(19) United States
(12) Patent Application Publication
(10) Pub. No.: US 2002/0198362 A1
(43) Pub. Date: Dec. 26, 2002

(54) Compositions and methods for the detection, diagnosis and therapy of hematological malignancies

(76) Inventors: Alexander Gaiger, Seattle, WA (US); Paul A. Algate, Issaquah, WA (US); Jane Mannion, Seattle, WA (US)

Correspondence Address: TOWNSEND AND TOWNSEND AND CREW, LLP, TWO EMBARCADERO CENTER, EIGHTH FLOOR, SAN FRANCISCO, CA, 94111-3834, US

(21) Appl. No.: 09/796,692

(22) Filed: Mar. 1, 2001

Related U.S. Application Data
(60) Provisional application No. 60/223,378, filed on Aug. 7, 2000.
(60) Provisional application No. 60/223,416, filed on Aug. 4, 2000.
(60) Provisional application No. 60/222,903, filed on Aug. 3, 2000.
(60) Provisional application No. 60/218,950, filed on Jul. 14, 2000.
(60) Provisional application No. 60/206,201, filed on May 22, 2000.
(60) Provisional application No. 60/202,084, filed on May 4, 2000.
(60) Provisional application No. 60/200,999, filed on May 1, 2000.
(60) Provisional application No. 60/200,303, filed on Apr. 28, 2000.
(60) Provisional application No. 60/200,779, filed on Apr. 28, 2000.
(60) Provisional application No. 60/200,545, filed on Apr. 27, 2000.
(60) Provisional application No. 60/190,479, filed on Mar. 17, 2000.
(60) Provisional application No. 60/186,126, filed on Mar. 1, 2000.

(51) Int. Cl. C07K 14/435; C12Q 1/68; C07H 21/04; C12P 21/02; C12N 5/06

(52) U.S. Cl. 530/350; 435/6; 435/69.1; 435/320.1; 435/325; 536/23.1

(57) ABSTRACT

Disclosed are methods and compositions for the detection, diagnosis, prognosis, and therapy of hematological malignancies, and in particular, human leukemias and lymphomas of the follicular, Hodgkin's and B cell and T cll non-Hodgkin's types. Disclosed are compositions, methods and kits for eliciting immune and T cell responses to specific malignancy-related antigenic polypeptides and antigenic polypeptide fragments thereof in an animal. Also disclosed are compositions and methods for use in the identification of cells and biological samples containing one or more hematological malignancy-related compositions, and methods for the detection and diagnosis of such diseases and affected cell types. Also disclosed are diagnostic and therapeutic kits, as well as methods for the diagnosis, therapy and/or prevention of a variety of leukemias and lymphomas.

[0001] The present application claims priority to U.S. Provisional Patent Applications Serial No. 60/186,126, filed Mar. 1, 2000; Serial No. 60/190,479, filed Mar. 17, 2000; Serial No. 60/200,545, filed Apr. 27, 2000; Serial No. 60/200,303, filed Apr. 28, 2000; Serial No. 60/200,779, filed Apr. 28, 2000; Serial No. 60/200,999; filed May 1, 2000; Serial No. 60/202,084, filed May 4, 2000; Serial No. 60/206,201, filed May 22, 2000; Serial No. 60/218,950, filed Jul. 14, 2000; Serial No. 60/222,903, filed Aug. 3, 2000; Serial No. 60/223,416, filed Aug. 4, 2000; and Serial No. 60/223,378, filed Aug. 7, 2000; the entire specification, claims and figures of each of which is specifically incorporated herein by reference in its entirety without disclaimer.

### BACKGROUND OF THE INVENTION

[0002] 1. Field of the Invention

[0003] The present invention relates generally to the fields of cancer diagnosis and therapy. More particularly, it concerns the surprising discovery of compositions and methods for the detection and immunotherapy of hematological malignancies, and particularly, leukemias, and lymphomas of the follicular, Hodgkin's and T cell and B cell Non-Hodgkin's types. The invention provides new, effective methods, compositions and kits for eliciting immune and T-cell response to antigenic polypeptides, and antigenic peptide fragments isolated therefrom, and methods for the use of such compositions for diagnosis, detection, treatment, monitoring, and/or prevention of various types of human hematological malignancies. In particular, the invention provides polypeptide, peptide, antibody, antigen binding fragment, hybridoma, host cell, vector, and polynucleotide pompounds and compositions for use in identification and discrimination between various types of hematological malignancies, and methods for the detection, diagnosis, prognosis, monitoring, and therapy of such conditions in an affected animal.

[0004] 2. Description of Related Art

[0005] Hematological Malignancies

[0006] Hematological malignancies, such as leukemias and lymphomas, are conditions characterized by abnormal growth and maturation of hematopoetic cells. Leukemias are generally neoplastic disorders of hematopoetic stem cells, and include adult and pediatric acute myeloid leukemia (AML), chronic myeloid leukemia (CML), acute lymphocytic leukemia (ALL), chronic lymphocytic leukemia (CLL) and secondary leukemia. Among lymphomas, there are two distinct groups: non-Hodgkin's lymphoma (NHL) and Hodgkin's disease. NHLs are the result of a clonal expansion of B- or T-cells, but the molecular pathogenesis of Hodgkin's disease, including lineage derivation and clonality, remains obscure. Other hematological malignancies include myelodysplastic syndromes (MDS), myeloproliferative syndromes (MPS) and myeloma. Hematological malignancies are generally serious disorders, resulting in a variety of symptoms, including bone marrow failure and organ failure.

[0007] NHLs are the sixth most common cause of cancer related deaths in the United States. Only prostate, breast, lung, colorectal and bladder cancer currently exceed lymphoma in annual incidence. In 1995, more than 45,000 new NHLs were diagnosed, and over 21,000 patients died of these diseases. The average age of lymphoma patients is relatively young (42 years), and the resulting number of years of life lost to these diseases renders NHLs fourth in economic impact among cancers in the United States. In the past 15 years, the American Cancer Society reported a 50% increase in the incidence of NHLs, one of the largest increases for any cancer group. Much of this increase has been attributed to the development of lymphomas in younger men who have acquired AIDS. Lymphomas are also the third most common childhood malignancy and account for approximately 10% of cancers in children. The survival rate (all ages) varies from 73% (low risk) to 26% (high risk).

[0008] 3. Deficiencies in the Prior Art

[0009] Treatment for many hematological malignancies, including leukemias and lymphomas, remains difficult, and existing therapies are not universally effective. While treatments involving specific immunotherapy appear to have considerable potential, such treatments have been limited by the small number of known malignancy-associated antigens. Moreover the ability to detect such hematological malignancies in their early stages can be quite difficult depending upon the particular malady. The lack of a sufficient number of specific diagnostic and prognostic markers of the diseases, and identification of cells and tissues that can be affected, has significantly limited the field of oncology.

[0010] Accordingly, there remains a need in the art for improved methods for detecting, screening, diagnosis and treatment of hematological malignancies such as Hodgkin's disease, chronic lymphocytic leukemia, as well as follicular and non-Hodgkin's lymphomas. The present invention fulfills these and other inherent needs in the field, and provides significant advantages in the detection of cells, and cell types that express one or more polypeptides that have been shown to be over-expressed in one or more of such hematological malignancies.

### SUMMARY OF THE INVENTION

[0011] The present invention addresses the foregoing long-felt need and other deficiencies in the art by identifying new and effective strategies for the identification, detection, screening, diagnosis, prognosis, prophylaxis, therapy, and immunomodulation of one or more hematological malignancies, and in particular, leukemias such as chronic lymphocytic leukemia, and lymphomas, such as those of the follicular, Hodgkin's and non-Hodgkin's types.

[0012] The present invention is based, in part, upon the surprising and unexpected discovery that certain previously unknown or unidentified human polypeptides, peptides, and antigenic fragments derived therefrom have now been identified that are overexpressed in one or more types of hematological malignancies. The genes encoding several of these polypeptides are now identified and obtained in isolated form, and have been characterized using a series of molecular biology methodologies including subtractive library analysis, microarray screening, polynucleotide sequencing, peptide and epitopic identification and characterization, as well as expression profiling, and in vitro whole gene cell priming. A set of these polynucleotides, and the polypeptides, peptides, and antigenic fragments they encode are now identified and implicated in the complex processes of hematological malignancy disease onset, progression, and/or outcome, and in particular, diseases such as leukemias and lymphomas.

[0013] The inventors have further demonstrated that a number of these polynucleotides, and their encoded polypeptides, as well as antibodies, antigen presenting cells, T cells, and the antigen binding fragments derived from such antibodies are useful in the development of particularly advantageous compositions and methods for the detection, diagnosis, prognosis, prophylaxis and/or therapy of one or more of these diseases, and particularly those conditions that are characterized by (a) an increased, altered, elevated, or sustained expression of one or more polynucleotides that comprise at least a first sequence region that comprises a nucleic acid sequence as disclosed in any one of SEQ ID NO:1 through SEQ ID NO:278, or (b) an increased, altered, elevated, or sustained biological activity of one or more polypeptides that comprise at least a first sequence region that comprises an amino acid sequence as disclosed in any one of SEQ ID NO:669 through SEQ ID NO:2532.

[0014] The present invention also provides methods and uses for one or more of the disclosed peptide, polypeptide, antibody, antigen binding fragment, and polynucleotide compositions of the present invention in generating an immune response or in generating a T-cell response in an animal, and in particular in a mammal such as a human. The invention also provides methods and uses for one or more of these compositions in the identification, detection, and quantitation of hematological malignancy compositions in clinical samples, isolated cells, whole tissues, and even affected individuals. The compositions and methods disclosed herein also may be used in the preparation of one or more diagnostic reagents, assays, medicaments, or therapeutics, for diagnosis and/or therapy of such diseases.

[0015] In a first important embodiment, there is provided a composition comprising at least a first isolated peptide or polypeptide comprising at least a first isolated coding region that comprises an amino acid sequence that is at least about 80%, about 81%, about 82%, about 83%, about 84%, about 85%, about 86%, about 87%, about 88%, about 89%, about 90%, about 91%, about 92%, about 93%, about 94%, about 95%, about 96%, about 97%, about 98%, or about 99% identical to the amino acid sequence of any one of SEQ ID NO:669 to SEQ ID NO:2532. Exemplary preferred sequences are those that comprise at least a first coding region that comprises an amino acid sequence that is at least about 85%, about 86%, about 87%, about 88%, about 89%, about 90%, about 91%, about 92%, about 93%, or about 94% identical to the amino acid sequence of any one of SEQ ID NO:669 to SEQ ID NO:2532, with those sequences that comprise at least a first coding region that comprises an amino acid sequence that is at least about 95%, about 96%, about 97%, about 98%, or about 99% identical to the amino acid sequence of any one of SEQ ID NO:669 to SEQ ID NO:2532 being examples of particularly preferred sequences in the practice of the present invention. Likewise, peptide and polypeptide compounds and compositions are also provided that comprise, consist essentially of, or consist of the amino acid sequence of any one of SEQ ID NO:669 to SEQ ID NO:2532.

[0016] In particular embodiments relating to compositions and methods for the detection, diagnosis, prognosis, prophylaxis, treatment, and therapy of Hodgkin's lymphoma, exemplary preferred peptide and polypeptide compositions have been provided herein. These include, but are not limited to, those peptide and polypeptide compounds and compositions that comprise at least a first isolated peptide or polypeptide comprising at least a first isolated coding region that comprises an amino acid sequence that is at least about 80%, about 81%, about 82%, about 83%, about 84%, about 85%, about 86%, about 87%, about 88%, about 89%, about 90%, about 91%, about 92%, about 93%, about 94%, about 95%, about 96%, about 97%, about 98%, or about 99% identical to the amino acid sequence of any one of SEQ ID NO:669 to SEQ ID NO:1380, and those that comprise at least a first coding region that comprises an amino acid sequence that is at least about 85%, about 86%, about 87%, about 88%, about 89%, about 90%, about 91%, about 92%, about 93%, or about 94% identical to the amino acid sequence of any one of SEQ ID NO:669 to SEQ ID NO:1380, and even those sequences that comprise at least a first coding region that comprises an amino acid sequence that is at least about 95%, about 96%, about 97%, about 98%, or about 99% identical to the amino acid sequence of any one of SEQ ID NO:669 to SEQ ID NO:1380.

[0017] Likewise, in particular embodiments relating to compositions and methods for the detection, diagnosis, prognosis, prophylaxis, treatment, and therapy of follicular lymphoma, exemplary preferred peptide and polypeptide compositions have also been provided herein. These include, but are not limited to, those peptide and polypeptide compounds and compositions that comprise at least a first isolated peptide or polypeptide comprising at least a first isolated coding region that comprises an amino acid sequence that is at least about 80%, about 81%, about 82%, about 83%, about 84%, about 85%, about 86%, about 87%, about 88%, about 89%, about 90%, about 91%, about 92%, about 93%, about 94%, about 95%, about 96%, about 97%, about 98%, or about 99% identical to the amino acid sequence of any one of SEQ ID NO:1381 to SEQ ID NO:1859, and those that comprise at least a first coding region that comprises an amino acid sequence that is at least about 85%, about 86%, about 87%, about 88%, about 89%, about 90%, about 91%, about 92%, about 93%, or about 94% identical to the amino acid sequence of any one of SEQ ID NO:1381 to SEQ ID NO:1859, and even those sequences that comprise at least a first coding region that comprises an amino acid sequence that is at least about 95%, about 96%, about 97%, about 98%, or about 99% identical to the amino acid sequence of any one of SEQ ID NO:1381 to SEQ ID NO:1859.

[0018] In a similar fashion, there are also embodiments disclosed herein that provide compositions and methods for the detection, diagnosis, prognosis, prophylaxis, treatment, and therapy of B cell non-Hodgkin's lymphoma. Exemplary preferred peptide and polypeptide compounds and compositions relating to this aspect of the invention include, but are not limited to, those petide and polypeptide compounds or compositions that comprise at least a first isolated peptide or polypeptide comprising at least a first isolated coding region that comprises an amino acid sequence that is at least about 80%, about 81%, about 82%, about 83%, about 84%, about 85%, about 86%, about 87%, about 88%, about 89%, about 90%, about 91%, about 92%, about 93%, about 94%, about 95%, about 96%, about 97%, about 98%, or about 99% identical to the amino acid sequence of any one of SEQ ID NO:1860 to SEQ ID NO:2105, and those that comprise at least a first coding region that comprises an amino acid sequence that is at least about 85%, about 86%, about 87%, about 88%, about 89%, about 90%, about 91%, about 92%, about 93%, or about 94% identical to the amino acid sequence of any one of SEQ ID NO:1860 to SEQ ID NO:2105, and even those sequences that comprise at least a first coding region that comprises an amino acid sequence that is at least about 95%, about 96%, about 97%, about 98%, or about 99% identical to the amino acid sequence of any one of SEQ ID NO:1860 to SEQ ID NO:2105.

[0019] In those embodiments relating to compositions and methods for the detection, diagnosis, prognosis, prophylaxis, treatment, and therapy of T cell non-Hodgkin's lymphoma, exemplary preferred peptide and polypeptide compositions include those compositions that comprise at least a first isolated peptide or polypeptide comprising at least a first isolated coding region that comprises an amino acid sequence that is at least about 80%, about 81%, about 82%, about 83%, about 84%, about 85%, about 86%, about 87%, about 88%, about 89%, about 90%, about 91%, about 92%, about 93%, about 94%, about 95%, about 96%, about 97%, about 98%, or about 99% identical to the amino acid sequence of any one of SEQ ID NO:2106 to SEQ ID NO:2375, and those that comprise at least a first coding region that comprises an amino acid sequence that is at least about 85%, about 86%, about 87%, about 88%, about 89%, about 90%, about 91%, about 92%, about 93%, or about 94% identical to the amino acid sequence of any one of SEQ ID NO:2106 to SEQ ID NO:2375, and even those sequences that comprise at least a first coding region that comprises an amino acid sequence that is at least about 95%, about 96%, about 97%, about 98%, or about 99% identical to the amino acid sequence of any one of SEQ ID NO:2106 to SEQ ID NO:2375.

[0020] In those embodiments relating to compositions and methods for the detection, diagnosis, prognosis, prophylaxis, treatment, and therapy of lymphoma, exemplary preferred peptide and polypeptide compositions include those compositions that comprise at least a first isolated peptide or polypeptide comprising at least a first isolated coding region that comprises an amino acid sequence that is at least about 80%, about 81%, about 82%, about 83%, about 84%, about 85%, about 86%, about 87%, about 88%, about 89%, about 90%, about 91%, about 92%, about 93%, about 94%, about 95%, about 96%, about 97%, about 98%, or about 99% identical to the amino acid sequence of any one of SEQ ID NO:2376 to SEQ ID NO:2352, and those that comprise at least a first coding region that comprises an amino acid sequence that is at least about 85%, about 86%, about 87%, about 88%, about 89%, about 90%, about 91%, about 92%, about 93%, or about 94% identical to the amino acid sequence of any one of SEQ ID NO:2376 to SEQ ID NO:2352, and even those sequences that comprise at least a first coding region that comprises an amino acid sequence that is at least about 95%, about 96%, about 97%, about 98%, or about 99% identical to the amino acid sequence of any one of SEQ ID NO:2376 to SEQ ID NO:2352.

[0021] Exemplary peptides of the present invention may be of any suitable length, depending upon the particular application thereof, and encompass those peptides that are about 10, about 15, about 20, about 25, about 30, about 35, about 40, about 45, about 50, about 55, about 60, about 65, about 70, about 75, about 80, about 85, about 90, about 95, about 100 or so amino acids in length. Of course, the peptides of the invention may also encompass any intermediate lengths or integers within the stated ranges.

[0022] Exemplary polypeptides and proteins of the present invention may be of any suitable length, depending upon the particular application thereof, and encompass those polypeptides and proteins that are about 100, about 150, about 200, about 250, about 300, about 350, about 400, about 450, about 500, about 550, about 600, about 650, about 700, about 750, about 800, about 850, about 900, about 950, or about 1000 or so amino acids in length, as well as longer polypeptides and proteins that are about 1000, about 1050, about 1100, about 1200, about 1250, about 1300, about 1350, about 1400, about 1450, about 1500, about 1600, about 1700, about 1800, about 1900, about 2000, about 2500, about 3000, about 3500, about 4000, about 4500, or even about 5000 or so amino acids in length. Of course, the polypeptides and proteins of the invention may also encompass any intermediate lengths or integers within the stated ranges.

[0023] The peptides, polypeptides, proteins, antibodies, and antigen binding fragments of the present invention will preferably comprise at least a first isolated coding region that comprises a sequence of at least about 30, 35, 40, 45, 50, 55, 60, 65, 70, 75, 80, 85, 90, 95 or 100 contiguous amino acids from any one of SEQ ID NO:669 to SEQ ID NO:1380, SEQ ID NO:1381 to SEQ ID NO:1859, SEQ ID NO:1860 to SEQ ID NO:2105, SEQ ID NO:2106 to SEQ ID NO:2375 or SEQ ID NO:2376 to SEQ ID NO:2532.

[0024] Furthermore, the polypeptides, proteins, antibodies, and antigen binding fragments of the present invention will even more preferably comprise at least a first isolated coding region that comprises a sequence of at least about 100, 110, 120, 130, 140, 150, 160, 170, 180, 190, or 200 contiguous amino acids from any one of SEQ ID NO:669 to SEQ ID NO:1380, SEQ ID NO:1381 to SEQ ID NO:1859, SEQ ID NO:1860 to SEQ ID NO:2105, SEQ ID NO:2106 to SEQ ID NO:2375 or SEQ ID NO:2376 to SEQ ID NO:2532.

[0025] Likewise, the polypeptides, proteins, antibodies, and antigen binding fragments of the present invention may comprise at least a first isolated coding region that comprises a substantially longer sequence, such as for example, one of at least about 200, 220, 240, 260, 280, or 300 or more contiguous amino acids from any one of SEQ ID NO:669 to SEQ ID NO:1380, SEQ ID NO:1381 to SEQ ID NO:1859, SEQ ID NO:1860 to SEQ ID NO:2105, SEQ ID NO:2106 to SEQ ID NO:2375 or SEQ ID NO:2376 to SEQ ID NO:2532.

[0026] In illustrative embodiments, and particularly in those embodiments concerning methods and compositions relating to Hodgkin's lymphoma, the polypeptides of the invention comprise at least a first isolated coding region that (a) comprises, (b) consists essentially of, or (c) consists of, the amino acid sequence of SEQ ID NO:669, SEQ ID NO:670, SEQ ID NO:671, SEQ ID NO:672, SEQ ID NO:673, SEQ ID NO:674, SEQ ID NO:675, SEQ ID NO:676, SEQ ID NO:677, SEQ ID NO:678, SEQ ID NO:679, SEQ ID NO:680, SEQ ID NO:681, SEQ ID NO:682, SEQ ID NO:683, SEQ ID NO:684, SEQ ID NO:685, SEQ ID NO:686, SEQ ID NO:687, SEQ ID NO:688, SEQ ID NO:689, SEQ ID NO:690, SEQ ID NO:691, SEQ ID NO:692, SEQ ID NO:693, SEQ ID NO:694, SEQ ID NO:695, SEQ ID NO:696, SEQ ID NO:697, SEQ ID NO:698, SEQ ID NO:699, SEQ ID NO:700, SEQ ID NO:701, SEQ ID NO:702, SEQ ID NO:703, SEQ ID NO:704, SEQ ID NO:705, SEQ ID NO:706, SEQ ID NO:707, SEQ ID NO:708, SEQ ID NO:709, SEQ ID NO:710, SEQ ID NO:711, SEQ ID NO:712, SEQ ID NO:713, SEQ ID NO:714, SEQ ID NO:715, SEQ ID NO:716, SEQ ID NO:717, SEQ ID NO:718, SEQ ID NO:719, SEQ ID NO:720, SEQ ID NO:721, SEQ ID NO:722, SEQ ID NO:723, SEQ ID NO:724, SEQ ID NO:725, SEQ ID NO:726, SEQ ID NO:727, SEQ ID NO:728, SEQ ID NO:729, SEQ ID NO:730, SEQ ID NO:731, SEQ ID NO:732, SEQ ID NO:733, SEQ ID NO:734, SEQ ID NO:735, SEQ ID NO:736, SEQ ID NO:737, SEQ ID NO:738, SEQ ID NO:739, SEQ ID NO:740, SEQ ID NO:741, SEQ ID NO:742, SEQ ID NO:743, SEQ ID NO:744, SEQ ID NO:745, SEQ ID NO:746, SEQ ID NO:747, SEQ ID NO:748, SEQ ID NO:749, SEQ ID NO:750, SEQ ID NO:751, SEQ ID NO:752, SEQ ID NO:753, SEQ ID NO:754, SEQ ID NO:755, SEQ ID NO:756, SEQ ID NO:757, SEQ ID NO:758, SEQ ID NO:759, SEQ ID NO:760, SEQ ID NO:761, SEQ ID NO:762, SEQ ID NO:763, SEQ ID NO:764, SEQ ID NO:765, SEQ ID NO:766, SEQ ID NO:767, SEQ ID NO:768, SEQ ID NO:769, SEQ ID NO:770, SEQ ID NO:771, SEQ ID NO:772, SEQ ID NO:773, SEQ ID NO:774, SEQ ID NO:775, SEQ ID NO:776, SEQ ID NO:777, SEQ ID NO:778, SEQ ID NO:779, SEQ ID NO:780, SEQ ID NO:781, SEQ ID NO:782, SEQ ID NO:783, SEQ ID NO:784, SEQ ID NO:785, SEQ ID NO:786, SEQ ID NO:787, SEQ ID NO:788, SEQ ID NO:789, SEQ ID NO:790, SEQ ID NO:791, SEQ ID NO:792, SEQ ID NO:793, SEQ ID NO:794, SEQ ID NO:795, SEQ ID NO:796, SEQ ID NO:797, SEQ ID NO:798, SEQ ID NO:799, SEQ ID NO:800, SEQ ID NO:801, SEQ ID NO:802, SEQ ID NO:803, SEQ ID NO:804, SEQ ID NO:805, SEQ ID NO:806, SEQ ID NO:807, SEQ ID NO:808, SEQ ID NO:809, SEQ ID NO:810, SEQ ID NO:811, SEQ ID NO:812, SEQ ID NO:813, SEQ ID NO:814, SEQ ID NO:815, SEQ ID NO:816, SEQ ID NO:817, SEQ ID NO:818, SEQ ID NO:819, SEQ ID NO:820, SEQ ID NO:821, SEQ ID NO:822, SEQ ID NO:823, SEQ ID NO:824, SEQ ID NO:825, SEQ ID NO:826, SEQ ID NO:827, SEQ ID NO:828, SEQ ID NO:829, SEQ ID NO:830, SEQ ID NO:831, SEQ ID NO:832, SEQ ID NO:833, SEQ ID NO:834, SEQ ID NO:835, SEQ ID NO:836, SEQ ID NO:837, SEQ ID NO:838, SEQ ID NO:839, SEQ ID NO:840, SEQ ID NO:841, SEQ ID NO:842, SEQ ID NO:843, SEQ ID NO:844, SEQ ID NO:845, SEQ ID NO:846, SEQ ID NO:847, SEQ ID NO:848, SEQ ID NO:849, SEQ ID NO:850, SEQ ID NO:851, SEQ ID NO:852, SEQ ID NO:853, SEQ ID NO:854, SEQ ID NO:855, SEQ ID NO:856, SEQ ID NO:857, SEQ ID NO:858, SEQ ID NO:859, SEQ ID NO:860, SEQ ID NO:861, SEQ ID NO:862, SEQ ID NO:863, SEQ ID NO:864, SEQ ID NO:865, SEQ ID NO:866, SEQ ID NO:867, SEQ ID NO:868, SEQ ID NO:869, SEQ ID NO:870, SEQ ID NO:871, SEQ ID NO:872, SEQ ID NO:873, SEQ ID NO:874, SEQ ID NO:875, SEQ ID NO:876, SEQ ID NO:877, SEQ ID NO:878, SEQ ID NO:879, SEQ ID NO:880, SEQ ID NO:881, SEQ ID NO:882, SEQ ID NO:883, SEQ ID NO:884, SEQ ID NO:885, SEQ ID NO:886, SEQ ID NO:887, SEQ ID NO:888, SEQ ID NO:889, SEQ ID NO:890, SEQ ID NO:891, SEQ ID NO:892, SEQ ID NO:893, SEQ ID NO:894, SEQ ID NO:895, SEQ ID NO:896, SEQ ID NO:897, SEQ ID NO:898, SEQ ID NO:899, SEQ ID NO:900, SEQ ID NO:901, SEQ ID NO:902, SEQ ID NO:903, SEQ ID NO:904, SEQ ID NO:905, SEQ ID NO:906, SEQ ID NO:907, SEQ ID NO:908, SEQ ID NO:909, SEQ ID NO:910, SEQ ID NO:911, SEQ ID NO:912, SEQ ID NO:913, SEQ ID NO:914, SEQ ID NO:915, SEQ ID NO:916, SEQ ID NO:917, SEQ ID NO:918, SEQ ID NO:919, SEQ ID NO:920, SEQ ID NO:921, SEQ ID NO:922, SEQ ID NO:923, SEQ ID NO:924, SEQ ID NO:925, SEQ ID NO:926, SEQ ID NO:927, SEQ ID NO:928, SEQ ID NO:929, SEQ ID NO:930, SEQ ID NO:931, SEQ ID NO:932, SEQ ID NO:933, SEQ ID NO:934, SEQ ID NO:935, SEQ ID NO:936, SEQ ID NO:937, SEQ ID NO:938, SEQ ID NO:939, SEQ ID NO:940, SEQ ID NO:941, SEQ ID NO:942, SEQ ID NO:943, SEQ ID NO:944, SEQ ID NO:945, SEQ ID NO:946, SEQ ID NO:947, SEQ ID NO:948, SEQ ID NO:949, SEQ ID NO:950, SEQ ID NO:951, SEQ ID NO:952, SEQ ID NO:953, SEQ ID NO:954, SEQ ID NO:955, SEQ ID NO:956, SEQ ID NO:957, SEQ ID NO:958, SEQ ID NO:959, SEQ ID NO:960, SEQ ID NO:961, SEQ ID NO:962, SEQ ID NO:963, SEQ ID NO:964, SEQ ID NO:965, SEQ ID NO:966, SEQ ID NO:967, SEQ ID NO:968, SEQ ID NO:969, SEQ ID NO:970, SEQ ID NO:971, SEQ ID NO:972, SEQ ID NO:973, SEQ ID NO:974, SEQ ID NO:975, SEQ ID NO:976, SEQ ID NO:977, SEQ ID NO:978, SEQ ID NO:979, SEQ ID NO:980, SEQ ID NO:981, SEQ ID NO:982, SEQ ID NO:983, SEQ ID NO:984, SEQ ID NO:985, SEQ ID NO:986, SEQ ID NO:987, SEQ ID NO:988, SEQ ID NO:989, SEQ ID NO:990, SEQ ID NO:991, SEQ ID NO:992, SEQ ID NO:993, SEQ ID NO:994, SEQ ID NO:995, SEQ ID NO:996, SEQ ID NO:997, SEQ ID NO:998, SEQ ID NO:999, SEQ ID NO:1000, SEQ ID NO:1001, SEQ ID NO:1002, SEQ ID NO:1003, SEQ ID NO:1004, SEQ ID NO:1005, SEQ ID NO:1006, SEQ ID NO:1007, SEQ ID NO:1008, SEQ ID NO:1009, SEQ ID NO:1010, SEQ ID NO:1011, SEQ ID NO:1012, SEQ ID NO:1013, SEQ ID NO:1014, SEQ ID NO:1015, SEQ ID NO:1016, SEQ ID NO:1017, SEQ ID NO:1018, SEQ ID NO:1019, SEQ ID NO:1020, SEQ ID NO:1021, SEQ ID NO:1022, SEQ ID NO:1023, SEQ ID NO:1024, SEQ ID NO:1025, SEQ ID NO:1026, SEQ ID NO:1027, SEQ ID NO:1028, SEQ ID NO:1029, SEQ ID NO:1030, SEQ ID NO:1031, SEQ ID NO:1032, SEQ ID NO:1033, SEQ ID NO:1034, SEQ ID NO:1035, SEQ ID NO:1036, SEQ ID NO:1037, SEQ ID NO:1038, SEQ ID NO:1039, SEQ ID NO:1040, SEQ ID NO:1041, SEQ ID NO:1042, SEQ ID NO:1043, SEQ ID NO:1044, SEQ ID NO:1045, SEQ ID NO:1046, SEQ ID NO:1047, SEQ ID NO:1048, SEQ ID NO:1049, SEQ ID NO:1050, SEQ ID NO:1051, SEQ ID NO:1052, SEQ ID NO:1053, SEQ ID NO:1054, SEQ ID NO:1055, SEQ ID NO:1056, SEQ ID NO:1057, SEQ ID NO:1058, SEQ ID NO:1059, SEQ ID NO:1060, SEQ ID NO:1061, SEQ ID NO:1062, SEQ ID NO:1063, SEQ ID NO:1064, SEQ ID NO:1065, SEQ ID NO:1066, SEQ ID NO:1067, SEQ ID NO:1068, SEQ ID NO:1069, SEQ ID NO:1070, SEQ ID NO:1071, SEQ ID NO:1072, SEQ ID NO:1073, SEQ ID NO:1074, SEQ ID NO:1075, SEQ ID NO:1076, SEQ ID NO:1077, SEQ ID NO:1078, SEQ ID NO:1079, SEQ ID NO:1080, SEQ ID NO:1081, SEQ ID NO:1082, SEQ ID NO:1083, SEQ ID NO:1084, SEQ ID NO:1085, SEQ ID NO:1086, SEQ ID NO:1087, SEQ ID NO:1088, SEQ ID NO:1089, SEQ ID NO:1090, SEQ ID NO:1091, SEQ ID NO:1092, SEQ ID NO:1093, SEQ ID NO:1094, SEQ ID NO:1095, SEQ ID NO:1096, SEQ ID NO:1097, SEQ ID NO:1098, SEQ ID NO:1099, SEQ ID NO:1100, SEQ ID NO:1101, SEQ ID NO:1102, SEQ ID NO:1103, SEQ ID NO:1104, SEQ ID NO:1105, SEQ ID NO:1106, SEQ ID NO:1107, SEQ ID NO:1108, SEQ ID NO:1109, SEQ ID NO:1110, SEQ ID NO:1111, SEQ ID NO:1112, SEQ ID NO:1113, SEQ ID NO:1114, SEQ ID NO:1115, SEQ ID NO:1116, SEQ ID NO:1117, SEQ ID NO:1118, SEQ ID NO:1119, SEQ ID NO:1120, SEQ ID NO:1121, SEQ ID NO:1122, SEQ ID NO:1123, SEQ ID NO:1124, SEQ ID NO:1125, SEQ ID NO:1126, SEQ ID NO:1127, SEQ ID NO:1128, SEQ ID NO:1129, SEQ ID NO:1130, SEQ ID NO:1131, SEQ ID NO:1132, SEQ ID NO:1133, SEQ ID NO:1134, SEQ ID NO:1135, SEQ ID NO:1136, SEQ ID NO:1137, SEQ ID NO:1138, SEQ ID NO:1139, SEQ ID NO:1140, SEQ ID NO:1141, SEQ ID NO:1142, SEQ ID NO:1143, SEQ ID NO:1144, SEQ ID NO:1145, SEQ ID NO:1146, SEQ ID NO:1147, SEQ ID NO:1148, SEQ ID NO:1149, SEQ ID NO:1150, SEQ ID NO:1151, SEQ ID NO:1152, SEQ ID NO:1153, SEQ ID NO:1154, SEQ ID NO:1155, SEQ ID NO:1156, SEQ ID NO:1157, SEQ ID NO:1158, SEQ ID NO:1159, SEQ ID NO:1160, SEQ ID NO:1161, SEQ ID NO:1162, SEQ ID NO:1163, SEQ ID NO:1164, SEQ ID NO:1165, SEQ ID NO:1166, SEQ ID NO:1167, SEQ ID NO:1168, SEQ ID NO:1169, SEQ ID NO:1170, SEQ ID NO:1171, SEQ ID NO:1172, SEQ ID NO:1173, SEQ ID NO:1174, SEQ ID NO:1175, SEQ ID NO:1176, SEQ ID NO:1177, SEQ ID NO:11711, SEQ ID NO:1179, SEQ ID NO:1180, SEQ ID NO:1181, SEQ ID NO:1182, SEQ ID NO:1183, SEQ ID NO:1184, SEQ ID NO:1185, SEQ ID NO:1186, SEQ ID NO:1187, SEQ ID NO:1188, SEQ ID NO:1189, SEQ ID NO:1190, SEQ ID NO:1191, SEQ ID NO:1192, SEQ ID NO:1193, SEQ ID NO:1194, SEQ ID NO:1195, SEQ ID NO:1196, SEQ ID NO:1197, SEQ ID NO:1198, SEQ ID NO:1199, SEQ ID NO:1200, SEQ ID NO:1201, SEQ ID NO:1202, SEQ ID NO:1203, SEQ ID NO:1204, SEQ ID NO:1205, SEQ ID NO:1206, SEQ ID NO:1207, SEQ ID NO:1208, SEQ ID NO:1209, SEQ ID NO:1210, SEQ ID NO:1211, SEQ ID NO:1212, SEQ ID NO:1213, SEQ ID NO:1214, SEQ ID NO:1215, SEQ ID NO:1216, SEQ ID NO:1217, SEQ ID NO:1218, SEQ ID NO:1219, SEQ ID NO:1220, SEQ ID NO:1221, SEQ ID NO:1222, SEQ ID NO:1223, SEQ ID NO:1224, SEQ ID NO:1225, SEQ ID NO:1226, SEQ ID NO:1227, SEQ ID NO:1228, SEQ ID NO:1229, SEQ ID NO:1230, SEQ ID NO:1231, SEQ ID NO:1232, SEQ ID NO:1233, SEQ ID NO:1234, SEQ ID NO:1235, SEQ ID NO:1236, SEQ ID NO:1237, SEQ ID NO:1238, SEQ ID NO:1239, SEQ ID NO:1240, SEQ ID NO:1241, SEQ ID NO:1242, SEQ ID NO:1243, SEQ ID NO:1244, SEQ ID NO:1245, SEQ ID NO:1246, SEQ ID NO:1247, SEQ ID NO:1248, SEQ ID NO:1249, SEQ ID NO:1250, SEQ ID NO:1251, SEQ ID NO:1252, SEQ ID NO:1253, SEQ ID NO:1254, SEQ ID NO:1255, SEQ ID NO:1256, SEQ ID NO:1257, SEQ ID NO:1258, SEQ ID NO:1259, SEQ ID NO:1260, SEQ ID NO:1261, SEQ ID NO:1262, SEQ ID NO:1263, SEQ ID NO:1264, SEQ ID NO:1265, SEQ ID NO:1266, SEQ ID NO:1267, SEQ ID NO:1268, SEQ ID NO:1269, SEQ ID NO:1270, SEQ ID NO:1271, SEQ ID NO:1272, SEQ ID NO:1273, SEQ ID NO:1274, SEQ ID NO:1275, SEQ ID NO:1276, SEQ ID NO:1277, SEQ ID NO:1278, SEQ ID NO:1279, SEQ ID NO:1280, SEQ ID NO:1281, SEQ ID NO:1282, SEQ ID NO:1283, SEQ ID NO:1284, SEQ ID NO:1285, SEQ ID NO:1286, SEQ ID NO:1287, SEQ ID NO:1288, SEQ ID NO:1289, SEQ ID NO:1290, SEQ ID NO:1291, SEQ ID NO:1292, SEQ ID NO:1293, SEQ ID NO:1294, SEQ ID NO:1295, SEQ ID NO:1296, SEQ ID NO:1297, SEQ ID NO:1298, SEQ ID NO:1299, SEQ ID NO:1300, SEQ ID NO:1301, SEQ ID NO:1302, SEQ ID NO:1303, SEQ ID NO:1304, SEQ ID NO:1305, SEQ ID NO:1306, SEQ ID NO:1307, SEQ ID NO:1308, SEQ ID NO:1309, SEQ ID NO:1310, SEQ ID NO:1311, SEQ ID NO:1312, SEQ ID NO:1313, SEQ ID NO:1314, SEQ ID NO:1315, SEQ ID NO:1316, SEQ ID NO:1317, SEQ ID NO:1318, SEQ ID NO:1319, SEQ ID NO:1320, SEQ ID NO:1321, SEQ ID NO:1322, SEQ ID NO:1323, SEQ ID NO:1324, SEQ ID NO:1325, SEQ ID NO:1326, SEQ ID NO:1327, SEQ ID NO:1328, SEQ ID NO:1329, SEQ ID NO:1330, SEQ ID NO:1331, SEQ ID NO:1332, SEQ ID NO:1333, SEQ ID NO:1334, SEQ ID NO:1335, SEQ ID NO:1336, SEQ ID NO:1337, SEQ ID NO:1338, SEQ ID NO:1339, SEQ ID NO:1340, SEQ ID NO:1341, SEQ ID NO:1342, SEQ ID NO:1343, SEQ ID NO:1344, SEQ ID NO:1345, SEQ ID NO:1346, SEQ ID NO:1347, SEQ ID NO:1348, SEQ ID NO:1349, SEQ ID NO:1350, SEQ ID NO:1351, SEQ ID NO:1352, SEQ ID NO:1353, SEQ ID NO:1354, SEQ ID NO:1355, SEQ ID NO:1356, SEQ ID NO:1357, SEQ ID NO:1358, SEQ ID NO:1359, SEQ ID NO:1360, SEQ ID NO:1361, SEQ ID NO:1362, SEQ ID NO:1363, SEQ ID NO:1364, SEQ ID NO:1365, SEQ ID NO:1366, SEQ ID NO:1367, SEQ ID NO:1368, SEQ ID NO:1369, SEQ ID NO:1370, SEQ ID NO:1371, SEQ ID NO:1372, SEQ ID NO:1373, SEQ ID NO:1374, SEQ ID NO:1375, SEQ ID NO:1376, SEQ ID NO:1377, SEQ ID NO:1378, SEQ ID NO:1379, or SEQ ID NO:1380.

[0027] In illustrative embodiments, and particularly in those embodiments concerning methods and compositions relating to follicular lymphoma, the polypeptides of the invention comprise at least a first isolated coding region that (a) comprises, (b) consists essentially of, or (c) consists of, the amino acid sequence of SEQ ID NO:1381, SEQ ID NO:1382, SEQ ID NO:1383, SEQ ID NO:1384, SEQ ID NO:1385, SEQ ID NO:1386, SEQ ID NO:1387, SEQ ID NO:1388, SEQ ID NO:1389, SEQ ID NO:1390, SEQ ID NO:1391, SEQ ID NO:1392, SEQ ID NO:1393, SEQ ID NO:1394, SEQ ID NO:1395, SEQ ID NO:1396, SEQ ID NO:1397, SEQ ID NO:1398, SEQ ID NO:1399, SEQ ID NO:1400, SEQ ID NO:1401, SEQ ID NO:1402, SEQ ID NO:1403, SEQ ID NO:1404, SEQ ID NO:1405, SEQ ID NO:1406, SEQ ID NO:1407, SEQ ID NO:1408, SEQ ID NO:1409, SEQ ID NO:1410, SEQ ID NO:1411, SEQ ID NO:1412, SEQ ID NO:1413, SEQ ID NO:1414, SEQ ID NO:1415, SEQ ID NO:1416, SEQ ID NO:1417, SEQ ID NO:1418, SEQ ID NO:1419, SEQ ID NO:1420, SEQ ID NO:1421, SEQ ID NO:1422, SEQ ID NO:1423, SEQ ID NO:1424, SEQ ID NO:1425, SEQ ID NO:1426, SEQ ID NO:1427, SEQ ID NO:1428, SEQ ID NO:1429, SEQ ID NO:1430, SEQ ID NO:1431, SEQ ID NO:1432, SEQ ID NO:1433, SEQ ID NO:1434, SEQ ID NO:1435, SEQ ID NO:1436, SEQ ID NO:1437, SEQ ID NO:1438, SEQ ID NO:1439, SEQ ID NO:1440, SEQ ID NO:1441, SEQ ID NO:1442, SEQ ID NO:1443, SEQ ID NO:1444, SEQ ID NO:1445, SEQ ID NO:1446, SEQ ID NO:1447, SEQ ID NO:1448, SEQ ID NO:1449, SEQ ID NO:1450, SEQ ID NO:1451, SEQ ID NO:1452, SEQ ID NO:1453, SEQ ID NO:1454, SEQ ID NO:1455, SEQ ID NO:1456, SEQ ID NO:1457, SEQ ID NO:1458, SEQ ID NO:1459, SEQ ID NO:1460, SEQ ID NO:1461, SEQ ID NO:1462, SEQ ID NO:1463, SEQ ID NO:1464 , SEQ ID NO:1465, SEQ ID NO:1466, SEQ ID NO:1467, SEQ ID NO:1468, SEQ ID NO:1469, SEQ ID NO:1470, SEQ ID NO:1471, SEQ ID NO:1472, SEQ ID NO:1473, SEQ ID NO:1474, SEQ ID NO:1475, SEQ ID NO:1476, SEQ ID NO:1477, SEQ ID NO:1478, SEQ ID NO:1479, SEQ ID NO:1480, SEQ ID NO:1481, SEQ ID NO:1482, SEQ ID NO:1483, SEQ ID NO:1484, SEQ ID NO:1485, SEQ ID NO:1486, SEQ ID NO:1487, SEQ ID NO:1488, SEQ ID NO:1489, SEQ ID NO:1490, SEQ ID NO:1491, SEQ ID NO:1492, SEQ ID NO:1493, SEQ ID NO:1494, SEQ ID NO:1495, SEQ ID NO:1496, SEQ ID NO:1497, SEQ ID NO:1498, SEQ ID NO:1499, SEQ ID NO:1500, SEQ ID NO:1501, SEQ ID NO:1502, SEQ ID NO:1503, SEQ ID NO:1504, SEQ ID NO:1505, SEQ ID NO:1506, SEQ ID NO:1507, SEQ ID NO:1508, SEQ ID NO:1509, SEQ ID NO:1510, SEQ ID NO:1511, SEQ ID NO:1512, SEQ ID NO:1513, SEQ ID NO:1514, SEQ ID NO:1515, SEQ ID NO:1516, SEQ ID NO:1517, SEQ ID NO:1518, SEQ ID NO:1519, SEQ ID NO:1520, SEQ ID NO:1521 , SEQ ID NO:1522, SEQ ID NO:1523, SEQ ID NO:1524, SEQ ID NO:1525, SEQ ID NO:1526, SEQ ID NO:1527, SEQ ID NO:1528, SEQ ID NO:1529, SEQ ID NO:1530, SEQ ID NO:1531, SEQ ID NO:1532, SEQ ID NO:1533, SEQ ID NO:1534, SEQ ID NO:1535, SEQ ID NO:1536, SEQ ID NO:1537, SEQ ID NO:1538, SEQ ID NO:1539, SEQ ID NO:1540, SEQ ID NO:1541, SEQ ID NO:1542, SEQ ID NO:1543, SEQ ID NO:1544, SEQ ID NO:1545, SEQ ID NO:1546, SEQ ID NO:1547, SEQ ID NO:1548, SEQ ID NO:1549, SEQ ID NO:1550, SEQ ID NO:1551, SEQ ID NO:1552, SEQ ID NO:1553, SEQ ID NO:1554, SEQ ID NO:1555, SEQ ID NO:1556, SEQ ID NO:1557, SEQ ID NO:1558, SEQ ID NO:1559, SEQ ID NO:1560, SEQ ID NO:1561, SEQ ID NO:1562, SEQ ID NO:1563, SEQ ID NO:1564, SEQ ID NO:1565, SEQ ID NO:1566, SEQ ID NO:1567, SEQ ID NO:1568, SEQ ID NO:1569, SEQ ID NO:1570, SEQ ID NO:1571, SEQ ID NO:1572, SEQ ID NO:1573, SEQ ID NO:1574, SEQ ID NO:1575, SEQ ID NO:1576, SEQ ID NO:1577, SEQ ID NO:1578, SEQ ID NO:1579, SEQ ID NO:1580, SEQ ID NO:1581, SEQ ID NO:1582, SEQ ID NO:1583, SEQ ID NO:1584, SEQ ID NO:1585, SEQ ID NO:1586, SEQ ID NO:1587, SEQ ID NO:1588, SEQ ID NO:1589, SEQ ID NO:1590, SEQ ID NO:1591, SEQ ID NO:1592, SEQ ID NO:1593, SEQ ID NO:1594, SEQ ID NO:1595, SEQ ID NO:1596, SEQ ID NO:1597, SEQ ID NO:1598, SEQ ID NO:1599, SEQ ID NO:1600, SEQ ID NO:1601, SEQ ID NO:1602, SEQ ID NO:1603, SEQ ID NO:1604, SEQ ID NO:1605, SEQ ID NO:1606, SEQ ID NO:1607, SEQ ID NO:1608, SEQ ID NO:1609, SEQ ID NO:1610, SEQ ID NO:1611, SEQ ID NO:1612, SEQ ID NO:1613, SEQ ID NO:1614, SEQ ID NO:1615, SEQ ID NO:1616, SEQ ID NO:1617, SEQ ID NO:1618, SEQ ID NO:1619, SEQ ID NO:1620, SEQ ID NO:1621, SEQ ID NO:1622, SEQ ID NO:1623, SEQ ID NO:1624, SEQ ID NO:1625, SEQ ID NO:1626, SEQ ID NO:1627, SEQ ID NO:1628, SEQ ID NO:1629, SEQ ID NO:1630, SEQ ID NO:1631, SEQ ID NO:1632, SEQ ID NO:1633, SEQ ID NO:1634, SEQ ID NO:1635, SEQ ID NO:1636, SEQ ID NO:1637, SEQ ID NO:1638, SEQ ID NO:1639, SEQ ID NO:1640, SEQ ID NO:1641, SEQ ID NO:1642, SEQ ID NO:1643, SEQ ID NO:1644, SEQ ID NO:1645, SEQ ID NO:1646, SEQ ID NO:1647, SEQ ID NO:1648, SEQ ID NO:1649, SEQ ID NO:1650, SEQ ID NO:1651, SEQ ID NO:1652, SEQ ID NO:1653, SEQ ID NO:1654, SEQ ID NO:1655, SEQ ID NO:1656, SEQ ID NO:1657, SEQ ID NO:1658, SEQ ID NO:1659, SEQ ID NO:1660, SEQ ID NO:1661, SEQ ID NO:1662, SEQ ID NO:1663, SEQ ID NO:1664, SEQ ID NO:1665, SEQ ID NO:1666, SEQ ID NO:1667, SEQ ID NO:1668, SEQ ID NO:1669, SEQ ID NO:1670, SEQ ID NO:1671, SEQ ID NO:1672, SEQ ID NO:1673, SEQ ID NO:1674, SEQ ID NO:1675, SEQ ID NO:1676, SEQ ID NO:1677, SEQ ID NO:1678, SEQ ID NO:1679, SEQ ID NO:1680, SEQ ID NO:1681, SEQ ID NO:1682, SEQ ID NO:1683, SEQ ID NO:1684, SEQ ID NO:1685, SEQ ID NO:1686, SEQ ID NO:1687, SEQ ID NO:1688, SEQ ID NO:1689, SEQ ID NO:1690, SEQ ID NO:1691, SEQ ID NO:1692, SEQ ID NO:1693, SEQ ID NO:1694, SEQ ID NO:1695, SEQ ID NO:1696, SEQ ID NO:1697, SEQ ID NO:1698, SEQ ID NO:1699 SEQ ID NO:1700, SEQ ID NO:1701, SEQ ID NO:1702, SEQ ID NO:1703, SEQ ID NO:1704, SEQ ID NO:1705, SEQ ID NO:1706, SEQ ID NO:1707, SEQ ID NO:1708, SEQ ID NO:1709, SEQ ID NO:1710, SEQ ID NO:1711, SEQ ID NO:1712, SEQ ID NO:1713, SEQ ID NO:1714, SEQ ID NO:1715, SEQ ID NO:1716, SEQ ID NO:1717, SEQ ID NO:1718, SEQ ID NO:1719, SEQ ID NO:1720, SEQ ID NO:1721, SEQ ID NO:1722, SEQ ID NO:1723, SEQ ID NO:1724, SEQ ID NO:1725, SEQ ID NO:1726, SEQ ID NO:1727, SEQ ID NO:1728, SEQ ID NO:1729, SEQ ID NO:1730, SEQ ID NO:1731, SEQ ID NO:1732, SEQ ID NO:1733, SEQ ID NO:1734, SEQ ID NO:1735, SEQ ID NO:1736, SEQ ID NO:1737, SEQ ID NO:1738, SEQ ID NO:1739, SEQ ID NO:1740, SEQ ID NO:1741, SEQ ID NO:1742, SEQ ID NO:1743, SEQ ID NO:1744, SEQ ID NO:1745, SEQ ID NO:1746, SEQ ID NO:1747, SEQ ID NO:1748, SEQ ID NO:1749, SEQ ID NO:1750, SEQ ID NO:1751, SEQ ID NO:1752, SEQ ID NO:1753, SEQ ID NO:1754, SEQ ID NO:1755, SEQ ID NO:1756, SEQ ID NO:1757, SEQ ID NO:1758, SEQ ID NO:1759, SEQ ID NO:1760, SEQ ID NO:1761, SEQ ID NO:1762, SEQ ID NO:1763, SEQ ID NO:1764, SEQ ID NO:1765, SEQ ID NO:1766, SEQ ID NO:1767, SEQ ID NO:1768, SEQ ID NO:1769, SEQ ID NO:1770, SEQ ID NO:1771, SEQ ID NO:1772, SEQ ID NO:1773, SEQ ID NO:1774, SEQ ID NO:1775, SEQ ID NO:1776, SEQ ID NO:1777, SEQ ID NO:1778, SEQ ID NO:1779, SEQ ID NO:1780, SEQ ID NO:1781, SEQ ID NO:1782, SEQ ID NO:1783, SEQ ID NO:1784, SEQ ID NO:1785, SEQ ID NO:1786, SEQ ID NO:1787, SEQ ID NO:1788, SEQ ID NO:1789, SEQ ID NO:1790, SEQ ID NO:1791, SEQ ID NO:1792, SEQ ID NO:1793, SEQ ID NO:1794, SEQ ID NO:1795, SEQ ID NO:1796, SEQ ID NO:1797, SEQ ID NO:1798, SEQ ID NO:1799, SEQ ID NO:1800, SEQ ID NO:1801, SEQ ID NO:1802, SEQ ID NO:1803, SEQ ID NO:1804, SEQ ID NO:1805, SEQ ID NO:1806, SEQ ID NO:1807, SEQ ID NO:1808, SEQ ID NO:1809, SEQ ID NO:1810, SEQ ID NO:1811, SEQ ID NO:1812, SEQ ID NO:1813, SEQ ID NO:1814, SEQ ID NO:1815, SEQ ID NO:1816, SEQ ID NO:1817, SEQ ID NO:1818, SEQ ID NO:1819, SEQ ID NO:1820, SEQ ID NO:1821, SEQ ID NO:1822, SEQ ID NO:1823, SEQ ID NO:1824, SEQ ID NO:1825, SEQ ID NO:1826, SEQ ID NO:1827, SEQ ID NO:1828, SEQ ID NO:1829, SEQ ID NO:1830, SEQ ID NO:1831, SEQ ID NO:1832 , SEQ ID NO:1833, SEQ ID NO:1834, SEQ ID NO:1835, SEQ ID NO:1836, SEQ ID NO:1837, SEQ ID NO:1838, SEQ ID NO:1839, SEQ ID NO:1840, SEQ ID NO:1841, SEQ ID NO:1842, SEQ ID NO:1843 , SEQ ID NO:1844, SEQ ID NO:1845, SEQ ID NO:1846, SEQ ID NO:1847, SEQ ID NO:1848, SEQ ID NO:1849, SEQ ID NO:1850, SEQ ID NO:1851, SEQ ID NO:1852, SEQ ID NO:1853, SEQ ID NO:1854, SEQ ID NO:1855, SEQ ID NO:1856, SEQ ID NO:1857, SEQ ID NO:1858, or SEQ ID NO:1859.

[0028] In illustrative embodiments, and particularly in those embodiments concerning methods and compositions relating to B cell non-Hodgkin's lymphoma, the polypeptides of the invention comprise at least a first isolated coding region that (a) comprises, (b) consists essentially of, or (c) consists of, the amino acid sequence of SEQ ID NO:1860, SEQ ID NO:1861, SEQ ID NO:1862, SEQ ID NO:1863, SEQ ID NO:1864, SEQ ID NO:1865, SEQ ID NO:1866, SEQ ID NO:1867, SEQ ID NO:1868, SEQ ID NO:1869, SEQ ID NO:1870, SEQ ID NO:1871, SEQ ID NO:1872, SEQ ID NO:1873, SEQ ID NO:1874, SEQ ID NO:1875, SEQ ID NO:1876, SEQ ID NO:1877, SEQ ID NO:1878, SEQ ID NO:1879, SEQ ID NO:1880, SEQ ID NO:1881, SEQ ID NO:1882, SEQ ID NO:1883, SEQ ID NO:1884, SEQ ID NO:1885, SEQ ID NO:1886, SEQ ID NO:1887, SEQ ID NO:1888, SEQ ID NO:1889, SEQ ID NO:1890, SEQ ID NO:1891, SEQ ID NO:1892, SEQ ID NO:1893, SEQ ID NO:1894, SEQ ID NO:1895, SEQ ID NO:1896, SEQ ID NO:1897, SEQ ID NO:1898, SEQ ID NO:1899, SEQ ID NO:1900, SEQ ID NO:1901, SEQ ID NO:1902, SEQ ID NO:1903, SEQ ID NO:1904, SEQ ID NO:1905, SEQ ID NO:1906, SEQ ID NO:1907, SEQ ID NO:1908, SEQ ID NO:1909, SEQ ID NO:1910, SEQ ID NO:1911, SEQ ID NO:1912, SEQ ID NO:1913, SEQ ID NO:1914, SEQ ID NO:1915, SEQ ID NO:1916, SEQ ID NO:1917, SEQ ID NO:1918, SEQ ID NO:1919, SEQ ID NO:1920, SEQ ID NO:1921, SEQ ID NO:1922, SEQ ID NO:1923, SEQ ID NO:1924, SEQ ID NO:1925, SEQ ID NO:1926, SEQ ID NO:1927, SEQ ID NO:1928, SEQ ID NO:192 9, SEQ ID NO:1930, SEQ ID NO:1931, SEQ ID NO:1932 , SEQ ID NO:1933, SEQ ID NO:1934, SEQ ID NO:1935, SEQ ID NO:1936, SEQ ID NO:1937, SEQ ID NO:1938, SEQ ID NO:1939, SEQ ID NO:1940, SEQ ID NO:1941, SEQ ID NO:1942, SEQ ID NO:1943, SEQ ID NO:1944, SEQ ID NO:1945, SEQ ID NO:1946, SEQ ID NO:1947, SEQ ID NO:1948, SEQ ID NO:1949, SEQ ID NO:1950, SEQ ID NO:1951, SEQ ID NO:1952, SEQ ID NO:1953, SEQ ID NO:1954, SEQ ID NO:1955, SEQ ID NO:1956, SEQ ID NO:1957, SEQ ID NO:1958, SEQ ID NO:1959, SEQ ID NO:1960, SEQ ID NO:1961, SEQ ID NO:1962, SEQ ID NO:1963, SEQ ID NO:1964, SEQ ID NO:1965, SEQ ID NO:1966, SEQ ID NO:1967, SEQ ID NO:1968, SEQ ID NO:1969, SEQ ID NO:1970, SEQ ID NO:1971, SEQ ID NO:1972, SEQ ID NO:1973, SEQ ID NO:1974, SEQ ID NO:1975 , SEQ ID NO:1976, SEQ ID NO:1977, SEQ ID NO:1978, SEQ ID NO:1979, SEQ ID NO:1980, SEQ ID NO:1981, SEQ ID NO:1982, SEQ ID NO:1983, SEQ ID NO:1984, SEQ ID NO:1985, SEQ ID NO:1986, SEQ ID NO:1987, SEQ ID NO:1988, SEQ ID NO:1989, SEQ ID NO:1990, SEQ ID NO:1991, SEQ ID NO:1992, SEQ ID NO:1993, SEQ ID NO:1994, SEQ ID NO:1995, SEQ ID NO:1996, SEQ ID NO:1997, SEQ ID NO:1998, SEQ ID NO:1999, SEQ ID NO:2000, SEQ ID NO:2001, SEQ ID NO:2002, SEQ ID NO:2003, SEQ ID NO:2004, SEQ ID NO:2005, SEQ ID NO:2006, SEQ ID NO:2007, SEQ ID NO:2008, SEQ ID NO:2009, SEQ ID NO:2010, SEQ ID NO:2011, SEQ ID NO:2012, SEQ ID NO:2013, SEQ ID NO:2014, SEQ ID NO:2015, SEQ ID NO:2016, SEQ ID NO:2017, SEQ ID NO:2018, SEQ ID NO:2019, SEQ ID NO:2020, SEQ ID NO:2021, SEQ ID NO:2022, SEQ ID NO:2023, SEQ ID NO:2024, SEQ ID NO:2025, SEQ ID NO:2026, SEQ ID NO:2027, SEQ ID NO:2028, SEQ ID NO:2029, SEQ ID NO:2030, SEQ ID NO:2031, SEQ ID NO:2032, SEQ ID NO:2033, SEQ ID NO:2034, SEQ ID NO:2035, SEQ ID NO:2036, SEQ ID NO:2037, SEQ ID NO:2038, SEQ ID NO:2039, SEQ ID NO:2040, SEQ ID NO:2041, SEQ ID NO:2042, SEQ ID NO:2043, SEQ ID NO:2044, SEQ ID NO:2045, SEQ ID NO:2046, SEQ ID NO:2047, SEQ ID NO:2048, SEQ ID NO:2049, SEQ ID NO:2050, SEQ ID NO:2051, SEQ ID NO:2052, SEQ ID NO:2053, SEQ ID NO:2054, SEQ ID NO:2055, SEQ ID NO:2056, SEQ ID NO:2057, SEQ ID NO:2058, SEQ ID NO:2059, SEQ ID NO:2060, SEQ ID NO:2061, SEQ ID NO:2062, SEQ ID NO:2063, SEQ ID NO:2064, SEQ ID NO:2065, SEQ ID NO:2066, SEQ ID NO:2067, SEQ ID NO:2068, SEQ ID NO:2069, SEQ ID NO:2070, SEQ ID NO:2071, SEQ ID NO:2072, SEQ ID NO:2073, SEQ ID NO:2074, SEQ ID NO:2075, SEQ ID NO:2076, SEQ ID NO:2077, SEQ ID NO:2078, SEQ ID NO:2079, SEQ ID NO:2080, SEQ ID NO:2081, SEQ ID NO:2082, SEQ ID NO:2083, SEQ ID NO:2084, SEQ ID NO:2085, SEQ ID NO:2086, SEQ ID NO:2087, SEQ ID NO:2088, SEQ ID NO:2089, SEQ ID NO:2090, SEQ ID NO:2091, SEQ ID NO:2092, SEQ ID NO:2093, SEQ ID NO:2094, SEQ ID NO:2095, SEQ ID NO:2096 , SEQ ID NO:2097, SEQ ID NO:2098, SEQ ID NO:2099, SEQ ID NO:2100, SEQ ID NO:2101, SEQ ID NO:2102, SEQ ID NO:2103, SEQ ID NO:2104, or SEQ ID NO:2105.

[0029] Further, in a variety of illustrative embodiments, and particularly in those embodiments concerning methods and compositions relating to T cell non-Hodgkin's lymphoma, the polypeptides of the invention comprise at least a first isolated coding region that (a) comprises, (b) consists essentially of, or (c) consists of, the amino acid sequence of SEQ ID NO:2106, SEQ ID NO:2107, SEQ ID NO:2108, SEQ ID NO:2109, SEQ ID NO:2110, SEQ ID NO:2111, SEQ ID NO:2112, SEQ ID NO:2113, SEQ ID NO:2114, SEQ ID NO:2115, SEQ ID NO:2116, SEQ ID NO:2117, SEQ ID NO:2118, SEQ ID NO:2119, SEQ ID NO:2120, SEQ ID NO:2121, SEQ ID NO:2122, SEQ ID NO:2123, SEQ ID NO:2124, SEQ ID NO:2125, SEQ ID NO:2126, SEQ ID NO:2127, SEQ ID NO:2128, SEQ ID NO:2129, SEQ ID NO:2130, SEQ ID NO:2131, SEQ ID NO:2132, SEQ ID NO:2133, SEQ ID NO:2134, SEQ ID NO:2135, SEQ ID NO:2136, SEQ ID NO:2137, SEQ ID NO:2138, SEQ ID NO:2139, SEQ ID NO:2140, SEQ ID NO:2141, SEQ ID NO:2142, SEQ ID NO:2143, SEQ ID NO:2144, SEQ ID NO:2145, SEQ ID NO:2146, SEQ ID NO:2147, SEQ ID NO:2148, SEQ ID NO:2149, SEQ ID NO:2150, SEQ ID NO:2151, SEQ ID NO:2152, SEQ ID NO:2153, SEQ ID NO:2154, SEQ ID NO:2155, SEQ ID NO:2156, SEQ ID NO:2157, SEQ ID NO:2158, SEQ ID NO:2159, SEQ ID NO:2160, SEQ ID NO:2161, SEQ ID NO:2162, SEQ ID NO:2163, SEQ ID NO:2164, SEQ ID NO:2165, SEQ ID NO:2166, SEQ ID NO:2167, SEQ ID NO:2168, SEQ ID NO:2169, SEQ ID NO:2170, SEQ ID NO:2171, SEQ ID NO:2172, SEQ ID NO:2173, SEQ ID NO:2174, SEQ ID NO:2175, SEQ ID NO:2176, SEQ ID NO:2177, SEQ ID NO:2178, SEQ ID NO:2179, SEQ ID NO:2180, SEQ ID NO:2181, SEQ ID NO:2182, SEQ ID NO:2183, SEQ ID NO:2184, SEQ ID NO:2185, SEQ ID NO:2186, SEQ ID NO:2187, SEQ ID NO:2188, SEQ ID NO:2189; SEQ ID NO:2190, SEQ ID NO:2191, SEQ ID NO:2192, SEQ ID NO:2193, SEQ ID NO:2194, SEQ ID NO:2195, SEQ ID NO:2196, SEQ ID NO:2197, SEQ ID NO:2198, SEQ ID NO:2199, SEQ ID NO:2200, SEQ ID NO:2201, SEQ ID NO:2202, SEQ ID NO:2203, SEQ ID NO:2204, SEQ ID NO:2205, SEQ ID NO:2206, SEQ ID NO:2207, SEQ ID NO:2208, SEQ ID NO:2209, SEQ ID NO:2210, SEQ ID NO:2211, SEQ ID NO:2212, SEQ ID NO:2213, SEQ ID NO:2214, SEQ ID NO:2215, SEQ ID NO:2216, SEQ ID NO:2217, SEQ ID NO:2218, SEQ ID NO:2219, SEQ ID NO:2220, SEQ ID NO:2221, SEQ ID NO:2222, SEQ ID NO:2223, SEQ ID NO:2224, SEQ ID NO:2225, SEQ ID NO:2226, SEQ ID NO:2227, SEQ ID NO:2228, SEQ ID NO:2229, SEQ ID NO:2230, SEQ ID NO:2231, SEQ ID NO:2232, SEQ ID NO:2233, SEQ ID NO:2234, SEQ ID NO:2235, SEQ ID NO:2236, SEQ ID NO:2237, SEQ ID NO:2238, SEQ ID NO:2239, SEQ ID NO:2240, SEQ ID NO:2241, SEQ ID NO:2242, SEQ ID NO:2243, SEQ ID NO:2244, SEQ ID NO:2245, SEQ ID NO:2246, SEQ ID NO:2247, SEQ ID NO:2248, SEQ ID NO:2249, SEQ ID NO:2250, SEQ ID NO:2251, SEQ ID NO:2252, SEQ ID NO:2253, SEQ ID NO:2254, SEQ ID NO:2255, SEQ ID NO:2256, SEQ ID NO:2257, SEQ ID NO:2258, SEQ ID NO:2259, SEQ ID NO:2260, SEQ ID NO:2261, SEQ ID NO:2262, SEQ ID NO:2263, SEQ ID NO:2264, SEQ ID NO:2265, SEQ ID NO:2266, SEQ ID NO:2267, SEQ ID NO:2268, SEQ ID NO:2269, SEQ ID NO:2270, SEQ ID NO:2271, SEQ ID NO:2272, SEQ ID NO:2273, SEQ ID NO:2274, SEQ ID NO:2275, SEQ ID NO:2276, SEQ ID NO:2277, SEQ ID NO:2278, SEQ ID NO:2279, SEQ ID NO:2280, SEQ ID NO:2281, SEQ ID NO:2282, SEQ ID NO:2283, SEQ ID NO:2284, SEQ ID NO:2285, SEQ ID NO:2286, SEQ ID NO:2287, SEQ ID NO:2288, SEQ ID NO:2289, SEQ ID NO:2290, SEQ ID NO:2291, SEQ ID NO:2292, SEQ ID NO:2293, SEQ ID NO:2294, SEQ ID NO:2295, SEQ ID NO:2296, SEQ ID NO:2297, SEQ ID NO:2298, SEQ ID NO:2299, SEQ ID NO:2300, SEQ ID NO:2301, SEQ ID NO:2302, SEQ ID NO:2303, SEQ ID NO:2304, SEQ ID NO:2305, SEQ ID NO:2306, SEQ ID NO:2307, SEQ ID NO:2308, SEQ ID NO:2309, SEQ ID NO:2310, SEQ ID NO:2311, SEQ ID NO:2312, SEQ ID NO:2313, SEQ ID NO:2314, SEQ ID NO:2315, SEQ ID NO:2316 , SEQ ID NO:2317 , SEQ ID NO:2318 , SEQ ID NO:2319 , SEQ ID NO:2320, SEQ ID NO:2321, SEQ ID NO:2322, SEQ ID NO:2323, SEQ ID NO:2324, SEQ ID NO:2325, SEQ ID NO:2326, SEQ ID NO:2327, SEQ ID NO:2328, SEQ ID NO:2329, SEQ ID NO:2330, SEQ ID NO:2331, SEQ ID NO:2332, SEQ ID NO:2333, SEQ ID NO:2334, SEQ ID NO:2335, SEQ ID NO:2336, SEQ ID NO:2337, SEQ ID NO:2338, SEQ ID NO:2339, SEQ ID NO:2340, SEQ ID NO:2341, SEQ ID NO:2342, SEQ ID NO:2343, SEQ ID NO:2344, SEQ ID NO:2345, SEQ ID NO:2346, SEQ ID NO:2347, SEQ ID NO:2348, SEQ ID NO:2349, SEQ ID NO:2350, SEQ ID NO:2351, SEQ ID NO:2352, SEQ ID NO:2353, SEQ ID NO:2354, SEQ ID NO:2355, SEQ ID NO:2356, SEQ ID NO:2357, SEQ ID NO:2358, SEQ ID NO:2359, SEQ ID NO:2360, SEQ ID NO:2361, SEQ ID NO:2362, SEQ ID NO:2363, SEQ ID NO:2364, SEQ ID NO:2365, SEQ ID NO:2366, SEQ ID NO:2367, SEQ ID NO:2368, SEQ ID NO:2369, SEQ ID NO:2370, SEQ ID NO:2371, SEQ ID NO:2372, SEQ ID NO:2373, SEQ ID NO:2374, or SEQ ID NO:2375.

[0030] In additional illustrative embodiments, and particularly in those embodiments concerning methods and compositions relating to lymphoma, the polypeptides of the invention comprise at least a first isolated coding region that (a) comprises, (b) consists essentially of, or (c) consists of, the amino acid sequence of SEQ ID NO:2376, SEQ ID NO:2377, SEQ ID NO:2378, SEQ ID NO:2379, SEQ ID NO:2380, SEQ ID NO:2381, SEQ ID NO:2382, SEQ ID NO:2383, SEQ ID NO:2384, SEQ ID NO:2385, SEQ ID NO:2386, SEQ ID NO:2387, SEQ ID NO:2388, SEQ ID NO:2389, SEQ ID NO:2390, SEQ ID NO:2391, SEQ ID NO:2392, SEQ ID NO:2393, SEQ ID NO:2394, SEQ ID NO:2395, SEQ ID NO:2396, SEQ ID NO:2397, SEQ ID NO:2398, SEQ ID NO:2399, SEQ ID NO:2400, SEQ ID NO:2401, SEQ ID NO:2402, SEQ ID NO:2403, SEQ ID NO:2404, SEQ ID NO:2405, SEQ ID NO:2406, SEQ ID NO:2407, SEQ ID NO:2408, SEQ ID NO:2409, SEQ ID NO:2410, SEQ ID NO:2411, SEQ ID NO:2412, SEQ ID NO:2413, SEQ ID NO:2414, SEQ ID NO:2415, SEQ ID NO:2416, SEQ ID NO:2417, SEQ ID NO:2418, SEQ ID NO:2419, SEQ ID NO:2420, SEQ ID NO:2421, SEQ ID NO:2422, SEQ ID NO:2423, SEQ ID NO:2424, SEQ ID NO:2425, SEQ ID NO:2426, SEQ ID NO:2427, SEQ ID NO:2428, SEQ ID NO:2429, SEQ ID NO:2430, SEQ ID NO:2431, SEQ ID NO:2432, SEQ ID NO:2433, SEQ ID NO:2434, SEQ ID NO:2435, SEQ ID NO:2436, SEQ ID NO:2437, SEQ ID NO:2438, SEQ ID NO:2439, SEQ ID NO:2440, SEQ ID NO:2441, SEQ ID NO:2442, SEQ ID NO:2443, SEQ ID NO:2444, SEQ ID NO:2445, SEQ ID NO:2446, SEQ ID NO:2447, SEQ ID NO:2448, SEQ ID NO:2449, SEQ ID NO:2450, SEQ ID NO:2451, SEQ ID NO:2452, SEQ ID NO:2453, SEQ ID NO:2454, SEQ ID NO:2455, SEQ ID NO:2456, SEQ ID NO:2457, SEQ ID NO:2458, SEQ ID NO:2459, SEQ ID NO:2460, SEQ ID NO:2461, SEQ ID NO:2462, SEQ ID NO:2463, SEQ ID NO:2464, SEQ ID NO:2465, SEQ ID NO:2466, SEQ ID NO:2467, SEQ ID NO:2468, SEQ ID NO:2469, SEQ ID NO:2470, SEQ ID NO:2471, SEQ ID NO:2472, SEQ ID NO:2473, SEQ ID NO:2474, SEQ ID NO:2475, SEQ ID NO:2476, SEQ ID NO:2477, SEQ ID NO:2478, SEQ ID NO:2479, SEQ ID NO:2480, SEQ ID NO:2481, SEQ ID NO:2482, SEQ ID NO:2483, SEQ ID NO:2484, SEQ ID NO:2485, SEQ ID NO:2486, SEQ ID NO:2487, SEQ ID NO:2488, SEQ ID NO:2489, SEQ ID NO:2490, SEQ ID NO:2491, SEQ ID NO:2492, SEQ ID NO:2493, SEQ ID NO:2494, SEQ ID NO:2495, SEQ ID NO:2496, SEQ ID NO:2497, SEQ ID NO:2498, SEQ ID NO:2499, SEQ ID NO:2500, SEQ ID NO:2501, SEQ ID NO:2502, SEQ ID NO:2503, SEQ ID NO:2504, SEQ ID NO:2505, SEQ ID NO:2506, SEQ ID NO:2507, SEQ ID NO:2508, SEQ ID NO:2509, SEQ ID NO:2510, SEQ ID NO:2511, SEQ ID NO:2512, SEQ ID NO:2513, SEQ ID NO:2514, SEQ ID NO:2515, SEQ ID NO:2516, SEQ ID NO:2517, SEQ ID NO:2518, SEQ ID NO:2519, SEQ ID NO:2520, SEQ ID NO:2521, SEQ ID NO:2522, SEQ ID NO:2523, SEQ ID NO:2524, SEQ ID NO:2525, SEQ ID NO:2526, SEQ ID NO:2527, SEQ ID NO:2528, SEQ ID NO:2529, SEQ ID NO:2530, SEQ ID NO:2531, or SEQ ID NO:2532.

[0031] The polypeptides and proteins of the invention preferably comprise at least a first isolated coding region comprising an amino acid sequence that is encoded by at least a first nucleic acid segment that comprises an at least 21, 22, 23, 24, 25, 26, 27, 28, 29, or 30 contiguous nucleotide sequence of any one of SEQ ID NO:1 to SEQ ID NO:668.

[0032] The polypeptides and proteins of the invention may also preferably comprise one or more coding regions that comprise an amino acid sequence encoded by at least a first nucleic acid segment that comprises an at least about 31, 32, 33, 34, 35, 36, 37, 38, 39, or 40 contiguous nucleotide sequence of any one of SEQ ID NO:1 to SEQ ID NO:668. The polypeptides and proteins of the invention may also preferably comprise one or more coding regions that comprise an amino acid sequence encoded by at least a first nucleic acid segment that comprises an at least about 41, 42, 43, 44, 45, 46, 47, 48, 49, or 50 contiguous nucleotide sequence of any one of SEQ ID NO:1 to SEQ ID NO:668. The polypeptides and proteins of the invention may also preferably comprise one or more coding regions that comprise an amino acid sequence encoded by at least a first nucleic acid segment that comprises an at least about 51, 52, 53, 54, 55, 56, 57, 58, 59, or 60 contiguous nucleotide sequence of any one of SEQ ID NO:1 to SEQ ID NO:668. The polypeptides and proteins of the invention may also preferably comprise one or more coding regions that comprise an amino acid sequence encoded by at least a first nucleic acid segment that comprises an at least about 61, 62, 63, 64, 65, 66, 67, 68, 69, 70, 71, 72, 73, 74, 75, 76, 77, 78, 79, 80, 81, 82, 83, 84, 85, 86, 87, 88, 89, 90, 91, 92, 93, 94, 95, 96, 97, 98, 99 or 100 contiguous nucleotide sequence of any one of SEQ ID NO:1 to SEQ ID NO:668.

[0033] Likewise, the polypeptides and proteins of the invention may also preferably comprise one or more coding regions that comprise an amino acid sequence encoded by at least a first nucleic acid segment that comprises an at least about 110, 120, 130, 140, 150, 160, 170, 180, 190, 200, 220, 240, 260, 280, 300, 320, 340, 360, 380, 400, 420, 440, 460, 480, or 500 contiguous nucleotide sequence, even up to and including the entire sequence or the substantially entire sequence of any one of SEQ ID NO:1 to SEQ ID NO:668.

[0034] In a second important embodiment, there is provided a composition comprising at least a first isolated polynucleotide that comprises a nucleic acid sequence that is at least about 80%, about 81%, about 82%, about 83%, about 84%, about 85%, about 86%, about 87%, about 88%, about 89%, about 90%, about 91%, about 92%, about 93%, about 94%, about 95%, about 96%, about 97%, about 98%, or about 99% identical to the nucleic acid sequence of any one of SEQ ID NO:1 to SEQ ID NO:668. Exemplary preferred sequences are those that comprise a nucleic acid sequence that is at least about 85%, about 86%, about 87%, about 88%, about 89%, about 90%, about 91%, about 92%, about 93%, or about 94% identical to the nucleic acid sequence of any one of SEQ ID NO:1 to SEQ ID NO:668, with those sequences that comprise at least a nucleic acid sequence that is at least about 95%, about 96%, about 97%, about 98%, or about 99% identical to the nucleic acid sequence of any one of SEQ ID NO:1 to SEQ ID NO:668 being examples of particularly preferred sequences in the practice of the present invention.

[0035] In embodiments that relate particularly to compositions and methods for the detection, diagnosis, prognosis, prophylaxis, treatment, and therapy of Hodgkin's lymphoma exemplary preferred polynucleotide compositions include those compositions that comprise at least a first isolated nucleic acid segment that comprises a sequence that is at least about 80%, about 81%, about 82%, about 83%, about 84%, about 85%, about 86%, about 87%, about 88%, about 89%, about 90%, about 91%, about 92%, about 93%, about 94%, about 95%, about 96%, about 97%, about 98%, or about 99% identical to the nucleic acid sequence of any one of SEQ ID NO:1 to SEQ ID NO:278 and SEQ ID NO:667 to SEQ ID NO:668, and those that comprise at least a first isolated nucleic acid segment that comprises a sequence that is at least about 85%, about 86%, about 87%, about 88%, about 89%, about 90%, about 91%, about 92%, about 93%, or about 94% identical to the nucleic acid sequence of any one of SEQ ID NO:1 to SEQ ID NO:278 and SEQ ID NO:667 to SEQ ID NO:668, and even those sequences that comprise at least a first isolated nucleic acid segment that comprises a sequence that is at least about 95%, about 96%, about 97%, about 98%, or about 99% identical to the nucleic acid sequence of any one of SEQ ID NO:1 to SEQ ID NO:278 and SEQ ID NO:667 to SEQ ID NO:668. Such polynucleotides will preferably comprise one or more isolated coding region, each of which may (a) comprise, (b) consist essentially of, or (c) consist of, the nucleic acid sequence of SEQ ID NO:1, SEQ ID NO:2, SEQ ID NO:3, SEQ ID NO:4, SEQ ID NO:5, SEQ ID NO:6, SEQ ID NO:7, SEQ ID NO:8, SEQ ID NO:9, SEQ ID NO:10, SEQ ID NO:1, SEQ ID NO:12, SEQ ID NO:13, SEQ ID NO:14, SEQ ID NO:15, SEQ ID NO:16, SEQ ID NO:17, SEQ ID NO:18, SEQ ID NO:19, SEQ ID NO:20, SEQ ID NO:21, SEQ ID NO:22, SEQ ID NO:23, SEQ ID NO:24, SEQ ID NO:25, SEQ ID NO:26, SEQ ID NO:27, SEQ ID NO:28, SEQ ID NO:29, SEQ ID NO:30, SEQ ID NO:31, SEQ ID NO:32, SEQ ID NO:33, SEQ ID NO:34, SEQ ID NO:35, SEQ ID NO:36, SEQ ID NO:37, SEQ ID NO:38, SEQ ID NO:39, SEQ ID NO:40, SEQ ID NO:41, SEQ ID NO:42, SEQ ID NO:43, SEQ ID NO:44, SEQ ID NO:45, SEQ ID NO:46, SEQ ID NO:47, SEQ ID NO:48, SEQ ID NO:49, SEQ ID NO:50, SEQ ID NO:51, SEQ ID NO:52, SEQ ID NO:53, SEQ ID NO:54, SEQ ID NO:55, SEQ ID NO:56, SEQ ID NO:57, SEQ ID NO:58, SEQ ID NO:59, SEQ ID NO:60, SEQ ID NO:61, SEQ ID NO:62, SEQ ID NO:63, SEQ ID NO:64, SEQ ID NO:65, SEQ ID NO:66, SEQ ID NO:67, SEQ ID NO:68, SEQ ID NO:69, SEQ ID NO:70, SEQ ID NO:71, SEQ ID NO:72, SEQ ID NO:73, SEQ ID NO:74, SEQ ID NO:75, SEQ ID NO:76, SEQ ID NO:77, SEQ ID NO:78, SEQ ID NO:79, SEQ ID NO:80, SEQ ID NO:81, SEQ ID NO:82, SEQ ID NO:83, SEQ ID NO:84, SEQ ID NO:85, SEQ ID NO:86, SEQ ID NO:87, SEQ ID NO:88, SEQ ID NO:89, SEQ ID NO:90, SEQ ID NO:91, SEQ ID NO:92, SEQ ID NO:93, SEQ ID NO:94, SEQ ID NO:95, SEQ ID NO:96, SEQ ID NO:97, SEQ ID NO:98, SEQ ID NO:99, SEQ ID NO:100, SEQ ID NO:101, SEQ ID NO:102, SEQ ID NO:103, SEQ ID NO:104, SEQ ID NO:105, SEQ ID NO:106, SEQ ID NO:107, SEQ ID NO:108, SEQ ID NO:109, SEQ ID NO:110, SEQ ID NO:111, SEQ ID NO:112, SEQ ID NO:113, SEQ ID NO:114, SEQ ID NO:115, SEQ ID NO:116, SEQ ID NO:117, SEQ ID NO:118, SEQ ID NO:119, SEQ ID NO:120, SEQ ID NO:121, SEQ ID NO:122, SEQ ID NO:123, SEQ ID NO:124, SEQ ID NO:125, SEQ ID NO:126, SEQ ID NO:127, SEQ ID NO:128, SEQ ID NO:129, SEQ ID NO:130, SEQ ID NO:131, SEQ ID NO:132, SEQ ID NO:133, SEQ ID NO:134, SEQ ID NO:135, SEQ ID NO:136, SEQ ID NO:137, SEQ ID NO:138, SEQ ID NO:139, SEQ ID NO:140, SEQ ID NO:141, SEQ ID NO:142, SEQ ID NO:143, SEQ ID NO:144, SEQ ID NO:145, SEQ ID NO:146, SEQ ID NO:147, SEQ ID NO:148, SEQ ID NO:149, SEQ ID NO:150, SEQ ID NO:151, SEQ ID NO:152, SEQ ID NO:153, SEQ ID NO:154, SEQ ID NO:155, SEQ ID NO:156, SEQ ID NO:157, SEQ ID NO:158, SEQ ID NO:159, SEQ ID NO:160, SEQ ID NO:161, SEQ ID NO:162, SEQ ID NO:163, SEQ ID NO:164, SEQ ID NO:165, SEQ ID NO:166, SEQ ID NO:167, SEQ ID NO:168, SEQ ID NO:169, SEQ ID NO:170, SEQ ID NO:171, SEQ ID NO:172, SEQ ID NO:173, SEQ ID NO:174, SEQ ID NO:175, SEQ ID NO:176, SEQ ID NO:177, SEQ ID NO:178, SEQ ID NO:179, SEQ ID NO:180, SEQ ID NO:181, SEQ ID NO:182, SEQ ID NO:183, SEQ ID NO:184, SEQ ID NO:185, SEQ ID NO:186, SEQ ID NO:187, SEQ ID NO:188, SEQ ID NO:189, SEQ ID NO:190, SEQ ID NO:191, SEQ ID NO:192, SEQ ID NO:193, SEQ ID NO:194, SEQ ID NO:195, SEQ ID NO:196, SEQ ID NO:197, SEQ ID NO:198, SEQ ID NO:199, SEQ ID NO:200, SEQ ID NO:201, SEQ ID NO:202, SEQ ID NO:203, SEQ ID NO:204, SEQ ID NO:205, SEQ ID NO:206, SEQ ID NO:207, SEQ ID NO:208, SEQ ID NO:209, SEQ ID NO:210, SEQ ID NO:211, SEQ ID NO:212, SEQ ID NO:213, SEQ ID NO:214, SEQ ID NO:215, SEQ ID NO:216, SEQ ID NO:217, SEQ ID NO:218, SEQ ID NO:219, SEQ ID NO:220, SEQ ID NO:221, SEQ ID NO:222, SEQ ID NO:223, SEQ ID NO:224, SEQ ID NO:225, SEQ ID NO:226, SEQ ID NO:227, SEQ ID NO:228, SEQ ID NO:229, SEQ ID NO:230, SEQ ID NO:231, SEQ ID NO:232, SEQ ID NO:233, SEQ ID NO:234, SEQ ID NO:235, SEQ ID NO:236, SEQ ID NO:237, SEQ ID NO:238, SEQ ID NO:239, SEQ ID NO:240, SEQ ID NO:241, SEQ ID NO:242, SEQ ID NO:243, SEQ ID NO:244, SEQ ID NO:245, SEQ ID NO:246, SEQ ID NO:247, SEQ ID NO:248, SEQ ID NO:249, SEQ ID NO:250, SEQ ID NO:251, SEQ ID NO:252, SEQ ID NO:253, SEQ ID NO:254, SEQ ID NO:255, SEQ ID NO:256, SEQ ID NO:257, SEQ ID NO:258, SEQ ID NO:259, SEQ ID NO:260, SEQ ID NO:261, SEQ ID NO:262, SEQ ID NO:263, SEQ ID NO:264, SEQ ID NO:265, SEQ ID NO:266, SEQ ID NO:267, SEQ ID NO:268, SEQ ID NO:269, SEQ ID NO:270, SEQ ID NO:271, SEQ ID NO:272, SEQ ID NO:273, SEQ ID NO:274, SEQ ID NO:275, SEQ ID NO:276, SEQ ID NO:277, or SEQ ID NO:278.

[0036] In embodiments that relate particularly to compositions and methods for the detection, diagnosis, prognosis, prophylaxis, treatment, and therapy of follicular lymphoma, exemplary preferred polynucleotide compositions include those compositions that comprise at least a first isolated nucleic acid segment that comprises a sequence that is at least about 80%, about 81%, about 82%, about 83%, about 84%, about 85%, about 86%, about 87%, about 88%, about 89%, about 90%, about 91%, about 92%, about 93%, about 94%, about 95%, about 96%, about 97%, about 98%, or about 99% identical to the nucleic acid sequence of any one of SEQ ID NO:279 to SEQ ID NO:436, and those that comprise at least a first isolated nucleic acid segment that comprises a sequence that is at least about 85%, about 86%, about 87%, about 88%, about 89%, about 90%, about 91%, about 92%, about 93%, or about 94% identical to the nucleic acid sequence of any one of SEQ ID NO:279 to SEQ ID NO:436, and even those sequences that comprise at least a first isolated nucleic acid segment that comprises a sequence that is at least about 95%, about 96%, about 97%, about 98%, or about 99% identical to the nucleic acid sequence of any one of SEQ ID NO:279 to SEQ ID NO:436. Such polynucleotides will preferably comprise one or more isolated coding region, each of which may (a) comprise, (b) consist essentially of, or (c) consist of, the nucleic acid sequence of SEQ ID NO:279, SEQ ID NO:280, SEQ ID NO:281, SEQ ID NO:282, SEQ ID NO:283, SEQ ID NO:284, SEQ ID NO:285, SEQ ID NO:286, SEQ ID NO:287, SEQ ID NO:288, SEQ ID NO:289, SEQ ID NO:290, SEQ ID NO:291, SEQ ID NO:292, SEQ ID NO:293, SEQ ID NO:294, SEQ ID NO:295, SEQ ID NO:296, SEQ ID NO:297, SEQ ID NO:298, SEQ ID NO:299, SEQ ID NO:300, SEQ ID NO:301, SEQ ID NO:302, SEQ ID NO:303, SEQ ID NO:304, SEQ ID NO:305, SEQ ID NO:306, SEQ ID NO:307, SEQ ID NO:308, SEQ ID NO:309, SEQ ID NO:310, SEQ ID NO:311, SEQ ID NO:312, SEQ ID NO:313, SEQ ID NO:314, SEQ ID NO:315, SEQ ID NO:316, SEQ ID NO:317, SEQ ID NO:318, SEQ ID NO:319, SEQ ID NO:320, SEQ ID NO:321, SEQ ID NO:322, SEQ ID NO:323, SEQ ID NO:324, SEQ ID NO:325, SEQ ID NO:326, SEQ ID NO:327, SEQ ID NO:328, SEQ ID NO:329, SEQ ID NO:330, SEQ ID NO:331, SEQ ID NO:332, SEQ ID NO:383, SEQ ID NO:334, SEQ ID NO:335, SEQ ID NO:336, SEQ ID NO:337, SEQ ID NO:338, SEQ ID NO:339, SEQ ID NO:340, SEQ ID NO:341, SEQ ID NO:342, SEQ ID NO:343, SEQ ID NO:344, SEQ ID NO:345, SEQ ID NO:346, SEQ ID NO:347, SEQ ID NO:348, SEQ ID NO:349, SEQ ID NO:350, SEQ ID NO:351, SEQ ID NO:352, SEQ ID NO:353, SEQ ID NO:354, SEQ ID NO:355, SEQ ID NO:356, SEQ ID NO:357, SEQ ID NO:358, SEQ ID NO:359, SEQ ID NO:360, SEQ ID NO:361, SEQ ID NO:362, SEQ ID NO:363, SEQ ID NO:364, SEQ ID NO:365, SEQ ID NO:366, SEQ ID NO:367, SEQ ID NO:368, SEQ ID NO:369, SEQ ID NO:370, SEQ ID NO:371, SEQ ID NO:372, SEQ ID NO:373, SEQ ID NO:374, SEQ ID NO:375, SEQ ID NO:376, SEQ ID NO:377, SEQ ID NO:378, SEQ ID NO:379, SEQ ID NO:380, SEQ ID NO:381, SEQ ID NO:382, SEQ ID NO:383, SEQ ID NO:384, SEQ ID NO:385, SEQ ID NO:386, SEQ ID NO:387, SEQ ID NO:388, SEQ ID NO:389, SEQ ID NO:390, SEQ ID NO:391, SEQ ID NO:392, SEQ ID NO:393, SEQ ID NO:394, SEQ ID NO:395, SEQ ID NO:396, SEQ ID NO:397, SEQ ID NO:398, SEQ ID NO:399, SEQ ID NO:400, SEQ ID NO:401, SEQ ID NO:402, SEQ ID NO:403, SEQ ID NO:404, SEQ ID NO:405, SEQ ID NO:406, SEQ ID NO:407, SEQ ID NO:408, SEQ ID NO:409, SEQ ID NO:410, SEQ ID NO:411, SEQ ID NO:412, SEQ ID NO:413, SEQ ID NO:414, SEQ ID NO:415, SEQ ID NO:416, SEQ ID NO:417, SEQ ID NO:418, SEQ ID NO:419, SEQ ID NO:420, SEQ ID NO:421, SEQ ID NO:422, SEQ ID NO:423, SEQ ID NO:424, SEQ ID NO:425, SEQ ID NO:426, SEQ ID NO:427, SEQ ID NO:428, SEQ ID NO:429, SEQ ID NO:430, SEQ ID NO:431, SEQ ID NO:432, SEQ ID NO:433, SEQ ID NO:434, SEQ ID NO:435, or SEQ ID NO:436.

[0037] In embodiments that relate particularly to compositions and methods for the detection, diagnosis, prognosis, prophylaxis, treatment, and therapy of B cell non-Hodgkin's lymphoma, exemplary preferred polynucleotide compositions include those compositions that comprise at least a first isolated nucleic acid segment that comprises a sequence that is at least about 80%, about 81%, about 82%, about 83%, about 84%, about 85%, about 86%, about 87%, about 88%, about 89%, about 90%, about 91%, about 92%, about 93%, about 94%, about 95%, about 96%, about 97%, about 98%, or about 99% identical to the nucleic acid sequence of any one of SEQ ID NO:437 to SEQ ID NO:528 and SEQ ID NO:665 to SEQ ID NO:668, and those that comprise at least a first isolated nucleic acid segment that comprises a sequence that is at least about 85%, about 86%, about 87%, about 88%, about 89%, about 90%, about 91%, about 92%, about 93%, or about 94% identical to the nucleic acid sequence of any one of SEQ ID NO:437 to SEQ ID NO:528 and SEQ ID NO:665 to SEQ ID NO:668, and even those sequences that comprise at least a first isolated nucleic acid segment that comprises a sequence that is at least about 95%, about 96%, about 97%, about 98%, or about 99% identical to the nucleic acid sequence of any one of SEQ ID NO:437 to SEQ ID NO:528 and SEQ ID NO:665 to SEQ ID NO:668. Such polynucleotides will preferably comprise one or more isolated coding region, each of which may (a) comprise, (b) consist essentially of, or (c) consist of, the nucleic acid sequence of SEQ ID NO:437, SEQ ID NO:438, SEQ ID NO:439, SEQ ID NO:440, SEQ ID NO:441, SEQ ID NO:442, SEQ ID NO:443, SEQ ID NO:444, SEQ ID NO:445, SEQ ID NO:446, SEQ ID NO:447, SEQ ID NO:448, SEQ ID NO:449, SEQ ID NO:450, SEQ ID NO:451, SEQ ID NO:452, SEQ ID NO:453, SEQ ID NO:454, SEQ ID NO:455, SEQ ID NO:456, SEQ ID NO:457, SEQ ID NO:458, SEQ ID NO:459, SEQ ID NO:460, SEQ ID NO:461, SEQ ID NO:462, SEQ ID NO:463, SEQ ID NO:464, SEQ ID NO:465, SEQ ID NO:466, SEQ ID NO:467, SEQ ID NO:468, SEQ ID NO:469, SEQ ID NO:470, SEQ ID NO:471, SEQ ID NO:472, SEQ ID NO:473, SEQ ID NO:474, SEQ ID NO:475, SEQ ID NO:476, SEQ ID NO:477, SEQ ID NO:478, SEQ ID NO:479, SEQ ID NO:480, SEQ ID NO:487, SEQ ID NO:482, SEQ ID NO:483, SEQ ID NO:484, SEQ ID NO:485, SEQ ID NO:486, SEQ ID NO:487, SEQ ID NO:488, SEQ ID NO:489, SEQ ID NO:490, SEQ ID NO:491, SEQ ID NO:492, SEQ ID NO:493, SEQ ID NO:494, SEQ ID NO:495, SEQ ID NO:496, SEQ ID NO:497, SEQ ID NO:498, SEQ ID NO:499, SEQ ID NO:500, SEQ ID NO:501, SEQ ID NO:502, SEQ ID NO:503, SEQ ID NO:504, SEQ ID NO:505, SEQ ID NO:506, SEQ ID NO:507, SEQ ID NO:508, SEQ ID NO:509, SEQ ID NO:510, SEQ ID NO:511, SEQ ID NO:512, SEQ ID NO:513, SEQ ID NO:514, SEQ ID NO:515, SEQ ID NO:516, SEQ ID NO:517, SEQ ID NO:518, SEQ ID NO:519, SEQ ID NO:520, SEQ ID NO:521, SEQ ID NO:522, SEQ ID NO:523, SEQ ID NO:524, SEQ ID NO:525, SEQ ID NO:526, SEQ ID NO:527, or SEQ ID NO:528.

[0038] In embodiments that relate particularly to compositions and methods for the detection, diagnosis, prognosis, prophylaxis, treatment, and therapy of T cell non-Hodgkin's lymphoma, exemplary preferred polynucleotide compositions include those compositions that comprise at least a first isolated nucleic acid segment that comprises a sequence that is at least about 80%, about 81%, about 82%, about 83%, about 84%, about 85%, about 86%, about 87%, about 88%, about 89%, about 90%, about 91%, about 92%, about 93%, about 94%, about 95%, about 96%, about 97%, about 98%, or about 99% identical to the nucleic acid sequence of any one of SEQ ID NO:529 to SEQ ID NO:610 and SEQ ID NO:665 or SEQ ID NO:666, and those that comprise at least a first isolated nucleic acid segment that comprises a sequence that is at least about 85%, about 86%, about 87%, about 88%, about 89%, about 90%, about 91%, about 92%, about 93%, or about 94% identical to the nucleic acid sequence of any one of SEQ ID NO:529 to SEQ ID NO:610 and SEQ ID NO:665 or SEQ ID NO:666, and even those sequences that comprise at least a first isolated nucleic acid segment that comprises a sequence that is at least about 95%, about 96%, about 97%, about 98%, or about 99% identical to the nucleic acid sequence of any one of SEQ ID NO:529 to SEQ ID NO:610 and SEQ ID NO:665 or SEQ ID NO:666. Such polynucleotides will preferably comprise one or more isolated coding region, each of which may (a) comprise, (b) consist essentially of, or (c) consist of, the nucleic acid sequence of SEQ ID NO:529, SEQ ID NO:530, SEQ ID NO:531, SEQ ID NO:532, SEQ ID NO:533, SEQ ID NO:534, SEQ ID NO:535, SEQ ID NO:536, SEQ ID NO:537, SEQ ID NO:538, SEQ ID NO:539, SEQ ID NO:540, SEQ ID NO:541, SEQ ID NO:542, SEQ ID NO:543, SEQ ID NO:544, SEQ ID NO:545, SEQ ID NO:546, SEQ ID NO:547, SEQ ID NO:548, SEQ ID NO:549, SEQ ID NO:550, SEQ ID NO:551, SEQ ID NO:552, SEQ ID NO:553, SEQ ID NO:554, SEQ ID NO:555, SEQ ID NO:556, SEQ ID NO:557, SEQ ID NO:558, SEQ ID NO:559, SEQ ID NO:560, SEQ ID NO:561, SEQ ID NO:562, SEQ ID NO:563, SEQ ID NO:564, SEQ ID NO:565, SEQ ID NO:566, SEQ ID NO:567, SEQ ID NO:568, SEQ ID NO:569, SEQ ID NO:570, SEQ ID NO:571, SEQ ID NO:572, SEQ ID NO:573, SEQ ID NO:574, SEQ ID NO:575, SEQ ID NO:576, SEQ ID NO:577, SEQ ID NO:578, SEQ ID NO:579, SEQ ID NO:580, SEQ ID NO:581, SEQ ID NO:582, SEQ ID NO:583, SEQ ID NO:584, SEQ ID NO:585, SEQ ID NO:586, SEQ ID NO:587, SEQ ID NO:588, SEQ ID NO:589, SEQ ID NO:590, SEQ ID NO:591, SEQ ID NO:592, SEQ ID NO:593, SEQ ID NO:594, SEQ ID NO:595, SEQ ID NO:596, SEQ ID NO:597, SEQ ID NO:598, SEQ ID NO:599, SEQ ID NO:600, SEQ ID NO:601, SEQ ID NO:602, SEQ ID NO:603, SEQ ID NO:604, SEQ ID NO:605, SEQ ID NO:606, SEQ ID NO:607, SEQ ID NO:608, SEQ ID NO:609, or SEQ ID NO:610.

[0039] In embodiments that relate particularly to compositions and methods for the detection, diagnosis, prognosis, prophylaxis, treatment, and therapy of lymphoma, exemplary preferred polynucleotide compositions include those compositions that comprise at least a first isolated nucleic acid segment that comprises a sequence that is at least about 80%, about 81%, about 82%, about 83%, about 84%, about 85%, about 86%, about 87%, about 88%, about 89%, about 90%, about 91%, about 92%, about 93%, about 94%, about 95%, about 96%, about 97%, about 98%, or about 99% identical to the nucleic acid sequence of any one of SEQ ID NO:611 to SEQ ID NO:664, and those that comprise at least a first isolated nucleic acid segment that comprises a sequence that is at least about 85%, about 86%, about 87%, about 88%, about 89%, about 90%, about 91%, about 92%, about 93%, or about 94% identical to the nucleic acid sequence of any one of SEQ ID NO:611 to SEQ ID NO:664, and even those sequences that comprise at least a first isolated nucleic acid segment that comprises a sequence that is at least about 95%, about 96%, about 97%, about 98%, or about 99% identical to the nucleic acid sequence of any one of SEQ ID NO:611 to SEQ ID NO:664. Such polynucleotides will preferably comprise one or more isolated coding region, each of which may (a) comprise, (b) consist essentially of, or (c) consist of, the nucleic acid sequence of SEQ ID NO:611, SEQ ID NO:612, SEQ ID NO:613, SEQ ID NO:614, SEQ ID NO:615, SEQ ID NO:616, SEQ ID NO:617, SEQ ID NO:618, SEQ ID NO:619, SEQ ID NO:620, SEQ ID NO:621, SEQ ID NO:622, SEQ ID NO:623, SEQ ID NO:624, SEQ ID NO:625, SEQ ID NO:626, SEQ ID NO:627, SEQ ID NO:628, SEQ ID NO:629, SEQ ID NO:630, SEQ ID NO:631, SEQ ID NO:632, SEQ ID NO:633, SEQ ID NO:634, SEQ ID NO:635, SEQ ID NO:636, SEQ ID NO:637, SEQ ID NO:638, SEQ ID NO:639, SEQ ID NO:640, SEQ ID NO:641, SEQ ID NO:642, SEQ ID NO:643, SEQ ID NO:644, SEQ ID NO:645, SEQ ID NO:646, SEQ ID NO:647, SEQ ID NO:648, SEQ ID NO:649, SEQ ID NO:650, SEQ ID NO:651, SEQ ID NO:652, SEQ ID NO:653, SEQ ID NO:654, SEQ ID NO:655, SEQ ID NO:656, SEQ ID NO:657, SEQ ID NO:658, SEQ ID NO:659, SEQ ID NO:660, SEQ ID NO:661, SEQ ID NO:662, SEQ ID NO:663, or SEQ ID NO:664.

[0040] In embodiments that relate particularly to compositions and methods for the detection, diagnosis, prognosis, prophylaxis, treatment, and therapy of chronic lymphocytic leukemia, exemplary preferred polynucleotide compositions include those compositions that comprise at least a first isolated nucleic acid segment that comprises a sequence that is at least about 80%, about 81%, about 82%, about 83%, about 84%, about 85%, about 86%, about 87%, about 88%, about 89%, about 90%, about 91%, about 92%, about 93%, about 94%, about 95%, about 96%, about 97%, about 98%, or about 99% identical to the nucleic acid sequence of SEQ ID NO:665 or SEQ ID NO:666, and those that comprise at least a first isolated nucleic acid segment that comprises a sequence that is at least about 85%, about 86%, about 87%, about 88%, about 89%, about 90%, about 91%, about 92%, about 93%, or about 94% identical to the nucleic acid sequence of SEQ ID NO:665 or SEQ ID NO:666, and even those sequences that comprise at least a first isolated nucleic acid segment that comprises a sequence that is at least about 95%, about 96%, about 97%, about 98%, or about 99% identical to the nucleic acid sequence of SEQ ID NO:665 or SEQ ID NO:666.

[0041] Exemplary polynucleotides of the present invention may be of any suitable length, depending upon the particular application thereof, and encompass those polynucleotides that (a) are at least about, or (b) comprise at least a first isolated nucleic acid segment that is at least about 30,40, 50,60, 70, 80, 90, 100, 110, 120, 120, 140, 150, 160, 170, 180, 190, 200, 210, 220, 230, 240, 250, 260, 270, 280, 290, 300, 320, 340, 360, 380, 400, 420, 440, 460, 480, 500, 520, 540, 560, 580, 600, 625, 650, 675, 700, 750, 800, 850, 900, 950, or 1000 or so nucleic acids in length, as well as longer polynucleotides that (a) are at least about, or (b) comprise at least a first isolated nucleic acid segment that is at least about 1000, 1025, 1050, 1075, 1100, 150, 1200, 1250, 1300, 1350, 1400, 1450, 1500, 1550, 1600, 1650, 1700, 1750, 1800, 1850, 1900, 1950, 2000, 2100, 2200, 2300, 2400, 2500, 2600, 2700, 2800, 2900, or 3000 or so nucleic acids in length, as well as substantially larger polynucleotides that (a) are at least about, or (b) comprise at least a first isolated nucleic acid segment that is at least about 3500, 4000, 4500, 5000, 5500, 6000, 6500, 7000, 7500, 8000, 8500, 9000, 9500 or 10,000 so nucleic acids in length. Of course, the polynucleotides and nucleic acid segments of the invention may also encompass any intermediate lengths or integers within the stated ranges.

[0042] The compositions of the present invention may comprise a single polypeptide or polynucleotide, or alternatively, may comprise two or more such hematological malignancy compounds, such as for example, two or more polypeptides, two or more polynucleotides, or even combinations of one or more peptides or polypeptides, along with one or more polynucleotides. When two or more polypeptides are contemplated for particular applications, the second and/or third and/or fourth, etc. isolated peptides and/or polypeptides will preferably comprise at least one isolated coding region that comprises an amino acid sequence that is at least about 91%, 93%, 95%, 97%, or 99% identical to the amino acid sequence of any one of SEQ ID NO:669 to SEQ ID NO:2532. Alternatively, the polynucleotides of the invention may comprise one or more coding regions that encode a first fusion protein or peptide, such as an adjuvant-coding region fused in correct reading frame to one or more of the disclosed hematological malignancy peptides or polypeptides. Alternatively, the fusion protein may comprise a hematological malignancy polypeptide or peptide fused, in correct reading frame, to a detectable protein or peptide, or to an immunostimulant protein or peptide, or other such construct. Fusion proteins such as these are particularly useful in those embodiments relating to diagnosis, detection, and therapy of one or more of the hematological malignancies as discussed herein.

[0043] The invention also provides a composition comprising at least a first hybridoma cell line that produces a monoclonal antibody having immunospecificity for one or more of the peptides or polypeptides as disclosed herein, or at least a first monoclonal antibody, or an antigen-binding fragment thereof, that has immunospecificity for such a peptide or polypeptide. The antigen binding fragments may comprise a light chain variable region, a heavy-chain variable region, a Fab fragment, a F(ab)₂ fragment, an Fv fragment, an scFv fragment, or an antigen-binding fragment of such an antibody.

[0044] The invention also provides a composition comprising at least a first isolated antigen-presenting cell that expresses a peptide or polypeptide as disclosed herein, or a plurality of isolated T cells that specifically react with such a peptide or polypeptide. Such pluralities of isolated T cells may be stimulated or expanded by contacting the T cells with one or more peptides or polypeptides as described herein. The T cells may be cloned prior to expansion, and may be obtained from bone marrow, a bone marrow fraction, peripheral blood, or a peripheral blood fraction from a healthy mammal, or from a mammal that is afflicted with at least a first hematological malignancy such as leukemia or lymphoma.

[0045] As descrbied above, the isolated coding regions within the polypeptides of the invention may be on the order of from 25 to about 1000 amino acids in length, or alternatively, may be on the order of from 50 to about 900 amino acids in length, from 75 to about 800 amino acids in length, from 100 to about 700 amino acids in length, or from 125 to about 600 amino acids in length, or any other such suitable range.

[0046] The isolated nucleic acid segments that encode such isolated coding regions may be on the order of from 50 to about 10,000 nucleotides in length, from 150 to about 8000 nucleotides in length, from 250 to about 6000 nucleotides in length, from 350 to about 4000 nucleotides in length, or from 450 to about 2000 nucleotides in length, or any other such suitable range.

[0047] The nucleic acid segment may be operably positioned under the control of at least a first heterologous, recombinant promoter, such as a tissue-specific, cell-specific, inducible, or otherwise regulated promoter. Such promoters may be further controlled or regulated by the presence of one or more additional enhancers or regulatory regions depending upon the particular cell type in which expression of the polynucleotide is desired. The polynucleotides and nucleic acid segments of the invention may also be comprised within a vector, such as a plasmid, or viral vector. The polypeptides and polynucleotides of the invention may also be comprised within a host cell, such as a recombinant host cell, or a human host cell such as a blood or bone marrow cell.

[0048] The polynucleotides of the invention may comprise at least a first isolated nucleic acid segment is operably attached, in frame, to at least a second isolated nucleic acid segment, such that the polynucleotide encodes a fusion protein in which the first peptide or polypeptide is linked to the second peptide or polypeptide.

[0049] The polypeptides of the present invention may comprise a contiguous amino acid coding region of any suitable length, such as for example, those of about 2000, about 1900, about 1850, about 1800, about 1750, about 1700, about 1650, about 1600, about 1550, about 1500, about 1450, about 1400, about 1350, about 1300, about 1250, about 1200, about 1150, about 1100 amino acids, or about 1000 or so amino acids in length. Likewise, the polypeptides and peptides of the present invention may comprise slightly shorter contiguous amino acid coding regions, such as for example, those of about 950, about 900, about 850, about 800, about 750, about 700, about 650, about 600, about 550, about 500, about 450, about 400, about 350, about 300, about 250, about 200, about 150, or even about 100 amino acids or so in length.

[0050] In similar fashion, the polypeptides and peptides of the present invention may comprise even smaller contiguous amino acid coding regions, such as for example, those of about 95, about 90, about 85, about 80, about 75, about 70, about 65, about 60, about 55, about 50, about 45, about 40, about 35, about 30, about 25, about 20, or even about 15 amino acids or so in length.

[0051] In all such embodiments, those peptides and polypeptides having intermediate lengths including all integers within the preferred ranges (e.g., those peptides and polypeptides that comprise at least a first coding region of at least about 94, about 93, about 92, about 91, about 89, about 88, about 87, about 86, about 84, about 83, about 82, about 81, about 79, about 78, about 77, about 76, about 74, about 73, about 72, about 71, about 69, about 68, about 67, about 66 or so amino acids in length, etc.) are all contemplated to fall within the scope of the present invention.

[0052] In particular embodiments, the peptides and polypeptides of the present invention may comprise at least a first coding region that comprises a sequence of at least about 9, or about 10, or about 11, or about 12, or about 13, or about 14, or about 15, or about 16, or about 17, or about 18, or about 19, or about 20, or about 21, or about 22, or about 23, or about 24, or about 25, or about 26, or about 27, or about 28, or about 29, or about 30, or about 31, or about 32, or about 13, or about 34, or about 35, or about 36, or about 37, or about 38, or about 39, or about 40, or about 41, or about 42, or about 43, or about 44, or about 45, or about 46, or about 47, or about 48, or about 49, or about 50 contiguous amino acids as disclosed in any one or more of SEQ ID NO:669 through SEQ ID NO:2532 herein.

[0053] In other embodiments, the peptides and polypeptides of the present invention may comprise at least a first coding region that comprises a sequence of at least about 51, or about 52, or about 53, or about 54, or about 55, or about 56, or about 57, or about 58, or about 59, or about 60, or about 61, or about 62, or about 63, or about 64, or about 65, or about 66, or about 67, or about 68, or about 69, or about 70, or about 71, or about 72, or about 73, or about 74, or about 75, or about 76, or about 77, or about 78, or about 79, or about 80, or about 81, or about 82, or about 83, or about 84, or about 85, or about 86, or about 87, or about 88, or about 89, or about 90, about 91, or about 92, or about 93, or about 94, or about 95, or about 96, or about 97, or about 98, or about 99, or 100 contiguous amino acids as disclosed in any one or more of SEQ ID NO:669 through SEQ ID NO:2532 herein.

[0054] In still other embodiments, the preferred peptides and polypeptides of the present invention comprise at least a first coding region that comprises a sequence of at least about 100, 125, 150, 175, 200, 225, 250, 275, 300, 325, 350, 375, 400, 425, 450, 475, 500, 525, 550, 575, 600, 625, 650, 675 or 700 or more contiguous amino acids as disclosed in any one or more of SEQ ID NO:669 through SEQ ID NO:2532 herein. The preferred peptides and polypeptides of the present invention may also comprise at least a first coding region that comprises a sequence of at least about 750, 775, 800, 825, 850, 875, 900, 925, 950, 975, 1000, 1025, 1050, 1075, 1100, 1125, 1150, 1175, 1200, 1225, 1250, 1275, 1300, 1325, 1350, 1375 or 1400 or more contiguous amino acids as disclosed in any one or more of SEQ ID NO:669 through SEQ ID NO:2532 herein. Likewise, in still other embodiments, the preferred peptides and polypeptides of the present invention comprise at least a first coding region that comprises a sequence of at least about 1500, 1525, 1550, 1575, 1600, 1625, 1650, 1675, 1700, 1725, 1750, 1775, 1800, 1825, 1850, 1875, 1900, 1925, 1950, 1975, or 2000 or more contiguous amino acids as disclosed in any one or more of SEQ ID NO:669 through SEQ ID NO:2532 herein.

[0055] The polypeptides of the invention typically will comprise at least a first contiguous amino acid sequence according to any one of SEQ ID NO:669 through SEQ ID NO:2532, but may also, optionally comprise at least a second, at least a third, or even at least a fourth or greater contiguous amino acid sequence according to any one of SEQ ID NO:669 through SEQ ID NO:2532. A single polypeptide may contain only a single coding region, or alternatively, a single polypeptide may comprise a plurality of identical or distinctly different contiguous amino acid sequences in accordance with any one of SEQ ID NO:669 through SEQ ID NO:2532. In fact, the polypeptide may comprise a plurality of the same contiguous amino acid sequences, or they may comprise one or more different contiguous amino acid sequences disclosed in SEQ ID NO:669 through SEQ ID NO:2532. For example, a single polypeptide can comprise a single contiguous amino acid sequence from one or more of SEQ ID NO:669 through SEQ ID NO:2532, or alternatively, may comprise two or more distinctly different contiguous amino acid sequences from one or more of SEQ ID NO:669 through SEQ ID NO:2532. In fact, the polypeptide may comprise 2, 3, 4, or even 5 distinct contiguous amino sequences as disclosed in any of SEQ ID NO:669 through SEQ ID NO:2532. Alternatively, a single polypeptide may comprise 2, 3, 4, or even 5 distinct coding regions. For example, a polypeptide may comprise at least a first coding region that comprises a first contiguous amino acid sequence as disclosed in any of SEQ ID NO:669 through SEQ ID NO:2532, and at least a second coding region that comprises a second contiguous amino acid sequence as disclosed in any of SEQ ID NO:669 through SEQ ID NO:2532. In contrast, a polypeptide may comprise at least a first coding region that comprises a first contiguous amino acid sequence as disclosed in any of SEQ ID NO:669 through SEQ ID NO:2532, and at least a second coding region that comprises a second distinctly different peptide or polypeptide, such as for example, an adjuvant or an immunostimulant peptide or polypeptide.

[0056] In such cases, the two coding regions may be separate on the same polypeptide, or the two coding regions may be operatively attached, each in the correct reading frame, such that a fusion polypeptide is produced, in which the first amino acid sequence of the first coding region is linked to the second amino acid sequence of the second coding region.

[0057] Throughout this disclosure, a phrase such as “a sequence as disclosed in SEQ ID NO:1 to SEQ ID NO:4” is intended to encompass any and all contiguous sequences disclosed by any one of these sequence identifiers. That is to say, “a sequence as disclosed in any of SEQ ID NO:1 through SEQ ID NO:4” means any sequence that is disclosed in any one of SEQ ID NO:1, SEQ ID NO:2, SEQ ID NO:3, or SEQ ID NO:4. Likewise, “a sequence as disclosed in any of SEQ ID NOs:25 to 37” means any sequence that is disclosed in any one of SEQ ID NO:25, SEQ ID NO:26, SEQ ID NO:27, SEQ ID NO:28, SEQ ID NO:29, SEQ ID NO:30, SEQ ID NO:31, SEQ ID NO:32, SEQ ID NO:33, SEQ ID NO:34, SEQ ID NO:35, SEQ ID NO:36, or SEQ ID NO:37, and so forth.

[0058] Likewise, “at least a first sequence from any one of SEQ ID NO:55 to SEQ ID NO:62” is intended to refer to a first sequence that is disclosed in any one of SEQ ID NO:55, SEQ ID NO:56, SEQ ID NO:57, SEQ ID NO:58, SEQ ID NO:59, SEQ ID NO:60, SEQ ID NO:61, or SEQ ID NO:62.

[0059] It will also be understood that the kits, and compositions of the present invention comprise in an overall and general sense at least one or more particular polynucleotides, polypeptides, and peptides that comprise one or more contiguous sequence regions from one or more of the nucleic acid sequences disclosed herein in SEQ ID NO:1 through SEQ ID NO:668 or from one or more of the amino acid sequences disclosed herein in SEQ ID NO:669 through SEQ ID NO:2532, and that such peptide, polypeptide and polynucleotide compositions may be used in one or more of the particular methods and uses disclosed herein for the diagnosis, detection, prophylaxis, and therapy of one or more hematological cancers, and in particular, lymphomas of a variety of specific types. It will also be understood to the skilled artisan having benefit of the teachings of the present Specification, that the peptide and polypeptide compositions may be used to generate a T cell or an immune response in an animal, and that such compositions may also be administered to an animal from which immunospecific antibodies and antigen binding fragments may be isolated or identified that specifically bind to such peptides or polypeptides. Such an artisan will also recognize that the polynucleotides identified by the present disclosure may be used to produce such peptides, polypeptides, antibodies, and antigen binding fragments, by recombinant protein production methodologies that are also within the capability of the skilled artisan having benefit of the specific amino acid and nucleic acid sequences provided herein.

[0060] Likewise, it will be understood by a skilled artisan in the field, that one or more of the disclosed compositions may used in one or more diagnostic or detection methodologies to identify certain antibodies, peptides, polynucleotides, or polypeptides in a biological sample, in a host cell, or even within the body or tissues of an animal. It will be understood by a skilled artisan in the field, that one or more of the disclosed nucleic acid or amino acid compositions may used in the preparation or manufacture of one or more medicaments for use in the diagnosis, detection, prognosis, prophylaxis, or therapy of one or more hematological malignancies in an animal, and particularly those malignant conditions disclosed and claimed herein.

[0061] It will also be readily apparent to those of skill in the art, that the methods, kits, and uses, of the present invention preferably employ one or more of the compounds and/or compositions disclosed herein that comprise one or more contiguous nucleotide sequences as may be presented in SEQ ID NO:1 through SEQ ID NO:10 of the attached sequence listing, as well as those compounds and compositions that comprise one or more contiguous nucleotide sequences as may be presented in SEQ ID NO:21 through SEQ ID NO:30, SEQ ID NO:31 through SEQ ID NO:40, SEQ ID NO:41 through SEQ ID NO:50, SEQ ID NO:51 through SEQ ID NO:60, SEQ ID NO:61 through SEQ ID NO:70, SEQ ID NO:71 through SEQ ID NO:80, SEQ ID NO:81 through SEQ ID NO:90, SEQ ID NO:91 through SEQ ID NO:100, SEQ ID NO:101 through SEQ ID NO:110, SEQ ID NO:111 through SEQ ID NO:120, SEQ ID NO:121 through SEQ ID NO:130, SEQ ID NO:131 through SEQ ID NO:140, SEQ ID NO:141 through SEQ ID NO:150, SEQ ID NO:151 through SEQ ID NO:160, SEQ ID NO:161 through SEQ ID NO:170, SEQ ID NO:171 through SEQ ID NO:180, SEQ ID NO:181 through SEQ ID NO:190, SEQ ID NO:191 through SEQ ID NO:200, SEQ ID NO:201 through SEQ ID NO:210, SEQ ID NO:211 through SEQ ID NO:220, SEQ ID NO:221 through SEQ ID NO:230, SEQ ID NO:231 through SEQ ID NO:240, SEQ ID NO:241 through SEQ ID NO:250, SEQ ID NO:251 through SEQ ID NO:260, SEQ ID NO:261 through SEQ ID NO:270, SEQ ID NO:271 through SEQ ID NO:280, SEQ ID NO:281 through SEQ ID NO:290, SEQ ID NO:291 through SEQ ID NO:300, SEQ ID NO:301 through SEQ ID NO:310, SEQ ID NO:311 through SEQ ID NO:320, SEQ ID NO:321 through SEQ ID NO:330, SEQ ID NO:331 through SEQ ID NO:340, SEQ ID NO:341 through SEQ ID NO:350, SEQ ID NO:351 through SEQ ID NO:360, SEQ ID NO:361 through SEQ ID NO:370, SEQ ID NO:371 through SEQ ID NO:380, SEQ ID NO:381 through SEQ ID NO:390, SEQ ID NO:391 through SEQ ID NO:400, SEQ ID NO:401 through SEQ ID NO:410, SEQ ID NO:411 through SEQ ID NO:420, SEQ ID NO:421 through SEQ ID NO:430, SEQ ID NO:431 through SEQ ID NO:440, SEQ ID NO:441 through SEQ ID NO:450, SEQ ID NO:451 through SEQ ID NO:460, SEQ ID NO:461 through SEQ ID NO:470, SEQ ID NO:471 through SEQ ID NO:480, SEQ ID NO:481 through SEQ ID NO:490, SEQ ID NO:491 through SEQ ID NO:500, SEQ ID NO:501 through SEQ ID NO:510, SEQ ID NO:511 through SEQ ID NO:520, SEQ ID NO:521 through SEQ ID NO:530, SEQ ID NO:531 through SEQ ID NO:540, SEQ ID NO:541 through SEQ ID NO:550, SEQ ID NO:551 through SEQ ID NO:560, SEQ ID NO:561 through SEQ ID NO:570, SEQ ID NO:571 through SEQ ID NO:580, SEQ ID NO:581 through SEQ ID NO:590, SEQ ID NO:591 through SEQ ID NO:600, SEQ ID NO:601 through SEQ ID NO:610, SEQ ID NO:611 through SEQ ID NO:620, SEQ ID NO:621 through SEQ ID NO:630, SEQ ID NO:631 through SEQ ID NO:640, SEQ ID NO:641 through SEQ ID NO:650, SEQ ID NO:651 through SEQ ID NO:660, and SEQ ID NO:661 through SEQ ID NO:669.

[0062] Likewise, it will also be readily apparent to those of skill in the art, that the methods, kits, and uses, of the present invention may also employ one or more of the compounds and compositions disclosed herein that comprise one or more contiguous amino acid sequences as may be presented in SEQ ID NO:669 through SEQ ID NO:678 of the attached sequence listing, as well as those compounds and compositions that comprise one or more contiguous amino acid sequences as may be presented in SEQ ID NO:679 through SEQ ID NO:688, SEQ ID NO:689 through SEQ ID NO:698, SEQ ID NO:699 through SEQ ID NO:708, SEQ ID NO:709 through SEQ ID NO:718, SEQ ID NO:719 through SEQ ID NO:728, SEQ ID NO:729 through SEQ ID NO:738, SEQ ID NO:739 through SEQ ID NO:748, SEQ ID NO:749 through SEQ ID NO:758, SEQ ID NO:759 through SEQ ID NO:768, SEQ ID NO:769 through SEQ ID NO:778, SEQ ID NO:779 through SEQ ID NO:788, SEQ ID NO:789 through SEQ ID NO:798, SEQ ID NO:799 through SEQ ID NO:808, SEQ ID NO:809 through SEQ ID NO:818, SEQ ID NO:819 through SEQ ID NO:828, SEQ ID NO:829 through SEQ ID NO:838, SEQ ID NO:839 through SEQ ID NO:848, SEQ ID NO:849 through SEQ ID NO:858, SEQ ID NO:859 through SEQ ID NO:868, SEQ ID NO:869 through SEQ ID NO:878, SEQ ID NO:879 through SEQ ID NO:888, SEQ ID NO:889 through SEQ ID NO:898, SEQ ID NO:899 through SEQ ID NO:908, SEQ ID NO:909 through SEQ ID NO:918, SEQ ID NO:919 through SEQ ID NO:928, SEQ ID NO:929 through SEQ ID NO:938, SEQ ID NO:939 through SEQ ID NO:948, SEQ ID NO:949 through SEQ ID NO:958, SEQ ID NO:959 through SEQ ID NO:968, SEQ ID NO:969 through SEQ ID NO:978, SEQ ID NO:979 through SEQ ID NO:988, SEQ ID NO:989 through SEQ ID NO:998, SEQ ID NO:999 through SEQ ID NO:1008, SEQ ID NO:1009 through SEQ ID NO:1018, SEQ ID NO:1019 through SEQ ID NO:1028, SEQ ID NO:1029 through SEQ ID NO:1038, SEQ ID NO:1039 through SEQ ID NO:1048, SEQ ID NO:1049 through SEQ ID NO:1058, SEQ ID NO:1059 through SEQ ID NO:1068, SEQ ID NO:1069 through SEQ ID NO:1078, SEQ ID NO:1079 through SEQ ID NO:1088, SEQ ID NO:1089 through SEQ ID NO:1098, SEQ ID NO:1099 through SEQ ID NO:1108, SEQ ID NO:1109 through SEQ ID NO:1118, SEQ ID NO:1119 through SEQ ID NO:1128, SEQ ID NO:1129 through SEQ ID NO:1138, SEQ ID NO:1139 through SEQ ID NO:1148, SEQ ID NO:1149 through SEQ ID NO:1158, SEQ ID NO:1159 through SEQ ID NO:1168, SEQ ID NO:1169 through SEQ ID NO:1178, SEQ ID NO:1179 through SEQ ID NO:1188, SEQ ID NO:1189 through SEQ ID NO:1198, SEQ ID NO:1199 through SEQ ID NO:1208, SEQ ID NO:1209 through SEQ ID NO:1218, SEQ ID NO:1219 through SEQ ID NO:1228, SEQ ID NO:1229 through SEQ ID NO:1238, SEQ ID NO:1239 through SEQ ID NO:1248, SEQ ID NO:1249 through SEQ ID NO:1258, SEQ ID NO:1259 through SEQ ID NO:1268, SEQ ID NO:1269 through SEQ ID NO:1278, SEQ ID NO:1279 through SEQ ID NO:1288, SEQ ID NO:1289 through SEQ ID NO:1298, SEQ ID NO:1299 through SEQ ID NO:1308, SEQ ID NO:1309 through SEQ ID NO:1318, SEQ ID NO:1319 through SEQ ID NO:1328, SEQ ID NO:1329 through SEQ ID NO:1338, SEQ ID NO:1339 through SEQ ID NO:1348, SEQ ID NO:1349 through SEQ ID NO:1358, SEQ ID NO:1359 through SEQ ID NO:1368, SEQ ID NO:1369 through SEQ ID NO:1378, SEQ ID NO:1379 through SEQ ID NO:1388, SEQ ID NO:1389 through SEQ ID NO:1398, SEQ ID NO:1399 through SEQ ID NO:1408, SEQ ID NO:1409 through SEQ ID NO:1418, SEQ ID NO:1419 through SEQ ID NO:1428, SEQ ID NO:1429 through SEQ ID NO:1438, SEQ ID NO:1439 through SEQ ID NO:1448, SEQ ID NO:1449 through SEQ ID NO:1458, SEQ ID NO:1459 through SEQ ID NO:1968, SEQ ID NO:1469 through SEQ ID NO:1478, SEQ ID NO:1479 through SEQ ID NO:1488, SEQ ID NO:1489 through SEQ ID NO:1498, SEQ ID NO:1499 through SEQ ID NO:1508, SEQ ID NO:1509 through SEQ ID NO:1518, SEQ ID NO:1519 through SEQ ID NO:1528, SEQ ID NO:1529 through SEQ ID NO:1538, SEQ ID NO:1539 through SEQ ID NO:1548, SEQ ID NO:1549 through SEQ ID NO:1558, SEQ ID NO:1559 through SEQ ID NO:1568, SEQ ID NO:1569 through SEQ ID NO:1578, SEQ ID NO:1579 through SEQ ID NO:1588, SEQ ID NO:1589 through SEQ ID NO:1598, SEQ ID NO:1599 through SEQ ID NO:1608, SEQ ID NO:1609 through SEQ ID NO:1618, SEQ ID NO:1619 through SEQ ID NO:1628, SEQ ID NO:1629 through SEQ ID NO:1638, SEQ ID NO:1639 through SEQ ID NO:1648, SEQ ID NO:1649 through SEQ ID NO:1658, SEQ ID NO:1659 through SEQ ID NO:1668, SEQ ID NO:1669 through SEQ ID NO:1678, SEQ ID NO:1679 through SEQ ID NO:1688, SEQ ID NO:1689 through SEQ ID NO:1698, SEQ ID NO:1699 through SEQ ID NO:1708, SEQ ID NO:1709 through SEQ ID NO:1718, SEQ ID NO:1719 through SEQ ID NO:1728, SEQ ID NO:1729 through SEQ ID NO:1738, SEQ ID NO:1739 through SEQ ID NO:1748, SEQ ID NO:1749 through SEQ ID NO:1758, SEQ ID NO:1759 through SEQ ID NO:1768, SEQ ID NO:1769 through SEQ ID NO:1778, SEQ ID NO:1779 through SEQ ID NO:1788, SEQ ID NO:1789 through SEQ ID NO:1798, SEQ ID NO:1799 through SEQ ID NO:1808, SEQ ID NO:1809 through SEQ ID NO:1818, SEQ ID NO:1819 through SEQ ID NO:1828, SEQ ID NO:1829 through SEQ ID NO:1838, SEQ ID NO:1839 through SEQ ID NO:1848, SEQ ID NO:1849 through SEQ ID NO:1858, SEQ ID NO:1859 through SEQ ID NO:1868, SEQ ID NO:1869 through SEQ ID NO:1878, SEQ ID NO:1879 through SEQ ID NO:1888, SEQ ID NO:1889 through SEQ ID NO:1898, SEQ ID NO:1899 through SEQ ID NO:1908, SEQ ID NO:1909 through SEQ ID NO:1918, SEQ ID NO:1919 through SEQ ID NO:1928, SEQ ID NO:1929 through SEQ ID NO:1938, SEQ ID NO:1939 through SEQ ID NO:1948, SEQ ID NO:1949 through SEQ ID NO:1958, SEQ ID NO:1959 through SEQ ID NO:1968, SEQ ID NO:1969 through SEQ ID NO:1978, SEQ ID NO:1979 through SEQ ID NO:1988, SEQ ID NO:1989 through SEQ ID NO:1998, SEQ ID NO:1999 through SEQ ID NO:2008, SEQ ID NO:2009 through SEQ ID NO:2018, SEQ ID NO:2019 through SEQ ID NO:2028, SEQ ID NO:2029 through SEQ ID NO:2038, SEQ ID NO:2039 through SEQ ID NO:2048, SEQ ID NO:2049 through SEQ ID NO:2058, SEQ ID NO:2059 through SEQ ID NO:2068, SEQ ID NO:2069 through SEQ ID NO:2078, SEQ ID NO:2079 through SEQ ID NO:2088, SEQ ID NO:2089 through SEQ ID NO:2098, SEQ ID NO:2099 through SEQ ID NO:2108, SEQ ID NO:2109 through SEQ ID NO:2118, SEQ ID NO:2119 through SEQ ID NO:2128, SEQ ID NO:2129 through SEQ ID NO:2138, SEQ ID NO:2139 through SEQ ID NO:2148, SEQ ID NO:2149 through SEQ ID NO:2158, SEQ ID NO:2159 through SEQ ID NO:2168, SEQ ID NO:2169 through SEQ ID NO:2178, SEQ ID NO:2179 through SEQ ID NO:2188, SEQ ID NO:2189 through SEQ ID NO:2198, SEQ ID NO:2199 through SEQ ID NO:2208, SEQ ID NO:2209 through SEQ ID NO:2218, SEQ ID NO:2219 through SEQ ID NO:2228, SEQ ID NO:2229 through SEQ ID NO:2238, SEQ ID NO:2239 through SEQ ID NO:2248, SEQ ID NO:2249 through SEQ ID NO:2258, SEQ ID NO:2259 through SEQ ID NO:2268, SEQ ID NO:2269 through SEQ ID NO:2278, SEQ ID NO:2279 through SEQ ID NO:2288, SEQ ID NO:2289 through SEQ ID NO:2298, SEQ ID NO:2299 through SEQ ID NO:2308, SEQ ID NO:2309 through SEQ ID NO:2318, SEQ ID NO:2319 through SEQ ID NO:2328, SEQ ID NO:2329 through SEQ ID NO:2338, SEQ ID NO:2339 through SEQ ID NO:2348, SEQ ID NO:2349 through SEQ ID NO:2358, SEQ ID NO:2359 through SEQ ID NO:2368, SEQ ID NO:2369 through SEQ ID NO:2378, SEQ ID NO:2379 through SEQ ID NO:2388, SEQ ID NO:2389 through SEQ ID NO:2398, SEQ ID NO:2399 through SEQ ID NO:2408, SEQ ID NO:2409 through SEQ ID NO:2418, SEQ ID NO:2419 through SEQ ID NO:2428, SEQ ID NO:2429 through SEQ ID NO:2438, SEQ ID NO:2439 through SEQ ID NO:2448, SEQ ID NO:2449 through SEQ ID NO:2458, SEQ ID NO:2459 through SEQ ID NO:2468, SEQ ID NO:2469 through SEQ ID NO:2478, SEQ ID NO:2479 through SEQ ID NO:2488, SEQ ID NO:2489 through SEQ ID NO:2498, SEQ ID NO:2499 through SEQ ID NO:2508, SEQ ID NO:2509 through SEQ ID NO:2518, SEQ ID NO:2519 through SEQ ID NO:2532 of the attached sequence listing.

### BRIEF DESCRIPTION OF THE DRAWINGS AND THE APPENDICES

[0063] The invention may be understood by reference to the following description taken in conjunction with the accompanying drawings, in which like reference numerals identify like elements, and in which:

[0064] FIG. 1 illustrates a schematic outline of the microarray chip technology approach used to identify the cDNA targets of the present invention as described Section 5.1;

[0065] FIG. 2 illustrates a schematic outline of the general protcol for in vitro whole gene CD8 T cell priming procedure used to generate antigen-specific lines and to identify clones of interest;

[0066] FIG. 3 illustrates a schematic outline of the general protcol for in vitro whole gene CD4 T cell priming procedure used to generate antigen-specific lines and to identify clones of interest;

[0067] FIG. 4 illustrates the results of Coronin 1A mRNA expression in lymphoma patients and normal tissues as determined by real-time PCR.

[0068] FIG. 5 illustrates the results of TCL extended normal panel.

### DESCRIPTION OF ILLUSTRATIVE EMBODIMENTS

[0069] In order that the invention herein described may be more fully understood, the following description of various illustrative embodiments is set forth.

[0070] The present invention is generally directed to compositions and methods for the immunotherapy and diagnosis of Hematological malignancies, such as leukemias and lymphomas of the Hodgkin's and non-Hodgkin's type.

[0071] Methods of Nucleic Acid Delivery and DNA Transfection

[0072] In certain embodiments, it is contemplated that one or more RNA or DNA and/or substituted polynucleotide compositions disclosed herein will be used to transfect an appropriate host cell. Technology for introduction of RNAs and DNAs, and vectors comprising them into suitable host cells is well known to those of skill in the art. In particular, such polynucleotides may be used to genetically transform one or more host cells, when therapeutic administration of one or more active peptides, compounds or vaccines is achieved through the expression of one or more polynucleotide constructs that encode one or more therapeutic compounds of interest.

[0073] A variety of means for introducing polynucleotides and/or polypeptides into suitable target cells is known to those of skill in the art. For example, when polynucleotides are contemplated for delivery to cells, several non-viral methods for the transfer of expression constructs into cultured mammalian cells are available to the skilled artisan for his use. These include, for example, calcium phosphate precipitation (Graham and Van Der Eb, 1973; Chen and Okayama, 1987; Rippe et al., 1990); DEAE-dextran precipitation (Gopal, 1985); electroporation (Wong and Neumann, 1982; Fromm et al., 1985; Tur-Kaspa et al., 1986; Potter et al., 1984; Suzuki et al., 1998; Vanbever et al., 1998), direct microinjection (Capecchi, 1980; Harland and Weintraub, 1985), DNA-loaded liposomes (Nicolau and Sene, 1982; Fraley et al., 1979; Takakura, 1998) and lipofectamine-DNA complexes, cell sonication (Fechheimer et al., 1987), gene bombardment using high velocity microprojectiles (Yang et al., 1990; Klein et al., 1992), and receptor-mediated transfection (Curiel et al., 1991; Wagner et al., 1992; Wu and Wu, 1987; Wu and Wu, 1988). Some of these techniques may be successfully adapted for in vivo or ex vivo use.

[0074] A bacterial cell, a yeast cell, or an animal cell transformed with one or more of the disclosed expression vectors represent an important aspect of the present invention. Such transformed host cells are often desirable for use in the expression of the various DNA gene constructs disclosed herein. In some aspects of the invention, it is often desirable to modulate, regulate, or otherwise control the expression of the gene segments disclosed herein. Such methods are routine to those of skill in the molecular genetic arts. Typically, when increased or over-expression of a particular gene is desired, various manipulations may be employed for enhancing the expression of the messenger RNA, particularly by using an active promoter, and in particular, a tissue-specific promoter such as those disclosed herein, as well as by employing sequences, which enhance the stability of the messenger RNA in the particular transformed host cell.

[0075] Typically, the initiation and translational termination region will involve stop codon(s), a terminator region, and optionally, a polyadenylation signal. In the direction of transcription, namely in the 5′ to 3′ direction of the coding or sense sequence, the construct will involve the transcriptional regulatory region, if any, and the promoter, where the regulatory region may be either 5′ or 3′ of the promoter, the ribosomal binding site, the initiation codon, the structural gene having an open reading frame in phase with the initiation codon, the stop codon(s), the polyadenylation signal sequence, if any, and the terminator region. This sequence as a double strand may be used by itself for transformation of a microorganism or eukaryotic host, but will usually be included with a DNA sequence involving a marker, where the second DNA sequence may be joined to the expression construct during introduction of the DNA into the host.

[0076] Where no functional replication system is present, the construct will also preferably include a sequence of at least about 30 or about 40 or about 50 basepairs (bp) or so, preferably at least about 60, about 70, about 80, or about 90 to about 100 or so bp, and usually not more than about 500 to about 1000 or so bp of a sequence homologous with a sequence in the host. In this way, the probability of legitimate recombination is enhanced, so that the gene will be integrated into the host and stably maintained by the host. Desirably, the regulatory regions of the expression construct will be in close proximity to (and also operably positioned relative to) the selected therapeutic gene providing for complementation as well as the gene providing for the competitive advantage. Therefore, in the event that the therapeutic gene is lost, the resulting organism will be likely to also lose the gene providing for the competitive advantage, so that it will be unable to compete in the environment with the gene retaining the intact construct.

[0077] The selected therapeutic gene can be introduced between the transcriptional and translational initiation region and the transcriptional and translational termination region, so as to be under the regulatory control of the initiation region. This construct may be included in a plasmid, which will include at least one replication system, but may include more than one, where one replication system is employed for cloning during the development of the plasmid and the second replication system is necessary for functioning in the ultimate host, in this case, a mammalian host cell. In addition, one or more markers may be present, which have been described previously. Where integration is desired, the plasmid will desirably include a sequence homologous with the host genome.

[0078] Genes or other nucleic acid segments, as disclosed herein, can be inserted into host cells using a variety of techniques that are well known in the art. Five general methods for delivering a nucleic segment into cells have been described: (1) chemical methods (Graham and VanDerEb, 1973); (2) physical methods such as microinjection (Capecchi, 1980), electroporation (U.S. Pat. No. 5,472,869; Wong and Neumann, 1982; Fromm et al., 1985), microprojectile bombardment (U.S. Pat. No. 5,874,265, specifically incorporated herein by reference in its entirety), “gene gun” (Yang et al., 1990); (3) viral vectors (Eglitis and Anderson, 1988); (4) receptor-mediated mechanisms (Curiel et al., 1991; Wagner et al., 1992); and (5) bacterial-mediated transformation.

[0079] Hematological Malignancy Related-Specific Antibodies and Antigen-Binding Fragments Thereof

[0080] The present invention further provides antibodies and antigen-binding fragments thereof, that specifically bind to (or are immunospecific for) at least a first peptide or peptide variant as disclosed herein. As used herein, an antibody or an antigen-binding fragment is said to “specifically bind” to a peptide if it reacts at a detectable level (within, for example, an ELISA) with the peptide, and does not react detectably with unrelated peptides or proteins under similar conditions. As used herein, “binding” refers to a noncovalent association between two separate molecules such that a “complex” is formed. The ability to bind may be evaluated by, for example, determining a binding constant for the formation of the complex. The binding constant is the value obtained when the concentration of the complex is divided by the product of the component concentrations. In the context of the present invention, in general, two compounds are said to “bind” when the binding constant for complex formation exceeds about 10³ L/mol. The binding constant maybe determined using methods well known in the art.

[0081] Any agent that satisfies the above requirements may be a binding agent. In illustrative embodiments, a binding agent is an antibody or an antigen-binding fragment thereof. Such antibodies may be prepared by any of a variety of techniques known to those of ordinary skill in the art (Harlow and Lane, 1988). In general, antibodies can be produced by cell culture techniques, including the generation of monoclonal antibodies as described herein, or via transfection of antibody genes into suitable bacterial or mammalian cell hosts, in order to allow for the production of recombinant antibodies. In one technique, an immunogen comprising the peptide is initially injected into any of a wide variety of mammals (e.g., mice, rats, rabbits, sheep or goats). In this step, the peptides of this invention may serve as the immunogen without modification. Alternatively, particularly for relatively short peptides, a superior immune response may be elicited if the peptide is joined to a carrier protein, such as bovine serum albumin or keyhole limpet hemocyanin. The immunogen is injected into the animal host, preferably according to a predetermined schedule incorporating one or more booster immunizations, and the animals are bled periodically. Polyclonal antibodies specific for the peptide may then be purified from such antisera by, for example, affinity chromatography using the peptide coupled to a suitable solid support.

[0082] Monoclonal antibodies specific for the antigenic peptide of interest may be prepared, for example, using the technique of Kohler and Milstein (1976) and improvements thereto. Briefly, these methods involve the preparation of immortal cell lines capable of producing antibodies having the desired specificity (i.e., reactivity with the peptide of interest). Such cell lines may be produced, for example, from spleen cells obtained from an animal immunized as described above. The spleen cells are then immortalized by, for example, fusion with a myeloma cell fusion partner, preferably one that is syngeneic with the immunized animal. A variety of fusion techniques may be employed. For example, the spleen cells and myeloma cells may be combined with a nonionic detergent for a few minutes and then plated at low density on a selective medium that supports the growth of hybrid cells, but not myeloma cells. A preferred selection technique uses HAT (hypoxanthine, aminopterin, thymidine) selection. After a sufficient time, usually about 1 to 2 weeks, colonies of hybrids are observed. Single colonies are selected and their culture supernatants tested for binding activity against the peptide. Hybridomas having high reactivity and specificity are preferred.

[0083] Monoclonal antibodies may be isolated from the supernatants of growing hybridoma colonies. In addition, various techniques may be employed to enhance the yield, such as injection of the hybridoma cell line into the peritoneal cavity of a suitable vertebrate host, such as a mouse. Monoclonal antibodies may then be harvested from the ascites fluid or the blood. Contaminants may be removed from the antibodies by conventional techniques, such as chromatography, gel filtration, precipitation, and extraction. The peptides of this invention may be used in the purification process in, for example, an affinity chromatography step.

[0084] Within certain embodiments, the use of antigen-binding fragments of antibodies may be preferred. Such fragments include Fab fragments, which may be prepared using standard techniques. Briefly, immunoglobulins may be purified from rabbit serum by affinity chromatography on Protein A bead columns (Harlow and Lane, 1988) and digested by papain to yield Fab and Fc fragments. The Fab and Fc fragments may be separated by affinity chromatography on Protein A bead columns.

[0085] Monoclonal antibodies and fragments thereof may be coupled to one or more therapeutic agents. Suitable agents in this regard include radioactive tracers and chemotherapeutic agents, which may be used, for example, to purge autologous bone marrow in vitro). Representative therapeutic agents include radionuclides, differentiation inducers, drugs, toxins, and derivatives thereof. Preferred radionuclides include ⁹⁰Y, ¹²³I, ¹²⁵I, ¹³¹I, ¹⁸⁶Re, ¹⁸⁸Re, ²¹¹At, and ²¹²Bi. Preferred drugs include methotrexate, and pyrimidine and purine analogs. Preferred differentiation inducers include phorbol esters and butyric acid. Preferred toxins include ricin, abrin, diptheria toxin, cholera toxin, gelonin, Pseudomonas exotoxin, Shigella toxin, and pokeweed antiviral protein. For diagnostic purposes, coupling of radioactive agents may be used to facilitate tracing of metastases or to determine the location of hematological malignancy related-positive tumors.

[0086] A therapeutic agent may be coupled (e.g., covalently bonded) to a suitable monoclonal antibody either directly or indirectly (e.g., via a linker group). A direct reaction between an agent and an antibody is possible when each possesses a substituent capable of reacting with the other. For example, a nucleophilic group, such as an amino or sulfhydryl group, on one may be capable of reacting with a carbonyl-containing group, such as an anhydride or an acid halide, or with an alkyl group containing a good leaving group (e.g., a halide) on the other.

[0087] Alternatively, it may be desirable to couple a therapeutic agent and an antibody via a linker group. A linker group can function as a spacer to distance an antibody from an agent in order to avoid interference with binding capabilities. A linker group can also serve to increase the chemical reactivity of a substituent on an agent or an antibody, and thus increase the coupling efficiency. An increase in chemical reactivity may also facilitate the use of agents, or functional groups on agents, which otherwise would not be possible.

[0088] It will be evident to those skilled in the art that a variety of bifunctional or polyfunctional reagents, both homo- and hetero-functional (such as those described in the catalog of the Pierce Chemical Co., Rockford, Ill.), may be employed as the linker group. Coupling may be affected, for example, through amino groups, carboxyl groups, and sulfhydryl groups or oxidized carbohydrate residues. There are numerous references describing such methodology, e.g., U.S. Pat. No. 4,671,958.

[0089] Where a therapeutic agent is more potent when free from the antibody portion of the immunoconjugates of the present invention, it may be desirable to use a linker group that is cleavable during or upon internalization into a cell. A number of different cleavable linker groups have been described. The mechanisms for the intracellular release of an agent from these linker groups include cleavage by reduction of a disulfide bond (U.S. Pat. No. 4,489,710), by irradiation of a photolabile bond (U.S. Pat. No. 4,625,014), by hydrolysis of derivatized amino acid side chains (U.S. Pat. No. 4,638,045), by serum complement-mediated hydrolysis (U.S. Pat. No. 4,671,958), and acid-catalyzed hydrolysis (U.S. Pat. No. 4,569,789).

[0090] It may be desirable to couple more than one agent to an antibody. In one embodiment, multiple molecules of an agent are coupled to one antibody molecule. In another embodiment, more than one type of agent may be coupled to one antibody. Regardless of the particular embodiment, immunoconjugates with more than one agent may be prepared in a variety of ways. For example, more than one agent may be coupled directly to an antibody molecule, or linkers that provide multiple sites for attachment can be used. Alternatively, a carrier can be used. A carrier may bear the agents in a variety of ways, including covalent bonding either directly or via a linker group. Suitable carriers include proteins such as albumins (U.S. Pat. No. 4,507,234), peptides and polysaccharides such as aminodextran (U.S. Pat. No. 4,699,784). A carrier may also bear an agent by noncovalent bonding or by encapsulation, such as within a liposome vesicle (U.S. Pat. No. 4,429,008 and U.S. Pat. No. 4,873,088). Carriers specific for radionuclide agents include radiohalogenated small molecules and chelating compounds. For example, U.S. Pat. No. 4,735,792 discloses representative radiohalogenated small molecules and their synthesis. A radionuclide chelate may be formed from chelating compounds that include those containing nitrogen and sulfur atoms as the donor atoms for binding the metal, or metal oxide, radionuclide. For example, U.S. Pat. No. 4,673,562 discloses representative chelating compounds and their synthesis.

[0091] A variety of routes of administration for the antibodies and immunoconjugates may be used. Typically, administration will be intravenous, intramuscular, subcutaneous or in the bed of a resected tumor. It will be evident that the precise dose of the antibody/immunoconjugate will vary depending upon the antibody used, the antigen density on the tumor, and the rate of clearance of the antibody.

[0092] Also provided herein are anti-idiotypic antibodies that mimic an immunogenic portion of hematological malignancy related. Such antibodies may be raised against an antibody, or an antigen-binding fragment thereof, that specifically binds to an immunogenic portion of hematological malignancy related, using well-known techniques. Anti-idiotypic antibodies that mimic an immunogenic portion of hematological malignancy related are those antibodies that bind to an antibody, or antigen-binding fragment thereof, that specifically binds to an immunogenic portion of hematological malignancy related, as described herein.

[0093] Irrespective of the source of the original hematological malignancy related peptide-specific antibody, the intact antibody, antibody multimers, or any one of a variety of functional, antigen-binding regions of the antibody may be used in the present invention. Exemplary functional regions include scFv, Fv, Fab′, Fab and F(ab′)₂ fragments of the hematological malignancy related peptide-specific antibodies. Techniques for preparing such constructs are well known to those in the art and are further exemplified herein.

[0094] The choice of antibody construct may be influenced by various factors. For example, prolonged half-life can result from the active readsorption of intact antibodies within the kidney, a property of the Fc piece of immunoglobulin. IgG based antibodies, therefore, are expected to exhibit slower blood clearance than their Fab′ counterparts. However, Fab′ fragment-based compositions will generally exhibit better tissue penetrating capability.

[0095] Antibody fragments can be obtained by proteolysis of the whole immunoglobulin by the non-specific thiol protease, papain. Papain digestion yields two identical antigen-binding fragments, termed “Fab fragments,” each with a single antigen-binding site, and a residual “Fc fragment.”

[0096] Papain should first be activated by reducing the sulphydryl group in the active site with cysteine, 2-mercaptoethanol or dithiothreitol. Heavy metals in the stock enzyme should be removed by chelation with EDTA (2 mM) to ensure maximum enzyme activity. Enzyme and substrate are normally mixed together in the ratio of 1:100 by weight. After incubation, the reaction can be stopped by irreversible alkylation of the thiol group with iodoacetamide or simply by dialysis. The completeness of the digestion should be monitored by SDS-PAGE and the various fractions separated by Protein A-Sepharose or ion exchange chromatography.

[0097] The usual procedure for preparation of F(ab′)₂ fragments from IgG of rabbit and human origin is limited proteolysis by the enzyme pepsin. The conditions, 100×antibody excess wt./wt. in acetate buffer at pH 4.5, 37° C., suggest that antibody is cleaved at the C-terminal side of the inter-heavy-chain disulfide bond. Rates of digestion of mouse IgG may vary with subclass and it may be difficult to obtain high yields of active F(ab′)₂ fragments without some undigested or completely degraded IgG. In particular, IgG_{2b} is highly susceptible to complete degradation. The other subclasses require different incubation conditions to produce optimal results, all of which is known in the art.

[0098] Pepsin treatment of intact antibodies yields an F(ab′)₂ fragment that has two antigen-combining sites and is still capable of cross-linking antigen. Digestion of rat IgG by pepsin requires conditions including dialysis in 0.1 M acetate buffer, pH 4.5, and then incubation for four hrs with 1% wt./wt. pepsin; IgG₁ and IgG₂ₐ digestion is improved if first dialyzed against 0.1 M formate buffer, pH 2.8, at 4° C., for 16 hrs followed by acetate buffer. IgG_{2b} gives more consistent results with incubation in staphylococcal V8 protease (3% wt./wt.) in 0.1 M sodium phosphate buffer, pH 7.8, for four hrs at 37° C.

[0099] A Fab fragment also contains the constant domain of the light chain and the first constant domain (CH1) of the heavy chain. Fab′ fragments differ from Fab fragments by the addition of a few residues at the carboxyl terminus of the heavy chain CH1 domain including one or more cysteine(s) from the antibody hinge region. F(ab′)₂ antibody fragments were originally produced as pairs of Fab′ fragments that have hinge cysteines between them. Other chemical couplings of antibody fragments are also known.

[0100] The term “variable,” as used herein in reference to antibodies, means that certain portions of the variable domains differ extensively in sequence among antibodies, and are used in the binding and specificity of each particular antibody to its particular antigen. However, the variability is not evenly distributed throughout the variable domains of antibodies. It is concentrated in three segments termed “hypervariable regions,” both in the light chain and the heavy chain variable domains.

[0101] The more highly conserved portions of variable domains are called the framework region (FR). The variable domains of native heavy and light chains each comprise four FRs (FR1, FR2, FR3 and FR4, respectively), largely adopting a β-sheet configuration, connected by three hypervariable regions, which form loops connecting, and in some cases, forming part of, the β-sheet structure.

[0102] The hypervariable regions in each chain are held together in close proximity by the FRs and, with the hypervariable regions from the other chain, contribute to the formation of the antigen-binding site of antibodies (Kabat et al., 1991, specifically incorporated herein by reference). The constant domains are not involved directly in binding an antibody to an antigen, but exhibit various effector functions, such as participation of the antibody in antibody-dependent cellular toxicity.

[0103] The term “hypervariable region,” as used herein, refers to the amino acid residues of an antibody that are responsible for antigen-binding. The hypervariable region comprises amino acid residues from a “complementarity determining region” or “CDR” (i.e. residues 24-34 (L1), 50-56 (L2) and 89-97 (L3) in the light chain variable domain and 31-35 (H1), 50-56 (H2) and 95-102 (H3) in the heavy chain variable domain (Kabat et al., 1991, specifically incorporated herein by reference) and/or those residues from a “hypervariable loop” (i.e., residues 26-32 (L1), 50-52(L2) and 91-96 (L3) in the light chain variable domain and 26-32 (H1), 53-55 (H2) and 96-101 (H3) in the heavy chain variable domain). “Framework” or “FR” residues are those variable domain residues other than the hypervariable region residues as herein defined.

[0104] An “Fv” fragment is the minimum antibody fragment that contains a complete antigen-recognition and binding site. This region consists of a dimer of one heavy chain and one light chain variable domain in tight, con-covalent association. It is in this configuration that three hypervariable regions of each variable domain interact to define an antigen-binding site on the surface of the V_{H}-V_{L} dimer. Collectively, six hypervariable regions confer antigen-binding specificity to the antibody. However, even a single variable domain (or half of an Fv comprising only three hypervariable regions specific for an antigen) has the ability to recognize and bind antigen, although at a lower affinity than the entire binding site.

[0105] “Single-chain Fv” or “sFv” antibody fragments comprise the V_{H} and V_{L} domains of antibody, wherein these domains are present in a single polypeptide chain. Generally, the Fv polypeptide further comprises a polypeptide linker between the V_{H} and V_{L} domains that enables the sFv to form the desired structure for antigen binding.

[0106] “Diabodies” are small antibody fragments with two antigen-binding sites, which fragments comprise a heavy chain variable domain (V_{H}) connected to a light chain variable domain (V_{L}) in the same polypeptide chain (V_{H}-V_{L}). By using a linker that is too short to allow pairing between the two domains on the same chain, the domains are forced to pair with the complementary domains of another chain and create two antigen-binding sites. Diabodies are described in European Pat. Appl. No. EP 404,097 and Intl. Pat. Appl. Publ. No. WO 93/11161, each specifically incorporated herein by reference. “Linear antibodies”, which can be bispecific or monospecific, comprise a pair of tandem Fd segments (V_{H}-C_{H}1-V_{H}-C_{H}1) that form a pair of antigen binding regions, as described in Zapata et al. (1995), specifically incorporated herein by reference.

[0107] Other types of variants are antibodies with improved biological properties relative to the parent antibody from which they are generated. Such variants, or second-generation compounds, are typically substitutional variants involving one or more substituted hypervariable region residues of a parent antibody. A convenient way for generating such substitutional variants is affinity maturation using phage display.

[0108] In affinity maturation using phage display, several hypervariable region sites (e.g., 6 to 7 sites) are mutated to generate all possible amino substitutions at each site. The antibody variants thus generated are displayed in a monovalent fashion from filamentous phage particles as fusions to the gene III product of M13 packaged within each particle. The phage-displayed variants are then screened for their biological activity (e.g., binding affinity) as herein disclosed. In order to identify candidate hypervariable region sites for modification, alanine-scanning mutagenesis can be performed on hypervariable region residues identified as contributing significantly to antigen binding.

[0109] Alternatively, or in addition, the crystal structure of the antigen-antibody complex be delineated and analyzed to identify contact points between the antibody and target. Such contact residues and neighboring residues are candidates for substitution. Once such variants are generated, the panel of variants is subjected to screening, and antibodies with analogues but different or even superior properties in one or more relevant assays are selected for further development.

[0110] In using a Fab′ or antigen binding fragment of an antibody, with the attendant benefits on tissue penetration, one may derive additional advantages from modifying the fragment to increase its half-life. A variety of techniques may be employed, such as manipulation or modification of the antibody molecule itself, and also conjugation to inert carriers. Any conjugation for the sole purpose of increasing half-life, rather than to deliver an agent to a target, should be approached carefully in that Fab′ and other fragments are chosen to penetrate tissues. Nonetheless, conjugation to non-protein polymers, such PEG and the like, is contemplated.

[0111] Modifications other than conjugation are therefore based upon modifying the structure of the antibody fragment to render it more stable, and/or to reduce the rate of catabolism in the body. One mechanism for such modifications is the use of D-amino acids in place of L-amino acids. Those of ordinary skill in the art will understand that the introduction of such modifications needs to be followed by rigorous testing of the resultant molecule to ensure that it still retains the desired biological properties. Further stabilizing modifications include the use of the addition of stabilizing moieties to either the N-terminal or the C-terminal, or both, which is generally used to prolong the half-life of biological molecules. By way of example only, one may wish to modify the termini by acylation or amination.

[0112] Moderate conjugation-type modifications for use with the present invention include incorporating a salvage receptor binding epitope into the antibody fragment. Techniques for achieving this include mutation of the appropriate region of the antibody fragment or incorporating the epitope as a peptide tag that is attached to the antibody fragment. Intl. Pat. Appl. Publ. No. WO 96/32478 is specifically incorporated herein by reference for the purposes of further exemplifying such technology. Salvage receptor binding epitopes are typically regions of three or more amino acids from one or two lops of the Fc domain that are transferred to the analogous position on the antibody fragment. The salvage receptor-binding epitopes disclosed in Intl. Pat. Appl. Publ. No. WO 98/45331 are incorporated herein by reference for use with the present invention.

[0113] T Cell Compositions Specific for Hematological Malignancy-Related Peptides

[0114] Immunotherapeutic compositions may also, or alternatively, comprise T cells specific for hematological malignancy related. Such cells may generally be prepared in vitro or ex vivo, using standard procedures. For example, T cells may be present within (or isolated from) bone marrow, peripheral blood or a fraction of bone marrow or peripheral blood of a mammal, such as a patient, using a commercially available cell separation system, such as the Isolex™ System, available from Nexell Therapeutics, Inc. (Irvine, Calif.; see also U.S. Pat. Nos. 5,240,856; 5,215,926; Intl. Pat. Appl. Publ. No. WO 89/06280; Intl. Pat. Appl. Publ. No. WO 91/16116 and Intl. Pat. Appl. Publ. No. WO 92/07243). Alternatively, T cells may be derived from related or unrelated humans, non-human mammals, cell lines or cultures.

[0115] T cells may be stimulated with hematological malignancy related peptide, polynucleotide encoding a hematological malignancy related peptide and/or an antigen-presenting cell (APC) that expresses a hematological malignancy related peptide. Such stimulation is performed under conditions and for a time sufficient to permit the generation of T cells that are specific for the hematological malignancy related peptide. Preferably, a hematological malignancy related peptide or polynucleotide is present within a delivery vehicle, such as a microsphere, to facilitate the generation of antigen-specific T cells. Briefly, T cells, which may be isolated from a patient or a related or unrelated donor by routine techniques (such as by Ficoll/Hypaque® density gradient centrifugation of peripheral blood lymphocytes), are incubated with hematological malignancy related peptide. For example, T cells may be incubated in vitro for 2-9 days (typically 4 days) at 37° C. with hematological malignancy related peptide (e.g., 5 to 25 μg/ml) or cells synthesizing a comparable amount of hematological malignancy related peptide. It may be desirable to incubate a separate aliquot of a T cell sample in the absence of hematological malignancy related peptide to serve as a control.

[0116] T cells are considered to be specific for a hematological malignancy related peptide if the T cells kill target cells coated with a hematological malignancy related peptide or expressing a gene encoding such a peptide. T cell specificity may be evaluated using any of a variety of standard techniques. For example, within a chromium release assay or proliferation assay, a stimulation index of more than two fold increase in lysis and/or proliferation, compared to negative controls, indicates T cell specificity. Such assays may be performed, for example, as described in Chen et al. (1994). Alternatively, detection of the proliferation of T cells may be accomplished by a variety of known techniques. For example, T cell proliferation can be detected by measuring an increased rate of DNA synthesis (e.g., by pulse-labeling cultures of T cells with tritiated thymidine and measuring the amount of tritiated thymidine incorporated into DNA). Other ways to detect T cell proliferation include measuring increases in interleukin-2 (IL-2) production, Ca²⁺ flux, or dye uptake, such as 3-(4,5-dimethylthiazol-2-yl)-2,5-diphenyl-tetrazolium. Alternatively, synthesis of lymphokines (such as interferon-gamma) can be measured or the relative number of T cells that can respond to a hematological malignancy related peptide may be quantified. Contact with a hematological malignancy related peptide (200 ng/ml-100 μg/ml, preferably 100 ng/ml-25 μg/ml) for 3-7 days should result in at least a two-fold increase in proliferation of the T cells and/or contact as described above for 2-3 hrs should result in activation of the T cells, as measured using standard cytokine assays in which a two-fold increase in the level of cytokine release (e.g., TNF or IFN-γ) is indicative of T cell activation (Coligan et al., 1998). hematological malignancy related specific T cells may be expanded using standard techniques. Within preferred embodiments, the T cells are derived from a patient or a related or unrelated donor and are administered to the patient following stimulation and expansion.

[0117] T cells that have been activated in response to a hematological malignancy related peptide, polynucleotide or hematological malignancy related-expressing APC may be CD4⁺ and/or CD8⁺. Specific activation of CD4⁺ or CD8⁺ T cells may be detected in a variety of ways. Methods for detecting specific T cell activation include detecting the proliferation of T cells, the production of cytokines (e.g., lymphokines), or the generation of cytolytic activity (i.e., generation of cytotoxic T cells specific for hematological malignancy related). For CD4⁺ T cells, a preferred method for detecting specific T cell activation is the detection of the proliferation of T cells. For CD8⁺ T cells, a preferred method for detecting specific T cell activation is the detection of the generation of cytolytic activity.

[0118] For therapeutic purposes, CD4⁺ or CD8⁺ T cells that proliferate in response to the hematological malignancy related peptide, polynucleotide or APC can be expanded in number either in vitro or in vivo. Proliferation of such T cells in vitro may be accomplished in a variety of ways. For example, the T cells can be re-exposed to hematological malignancy related peptide, with or without the addition of T cell growth factors, such as interleukin-2, and/or stimulator cells that synthesize a hematological malignancy related peptide. The addition of stimulator cells is preferred where generating CD8⁺ T cell responses. T cells can be grown to large numbers in vitro with retention of specificity in response to intermittent restimulation with hematological malignancy related peptide. Briefly, for the primary in vitro stimulation (IVS), large numbers of lymphocytes (e.g., greater than 4×10⁷) may be placed in flasks with media containing human serum. hematological malignancy related peptide (e.g., peptide at 10 μg/ml) may be added directly, along with tetanus toxoid (e.g., 5 μg/ml). The flasks may then be incubated (e.g., 37° C. for 7 days). For a second IVS, T cells are then harvested and placed in new flasks with 2-3×10⁷ irradiated peripheral blood mononuclear cells. hematological malignancy related peptide (e.g., 10 μg/ml) is added directly. The flasks are incubated at 37° C. for 7 days. On day 2 and day 4 after the second IVS, 2-5 units of interleukin-2 (IL-2) may be added. For a third IVS, the T cells may be placed in wells and stimulated with the individual's own EBV transformed B cells coated with the peptide. IL-2 may be added on days 2 and 4 of each cycle. As soon as the cells are shown to be specific cytotoxic T cells, they may be expanded using a 10-day stimulation cycle with higher IL-2 (20 units) on days 2, 4 and 6.

[0119] Alternatively, one or more T cells that proliferate in the presence of hematological malignancy related peptide can be expanded in number by cloning. Methods for cloning cells are well known in the art, and include limiting dilution. Responder T cells may be purified from the peripheral blood of sensitized patients by density gradient centrifugation and sheep red cell rosetting and established in culture by stimulating with the nominal antigen in the presence of irradiated autologous filler cells. In order to generate CD4⁺ T cell lines, hematological malignancy related peptide is used as the antigenic stimulus and autologous peripheral blood lymphocytes (PBL) or lymphoblastoid cell lines (LCL) immortalized by infection with Epstein Barr virus are used as antigen-presenting cells. In order to generate CD8⁺ T cell lines, autologous antigen-presenting cells transfected with an expression vector that produces hematological malignancy related peptide may be used as stimulator cells. Established T cell lines may be cloned 2-4 days following antigen stimulation by plating stimulated T cells at a frequency of 0.5 cells per well in 96-well flat-bottom plates with 1×10⁶ irradiated PBL or LCL cells and recombinant interleukin-2 (rIL2) (50 U/ml). Wells with established clonal growth may be identified at approximately 2-3 weeks after initial plating and restimulated with appropriate antigen in the presence of autologous antigen-presenting cells, then subsequently expanded by the addition of low doses of rIL2 (10 U/ml) 2-3 days following antigen stimulation. T cell clones may be maintained in 24-well plates by periodic restimulation with antigen and rIL2 approximately every two weeks. Cloned and/or expanded cells may be administered back to the patient as described, for example, by Chang et al., (1996).

[0120] Within certain embodiments, allogeneic T-cells may be primed (i.e., sensitized to hematological malignancy related) in vivo and/or in vitro. Such priming may be achieved by contacting T cells with a hematological malignancy related peptide, a polynucleotide encoding such a peptide or a cell producing such a peptide under conditions and for a time sufficient to permit the priming of T cells. In general, T cells are considered to be primed if, for example, contact with a hematological malignancy related peptide results in proliferation and/or activation of the T cells, as measured by standard proliferation, chromium release and/or cytokine release assays as described herein. A stimulation index of more than two fold increase in proliferation or lysis, and more than three fold increase in the level of cytokine, compared to negative controls indicates T-cell specificity. Cells primed in vitro may be employed, for example, within bone marrow transplantation or as donor lymphocyte infusion.

[0121] T cells specific for hematological malignancy related can kill cells that express hematological malignancy related protein. Introduction of genes encoding T-cell receptor (TCR) chains for hematological malignancy related are used as a means to quantitatively and qualitatively improve responses to hematological malignancy related bearing leukemia and cancer cells. Vaccines to increase the number of T cells that can react to hematological malignancy related positive cells are one method of targeting hematological malignancy related bearing cells. T cell therapy with T cells specific for hematological malignancy related is another method. An alternative method is to introduce the TCR chains specific for hematological malignancy related into T cells or other cells with lytic potential. In a suitable embodiment, the TCR alpha and beta chains are cloned out from a hematological malignancy related specific T cell line and used for adoptive T cell therapy, such as described in WO96/30516, incorporated herein by reference.

[0122] Pharmaceutical Compositions and Vaccine Formulations

[0123] Within certain aspects, peptides, polynucleotides, antibodies and/or T cells may be incorporated into pharmaceutical compositions or immunogenic compositions (i.e., vaccines). Alternatively, a pharmaceutical composition may comprise an antigen-presenting cell (e.g., a dendritic cell) transfected with a hematological malignancy related polynucleotide such that the antigen-presenting cell expresses a hematological malignancy related peptide. Pharmaceutical compositions comprise one or more such compounds or cells and a physiologically acceptable carrier or excipient. Vaccines may comprise one or more such compounds or cells and an immunostimulant, such as an adjuvant or a liposome (into which the compound is incorporated). An immunostimulant may be any substance that enhances or potentiates an immune response (antibody- and/or cell-mediated) to an exogenous antigen. Examples of immunostimulants include adjuvants, biodegradable microspheres (e.g., polylactic galactide) and liposomes (into which the compound is incorporated) (U.S. Pat. No. 4,235,877). Vaccine preparation is generally described in, for example, Powell and Newman (1995). Pharmaceutical compositions and vaccines within the scope of the present invention may also contain other compounds, which may be biologically active or inactive. For example, one or more immunogenic portions of other tumor antigens may be present, either incorporated into a fusion peptide or as a separate compound, within the composition or vaccine.

[0124] Within certain embodiments, pharmaceutical compositions and vaccines are designed to elicit T cell responses specific for a hematological malignancy related peptide in a patient, such as a human. In general, T cell responses may be favored through the use of relatively short peptides (e.g., comprising less than 23 consecutive amino acid residues of a native hematological malignancy related peptide, preferably 4-16 consecutive residues, more preferably 8-16 consecutive residues and still more preferably 8-10 consecutive residues). Alternatively, or in addition, a vaccine may comprise an immunostimulant that preferentially enhances a T cell response. In other words, the immunostimulant may enhance the level of a T cell response to a hematological malignancy related peptide by an amount that is proportionally greater than the amount by which an antibody response is enhanced. For example, when compared to a standard oil based adjuvant, such as CFA, an immunostimulant that preferentially enhances a T cell response may enhance a proliferative T cell response by at least two fold, a lytic response by at least 10%, and/or T cell activation by at least two fold compared to hematological malignancy related-negative control cell lines, while not detectably enhancing an antibody response. The amount by which a T cell or antibody response to a hematological malignancy related peptide is enhanced may generally be determined using any representative technique known in the art, such as the techniques provided herein.

[0125] A pharmaceutical composition or vaccine may contain DNA encoding one or more of the peptides as described above, such that the peptide is generated in situ. As noted above, the DNA may be present within any of a variety of delivery systems known to those of ordinary skill in the art, including nucleic acid expression systems, bacterial and viral expression systems and mammalian expression systems. Numerous gene delivery techniques are well known in the art (Rolland, 1998, and references cited therein). Appropriate nucleic acid expression systems contain the necessary DNA, cDNA or RNA sequences for expression in the patient (such as a suitable promoter and terminating signal). Bacterial delivery systems involve the administration of a bacterium (such as Bacillus-Calmette-Guerrin) that expresses an immunogenic portion of the peptide on its cell surface or secretes such an epitope. In a preferred embodiment, the DNA may be introduced using a viral expression system (e.g., vaccinia or other pox virus, retrovirus, or adenovirus), which may involve the use of a non-pathogenic (defective), replication competent virus (Fisher-Hoch et al., 1989; Flexner et al., 1989; Flexner et al., 1990; U.S. Pat. Nos. 4,603,112, 4,769,330, 5,017,487; Intl. Pat. Appl. Publ. No. WO 89/01973; U.S. Pat. No. 4,777,127; Great Britain Pat. No. GB 2,200,651; European Pat. No. EP 0,345,242; Intl. Pat. Appl. Publ. No. WO 91/02805; Berkner, 1988; Rosenfeld et al., 1991; Kolls et al., 1994; Kass-Eisler et al., 1993; Guzman et al., 1993a; and Guzman et al., 1993). Techniques for incorporating DNA into such expression systems are well known to those of ordinary skill in the art. The DNA may also be “naked,” as described, for example, in Ulmer et al. (1993) and reviewed by Cohen (1993). The uptake of naked DNA may be increased by coating the DNA onto biodegradable beads, which are efficiently transported into the cells. It will be apparent that a vaccine may comprise both a polynucleotide and a peptide component. Such vaccines may provide for an enhanced immune response.

[0126] As noted above, a pharmaceutical composition or vaccine may comprise an antigen-presenting cell that expresses a hematological malignancy related peptide. For therapeutic purposes, as described herein, the antigen-presenting cell is preferably an autologous dendritic cell. Such cells may be prepared and transfected using standard techniques (Reeves et al., 1996; Tuting et al., 1998; and Nair et al., 1998). Expression of a hematological malignancy related peptide on the surface of an antigen-presenting cell may be confirmed by in vitro stimulation and standard proliferation as well as chromium release assays, as described herein.

[0127] It will be apparent to those of ordinary skill in the art having the benefit of the present teachings that a vaccine may contain pharmaceutically acceptable salts of the polynucleotides and peptides provided herein. Such salts may be prepared from pharmaceutically acceptable non-toxic bases, including organic bases (e.g., salts of primary, secondary and tertiary amines and basic amino acids) and inorganic bases (e.g., sodium, potassium, lithium, ammonium, calcium and magnesium salts). The phrases “pharmaceutically or pharmacologically acceptable” refer to molecular entities and compositions that do not produce an adverse, allergic or other significant untoward reaction when administered to an animal, or a human, as appropriate. As used herein, “pharmaceutically acceptable carrier” includes any and all solvents, dispersion media, coatings, antibacterial and antifungal agents, isotonic and absorption delaying agents and the like. The use of such media and agents for pharmaceutical active substances is well known in the art. Except insofar as any conventional media or agent is incompatible with the active ingredient, its use in the therapeutic compositions is contemplated. For human administration, preparations should meet sterility, pyrogenicity, and general safety and purity standards as required by the Food and Drug Administration Office of Biologics standards. Supplementary active ingredients can also be incorporated into the compositions.

[0128] While any suitable carrier known to those of ordinary skill in the art may be employed in the pharmaceutical compositions of this invention, the type of carrier will vary depending on the mode of administration. Compositions of the present invention may be formulated for any appropriate manner of administration, including for example, topical, oral, nasal, intravenous, intracranial, intraperitoneal, subcutaneous or intramuscular administration. For parenteral administration, such as subcutaneous injection, the carrier preferably comprises water, saline, alcohol, a fat, a wax or a buffer. For oral administration, any of the above carriers or a solid carrier, such as mannitol, lactose, starch, magnesium stearate, sodium saccharine, talcum, cellulose, glucose, sucrose, and magnesium carbonate, may be employed. Biodegradable microspheres (e.g., polylactate polyglycolate) may also be employed as carriers for the pharmaceutical compositions of this invention. Suitable biodegradable microspheres are disclosed, for example, in U.S. Pat. Nos. 4,897,268; 5,075,109; 5,928,647; 5,811,128; 5,820,883; 5,853,763; 5,814,344 and 5,942,252. For certain topical applications, formulation as a cream or lotion, using well-known components, is preferred.

[0129] Such compositions may also comprise buffers (e.g., neutral buffered saline or phosphate buffered saline), carbohydrates (e.g., glucose, mannose, sucrose or dextrans), mannitol, proteins, peptides or amino acids such as glycine, antioxidants, bacteriostats, chelating agents such as EDTA or glutathione, adjuvants (e.g., aluminum hydroxide), solutes that render the formulation isotonic, hypotonic or weakly hypertonic with the blood of a recipient, suspending agents, thickening agents and/or preservatives. Alternatively, compositions of the present invention may be formulated as a lyophilizate, or formulated with one or more liposomes, microspheres, nanoparticles, or micronized delivery systems using well-known technology.

[0130] Any of a variety of immunostimulants, such as adjuvants, may be employed in the preparation of vaccine compositions of this invention. Most adjuvants contain a substance designed to protect the antigen from rapid catabolism, such as aluminum hydroxide or mineral oil, and a stimulator of immune responses, such as lipid A, Bortadella pertussis or Mycobacterium tuberculosis derived proteins. Suitable adjuvants are commercially available as, for example, alum-based adjuvants (e.g., Alhydrogel, Rehydragel, aluminum phosphate, Algammulin, aluminum hydroxide); oil based adjuvants (Freund's Incomplete Adjuvant and Complete Adjuvant (Difco Laboratories, Detroit, Mich.), Specol, RIBI, TiterMax, Montanide ISA50 or Seppic MONTANIDE ISA 720); nonionic block copolymer-based adjuvants, cytokines (e.g., GM-CSF or Flat3-ligand); Merck Adjuvant 65 (Merck and Company, Inc., Rahway, N.J.); AS-2 (SmithKline Beecham, Philadelphia, Pa.); salts of calcium, iron or zinc; an insoluble suspension of acylated tyrosine; acylated sugars; cationically or anionically derivatized polysaccharides; polyphosphazenes; biodegradable microspheres; monophosphoryl lipid A and Quil A. Cytokines, such as GM-CSF or interleukin-2, -7, or -12, may also be used as adjuvants.

[0131] Hemocyanins and hemoerythrins may also be used in the invention. The use of hemocyanin from keyhole limpet (KLH) is particularly preferred, although other molluscan and arthropod hemocyanins and hemoerythrins may be employed. Various polysaccharide adjuvants may also be used. Polyamine varieties of polysaccharides are particularly preferred, such as chitin and chitosan, including deacetylated chitin.

[0132] A further preferred group of adjuvants are the muramyl dipeptide (MDP, N-acetylmuramyl-L-alanyl-D-isoglutamine) group of bacterial peptidoglycans. Derivatives of muramyl dipeptide, such as the amino acid derivative threonyl-MDP, and the fatty acid derivative MTPPE, are also contemplated.

[0133] U.S. Pat. No. 4,950,645 describes a lipophilic disaccharide-tripeptide derivative of muramyl dipeptide that is proposed for use in artificial liposomes formed from phosphatidyl choline and phosphatidyl glycerol. It is said to be effective in activating human monocytes and destroying tumor cells, but is non-toxic in generally high doses. The compounds of U.S. Pat. No. 4,950,645, and Intl. Pat. Appl. Publ. No. WO 91/16347 are also proposed for use in achieving particular aspects of the present invention.

[0134] BCG and BCG-cell wall skeleton (CWS) may also be used as adjuvants in the invention, with or without trehalose dimycolate. Trehalose dimycolate may be used itself. Azuma et al. (1988) show that trehalose dimycolate administration correlates with augmented resistance to influenza virus infection in mice. Trehalose dimycolate may be prepared as described in U.S. Pat. No. 4,579,945.

[0135] Amphipathic and surface-active agents, e.g., saponin and derivatives such as QS21 (Cambridge Biotech), form yet another group of preferred adjuvants for use with the immunogens of the present invention. Nonionic block copolymer surfactants (Rabinovich et al., 1994; Hunter et al., 1991) may also be employed. Oligonucleotides, as described by Yamamoto et al. (1988) are another useful group of adjuvants. Quil A and lentinen are also preferred adjuvants.

[0136] Superantigens are also contemplated for use as adjuvants in the present invention. “Superantigens” are generally bacterial products that stimulate a greater proportion of T lymphocytes than peptide antigens without a requirement for antigen processing (Mooney et. al., 1994). Superantigens include Staphylococcus exoproteins, such as the α, β, γ and δ enterotoxins from S. aureus and S. epidermidis, and the α, β, γ and δ E. coli exotoxins.

[0137] Common Staphylococcus enterotoxins are known as staphylococcal enterotoxin A (SEA) and staphylococcal enterotoxin B (SEB), with enterotoxins through E (SEE) being described (Rott et. al, 1992). Streptococcus pyogenes B (SEB), Clostridium perfringens enterotoxin (Bowness et. al., 1992), cytoplasmic membrane-associated protein (CAP) from S. pyogenes (Sato et. al., 1994) and toxic shock syndrome toxin-i (TSST-1) from S. aureus (Schwab et. al., 1993) are further useful superantigens.

[0138] One group of adjuvants particularly preferred for use in the invention are the detoxified endotoxins, such as the refined detoxified endotoxin of U.S. Pat. No. 4,866,034. These refined detoxified endotoxins are effective in producing adjuvant responses in mammals.

[0139] The detoxified endotoxins may be combined with other adjuvants. Combination of detoxified endotoxins with trehalose dimycolate is contemplated, as described in U.S. Pat. No. 4,435,386. Combinations of detoxified endotoxins with trehalose dimycolate and endotoxic glycolipids is also contemplated (U.S. Pat. No. 4,505,899), as is combination of detoxified endotoxins with cell wall skeleton (CWS) or CWS and trehalose dimycolate, as described in U.S. Pat. Nos. 4,436,727, 4,436,728 and 4,505,900. Combinations of just CWS and trehalose dimycolate, without detoxified endotoxins are also envisioned to be useful, as described in U.S. Pat. No. 4,520,019.

[0140] MPL is currently one preferred immunopotentiating agent for use herein. References that concern the uses of MPL include Tomai et al. (1987), Chen et l. (1991) and Garg and Subbarao (1992), that each concern certain roles of MPL in the reactions of aging mice; Elliott et al. (1991), that concerns the D-galactosamine loaded mouse and its enhanced sensitivity to lipopolysaccharide and MPL; Chase et al. (1986), that relates to bacterial infections; and Masihi et al. (1988), that describes the effects of MPL and endotoxin on resistance of mice to Toxoplasma gondii. Fitzgerald (1991) also reported on the use of MPL to up-regulate the immunogenicty of a syphilis vaccine and to confer significant protection against challenge infection in rabbits.

[0141] Thus MPL is known to be safe for use, as shown in the above model systems. Phase-I clinical trials have also shown MPL to be safe for use (Vosika et al., 1984). Indeed, 100 μg/m² is known to be safe for human use, even on an outpatient basis (Vosika et al., 1984).

[0142] MPL generally induces polyclonal B cell activation (Baker et al., 1994), and has been shown to augment antibody production in many systems, for example, in immunologically immature mice (Baker et al., 1988); in aging mice (Tomai and Johnson, 1989); and in nude and Xid mice (Madonna and Vogel, 1986; Myers et al., 1995). Antibody production has been shown against erythrocytes (Hraba et al., 1993); T cell dependent and independent antigens; Pnu-immune vaccine (Garg and Subbarao, 1992); isolated tumor-associated antigens (U.S. Pat. No. 4,877,611); against syngeneic tumor cells (Livingston et al., 1985; Ravindranath et al., 1994a;b); and against tumor-associated gangliosides (Ravindranath et al., 1994a;b).

[0143] Another useful attribute of MPL is that is augments IgM responses, as shown by Baker et al. (1988a), who describe the ability of MPL to increase antibody responses in young mice. This is a particularly useful feature of an adjuvant for use in certain embodiments of the present invention. Myers et al. (1995) recently reported on the ability of MPL to induce IgM antibodies, by virtue T cell-independent antibody production.

[0144] In the Myers et al. (1995) studies, MPL was conjugated to the hapten, TNP. MPL was proposed for use as a carrier for other haptens, such as peptides.

[0145] MPL also activates and recruits macrophages (Verna et al., 1992). Tomai and Johnson (1989) showed that MPL-stimulated T cells enhance IL-1 secretion by macrophages. MPL is also known to activate superoxide production, lysozyme activity, phagocytosis, and killing of Candida in murine peritoneal macrophages (Chen et al., 1991).

[0146] The effects of MPL on T cells include the endogenous production of cytotoxic factors, such as TNF, in serum of BCG-primed mice by MPL (Bennett et al., 1988). Kovach et al. (1990) and Elliot et al. (1991) also show that MPL induces TNF activity. MPL is known to act with TNF-α to induce release of IFN-γ by NK cells. IFN-γ production by T cells in response to MPL was also documented by Tomai and Johnson (1989), and Odean et al. (1990).

[0147] MPL is also known to be a potent T cell adjuvant. For example, MPL stimulates proliferation of melanoma-antigen specific CTLs (Mitchell et al., 1988, 1993). Further, Baker et al. (1988b) showed that nontoxic MPL inactivated suppressor T cell activity. Naturally, in the physiological environment, the inactivation of T suppressor cells allows for increased benefit for the animal, as realized by, e.g., increased antibody production. Johnson and Tomai (1988) have reported on the possible cellular and molecular mediators of the adjuvant action of MPL.

[0148] MPL is also known to induce aggregation of platelets and to phosphorylate a platelet protein prior to induction of serotonin secretion (Grabarek et al., 1990). This study shows that MPL is involved in protein kinase C activation and signal transduction.

[0149] Many articles concern the structure and function of MPL include. These include Johnson et al. (1990), that describes the structural characterization of MPL homologs obtained from Salmonella minnesota Re595 lipopolysaccharide. The work of Johnson et al. (1990), in common with Grabarek et al. (1990), shows that the fatty acid moieties of MPL can vary, even in commercial species. In separating MPL into eight fractions by thin layer chromatography, Johnson et al. (1990) found that three were particularly active, as assessed using human platelet responses. The chemical components of the various MPL species were characterized by Johnson et al. (1990).

[0150] Baker et al. (1992) further analyzed the structural features that influence the ability of lipid A and its analogs to abolish expression of suppressor T cell activity. They reported that decreasing the number of phosphate groups in lipid A from two to one (i.e., creating monophosphoryl lipid A, MPL) as well as decreasing the fatty acyl content, primarily by removing the residue at the 3 position, resulted in a progressive reduction in toxicity; however, these structural modifications did not influence its ability to abolish the expression of Ts function (Baker et al., 1992). These types of MPL are ideal for use in the present invention.

[0151] Baker et al. (1992) also showed that reducing the fatty acyl content from five to four (lipid A precursor IV_{A} or Iₐ) eliminated the capacity to influence Ts function but not to induce polyclonal activation of B cells. These studies show that in order to be able to abolish the expression of Ts function, lipid A must be a glucosamine disaccharide; may have either one or two phosphate groups; and must have at least five fatty acyl groups. Also, the chain length of the nonhydroxylated fatty acid, as well as the location of acyloxyacyl groups (2′ versus 3′ position), may play an important role (Baker et al., 1992).

[0152] In examining the relationship between chain length and position of fatty acyl groups on the ability of lipid A to abolish the expression of suppressor T-cell (Ts) activity, Baker et al. (1994) found that fatty acyl chain lengths of C₁₂ to C₁₄ appeared to be optimal for bioactivity. Therefore, although their use is still possible, lipid A preparations with fatty acyl groups of relatively short chain length (C₁₀ to C₁₂ from Pseudomonas aeruginosa and Chromobacterium violaceum) or predominantly long chain length (C₁₈ from Helicobacter pylori) are less preferred for use in this invention.

[0153] Baker et al. (1994) also showed that the lipid A proximal inner core region oligosaccharides of some bacterial lipopolysaccharides increase the expression of Ts activity; due mainly to the capacity of such oligosaccharides, which are relatively conserved in structure among gram-negative bacterial, to enlarge or expand upon the population of CD8⁺ Ts generated during the course of a normal antibody response to unrelated microbial antigens. The minimal structure required for the expression of the added immunosuppression observed was reported to be a hexasaccharide containing one 2-keto-3-deoxyoctonate residue, two glucose residues, and three heptose residues to which are attached two pyrophosphorylethanolamine groups (Baker et al., 1994). This information may be considered in utilizing or even designing further adjuvants for use in the invention.

[0154] In a generally related line of work, Tanamoto et al. (1994a;b; 1995) described the dissociation of endotoxic activities in a chemically synthesized Lipid A precursor after acetylation or succinylation. Thus, compounds such as “acetyl 406” and “succinyl 516” (Tanamoto et al., 1994a;b; 1995) are also contemplated for use in the invention.

[0155] Synthetic MPLs form a particularly preferred group of antigens. For example, Brade et al. (1993) described an artificial glycoconjugate containing the bisphosphorylated glucosamine disaccharide backbone of lipid A that binds to anti-Lipid A MAbs. This is one candidate for use in certain aspects of the invention.

[0156] The MPL derivatives described in U.S. Pat. No. 4,987,237 are particularly contemplated for use in the present invention. U.S. Pat. No. 4,987,237 describes MPL derivatives that contain one or more free groups, such as amines, on a side chain attached to the primary hydroxyl groups of the monophosphoryl lipid A nucleus through an ester group. The derivatives provide a convenient method for coupling the lipid A through coupling agents to various biologically active materials. The immunostimulant properties of lipid A are maintained. All MPL derivatives in accordance with U.S. Pat. No. 4,987,237 are envisioned for use in the MPL adjuvant-incorporated cells of this invention.

[0157] Various adjuvants, even those that are not commonly used in humans, may still be employed in animals, where, for example, one desires to raise antibodies or to subsequently obtain activated T cells. The toxicity or other adverse effects that may result from either the adjuvant or the cells, e.g., as may occur using non-irradiated tumor cells, is irrelevant in such circumstances.

[0158] Within the vaccines provided herein, the adjuvant composition is preferably designed to induce an immune response predominantly of the Th1 type. High levels of Th1-type cytokines (e.g., IFN-γ, TNFα, IL-2 and IL-12) tend to favor the induction of cell-mediated immune responses to an administered antigen. In contrast, high levels of Th2-type cytokines (e.g., IL-4, IL-5, IL-6 and IL-10) tend to favor the induction of humoral immune responses. Following application of a vaccine as provided herein, a patient will support an immune response that includes Th1- and Th2-type responses. Within a preferred embodiment, in which a response is predominantly Th1-type, the level of Th1-type cytokines will increase to a greater extent than the level of Th2-type cytokines. The levels of these cytokines may be readily assessed using standard assays. For a review of the families of cytokines see e.g., Mosmann and Coffman (1989).

[0159] Preferred adjuvants for use in eliciting a predominantly Th1-type response include, for example, a combination of monophosphoryl lipid A, preferably 3-de-O-acylated monophosphoryl lipid A (3D-MPL), together with an aluminum salt. MPL adjuvants are available from Corixa Corporation (Seattle, Wash.; see e.g., U.S. Pat. Nos. 4,436,727; 4,877,611; 4,866,034 and 4,912,094, each of which is specifically incorporated herein by reference in its entirety). CpG-containing oligonucleotides (in which the CpG dinucleotide is unmethylated) also induce a predominantly Th1 response. Such oligonucleotides are well known and are described, for example, in Intl. Pat. Appl. Publ. No. WO 96/02555 and Intl. Pat. Appl. Publ. No. WO 99/33488. Immunostimulatory DNA sequences are also described, for example, by Sato et al. (1996). Another preferred adjuvant is a saponin, preferably QS21 (Aquila Biopharmaceuticals Inc., Framingham, Mass.), which may be used alone or in combination with other adjuvants. For example, an enhanced system involves the combination of a monophosphoryl lipid A and saponin derivative, such as the combination of QS21 and 3D-MPL (see e.g., Intl. Pat. Appl. Publ. No. WO 94/00153), or a less reactogenic composition where the QS21 is quenched with cholesterol (see e.g., Intl. Pat. Appl. Publ. No. WO 96/33739). Other preferred formulations comprise an oil-in-water emulsion and tocopherol. A particularly potent adjuvant formulation involving QS21, 3D-MPL and tocopherol in an oil-in-water emulsion has also been described (see e.g., Intl. Pat. Appl. Publ. No. WO 95/17210).

[0160] Other preferred adjuvants include Montanide ISA 720 (Seppic), SAF (Chiron), ISCOMS (CSL), MF-59 (Chiron), the SBAS series of adjuvants (e.g., SBAS-2 or SBAS-4, available from SmithKline Beecham, Rixensart, Belgium), Detox (Corixa Corporation), RC-529 (Corixa Corporation) and aminoalkyl glucosaminide 4-phosphates (AGPs).

[0161] Any vaccine provided herein may be prepared using well-known methods that result in a combination of one or more antigens, one or more immunostimulants or adjuvants and one or more suitable carriers, excipients, or pharmaceutically acceptable buffers. The compositions described herein may be administered as part of a sustained release formulation (i.e., a formulation such as a capsule, sponge or gel [composed of polysaccharides, for example] that effects a slow release of compound following administration). Such formulations may generally be prepared using well-known technology (Coombes et al., 1996) and administered by, for example, oral, rectal or subcutaneous implantation, or by implantation at the desired target site. Sustained-release formulations may contain a peptide, polynucleotide or antibody dispersed in a carrier matrix and/or contained within a reservoir surrounded by a rate-controlling membrane.

[0162] Carriers for use within such formulations are preferably biocompatible, and may also be biodegradable; preferably the formulation provides a relatively constant level of active component release. Such carriers include microparticles of poly(lactide-co-glycolide), as well as polyacrylate, latex, starch, cellulose and dextran. Other delayed-release carriers include supramolecular biovectors, which comprise a non-liquid hydrophilic core (e.g., a cross-linked polysaccharide or oligosaccharide) and, optionally, an external layer comprising an amphiphilic compound, such as a phospholipid (U.S. Pat. No. 5,151,254; Intl. Pat. Appl. Publ. No. WO 94/20078; Intl. Pat. Appl. Publ. No. WO/94/23701; and Intl. Pat. Appl. Publ. No. WO 96/06638). The amount of active compound contained within a sustained release formulation depends upon the site of implantation, the rate and expected duration of release and the nature of the condition to be treated or prevented.

[0163] Any of a variety of delivery vehicles may be employed within pharmaceutical compositions and vaccines to facilitate production of an antigen-specific immune response that targets tumor cells. Delivery vehicles include antigen-presenting cells (APCs), such as dendritic cells, macrophages, B cells, monocytes and other cells that may be engineered to be efficient APCs. Such cells may, but need not, be genetically modified to increase the capacity for presenting the antigen, to improve activation and/or maintenance of the T cell response, to have anti-tumor effects per se and/or to be immunologically compatible with the receiver (i.e., matched HLA haplotype). APCs may generally be isolated from any of a variety of biological fluids and organs, including tumor and peritumoral tissues, and may be autologous, allogeneic, syngeneic or xenogeneic cells.

[0164] Certain preferred embodiments of the present invention use dendritic cells or progenitors thereof as antigen-presenting cells. Dendritic cells are highly potent APCs (Banchereau and Steinman, 1998) and have been shown to be effective as a physiological adjuvant for eliciting prophylactic or therapeutic antitumor immunity (Timmerman and Levy, 1999). In general, dendritic cells may be identified based on their typical shape (stellate in situ, with marked cytoplasmic processes (dendrites) visible in vitro), their ability to take up, process and present antigens with high efficiency and their ability to activate naive T cell responses. Dendritic cells may, of course, be engineered to express specific cell-surface receptors or ligands that are not commonly found on dendritic cells in vivo or ex vivo, and such modified dendritic cells are contemplated by the present invention. As an alternative to dendritic cells, secreted vesicles antigen-loaded dendritic cells (called exosomes) may be used within a vaccine (Zitvogel et al., 1998).

[0165] Dendritic cells and progenitors may be obtained from peripheral blood, bone marrow, tumor-infiltrating cells, peritumoral tissues-infiltrating cells, lymph nodes, spleen, skin, umbilical cord blood or any other suitable tissue or fluid. For example, dendritic cells may be differentiated ex vivo by adding a combination of cytokines such as GM-CSF, IL-4, IL-13 and/or TNFα to cultures of monocytes harvested from peripheral blood. Alternatively, CD34 positive cells harvested from peripheral blood, umbilical cord blood or bone marrow may be differentiated into dendritic cells by adding to the culture medium combinations of GM-CSF, IL-3, TNFα, CD40 ligand, LPS, flt3 ligand and/or other compound(s) that induce differentiation, maturation and proliferation of dendritic cells.

[0166] Dendritic cells are conveniently categorized as “immature” and “mature” cells, which allows a simple way to discriminate between two well characterized phenotypes. However, this nomenclature should not be construed to exclude all possible intermediate stages of differentiation. Immature dendritic cells are characterized as APC with a high capacity for antigen uptake and processing, which correlates with the high expression of Fcγ receptor and mannose receptor. The mature phenotype is typically characterized by a lower expression of these markers, but a high expression of cell surface molecules responsible for T cell activation such as class I and class II MHC, adhesion molecules (e.g., CD54 and CD11) and costimulatory molecules (e.g., CD40, CD80, CD86 and 4-1BB).

[0167] APCs may generally be transfected with a polynucleotide encoding a hematological malignancy related peptide, such that the peptide, or an immunogenic portion thereof, is expressed on the cell surface. Such transfection may take place ex vivo, and a composition or vaccine comprising such transfected cells may then be used for therapeutic purposes, as described herein. Alternatively, a gene delivery vehicle that targets a dendritic or other antigen-presenting cell may be administered to a patient, resulting in transfection that occurs in vivo. In vivo and ex vivo transfection of dendritic cells, for example, may generally be performed using any methods known in the art, such as those described in Intl. Pat. Appl. Publ. No. WO 97/24447, or the gene gun approach described by Mahvi et al. (1997). Antigen loading of dendritic cells may be achieved by incubating dendritic cells or progenitor cells with the hematological malignancy related peptide, DNA (naked or within a plasmid vector) or RNA; or with antigen-expressing recombinant bacterium or viruses (e.g., vaccinia, fowlpox, adenovirus or lentivirus vectors). Prior to loading, the peptide may be covalently conjugated to an immunological partner that provides T cell help (e.g., a carrier molecule). Alternatively, a dendritic cell may be pulsed with a non-conjugated immunological partner, separately or in the presence of the peptide.

[0168] Combined therapeutics is also contemplated, and the same type of underlying pharmaceutical compositions may be employed for both single and combined medicaments. Vaccines and pharmaceutical compositions may be presented in unit-dose or multi-dose containers, such as sealed ampoules or vials. Such containers are preferably hermetically sealed to preserve sterility of the formulation until use. In general, formulations may be stored as suspensions, solutions or emulsions in oily or aqueous vehicles. Alternatively, a vaccine or pharmaceutical composition may be stored in a freeze-dried condition requiring only the addition of a sterile liquid carrier immediately prior to use.

[0169] Diagnostic and Prognostic Methods for Hematological Malignancy Diseases

[0170] The present invention further provides methods for detecting a malignant disease associated with one or more of the polypeptide or polynucleotide compositions disclosed herein, and for monitoring the effectiveness of an immunization or therapy for such a disease. To determine the presence or absence of a malignant disease associated with one or more of the polypeptide or polynucleotide compositions disclosed herein, a patient may be tested for the level of T cells specific for one or more of such compositions. Within certain methods, a biological sample comprising CD4⁺ and/or CD8⁺ T cells isolated from a patient is incubated with one or more of the polypeptide or polynucleotide compositions disclosed herein, and/or an APC that expresses one or more of such peptides or polypeptides, and the presence or absence of specific activation of the T cells is detected, as described herein. Suitable biological samples include, but are not limited to, isolated T cells. For example, T cells may be isolated from a patient by routine techniques (such as by Ficoll/Hypaque density gradient centrifugation of peripheral blood lymphocytes). T cells may be incubated in vitro for 2-9 days (typically 4 days) at 37° C. with one or more of the disclosed peptide, polypeptide or polynucleotide compositions (e.g., 5-25 μg/ml). It may be desirable to incubate another aliquot of a T cell sample in the absence of the composition to serve as a control. For CD4⁺ T cells, activation is preferably detected by evaluating proliferation of the T cells. For CD8⁺ T cells, activation is preferably detected by evaluating cytolytic activity. A level of proliferation that is at least two fold greater and/or a level of cytolytic activity that is at least 20% greater than in disease-free patients indicates the presence of a malignant disease associated with expression or one or more of the disclosed polypeptide or polynucleotide compositions. Further correlation may be made, using methods well known in the art, between the level of proliferation and/or cytolytic activity and the predicted response to therapy. In particular, patients that display a higher antibody, proliferative and/or lytic response may be expected to show a greater response to therapy.

[0171] Within other methods, a biological sample obtained from a patient is tested for the level of antibody specific for one or more of the hematological malignancy-related peptides or polypeptide s disclosed herein. The biological sample is incubated with hematological malignancy-related peptide or polypeptide, or a polynucleotide encoding such a peptide or polypeptide, and/or an APC that expresses such a peptide or polypeptide under conditions and for a time sufficient to allow immunocomplexes to form. Immunocomplexes formed between the selected peptide or polypeptide and antibodies in the biological sample that specifically bind to the selected peptide or polypeptide are then detected. A biological sample for use within such methods may be any sample obtained from a patient that would be expected to contain antibodies. Suitable biological samples include blood, sera, ascites, bone marrow, pleural effusion, and cerebrospinal fluid.

[0172] The biological sample is incubated with the selected peptide or polypeptide in a reaction mixture under conditions and for a time sufficient to permit immunocomplexes to form between the selected peptide or polypeptide and antibodies that are immunospecific for such a peptide or polypeptide. For example, a biological sample and a selected peptide or polypeptide peptide may be incubated at 4° C. for 24-48 hrs.

[0173] Following the incubation, the reaction mixture is tested for the presence of immunocomplexes. Detection of immunocomplexes formed between the selected peptide or polypeptide and antibodies present in the biological sample may be accomplished by a variety of known techniques, such as radioimmunoassays (RIA) and enzyme linked immunosorbent assays (ELISA). Suitable assays are well known in the art and are amply described in the scientific and patent literature (Harlow and Lane, 1988). Assays that may be used include, but are not limited to, the double monoclonal antibody sandwich immunoassay technique (U.S. Pat. No. 4,376,110); monoclonal-polyclonal antibody sandwich assays (Wide et al., 1970); the “western blot” method (U.S. Pat. No. 4,452,901); immunoprecipitation of labeled ligand (Brown et al., 1980); enzyme-linked immunosorbent assays (Raines and Ross, 1982); immunocytochemical techniques, including the use of fluorochromes (Brooks et al., 1980); and neutralization of activity (Bowen-Pope et al., 1984). Other immunoassays include, but are not limited to, those described in U.S. Pat. Nos. 3,817,827; 3,850,752; 3,901,654; 3,935,074; 3,984,533; 3,996,345; 4,034,074; and 4,098,876.

[0174] For detection purposes, the selected peptide or polypeptide may either be labeled or unlabeled. Unlabeled polypeptide peptide may be used in agglutination assays or in combination with labeled detection reagents that bind to the immunocomplexes (e.g., anti-immunoglobulin, protein G, Protein A or a lectin and secondary antibodies, or antigen-binding fragments thereof, capable of binding to the antibodies that specifically bind to the selected hematological maliganacy-related peptide or polypeptide). If the selected peptide or polypeptide is labeled, the reporter group may be any suitable reporter group known in the art, including radioisotopes, fluorescent groups, luminescent groups, enzymes, biotin and dye particles.

[0175] Within certain assays, unlabeled peptide or polypeptide is immobilized on a solid support. The solid support may be any material known to those of ordinary skill in the art to which the peptide may be attached. For example, the solid support may be a test well in a microtiter plate or a nitrocellulose or other suitable membrane. Alternatively, the support may be a bead or disc, such as glass, fiberglass, latex or a plastic material such as polystyrene or polyvinylchloride. The support may also be a magnetic particle or a fiber optic sensor, such as those disclosed, for example, in U.S. Pat. No. 5,359,681. The peptide may be immobilized on the solid support using a variety of techniques known to those of skill in the art, which are amply described in the patent and scientific literature. In the context of the present invention, the term “immobilization” refers to both noncovalent association, such as adsorption, and covalent attachment (which may be a direct linkage between the antigen and functional groups on the support or may be a linkage by way of a cross-linking agent). Immobilization by adsorption to a well in a microtiter plate or to a membrane is preferred. In such cases, adsorption may be achieved by contacting the selected peptide or polypeptide, in a suitable buffer, with the solid support for a suitable amount of time. The contact time varies with temperature, but is typically between about 1 hour and about 1 day. In general, contacting a well of a plastic microtiter plate (such as polystyrene or polyvinylchloride) with an amount of peptide ranging from about 10 ng to about 10 μg, and preferably about 100 ng to about 1 μg, is sufficient to immobilize an adequate amount of peptide.

[0176] Following immobilization, the remaining protein binding sites on the support are typically blocked. Any suitable blocking agent known to those of ordinary skill in the art, such as bovine serum albumin, Tween™ 20™ (Sigma Chemical Co., St. Louis, Mo.), heat-inactivated normal goat serum (NGS), or BLOTTO (buffered solution of nonfat dry milk which also contains a preservative, salts, and an antifoaming agent) may be used. The support is then incubated with a biological sample suspected of containing specific antibody. The sample can be applied neat, or, more often, it can be diluted, usually in a buffered solution which contains a small amount (0.1%-5.0% by weight) of protein, such as BSA, NGS, or BLOTTO. In general, an appropriate contact time (i.e., incubation time) is a period of time that is sufficient to detect the presence of antibody or an antigen binding fragment that is immunospecific for the selected peptide or polypeptide within a sample containing such an antibody or binding fragment thereof. Preferably, the contact time is sufficient to achieve a level of binding that is at least about 95% of that achieved at equilibrium between bound and unbound antibody or antibody fragment. Those of ordinary skill in the art will recognize that the time necessary to achieve equilibrium may be readily determined by assaying the level of binding that occurs over a period of time. At room temperature, an incubation time of about 30 min is generally sufficient.

[0177] Unbound sample may then be removed by washing the solid support with an appropriate buffer, such as PBS containing 0.1% Tween™ 20. A detection reagent that binds to the immunocomplexes and that comprises at least a first detectable labe or “reporter” molecule may then be added. The detection reagent is incubated with the immunocomplex for an amount of time sufficient to detect the bound antibody or antigen binding fragment thereof. An appropriate amount of time may generally be determined by assaying the level of binding that occurs over a period of time. Unbound label or detection reagent is then removed and bound label or detection reagent is detected using a suitable assay or analytical instrument. The method employed for detecting the reporter group depends upon the nature of the reporter group. For radioactive labels, scintillation counting or autoradiographic methods are generally appropriate. Spectroscopic methods may be used to detect dyes, luminescent or chemiluminescent moieties and various chromogens, fluorescent labels and such like. Biotin may be detected using avidin, coupled to a different reporter group (commonly a radioactive or fluorescent group or an enzyme). Enzyme reporter groups (e.g., horseradish peroxidase, β-galactosidase, alkaline phosphatase and glucose oxidase) may generally be detected by the addition of substrate (generally for a specific period of time), followed by spectroscopic or other analysis of the reaction products. Regardless of the specific method employed, a level of bound detection reagent that is at least two fold greater than background (i.e., the level observed for a biological sample obtained from a disease-free individual) indicates the presence of a malignant disease associated with expression of the selected peptide or polypeptide.

[0178] In general, methods for monitoring the effectiveness of an immunization or therapy involve monitoring changes in the level of antibodies or T cells specific for the selected peptide or polypeptide in a sample, or in an animal such as a human patient. Methods in which antibody levels are monitored may comprise the steps of: (a) incubating a first biological sample, obtained from a patient prior to a therapy or immunization, with a selected peptide or polypeptide, wherein the incubation is performed under conditions and for a time sufficient to allow immunocomplexes to form; (b) detecting immunocomplexes formed between the selected peptide or polypeptide and antibodies or antigen binding fragments in the biological sample that specifically bind to the selected peptide or polypeptide; (c) repeating steps (a) and (b) using a second biological sample taken from the patient at at later time, such as for example, following a given therapy or immunization; and (d) comparing the number of immunocomplexes detected in the first and second biological samples. Alternatively, a polynucleotide encoding the selected peptide or polypeptide, or an APC expressing the selected peptide or polypeptide may be employed in place of the selected peptide or polypeptide itself. Within such methods, immunocomplexes between the selected peptide or polypeptide encoded by a polynucleotide, or expressed by the APC, and antibodies and/or antigen binding fragments in the biological sample are detected.

[0179] Methods in which T cell activation and/or the number of hematological malignancy polypepide-specific precursors are monitored may comprise the steps of: (a) incubating a first biological sample comprising CD4⁺ and/or CD8⁺ cells (e.g., bone marrow, peripheral blood or a fraction thereof), obtained from a patient prior to a therapy or immunization, with a hematological malignancy peptide or polypeptide, wherein the incubation is performed under conditions and for a time sufficient to allow specific activation, proliferation and/or lysis of T cells; (b) detecting an amount of activation, proliferation and/or lysis of the T cells; (c) repeating steps (a) and (b) using a second biological sample comprising CD4⁺ and/or CD8⁺ T cells, and taken from the same patient following therapy or immunization; and (d) comparing the amount of activation, proliferation and/or lysis of T cells in the first and second biological samples. Alternatively, a polynucleotide encoding a hematological malignancy related peptide, or an APC expressing such a peptide may be employed in place of the hematological malignancy peptide itself.

[0180] A biological sample for use within such methods may be any sample obtained from a patient that would be expected to contain antibodies, CD4⁺ T cells and/or CD8⁺ T cells. Suitable biological samples include blood, sera, ascites, bone marrow, pleural effusion and cerebrospinal fluid. A first biological sample may be obtained prior to initiation of therapy or immunization or part way through a therapy or vaccination regime. The second biological sample should be obtained in a similar manner, but at a time following additional therapy or immunization. The second biological sample may be obtained at the completion of, or part way through, therapy or immunization, provided that at least a portion of therapy or immunization takes place between the isolation of the first and second biological samples.

[0181] Incubation and detection steps for both samples may generally be performed as described above. A statistically significant increase in the number of immunocomplexes in the second sample relative to the first sample reflects successful therapy or immunization.

[0182] Administration of Pharmaceutical Compositions and Formulations

[0183] In certain embodiments, the present invention concerns formulation of one or more of the polynucleotide, polypeptide, peptide, antibody, or antigen binding fragment compositions disclosed herein in pharmaceutically acceptable solutions for administration to a cell or an animal, either alone, or in combination with one or more other modalities of anti-cancer therapy, or in combination with one or more diagnostic or therapeutic agents.

[0184] It will also be understood that, if desired, the nucleic acid segment, RNA, or DNA compositions disclosed herein may be administered in combination with other agents as well, such as, e.g., proteins or peptides or various pharmaceutically-active agents. As long as the composition comprises at least one of the genetic expression constructs disclosed herein, there is virtually no limit to other components that may also be included, given that the additional agents do not cause a significant adverse effect upon contact with the target cells or host tissues. The RNA- or DNA-derived compositions may thus be delivered along with various other agents as required in the particular instance. Such RNA or DNA compositions may be purified from host cells or other biological sources, or alternatively may be chemically synthesized as described herein. Likewise, such compositions may comprise substituted or derivatized RNA or DNA compositions. Such compositions may include one or more therapeutic gene constructs, either alone, or in combination with one or more modified peptide or nucleic acid substituent derivatives, and/or other anticancer therapeutics.

[0185] The formulation of pharmaceutically-acceptable excipients and carrier solutions are well-known to those of skill in the art, as is the development of suitable dosing and treatment regimens for using the particular compositions described herein in a variety of treatment regimens, including e.g., oral, intravenous, intranasal, transdermal, intraprostatic, intratumoral, and/or intramuscular administration and formulation.

[0186] Injectable Delivery

[0187] For example, the pharmaceutical compositions disclosed herein may be administered parenterally, intravenously, intramuscularly, or even intraperitoneally as described in U.S. Pat. Nos. 5,543,158, 5,641,515 and 5,399,363 (each specifically incorporated herein by reference in its entirety). Solutions of the active compounds as free-base or pharmacologically acceptable salts may be prepared in water suitably mixed with a surfactant, such as hydroxypropylcellulose. Dispersions may also be prepared in glycerol, liquid polyethylene glycols, and mixtures thereof and in oils. Under ordinary conditions of storage and use, these preparations contain a preservative to prevent the growth of microorganisms.

[0188] The pharmaceutical forms suitable for injectable use include sterile aqueous solutions or dispersions and sterile powders for the extemporaneous preparation of sterile injectable solutions or dispersions (U.S. Pat. No. 5,466,468, specifically incorporated herein by reference in its entirety). In all cases the form must be sterile and must be fluid to the extent that easy syringability exists. It must be stable under the conditions of manufacture and storage and must be preserved against the contaminating action of microorganisms, such as bacteria and fungi. The carrier can be a solvent or dispersion medium containing, for example, water, ethanol, polyol (e.g., glycerol, propylene glycol, and liquid polyethylene glycol, and the like), suitable mixtures thereof, and/or vegetable oils. Proper fluidity may be maintained, for example, by the use of a coating, such as lecithin, by the maintenance of the required particle size in the case of dispersion and by the use of surfactants. The prevention of the action of microorganisms can be brought about by various antibacterial and antifungal agents, for example, parabens, chlorobutanol, phenol, sorbic acid, thimerosal, and the like. In many cases, it will be preferable to include isotonic agents, for example, sugars or sodium chloride. Prolonged absorption of the injectable compositions can be brought about by the use in the compositions of agents delaying absorption, for example, aluminum monostearate and gelatin.

[0189] For parenteral administration in an aqueous solution, for example, the solution should be suitably buffered if necessary and the liquid diluent first rendered isotonic with sufficient saline or glucose. These particular aqueous solutions are especially suitable for intravenous, intramuscular, subcutaneous and intraperitoneal administration. In this connection, sterile aqueous media that can be employed will be known to those of skill in the art in light of the present disclosure. For example, one dosage may be dissolved in 1 ml of isotonic NaCl solution and either added to 1000 ml of hypodermoclysis fluid or injected at the proposed site of infusion, (see for example, Hoover, 1975). Some variation in dosage will necessarily occur depending on the condition of the subject being treated. The person responsible for administration will, in any event, determine the appropriate dose for the individual subject. Moreover, for human administration, preparations should meet sterility, pyrogenicity, and general safety and purity standards as required by FDA Office of Biologics standards.

[0190] Sterile injectable solutions may be prepared by incorporating the gene therapy constructs in the required amount in the appropriate solvent with several of the other ingredients enumerated above, as required, followed by filtered sterilization. Generally, dispersions are prepared by incorporating the various sterilized active ingredients into a sterile vehicle which contains the basic dispersion medium and the required other ingredients from those enumerated above. In the case of sterile powders for the preparation of sterile injectable solutions, the preferred methods of preparation are vacuum-drying and freeze-drying techniques which yield a powder of the active ingredient plus any additional desired ingredient from a previously sterile-filtered solution thereof.

[0191] The compositions disclosed herein may be formulated in a neutral or salt form. Pharmaceutically-acceptable salts, include the acid addition salts and which are formed with inorganic acids such as, for example, hydrochloric or phosphoric acids, or such organic acids as acetic, oxalic, tartaric, mandelic, and the like. Salts formed with the free carboxyl groups can also be derived from inorganic bases such as, for example, sodium, potassium, ammonium, calcium, or ferric hydroxides, and such organic bases as isopropylamine, trimethylamine, histidine, procaine and the like. Upon formulation, solutions will be administered in a manner compatible with the dosage formulation and in such amount as is therapeutically effective. The formulations are easily administered in a variety of dosage forms such as injectable solutions, drug release capsules and the like.

[0192] As used herein, “carrier” includes any and all solvents, dispersion media, vehicles, coatings, diluents, antibacterial and antifungal agents, isotonic and absorption delaying agents, buffers, carrier solutions, suspensions, colloids, and the like. The use of such media and agents for pharmaceutical active substances is well known in the art. Except insofar as any conventional media or agent is incompatible with the active ingredient, its use in the therapeutic compositions is contemplated. Supplementary active ingredients can also be incorporated into the compositions.

[0193] Intranasal Delivery

[0194] One may use nasal solutions or sprays, aerosols or even inhalants for the treatment of hematological malignancies with one of more of the disclosed peptides and polynucleotides. Nasal solutions are usually aqueous solutions designed for administration to the nasal passages in drops or sprays. Nasal solutions are prepared so that they are similar in many respects to nasal secretions, so that normal ciliary action is maintained. Thus, the aqueous nasal solutions usually are isotonic and slightly buffered to maintain a pH of from about 5.5 to about 6.5. In addition, antimicrobial preservatives, similar to those used in ophthalmic preparations, and appropriate drug stabilizers, if required, may be included in the formulation. Various commercial nasal preparations are known.

[0195] Inhalations and inhalants are pharmaceutical preparations designed for delivering a drug or compound into the respiratory tree of a patient. A vapor or mist is administered and reaches the affected area, often to give relief from symptoms of bronchial and nasal congestion. However, this route can also be employed to deliver agents into the systemic circulation. Inhalations may be administered by the nasal or oral respiratory routes. The administration of inhalation solutions is only effective if the droplets are sufficiently fine and uniform in size so that the mist reaches the bronchioles.

[0196] Another group of products, also known as inhalations, and sometimes called insufflations, consists of finely powdered or liquid drugs that are carried into the respiratory passages by the use of special delivery systems, such as pharmaceutical aerosols, that hold a solution or suspension of the drug in a liquefied gas propellant. When released through a suitable valve and oral adapter, a metered does of the inhalation is propelled into the respiratory tract of the patient.

[0197] Particle size is of importance in the administration of this type of preparation. It has been reported that the optimum particle size for penetration into the pulmonary cavity is of the order of about 0.5 to about 7 μm. Fine mists are produced by pressurized aerosols and hence their use in considered advantageous.

[0198] Lipsome-, Nanocapsule-, and Microparticle-Mediated Delivery

[0199] In certain embodiments, the inventors contemplate the use of liposomes, nanocapsules, microparticles, microspheres, lipid particles, vesicles, and the like, for the introduction of the polynucleotide compositions of the present invention into suitable host cells. In particular, the polynucleotide compositions of the present invention may be formulated for delivery either encapsulated in a lipid particle, a liposome, a vesicle, a nanosphere, or a nanoparticle or the like.

[0200] Such formulations may be preferred for the introduction of pharmaceutically acceptable formulations of the nucleic acids disclosed herein. The formation and use of liposomes is generally known to those of skill in the art (see for example, Couvreur et al., 1977; Couvreur, 1988; Lasic, 1998; which describes the use of liposomes and nanocapsules in the targeted antibiotic therapy for intracellular bacterial infections and diseases). Recently, liposomes were developed with improved serum stability and circulation half-lives (Gabizon and Papahadjopoulos, 1988; Allen and Choun, 1987; U.S. Pat. No. 5,741,516, specifically incorporated herein by reference in its entirety). Further, various methods of liposome and liposome like preparations as potential drug carriers have been reviewed (Takakura, 1998; Chandran et al., 1997; Margalit, 1995; U.S. Pat. Nos. 5,567,434; 5,552,157; 5,565,213; 5,738,868 and 5,795,587, each specifically incorporated herein by reference in its entirety).

[0201] Liposomes have been used successfully with a number of cell types that are normally resistant to transfection by other procedures including T cell suspensions, primary hepatocyte cultures and PC12 cells (Renneisen et al., 1990; Muller et al., 1990). In addition, liposomes are free of the DNA length constraints that are typical of viral-based delivery systems. Liposomes have been used effectively to introduce genes, drugs (Heath and Martin, 1986; Heath et al., 1986; Balazsovits et al., 1989; Fresta and Puglisi, 1996), radiotherapeutic agents (Pikul et al., 1987), enzymes (Imaizumi et al., 1 990a; Imaizumi et al., 1 990b), viruses (Faller and Baltimore, 1984), transcription factors and allosteric effectors (Nicolau and Gersonde, 1979) into a variety of cultured cell lines and animals. In addition, several successful clinical trails examining the effectiveness of liposome-mediated drug delivery have been completed (Lopez-Berestein et al., 1985a; 1985b; Coune, 1988; Sculier et al., 1988). Furthermore, several studies suggest that the use of liposomes is not associated with autoimmune responses, toxicity or gonadal localization after systemic delivery (Mori and Fukatsu, 1992).

[0202] Liposomes are formed from phospholipids that are dispersed in an aqueous medium and spontaneously form multilamellar concentric bilayer vesicles (also termed multilamellar vesicles (MLVs). MLVs generally have diameters of from 25 nm to 4 μm. Sonication of MLVs results in the formation of small unilamellar vesicles (SUVs) with diameters in the range of 200 to 500 Å, containing an aqueous solution in the core.

[0203] Liposomes bear resemblance to cellular membranes and are contemplated for use in connection with the present invention as carriers for the peptide compositions. They are widely suitable as both water- and lipid-soluble substances can be entrapped, i.e. in the aqueous spaces and within the bilayer itself, respectively. It is possible that the drug-bearing liposomes may even be employed for site-specific delivery of active agents by selectively modifying the liposomal formulation.

[0204] In addition to the teachings of Couvreur et al. (1977; 1988), the following information may be utilized in generating liposomal formulations. Phospholipids can form a variety of structures other than liposomes when dispersed in water, depending on the molar ratio of lipid to water. At low ratios the liposome is the preferred structure. The physical characteristics of liposomes depend on pH, ionic strength and the presence of divalent cations. Liposomes can show low permeability to ionic and polar substances, but at elevated temperatures undergo a phase transition which markedly alters their permeability. The phase transition involves a change from a closely packed, ordered structure, known as the gel state, to a loosely packed, less-ordered structure, known as the fluid state. This occurs at a characteristic phase-transition temperature and results in an increase in permeability to ions, sugars, and drugs.

[0205] Alternatively, the invention provides for pharmaceutically acceptable nanocapsule formulations of the polynucleotide compositions of the present invention. Nanocapsules can generally entrap compounds in a stable and reproducible way (Henry-Michelland et al., 1987; Quintanar-Guerrero et al., 1998; Douglas et al., 1987). To avoid side effects due to intracellular polymeric overloading, such ultrafine particles (sized around 0.1 μm) should be designed using polymers able to be degraded in vivo. Biodegradable polyalkyl-cyanoacrylate nanoparticles that meet these requirements are contemplated for use in the present invention, and such particles may be are easily made, as described (Couvreur et al., 1980; 1988; zur Muhlen et al., 1998; Zambaux et al. 1998; Pinto-Alphandry et al., 1995 and U.S. Pat. No. 5,145,684, specifically incorporated herein by reference in its entirety). In particular, methods of polynucleotide polynucleotide delivery to a target cell using either nanoparticles or nanospheres (Schwab et al., 1994; Truong-Le et al., 1998) are also particularly contemplated to be useful in formulating the disclosed compositions for administration to an animal, and to a human in particular.

[0206] Therapeutic Agents and Kits

[0207] The invention also provides one or more of the hematological malignancy-related compositions formulated with one or more pharmaceutically acceptable excipients, carriers, diluents, adjuvants, and/or other components for use in the preaparation of medicaments, or diagnostic reagents, as well as various kits comprising one or more of such compositions, medicaments, or formulations intended for administration to an animal in need thereof, or for use in one or more diagnostic assays for identifying polynucleotides, polypeptides, and/or antibodies that are specific for one or more hematological malignancy-related compounds as described herein. In addition to the disclosed epitopes, antibodies and antigen binding fragments, antibody- or antigen binding fragment-encoding polynucleotides or additional anticancer agents, polynucleotides, peptides, antigens, or other therapeutic compounds as may be employed in the formulation of particular compositions and formulations disclosed herein, and particularly in the preparation of anticancer agents or anti-hematological malignancies therapies for administration to the affected mammal.

[0208] As such, preferred animals for administration of the pharmaceutical compositions disclosed herein include mammals, and particularly humans. Other preferred animals include primates, sheep, goats, bovines, equines, porcines, lupines, canines, and felines, as well as any other mammalian species commonly considered pets, livestock, or commercially relevant animal species. The compositions and formulations may include partially or significantly purified polypeptide, polynucleotide, or antibody or antigen binding fragment compositions, either alone, or in combination with one or more additional active ingredients, anticancer agents, vaccines, adjuvants, or other therapeutics which may be obtained from natural or recombinant sources, or which may be obtainable naturally or either chemically synthesized, or alternatively produced in vitro from recombinant host cells expressing one or more nucleic acid segments that encode one or more such additional active ingredients, carriers, adjuvants, cofactors, or other therapeutic compound.

[0209] Diagnostic Reagents and Kits

[0210] The invention further provides diagnostic reagents and kits comprising one or more such reagents for use in a variety of diagnostic assays, including for example, immunoassays such as ELISA and “sandwich”-type immunoassays. Such kits may preferably include at least a first peptide, or a first antibody or antigen binding fragment of the invention, a functional fragment thereof, or a cocktail thereof, and means for signal generation. The kit's components may be pre-attached to a solid support, or may be applied to the surface of a solid support when the kit is used. The signal generating means may come pre-associated with an antibody of the invention or may require combination with one or more components, e.g., buffers, antibody-enzyme conjugates, enzyme substrates, or the like, prior to use. Kits may also include additional reagents, e.g., blocking reagents for reducing nonspecific binding to the solid phase surface, washing reagents, enzyme substrates, and the like. The solid phase surface may be in the form of microtiter plates, microspheres, or other materials suitable for immobilizing proteins, peptides, or polypeptides. Preferably, an enzyme that catalyzes the formation of a chemiluminescent or chromogenic product or the reduction of a chemiluminescent or chromogenic substrate is a component of the signal generating means. Such enzymes are well known in the art.

[0211] Such kits are useful in the detection, monitoring and diagnosis of conditions characterized by over-expression or inappropriate expression of hematological malignancy-related peptides, polypeptides, antibodies, and/or polynucleotides, as well as hybridomas, host cells, and vectors comprising one or more such compositions as disclosed herein.

[0212] The therapeutic and diagnostic kits of the present invention may also be prepared that comprise at least one of the antibody, peptide, antigen binding fragment, hybridoma, vector, vaccine, polynucleotide, or cellular compositions disclosed herein and instructions for using the composition as a diagnostic reagent or therapeutic agent. Containers for use in such kits may typically comprise at least one vial, test tube, flask, bottle, syringe or other suitable container, into which one or more of the diagnostic and/or therapeutic composition(s) may be placed, and preferably suitably aliquoted. Where a second therapeutic agent is also provided, the kit may also contain a second distinct container into which this second diagnostic and/or therapeutic composition may be placed. Alternatively, a plurality of compounds may be prepared in a single pharmaceutical composition, and may be packaged in a single container means, such as a vial, flask, syringe, bottle, or other suitable single container. The kits of the present invention will also typically include a means for containing the vial(s) in close confinement for commercial sale, such as, e.g., injection or blow-molded plastic containers into which the desired vial(s) are retained. Where a radiolabel, chromogenic, fluorigenic, or other type of detectable label or detecting means is included within the kit, the labeling agent may be provided either in the same container as the diagnostic or therapeutic composition itself, or may alternatively be placed in a second distinct container means into which this second composition may be placed and suitably aliquoted. Alternatively, the detection reagent and the label may be prepared in a single container means, and in most cases, the kit will also typically include a means for containing the vial(s) in close confinement for commercial sale and/or convenient packaging and delivery.

[0213] Polynucleotide Compositions

[0214] As used herein, the terms “DNA segment” and “polynucleotide” refer to a DNA molecule that has been isolated free of total genomic DNA of a particular species. Therefore, a DNA segment encoding a polypeptide refers to a DNA segment that contains one or more coding sequences yet is substantially isolated away from, or purified free from, total genomic DNA of the species from which the DNA segment is obtained. Included within the terms “DNA segment” and “polynucleotide” are DNA segments and smaller fragments of such segments, and also recombinant vectors, including, for example, plasmids, cosmids, phagemids, phage, viruses, and the like.

[0215] As will be understood by those skilled in the art, the DNA segments of this invention can include genomic sequences, extra-genomic and plasmid-encoded sequences and smaller engineered gene segments that express, or may be adapted to express, proteins, polypeptides, peptides and the like. Such segments may be naturally isolated, or modified synthetically by the hand of man.

[0216] “Isolated,” as used herein, means that a polynucleotide is substantially away from other coding sequences, and that the DNA segment does not contain large portions of unrelated coding DNA, such as large chromosomal fragments or other functional genes or polypeptide coding regions. Of course, this refers to the DNA segment as originally isolated, and does not exclude genes or coding regions later added to the segment by the hand of man.

[0217] As will be recognized by the skilled artisan, polynucleotides may be single-stranded (coding or antisense) or double-stranded, and may be DNA (genomic, cDNA or synthetic) or RNA molecules. RNA molecules include HnRNA molecules, which contain introns and correspond to a DNA molecule in a one-to-one manner, and mRNA molecules, which do not contain introns. Additional coding or non-coding sequences may, but need not, be present within a polynucleotide of the present invention, and a polynucleotide may, but need not, be linked to other molecules and/or support materials.

[0218] Polynucleotides may comprise a native sequence (i.e., an endogenous sequence that encodes a hematological malignancy-related tumor protein or a portion thereof) or may comprise a variant, or a biological or antigenic functional equivalent of such a sequence. Polynucleotide variants may contain one or more substitutions, additions, deletions and/or insertions, as further described below, preferably such that the immunogenicity of the encoded polypeptide is not diminished, relative to a native tumor protein. The effect on the immunogenicity of the encoded polypeptide may generally be assessed as described herein. The term “variants” also encompasses homologous genes of xenogenic origin.

[0219] When comparing polynucleotide or polypeptide sequences, two sequences are said to be “identical” if the sequence of nucleotides or amino acids in the two sequences is the same when aligned for maximum correspondence, as described below. Comparisons between two sequences are typically performed by comparing the sequences over a comparison window to identify and compare local regions of sequence similarity. A “comparison window” as used herein, refers to a segment of at least about 20 contiguous positions, usually 30 to about 75, 40 to about 50, in which a sequence may be compared to a reference sequence of the same number of contiguous positions after the two sequences are optimally aligned.

[0220] Optimal alignment of sequences for comparison may be conducted using the Megalign program in the Lasergene suite of bioinformatics software (DNASTAR, Inc., Madison, Wis.), using default parameters. This program embodies several alignment schemes described in the following references: Dayhoff, Mo. (1978) A model of evolutionary change in proteins—Matrices for detecting distant relationships. In Dayhoff, Mo. (ed.) Atlas of Protein Sequence and Structure, National Biomedical Research Foundation, Washington DC. Vol. 5, Suppl. 3, pp. 345-358; Hein J. (1990) Unified Approach to Alignment and Phylogenes pp. 626-645 Methods in Enzymology vol. 183, Academic Press, Inc., San Diego, Calif.; Higgins, D. G. and Sharp, P. M. (1989) CABIOS 5:151-153; Myers, E. W. and Muller W. (1988) CABIOS 4:11-17; Robinson, E. D. (1971) Comb. Theor 11:105; Santou, N. Nes, M. (1987) Mol. Biol. Evol. 4:406-425; Sneath, P. H. A. and Sokal, R. R. (1973) Numerical Taxonomy—the Principles and Practice of Numerical Taxonomy, Freeman Press, San Francisco, Calif.; Wilbur, W. J. and Lipman, D. J. (1983) Proc. Natl. Acad., Sci. USA 80:726-730.

[0221] Alternatively, optimal alignment of sequences for comparison may be conducted by the local identity algorithm of Smith and Waterman (1981) Add. APL. Math 2:482, by the identity alignment algorithm of Needleman and Wunsch (1970) J. Mol. Biol. 48:443, by the search for similarity methods of Pearson and Lipman (1988) Proc. Natl. Acad. Sci. USA 85: 2444, by computerized implementations of these algorithms (GAP, BESTFIT, BLAST, FASTA, and TFASTA in the Wisconsin Genetics Software Package, Genetics Computer Group (GCG), 575 Science Dr., Madison, Wis.), or by inspection.

[0222] One preferred example of algorithms that are suitable for determining percent sequence identity and sequence similarity are the BLAST and BLAST 2.0 algorithms, which are described in Altschul et al. (1977) Nucl. Acids Res. 25:3389-3402 and Altschul et al. (1990) J. Mol. Biol. 215:403-410, respectively. BLAST and BLAST 2.0 can be used, for example with the parameters described herein, to determine percent sequence identity for the polynucleotides and polypeptides of the invention. Software for performing BLAST analyses is publicly available through the National Center for Biotechnology Information. In one illustrative example, cumulative scores can be calculated using, for nucleotide sequences, the parameters M (reward score for a pair of matching residues; always >0) and N (penalty score for mismatching residues; always <0). For amino acid sequences, a scoring matrix can be used to calculate the cumulative score. Extension of the word hits in each direction are halted when: the cumulative alignment score falls off by the quantity X from its maximum achieved value; the cumulative score goes to zero or below, due to the accumulation of one or more negative-scoring residue alignments; or the end of either sequence is reached. The BLAST algorithm parameters W, T and X determine the sensitivity and speed of the alignment. The BLASTN program (for nucleotide sequences) uses as defaults a wordlength (W) of 11, and expectation (E) of 10, and the BLOSUM62 scoring matrix (see Henikoff and Henikoff (1989) Proc. Natl. Acad. Sci. USA 89:10915) alignments, (B) of 50, expectation (E) of 10, M=5, N=−4 and a comparison of both strands.

[0223] Preferably, the “percentage of sequence identity” is determined by comparing two optimally aligned sequences over a window of comparison of at least 20 positions, wherein the portion of the polynucleotide or polypeptide sequence in the comparison window may comprise additions or deletions (i.e., gaps) of 20 percent or less, usually 5 to 15 percent, or 10 to 12 percent, as compared to the reference sequences (which does not comprise additions or deletions) for optimal alignment of the two sequences. The percentage is calculated by determining the number of positions at which the identical nucleic acid bases or amino acid residue occurs in both sequences to yield the number of matched positions, dividing the number of matched positions by the total number of positions in the reference sequence (i.e., the window size) and multiplying the results by 100 to yield the percentage of sequence identity.

[0224] Therefore, the present invention encompasses polynucleotide and polypeptide sequences having substantial identity to the sequences disclosed herein, for example those comprising at least 50% sequence identity, preferably at least 55%, 60%, 65%, 70%, 75%, 80%, 85%, 90%, 95%, 96%, 97%, 98%, or 99% or higher, sequence identity compared to a polynucleotide or polypeptide sequence of this invention using the methods described herein, (e.g., BLAST analysis using standard parameters, as described below). One skilled in this art will recognize that these values can be appropriately adjusted to determine corresponding identity of proteins encoded by two nucleotide sequences by taking into account codon degeneracy, amino acid similarity, reading frame positioning and the like.

[0225] In additional embodiments, the present invention provides isolated polynucleotides and polypeptides comprising various lengths of contiguous stretches of sequence identical to or complementary to one or more of the sequences disclosed herein. For example, polynucleotides are provided by this invention that comprise at least about 15, 20, 30, 40, 50, 75, 100, 150, 200, 300, 400, 500 or 1000 or more contiguous nucleotides of one or more of the sequences disclosed herein as well as all intermediate lengths there between. It will be readily understood that “intermediate lengths”, in this context, means any length between the quoted values, such as 16, 17, 18, 19, etc.; 21, 22, 23, etc.; 30, 31, 32, etc.; 50, 51, 52, 53, etc.; 100, 101, 102, 103, etc.; 150, 151, 152, 153, etc.; including all integers through 200-500; 500-1,000, and the like.

[0226] The polynucleotides of the present invention, or fragments thereof, regardless of the length of the coding sequence itself, may be combined with other DNA sequences, such as promoters, polyadenylation signals, additional restriction enzyme sites, multiple cloning sites, other coding segments, and the like, such that their overall length may vary considerably. It is therefore contemplated that a nucleic acid fragment of almost any length may be employed, with the total length preferably being limited by the ease of preparation and use in the intended recombinant DNA protocol. For example, illustrative DNA segments with total lengths of about 10,000, about 5000, about 3000, about 2,000, about 1,000, about 500, about 200, about 100, about 50 base pairs in length, and the like, (including all intermediate lengths) are contemplated to be useful in many implementations of this invention.

[0227] In other embodiments, the present invention is directed to polynucleotides that are capable of hybridizing under moderately stringent conditions to a polynucleotide sequence provided herein, or a fragment thereof, or a complementary sequence thereof. Hybridization techniques are well known in the art of molecular biology. For purposes of illustration, suitable moderately stringent conditions for testing the hybridization of a polynucleotide of this invention with other polynucleotides include prewashing in a solution of 5×SSC, 0.5% SDS, 1.0 mM EDTA (pH 8.0); hybridizing at 50° C.-65° C., 5×SSC, overnight; followed by washing twice at 65° C. for 20 minutes with each of 2×, 0.5× and 0.2×SSC containing 0.1% SDS.

[0228] Moreover, it will be appreciated by those of ordinary skill in the art that, as a result of the degeneracy of the genetic code, there are many nucleotide sequences that encode a polypeptide as described herein. Some of these polynucleotides bear minimal homology to the nucleotide sequence of any native gene. Nonetheless, polynucleotides that vary due to differences in codon usage are specifically contemplated by the present invention. Further, alleles of the genes comprising the polynucleotide sequences provided herein are within the scope of the present invention. Alleles are endogenous genes that are altered as a result of one or more mutations, such as deletions, additions and/or substitutions of nucleotides. The resulting mRNA and protein may, but need not, have an altered structure or function. Alleles may be identified using standard techniques (such as hybridization, amplification and/or database sequence comparison).

[0229] Probes and Primers

[0230] In other embodiments of the present invention, the polynucleotide sequences provided herein can be advantageously used as probes or primers for nucleic acid hybridization. As such, it is contemplated that nucleic acid segments that comprise a sequence region of at least about 15, 20, 25, 30, 35, 40, 45, 50, 55, 60, 65, 70, 75, 80, 85, 90, or 95 nucleotide long contiguous sequence that has the same sequence as, or is complementary to, at least a 15, 20, 25, 30, 35, 40, 45, 50, 55, 60, 65, 70, 75, 80, 85, 90, or 95 nucleotide long contiguous sequence as disclosed in any one of SEQ ID NO:1 to SEQ ID NO:668 will find particular utility in a variety of hybridization embodiments. Longer contiguous identical or complementary sequences, e.g., those of about 100, 110, 120, 130, 140, 150, 160, 170, 180, 190, 200, 210, 220, 230, 240, 250, 260, 270, 280, 290, 300, 310, 320, 330, 340, 350, 360, 370, 380, 390, 400, 410, 420, 430, 440, 450, 460, 470, 480, 490, 500, 525, 550, 575, 600, 650, 700, 750, 800, 850, 900, 950, or even 1000 or so nucleotides (including all intermediate lengths) and all full-length sequences as disclosed in SEQ ID NO:1 to SEQ ID NO:668 will also be of use in certain embodiments as probes, primers, or amplification targets and such like.

[0231] The ability of such nucleic acid probes to specifically hybridize to a sequence of interest will enable them to be of use in detecting the presence of complementary sequences in a given sample. However, other uses are also envisioned, such as the use of the sequence information for the preparation of mutant species primers, or primers, for use in preparing other genetic constructions, and for identifying and characterizing full-length polynucleotides and full, or substantially full-length cDNAs, mRNAs, and such like.

[0232] Polynucleotide molecules having sequence regions consisting of contiguous nucleotide stretches identical or complementary to one or more polynucleotide sequences as disclosed herein, are particularly contemplated as hybridization probes for use in, e.g., Southern hybridization analyses and Northern blotting. This would allow a gene product, or fragment thereof, to be analyzed, both in diverse cell types and also in various bacterial cells. The total size of fragment, as well as the size of the complementary stretch(es), will ultimately depend on the intended use or application of the particular nucleic acid segment. Smaller fragments will generally find use in hybridization embodiments, wherein the length of the contiguous complementary region may be varied, such as between about 15, 20, 25, 30, 35, 40, 45, 50, 55, 60 or so and up to and including larger contiguous complementary sequences, including those of about 70, 80, 90, 100, 120, 140, 160, 180, or 200 or so nucleotides in length may also be used, according to the given desired goal, and the particular length of the complementary sequences one wishes to detect by hybridization analysis.

[0233] The use of a hybridization probe of about between about 20 and about 500 nucleotides in length allows the formation of a duplex molecule that is both stable and selective. Molecules having contiguous complementary sequences over stretches greater than about 20 or so bases in length are generally preferred, though, in order to increase stability and selectivity of the hybrid, and thereby improve the quality and degree of specific hybrid molecules obtained. One will generally prefer to design nucleic acid molecules having gene-complementary stretches of between about 25 and 300 or so contiguous nucleotides, or even longer where desired.

[0234] Hybridization probes may be selected from any portion of any of the sequences disclosed herein. All that is required is to review the sequence set forth in any one of SEQ ID NO:1 through SEQ ID NO:668, or to any contiguous portion of such a sequence, from about 15 to 30 nucleotides in length up to and including the full length sequences disclosed in any one of SEQ ID NO:1 through SEQ ID NO:668, that one wishes to utilize as a probe or primer. The choice of probe and primer sequences may be governed by various factors. For example, one may wish to employ primers from towards the termini of the total sequence.

[0235] Small polynucleotide segments or fragments may be readily prepared by, for example, directly synthesizing the fragment by chemical means, as is commonly practiced using an automated oligonucleotide synthesizer. Also, fragments may be obtained by application of nucleic acid reproduction technology, such as the PCR™ technology of U.S. Pat. No. 4,683,202 (incorporated herein by reference), by introducing selected sequences into recombinant vectors for recombinant production, and by other recombinant DNA techniques generally known to those of skill in the art of molecular biology.

[0236] The nucleotide sequences of the invention may be used for their ability to selectively form duplex molecules with complementary stretches of the entire gene or gene fragments of interest. Depending on the application envisioned, one will typically desire to employ varying conditions of hybridization to achieve varying degrees of selectivity of probe towards target sequence. For applications requiring high selectivity, one will typically desire to employ relatively stringent conditions to form the hybrids, e.g., one will select relatively low salt and/or high temperature conditions, such as provided by a salt concentration of from about 0.02 M to about 0.15 M salt at temperatures of from about 50° C. to about 70° C. Such selective conditions tolerate little, if any, mismatch between the probe and the template or target strand, and would be particularly suitable for isolating related sequences.

[0237] Of course, for some applications, for example, where one desires to prepare mutants employing a mutant primer strand hybridized to an underlying template, less stringent (reduced stringency) hybridization conditions will typically be needed in order to allow formation of the heteroduplex. In these circumstances, one may desire to employ salt conditions such as those of from about 0.15 M to about 0.9 M salt, at temperatures ranging from about 20° C. to about 55° C. Cross-hybridizing species can thereby be readily identified as positively hybridizing signals with respect to control hybridizations. In any case, it is generally appreciated that conditions can be rendered more stringent by the addition of increasing amounts of formamide, which serves to destabilize the hybrid duplex in the same manner as increased temperature. Thus, hybridization conditions can be readily manipulated, and thus will generally be a method of choice depending on the desired results.

[0238] Polynucleotide Identification and Characterization

[0239] Polynucleotides may be identified, prepared and/or manipulated using any of a variety of well established techniques. For example, a polynucleotide may be identified, as described in more detail below, by screening a microarray of cDNAs for tumor-associated expression (i.e., expression that is at least two fold greater in a tumor than in normal tissue, as determined using a representative assay provided herein). Such screens may be performed, for example, using a Synteni microarray (Palo Alto, Calif.) according to the manufacturer's instructions (and essentially as described by Schena et al., Proc. Natl. Acad. Sci. USA 93:10614-10619, 1996 and Heller et al., Proc. Natl. Acad. Sci USA 94:2150-2155, 1997). Alternatively, polynucleotides may be amplified from cDNA prepared from cells expressing the proteins described herein, such as hematological malignancy-related tumor cells. Such polynucleotides may be amplified via polymerase chain reaction (PCR). For this approach, sequence-specific primers may be designed based on the sequences provided herein, and may be purchased or synthesized.

[0240] An amplified portion of a polynucleotide of the present invention may be used to isolate a full length gene from a suitable library (e.g., a hematological malignancy-related tumor cDNA library) using well known techniques. Within such techniques, a library (cDNA or genomic) is screened using one or more polynucleotide probes or primers suitable for amplification. Preferably, a library is size-selected to include larger molecules. Random primed libraries may also be preferred for identifying 5′ and upstream regions of genes. Genomic libraries are preferred for obtaining introns and extending 5′ sequences.

[0241] For hybridization techniques, a partial sequence may be labeled (e.g., by nick-translation or end-labeling with ³²P) using well known techniques. A bacterial or bacteriophage library is then generally screened by hybridizing filters containing denatured bacterial colonies (or lawns containing phage plaques) with the labeled probe (see Sambrook et al., Molecular Cloning: A Laboratory Manual, Cold Spring Harbor Laboratories, Cold Spring Harbor, N.Y., 1989). Hybridizing colonies or plaques are selected and expanded, and the DNA is isolated for further analysis. cDNA clones may be analyzed to determine the amount of additional sequence by, for example, PCR using a primer from the partial sequence and a primer from the vector. Restriction maps and partial sequences may be generated to identify one or more overlapping clones. The complete sequence may then be determined using standard techniques, which may involve generating a series of deletion clones. The resulting overlapping sequences can then assembled into a single contiguous sequence. A full length cDNA molecule can be generated by ligating suitable fragments, using well known techniques.

[0242] Alternatively, there are numerous amplification techniques for obtaining a full length coding sequence from a partial cDNA sequence. Within such techniques, amplification is generally performed via PCR. Any of a variety of commercially available kits may be used to perform the amplification step. Primers may be designed using, for example, software or algorithms or formulas well known in the art.

[0243] One such amplification technique is inverse PCR (see Triglia et al., Nucl. Acids Res. 16:8186, 1988), which uses restriction enzymes to generate a fragment in the known region of the gene. The fragment is then circularized by intramolecular ligation and used as a template for PCR with divergent primers derived from the known region. Within an alternative approach, sequences adjacent to a partial sequence may be retrieved by amplification with a primer to a linker sequence and a primer specific to a known region. The amplified sequences are typically subjected to a second round of amplification with the same linker primer and a second primer specific to the known region. A variation on this procedure, which employs two primers that initiate extension in opposite directions from the known sequence, is described in WO 96/38591. Another such technique is known as “rapid amplification of cDNA ends” or RACE. This technique involves the use of an internal primer and an external primer, which hybridizes to a polyA region or vector sequence, to identify sequences that are 5′ and 3′ of a known sequence. Additional techniques include capture PCR (Lagerstrom et al., PCR Methods Applic. 1:111-19, 1991) and walking PCR (Parker et al., Nucl. Acids. Res. 19:3055-60, 1991). Other methods employing amplification may also be employed to obtain a full length cDNA sequence.

[0244] In certain instances, it is possible to obtain a full length cDNA sequence by analysis of sequences provided in an expressed sequence tag (EST) database, such as that available from GenBank. Searches for overlapping ESTs may generally be performed using well known programs (e.g., NCBI BLAST searches), and such ESTs may be used to generate a contiguous full length sequence. Full length DNA sequences may also be obtained by analysis of genomic fragments.

[0245] Polynucleotide Expression in Host Cells

[0246] In other embodiments of the invention, polynucleotide sequences or fragments thereof which encode polypeptides of the invention, or fusion proteins or functional equivalents thereof, may be used in recombinant DNA molecules to direct expression of a polypeptide in appropriate host cells. Due to the inherent degeneracy of the genetic code, other DNA sequences that encode substantially the same or a functionally equivalent amino acid sequence may be produced and these sequences may be used to clone and express a given polypeptide.

[0247] As will be understood by those of skill in the art, it may be advantageous in some instances to produce polypeptide-encoding nucleotide sequences possessing non-naturally occurring codons. For example, codons preferred by a particular prokaryotic or eukaryotic host can be selected to increase the rate of protein expression or to produce a recombinant RNA transcript having desirable properties, such as a half-life which is longer than that of a transcript generated from the naturally occurring sequence.

[0248] Moreover, the polynucleotide sequences of the present invention can be engineered using methods generally known in the art in order to alter polypeptide encoding sequences for a variety of reasons, including but not limited to, alterations which modify the cloning, processing, and/or expression of the gene product. For example, DNA shuffling by random fragmentation and PCR reassembly of gene fragments and synthetic oligonucleotides may be used to engineer the nucleotide sequences. In addition, site-directed mutagenesis may be used to insert new restriction sites, alter glycosylation patterns, change codon preference, produce splice variants, or introduce mutations, and so forth.

[0249] In another embodiment of the invention, natural, modified, or recombinant nucleic acid sequences may be ligated to a heterologous sequence to encode a fusion protein. For example, to screen peptide libraries for inhibitors of polypeptide activity, it may be useful to encode a chimeric protein that can be recognized by a commercially available antibody. A fusion protein may also be engineered to contain a cleavage site located between the polypeptide-encoding sequence and the heterologous protein sequence, so that the polypeptide may be cleaved and purified away from the heterologous moiety.

[0250] Sequences encoding a desired polypeptide may be synthesized, in whole or in part, using chemical methods well known in the art (see Caruthers, M. H. et al. (1980) Nucl. Acids Res. Symp. Ser. 215-223, Horn, T. et al. (1980) Nucl. Acids Res. Symp. Ser. 225-232). Alternatively, the protein itself may be produced using chemical methods to synthesize the amino acid sequence of a polypeptide, or a portion thereof. For example, peptide synthesis can be performed using various solid-phase techniques (Roberge, J. Y. et al. (1995) Science 269:202-204) and automated synthesis may be achieved, for example, using the ABI 431A Peptide Synthesizer (Perkin Elmer, Palo Alto, Calif.).

[0251] A newly synthesized peptide may be substantially purified by preparative high performance liquid chromatography (e.g., Creighton, T. (1983) Proteins, Structures and Molecular Principles, W H Freeman and Co., New York, N.Y.) or other comparable techniques available in the art. The composition of the synthetic peptides may be confirmed by amino acid analysis or sequencing (e.g., the Edman degradation procedure). Additionally, the amino acid sequence of a polypeptide, or any part thereof, may be altered during direct synthesis and/or combined using chemical methods with sequences from other proteins, or any part thereof, to produce a variant polypeptide.

[0252] In order to express a desired polypeptide, the nucleotide sequences encoding the polypeptide, or functional equivalents, may be inserted into appropriate expression vector, i.e., a vector which contains the necessary elements for the transcription and translation of the inserted coding sequence. Methods which are well known to those skilled in the art may be used to construct expression vectors containing sequences encoding a polypeptide of interest and appropriate transcriptional and translational control elements. These methods include in vitro recombinant DNA techniques, synthetic techniques, and in vivo genetic recombination. Such techniques are described in Sambrook, J. et al. (1989) Molecular Cloning, A Laboratory Manual, Cold Spring Harbor Press, Plainview, N.Y., and Ausubel, F. M. et al. (1989) Current Protocols in Molecular Biology, John Wiley & Sons, New York. N.Y.

[0253] A variety of expression vector/host systems may be utilized to contain and express polynucleotide sequences. These include, but are not limited to, microorganisms such as bacteria transformed with recombinant bacteriophage, plasmid, or cosmid DNA expression vectors; yeast transformed with yeast expression vectors; insect cell systems infected with virus expression vectors (e.g., baculovirus); plant cell systems transformed with virus expression vectors (e.g., cauliflower mosaic virus, CaMV; tobacco mosaic virus, TMV) or with bacterial expression vectors (e.g., Ti or pBR322 plasmids); or animal cell systems.

[0254] The “control elements” or “regulatory sequences” present in an expression vector are those non-translated regions of the vector—enhancers, promoters, 5′ and 3′ untranslated regions—which interact with host cellular proteins to carry out transcription and translation. Such elements may vary in their strength and specificity. Depending on the vector system and host utilized, any number of suitable transcription and translation elements, including constitutive and inducible promoters, may be used. For example, when cloning in bacterial systems, inducible promoters such as the hybrid lacZ promoter of the PBLUESCRIPT phagemid (Stratagene, La Jolla, Calif.) or PSPORT1 plasmid (Gibco BRL, Gaithersburg, Md.) and the like may be used. In mammalian cell systems, promoters from mammalian genes or from mammalian viruses are generally preferred. If it is necessary to generate a cell line that contains multiple copies of the sequence encoding a polypeptide, vectors based on SV40 or EBV may be advantageously used with an appropriate selectable marker.

[0255] In bacterial systems, a number of expression vectors may be selected depending upon the use intended for the expressed polypeptide. For example, when large quantities are needed, for example for the induction of antibodies, vectors which direct high level expression of fusion proteins that are readily purified may be used. Such vectors include, but are not limited to, the multifunctional E. coli cloning and expression vectors such as BLUESCRIPT (Stratagene), in which the sequence encoding the polypeptide of interest may be ligated into the vector in frame with sequences for the amino-terminal Met and the subsequent 7 residues of beta-galactosidase so that a hybrid protein is produced; pIN vectors (Van Heeke, G. and S. M. Schuster (1989) J. Biol. Chem. 264:5503-5509); and the like. pGEX Vectors (Promega, Madison, Wis.) may also be used to express foreign polypeptides as fusion proteins with glutathione S-transferase (GST). In general, such fusion proteins are soluble and can easily be purified from lysed cells by adsorption to glutathione-agarose beads followed by elution in the presence of free glutathione. Proteins made in such systems may be designed to include heparin, thrombin, or factor XA protease cleavage sites so that the cloned polypeptide of interest can be released from the GST moiety at will.

[0256] In the yeast, Saccharomyces cerevisiae, a number of vectors containing constitutive or inducible promoters such as alpha factor, alcohol oxidase, and PGH may be used. For reviews, see Ausubel et al. (supra) and Grant et al. (1987) Methods Enzymol. 153:516-544.

[0257] In cases where plant expression vectors are used, the expression of sequences encoding polypeptides may be driven by any of a number of promoters. For example, viral promoters such as the 35S and 19S promoters of CaMV may be used alone or in combination with the omega leader sequence from TMV (Takamatsu, N. (1987) EMBO J. 6:307-311. Alternatively, plant promoters such as the small subunit of RUBISCO or heat shock promoters may be used (Coruzzi, G. et al. (1984) EMBO J. 3:1671-1680; Broglie, R. et al. (1984) Science 224:838-843; and Winter, J. et al. (1991) Results Probl. Cell Differ. 17:85-105). These constructs can be introduced into plant cells by direct DNA transformation or pathogen-mediated transfection. Such techniques are described in a number of generally available reviews (see, for example, Hobbs, S. or Murry, L. E. in McGraw Hill Yearbook of Science and Technology (1992) McGraw Hill, New York, N.Y.; pp. 191-196).

[0258] An insect system may also be used to express a polypeptide of interest. For example, in one such system, Autographa californica nuclear polyhedrosis virus (AcNPV) is used as a vector to express foreign genes in Spodoptera frugiperda cells or in Trichoplusia larvae. The sequences encoding the polypeptide may be cloned into a non-essential region of the virus, such as the polyhedrin gene, and placed under control of the polyhedrin promoter. Successful insertion of the polypeptide-encoding sequence will render the polyhedrin gene inactive and produce recombinant virus lacking coat protein. The recombinant viruses may then be used to infect, for example, S. frugiperda cells or Trichoplusia larvae in which the polypeptide of interest may be expressed (Engelhard, E. K. et al. (1994) Proc. Natl. Acad. Sci. 91 :3224-3227).

[0259] In mammalian host cells, a number of viral-based expression systems are generally available. For example, in cases where an adenovirus is used as an expression vector, sequences encoding a polypeptide of interest may be ligated into an adenovirus transcription/translation complex consisting of the late promoter and tripartite leader sequence. Insertion in a non-essential E1 or E3 region of the viral genome may be used to obtain a viable virus which is capable of expressing the polypeptide in infected host cells (Logan, J. and Shenk, T. (1984) Proc. Natl. Acad. Sci. 81:3655-3659). In addition, transcription enhancers, such as the Rous sarcoma virus (RSV) enhancer, may be used to increase expression in mammalian host cells.

[0260] Specific initiation signals may also be used to achieve more efficient translation of sequences encoding a polypeptide of interest. Such signals include the ATG initiation codon and adjacent sequences. In cases where sequences encoding the polypeptide, its initiation codon, and upstream sequences are inserted into the appropriate expression vector, no additional transcriptional or translational control signals may be needed. However, in cases where only coding sequence, or a portion thereof, is inserted, exogenous translational control signals including the ATG initiation codon should be provided. Furthermore, the initiation codon should be in the correct reading frame to ensure translation of the entire insert. Exogenous translational elements and initiation codons may be of various origins, both natural and synthetic. The efficiency of expression may be enhanced by the inclusion of enhancers which are appropriate for the particular cell system which is used, such as those described in the literature (Scharf, D. et al. (1994) Results Probl. Cell Differ. 20:125-162).

[0261] In addition, a host cell strain may be chosen for its ability to modulate the expression of the inserted sequences or to process the expressed protein in the desired fashion. Such modifications of the polypeptide include, but are not limited to, acetylation, carboxylation. glycosylation, phosphorylation, lipidation, and acylation. Post-translational processing which cleaves a “prepro” form of the protein may also be used to facilitate correct insertion, folding and/or function. Different host cells such as CHO, HeLa, MDCK, HEK293, and WI38, which have specific cellular machinery and characteristic mechanisms for such post-translational activities, may be chosen to ensure the correct modification and processing of the foreign protein.

[0262] For long-term, high-yield production of recombinant proteins, stable expression is generally preferred. For example, cell lines which stably express a polynucleotide of interest may be transformed using expression vectors which may contain viral origins of replication and/or endogenous expression elements and a selectable marker gene on the same or on a separate vector. Following the introduction of the vector, cells may be allowed to grow for 1-2 days in an enriched media before they are switched to selective media. The purpose of the selectable marker is to confer resistance to selection, and its presence allows growth and recovery of cells which successfully express the introduced sequences. Resistant clones of stably transformed cells may be proliferated using tissue culture techniques appropriate to the cell type.

[0263] Any number of selection systems may be used to recover transformed cell lines. These include, but are not limited to, the herpes simplex virus thymidine kinase (Wigler, M. et al. (1977) Cell 11:223-32) and adenine phosphoribosyltransferase (Lowy, I. et al. (1990) Cell 22:817-23) genes which can be employed in tk.sup.- or aprt.sup.- cells, respectively. Also, antimetabolite, antibiotic or herbicide resistance can be used as the basis for selection; for example, dhfr which confers resistance to methotrexate (Wigler, M. et al. (1980) Proc. Natl. Acad. Sci. 77:3567-70); npt, which confers resistance to the aminoglycosides, neomycin and G-418 (Colbere-Garapin, F. et al (1981) J. Mol. Biol. 150:1-14); and als or pat, which confer resistance to chlorsulfuron and phosphinotricin acetyltransferase, respectively (Murry, supra). Additional selectable genes have been described, for example, trpB, which allows cells to utilize indole in place of tryptophan, or hisD, which allows cells to utilize histinol in place of histidine (Hartman, S. C. and R. C. Mulligan (1988) Proc. Natl. Acad. Sci. 85:8047-51). Recently, the use of visible markers has gained popularity with such markers as anthocyanins, beta-glucuronidase and its substrate GUS, and luciferase and its substrate luciferin, being widely used not only to identify transformants, but also to quantify the amount of transient or stable protein expression attributable to a specific vector system (Rhodes, C. A. et al. (1995) Methods Mol. Biol. 55:121-131).

[0264] Although the presence/absence of marker gene expression suggests that the gene of interest is also present, its presence and expression may need to be confirmed. For example, if the sequence encoding a polypeptide is inserted within a marker gene sequence, recombinant cells containing sequences can be identified by the absence of marker gene function. Alternatively, a marker gene can be placed in tandem with a polypeptide-encoding sequence under the control of a single promoter. Expression of the marker gene in response to induction or selection usually indicates expression of the tandem gene as well.

[0265] Alternatively, host cells which contain and express a desired polynucleotide sequence may be identified by a variety of procedures known to those of skill in the art. These procedures include, but are not limited to, DNA-DNA or DNA-RNA hybridizations and protein bioassay or immunoassay techniques which include membrane, solution, or chip based technologies for the detection and/or quantification of nucleic acid or protein.

[0266] A variety of protocols for detecting and measuring the expression of polynucleotide-encoded products, using either polyclonal or monoclonal antibodies specific for the product are known in the art. Examples include enzyme-linked immunosorbent assay (ELISA), radioimmunoassay (RIA), and fluorescence activated cell sorting (FACS). A two-site, monoclonal-based immunoassay utilizing monoclonal antibodies reactive to two non-interfering epitopes on a given polypeptide may be preferred for some applications, but a competitive binding assay may also be employed. These and other assays are described, among other places, in Hampton, R. et al. (1990; Serological Methods, a Laboratory Manual, APS Press, St Paul. Minn.) and Maddox, D. E. et al. (1983; J. Exp. Med. 158:1211-1216).

[0267] A wide variety of labels and conjugation techniques are known by those skilled in the art and may be used in various nucleic acid and amino acid assays. Means for producing labeled hybridization or PCR probes for detecting sequences related to polynucleotides include oligolabeling, nick translation, end-labeling or PCR amplification using a labeled nucleotide. Alternatively, the sequences, or any portions thereof may be cloned into a vector for the production of an mRNA probe. Such vectors are known in the art, are commercially available, and may be used to synthesize RNA probes in vitro by addition of an appropriate RNA polymerase such as T7, T3, or SP6 and labeled nucleotides. These procedures may be conducted using a variety of commercially available kits. Suitable reporter molecules or labels, which may be used include radionuclides, enzymes, fluorescent, chemiluminescent, or chromogenic agents as well as substrates, cofactors, inhibitors, magnetic particles, and the like.

[0268] Host cells transformed with a polynucleotide sequence of interest may be cultured under conditions suitable for the expression and recovery of the protein from cell culture. The protein produced by a recombinant cell may be secreted or contained intracellularly depending on the sequence and/or the vector used. As will be understood by those of skill in the art, expression vectors containing polynucleotides of the invention may be designed to contain signal sequences which direct secretion of the encoded polypeptide through a prokaryotic or eukaryotic cell membrane. Other recombinant constructions may be used to join sequences encoding a polypeptide of interest to nucleotide sequence encoding a polypeptide domain which will facilitate purification of soluble proteins. Such purification facilitating domains include, but are not limited to, metal chelating peptides such as histidine-tryptophan modules that allow purification on immobilized metals, protein A domains that allow purification on immobilized immunoglobulin, and the domain utilized in the FLAGS extension/affinity purification system (Immunex Corp., Seattle, Wash.). The inclusion of cleavable linker sequences such as those specific for Factor XA or enterokinase (Invitrogen. San Diego, Calif.) between the purification domain and the encoded polypeptide may be used to facilitate purification. One such expression vector provides for expression of a fusion protein containing a polypeptide of interest and a nucleic acid encoding 6 histidine residues preceding a thioredoxin or an enterokinase cleavage site. The histidine residues facilitate purification on IMIAC (immobilized metal ion affinity chromatography) as described in Porath, J. et al. (1992, Prot. Exp. Purif. 3:263-281) while the enterokinase cleavage site provides a means for purifying the desired polypeptide from the fusion protein. A discussion of vectors which contain fusion proteins is provided in Kroll, D. J. et al. (1993; DNA Cell Biol. 12:441-453).

[0269] In addition to recombinant production methods, polypeptides of the invention, and fragments thereof, may be produced by direct peptide synthesis using solid-phase techniques (Merrifield J. (1963) J. Am. Chem. Soc. 85:2149-2154). Protein synthesis may be performed using manual techniques or by automation. Automated synthesis may be achieved, for example, using Applied Biosystems 431A Peptide Synthesizer (Perkin Elmer). Alternatively, various fragments may be chemically synthesized separately and combined using chemical methods to produce the full length molecule.

[0270] Site-Specific Mutagenesis

[0271] Site-specific mutagenesis is a technique useful in the preparation of individual peptides, or biologically functional equivalent polypeptides, through specific mutagenesis of the underlying polynucleotides that encode them. The technique, well-known to those of skill in the art, further provides a ready ability to prepare and test sequence variants, for example, incorporating one or more of the foregoing considerations, by introducing one or more nucleotide sequence changes into the DNA. Site-specific mutagenesis allows the production of mutants through the use of specific oligonucleotide sequences which encode the DNA sequence of the desired mutation, as well as a sufficient number of adjacent nucleotides, to provide a primer sequence of sufficient size and sequence complexity to form a stable duplex on both sides of the deletion junction being traversed. Mutations may be employed in a selected polynucleotide sequence to improve, alter, decrease, modify, or otherwise change the properties of the polynucleotide itself, and/or alter the properties, activity, composition, stability, or primary sequence of the encoded polypeptide.

[0272] In certain embodiments of the present invention, the inventors contemplate the mutagenesis of the disclosed polynucleotide sequences to alter one or more properties of the encoded polypeptide, such as the antigenicity of a polypeptide vaccine. The techniques of site-specific mutagenesis are well-known in the art, and are widely used to create variants of both polypeptides and polynucleotides. For example, site-specific mutagenesis is often used to alter a specific portion of a DNA molecule. In such embodiments, a primer comprising typically about 14 to about 25 nucleotides or so in length is employed, with about 5 to about 10 residues on both sides of the junction of the sequence being altered.

[0273] As will be appreciated by those of skill in the art, site-specific mutagenesis techniques have often employed a phage vector that exists in both a single stranded and double stranded form. Typical vectors useful in site-directed mutagenesis include vectors such as the M13 phage. These phage are readily commercially-available and their use is generally well-known to those skilled in the art. Double-stranded plasmids are also routinely employed in site directed mutagenesis that eliminates the step of transferring the gene of interest from a plasmid to a phage.

[0274] In general, site-directed mutagenesis in accordance herewith is performed by first obtaining a single-stranded vector or melting apart of two strands of a double-stranded vector that includes within its sequence a DNA sequence that encodes the desired peptide. An oligonucleotide primer bearing the desired mutated sequence is prepared, generally synthetically. This primer is then annealed with the single-stranded vector, and subjected to DNA polymerizing enzymes such as E. coli polymerase I Klenow fragment, in order to complete the synthesis of the mutation-bearing strand. Thus, a heteroduplex is formed wherein one strand encodes the original non-mutated sequence and the second strand bears the desired mutation. This heteroduplex vector is then used to transform appropriate cells, such as E. coli cells, and clones are selected which include recombinant vectors bearing the mutated sequence arrangement.

[0275] The preparation of sequence variants of the selected peptide-encoding DNA segments using site-directed mutagenesis provides a means of producing potentially useful species and is not meant to be limiting as there are other ways in which sequence variants of peptides and the DNA sequences encoding them may be obtained. For example, recombinant vectors encoding the desired peptide sequence may be treated with mutagenic agents, such as hydroxylamine, to obtain sequence variants. Specific details regarding these methods and protocols are found in the teachings of Maloy et al., 1994; Segal, 1976; Prokop and Bajpai, 1991; Kuby, 1994; and Maniatis et al., 1982, each incorporated herein by reference, for that purpose.

[0276] As used herein, the term “oligonucleotide directed mutagenesis procedure” refers to template-dependent processes and vector-mediated propagation which result in an increase in the concentration of a specific nucleic acid molecule relative to its initial concentration, or in an increase in the concentration of a detectable signal, such as amplification. As used herein, the term “oligonucleotide directed mutagenesis procedure” is intended to refer to a process that involves the template-dependent extension of a primer molecule. The term template dependent process refers to nucleic acid synthesis of an RNA or a DNA molecule wherein the sequence of the newly synthesized strand of nucleic acid is dictated by the well-known rules of complementary base pairing (see, for example, Watson, 1987). Typically, vector mediated methodologies involve the introduction of the nucleic acid fragment into a DNA or RNA vector, the clonal amplification of the vector, and the recovery of the amplified nucleic acid fragment. Examples of such methodologies are provided by U.S. Pat. No. 4,237,224, specifically incorporated herein by reference in its entirety.

[0277] Polynucleotide Amplification Techniques

[0278] A number of template dependent processes are available to amplify the target sequences of interest present in a sample. One of the best known amplification methods is the polymerase chain reaction (PCR™) which is described in detail in U.S. Pat. Nos. 4,683,195, 4,683,202 and 4,800,159, each of which is incorporated herein by reference in its entirety. Briefly, in PCR™, two primer sequences are prepared which are complementary to regions on opposite complementary strands of the target sequence. An excess of deoxynucleoside triphosphates is added to a reaction mixture along with a DNA polymerase (e.g., Taq polymerase). If the target sequence is present in a sample, the primers will bind to the target and the polymerase will cause the primers to be extended along the target sequence by adding on nucleotides. By raising and lowering the temperature of the reaction mixture, the extended primers will dissociate from the target to form reaction products, excess primers will bind to the target and to the reaction product and the process is repeated. Preferably reverse transcription and PCR™ amplification procedure may be performed in order to quantify the amount of mRNA amplified. Polymerase chain reaction methodologies are well known in the art.

[0279] Another method for amplification is the ligase chain reaction (referred to as LCR), disclosed in Eur. Pat. Appl. Publ. No. 320,308 (specifically incorporated herein by reference in its entirety). In LCR, two complementary probe pairs are prepared, and in the presence of the target sequence, each pair will bind to opposite complementary strands of the target such that they abut. In the presence of a ligase, the two probe pairs will link to form a single unit. By temperature cycling, as in PCR™, bound ligated units dissociate from the target and then serve as “target sequences” for ligation of excess probe pairs. U.S. Pat. No. 4,883,750, incorporated herein by reference in its entirety, describes an alternative method of amplification similar to LCR for binding probe pairs to a target sequence.

[0280] Qbeta Replicase, described in PCT Intl. Pat. Appl. Publ. No. PCT/US87/00880, incorporated herein by reference in its entirety, may also be used as still another amplification method in the present invention. In this method, a replicative sequence of RNA that has a region complementary to that of a target is added to a sample in the presence of an RNA polymerase. The polymerase will copy the replicative sequence that can then be detected.

[0281] An isothermal amplification method, in which restriction endonucleases and ligases are used to achieve the amplification of target molecules that contain nucleotide 5′-[α-thio]triphosphates in one strand of a restriction site (Walker et al., 1992, incorporated herein by reference in its entirety), may also be useful in the amplification of nucleic acids in the present invention.

[0282] Strand Displacement Amplification (SDA) is another method of carrying out isothermal amplification of nucleic acids which involves multiple rounds of strand displacement and synthesis, i.e. nick translation. A similar method, called Repair Chain Reaction (RCR) is another method of amplification which may be useful in the present invention and is involves annealing several probes throughout a region targeted for amplification, followed by a repair reaction in which only two of the four bases are present. The other two bases can be added as biotinylated derivatives for easy detection. A similar approach is used in SDA.

[0283] Sequences can also be detected using a cyclic probe reaction (CPR). In CPR, a probe having a 3′ and 5′ sequences of non-target DNA and an internal or “middle” sequence of the target protein specific RNA is hybridized to DNA which is present in a sample. Upon hybridization, the reaction is treated with RNaseH, and the products of the probe are identified as distinctive products by generating a signal that is released after digestion. The original template is annealed to another cycling probe and the reaction is repeated. Thus, CPR involves amplifying a signal generated by hybridization of a probe to a target gene specific expressed nucleic acid.

[0284] Still other amplification methods described in Great Britain Pat. Appl. No. 2 202 328, and in PCT Intl. Pat. Appl. Publ. No. PCT/US89/01025, each of which is incorporated herein by reference in its entirety, may be used in accordance with the present invention. In the former application, “modified” primers are used in a PCR-like, template and enzyme dependent synthesis. The primers may be modified by labeling with a capture moiety (e.g., biotin) and/or a detector moiety (e.g., enzyme). In the latter application, an excess of labeled probes is added to a sample. In the presence of the target sequence, the probe binds and is cleaved catalytically. After cleavage, the target sequence is released intact to be bound by excess probe. Cleavage of the labeled probe signals the presence of the target sequence.

[0285] Other nucleic acid amplification procedures include transcription-based amplification systems (TAS) (Kwoh et al., 1989; PCT Intl. Pat. Appl. Publ. No. WO 88/10315, incorporated herein by reference in its entirety), including nucleic acid sequence based amplification (NASBA) and 3SR. In NASBA, the nucleic acids can be prepared for amplification by standard phenol/chloroform extraction, heat denaturation of a sample, treatment with lysis buffer and minispin columns for isolation of DNA and RNA or guanidinium chloride extraction of RNA. These amplification techniques involve annealing a primer that has sequences specific to the target sequence. Following polymerization, DNA/RNA hybrids are digested with RNase H while double stranded DNA molecules are heat-denatured again. In either case the single stranded DNA is made fully double stranded by addition of second target-specific primer, followed by polymerization. The double stranded DNA molecules are then multiply transcribed by a polymerase such as T7 or SP6. In an isothermal cyclic reaction, the RNAs are reverse transcribed into DNA, and transcribed once again with a polymerase such as T7 or SP6. The resulting products, whether truncated or complete, indicate target-specific sequences.

[0286] Eur. Pat. Appl. Publ. No. 329,822, incorporated herein by reference in its entirety, disclose a nucleic acid amplification process involving cyclically synthesizing single-stranded RNA (“ssRNA”), ssDNA, and double-stranded DNA (dsDNA), which may be used in accordance with the present invention. The ssRNA is a first template for a first primer oligonucleotide, which is elongated by reverse transcriptase (RNA-dependent DNA polymerase). The RNA is then removed from resulting DNA:RNA duplex by the action of ribonuclease H (RNase H, an RNase specific for RNA in a duplex with either DNA or RNA). The resultant ssDNA is a second template for a second primer, which also includes the sequences of an RNA polymerase promoter (exemplified by T7 RNA polymerase) 5′ to its homology to its template. This primer is then extended by DNA polymerase (exemplified by the large “Klenow” fragment of E. coli DNA polymerase I), resulting as a double-stranded DNA (“dsDNA”) molecule, having a sequence identical to that of the original RNA between the primers and having additionally, at one end, a promoter sequence. This promoter sequence can be used by the appropriate RNA polymerase to make many RNA copies of the DNA. These copies can then re-enter the cycle leading to very swift amplification. With proper choice of enzymes, this amplification can be done isothermally without addition of enzymes at each cycle. Because of the cyclical nature of this process, the starting sequence can be chosen to be in the form of either DNA or RNA.

[0287] PCT Intl. Pat. Appl. Publ. No. WO 89/06700, incorporated herein by reference in its entirety, disclose a nucleic acid sequence amplification scheme based on the hybridization of a promoter/primer sequence to a target single-stranded DNA (“ssDNA”) followed by transcription of many RNA copies of the sequence. This scheme is not cyclic; i.e. new templates are not produced from the resultant RNA transcripts. Other amplification methods include “RACE” (Frohman, 1990), and “one-sided PCR” (Ohara, 1989) which are well-known to those of skill in the art.

[0288] Methods based on ligation of two (or more) oligonucleotides in the presence of nucleic acid having the sequence of the resulting “di-oligonucleotide”, thereby amplifying the di-oligonucleotide (Wu and Dean, 1996, incorporated herein by reference in its entirety), may also be used in the amplification of DNA sequences of the present invention.

[0289] In vivo Polynucleotide Delivery Techniques

[0290] In additional embodiments, genetic constructs comprising one or more of the polynucleotides of the invention are introduced into cells in vivo. This may be achieved using any of a variety or well known approaches, several of which are outlined below for the purpose of illustration.

[0291] Adenovirus

[0292] One of the preferred methods for in vivo delivery of one or more nucleic acid sequences involves the use of an adenovirus expression vector. “Adenovirus expression vector” is meant to include those constructs containing adenovirus sequences sufficient to (a) support packaging of the construct and (b) to express a polynucleotide that has been cloned therein in a sense or antisense orientation. Of course, in the context of an antisense construct, expression does not require that the gene product be synthesized.

[0293] The expression vector comprises a genetically engineered form of an adenovirus. Knowledge of the genetic organization of adenovirus, a 36 kb, linear, double-stranded DNA virus, allows substitution of large pieces of adenoviral DNA with foreign sequences up to 7 kb (Grunhaus and Horwitz, 1992). In contrast to retrovirus, the adenoviral infection of host cells does not result in chromosomal integration because adenoviral DNA can replicate in an episomal manner without potential genotoxicity. Also, adenoviruses are structurally stable, and no genome rearrangement has been detected after extensive amplification. Adenovirus can infect virtually all epithelial cells regardless of their cell cycle stage. So far, adenoviral infection appears to be linked only to mild disease such as acute respiratory disease in humans.

[0294] Adenovirus is particularly suitable for use as a gene transfer vector because of its mid-sized genome, ease of manipulation, high titer, wide target-cell range and high infectivity. Both ends of the viral genome contain 100-200 base pair inverted repeats (ITRs), which are cis elements necessary for viral DNA replication and packaging. The early (E) and late (L) regions of the genome contain different transcription units that are divided by the onset of viral DNA replication. The E1 region (E1A and E1B) encodes proteins responsible for the regulation of transcription of the viral genome and a few cellular genes. The expression of the E2 region (E2A and E2B) results in the synthesis of the proteins for viral DNA replication. These proteins are involved in DNA replication, late gene expression and host cell shut-off (Renan, 1990). The products of the late genes, including the majority of the viral capsid proteins, are expressed only after significant processing of a single primary transcript issued by the major late promoter (MLP). The MLP, (located at 16.8 m.u.) is particularly efficient during the late phase of infection, and all the mRNA's issued from this promoter possess a 5′-tripartite leader (TPL) sequence which makes them preferred mRNA's for translation.

[0295] In a current system, recombinant adenovirus is generated from homologous recombination between shuttle vector and provirus vector. Due to the possible recombination between two proviral vectors, wild-type adenovirus may be generated from this process. Therefore, it is critical to isolate a single clone of virus from an individual plaque and examine its genomic structure.

[0296] Generation and propagation of the current adenovirus vectors, which are replication deficient, depend on a unique helper cell line, designated 293, which was transformed from human embryonic kidney cells by Ad5 DNA fragments and constitutively expresses E1 proteins (Graham et al., 1977). Since the E3 region is dispensable from the adenovirus genome (Jones and Shenk, 1978), the current adenovirus vectors, with the help of 293 cells, carry foreign DNA in either the E1, the D3 or both regions (Graham and Prevec, 1991). In nature, adenovirus can package approximately 105% of the wild-type genome (Ghosh-Choudhury et al., 1987), providing capacity for about 2 extra kB of DNA. Combined with the approximately 5.5 kB of DNA that is replaceable in the E1 and E3 regions, the maximum capacity of the current adenovirus vector is under 7.5 kB, or about 15% of the total length of the vector. More than 80% of the adenovirus viral genome remains in the vector backbone and is the source of vector-borne cytotoxicity. Also, the replication deficiency of the E1-deleted virus is incomplete. For example, leakage of viral gene expression has been observed with the currently available vectors at high multiplicities of infection (MOI) (Mulligan, 1993).

[0297] Helper cell lines may be derived from human cells such as human embryonic kidney cells, muscle cells, hematopoietic cells or other human embryonic mesenchymal or epithelial cells. Alternatively, the helper cells may be derived from the cells of other mammalian species that are permissive for human adenovirus. Such cells include, e.g., Vero cells or other monkey embryonic mesenchymal or epithelial cells. As stated above, the currently preferred helper cell line is 293.

[0298] Recently, Racher et al. (1995) disclosed improved methods for culturing 293 cells and propagating adenovirus. In one format, natural cell aggregates are grown by inoculating individual cells into 1 liter siliconized spinner flasks (Techne, Cambridge, UK) containing 100-200 ml of medium. Following stirring at 40 rpm, the cell viability is estimated with trypan blue. In another format, Fibra-Cel microcarriers (Bibby Sterlin, Stone, UK) (5 g/l) is employed as follows. A cell inoculum, resuspended in 5 ml of medium, is added to the carrier (50 ml) in a 250 ml Erlenmeyer flask and left stationary, with occasional agitation, for 1 to 4 h. The medium is then replaced with 50 ml of fresh medium and shaking initiated. For virus production, cells are allowed to grow to about 80% confluence, after which time the medium is replaced (to 25% of the final volume) and adenovirus added at an MOI of 0.05. Cultures are left stationary overnight, following which the volume is increased to 100% and shaking commenced for another 72 h.

[0299] Other than the requirement that the adenovirus vector be replication defective, or at least conditionally defective, the nature of the adenovirus vector is not believed to be crucial to the successful practice of the invention. The adenovirus may be of any of the 42 different known serotypes or subgroups A-F. Adenovirus type 5 of subgroup C is the preferred starting material in order to obtain a conditional replication-defective adenovirus vector for use in the present invention, since Adenovirus type 5 is a human adenovirus about which a great deal of biochemical and genetic information is known, and it has historically been used for most constructions employing adenovirus as a vector.

[0300] As stated above, the typical vector according to the present invention is replication defective and will not have an adenovirus E1 region. Thus, it will be most convenient to introduce the polynucleotide encoding the gene of interest at the position from which the E1-coding sequences have been removed. However, the position of insertion of the construct within the adenovirus sequences is not critical to the invention. The polynucleotide encoding the gene of interest may also be inserted in lieu of the deleted E3 region in E3 replacement vectors as described by Karlsson et al. (1986) or in the E4 region where a helper cell line or helper virus complements the E4 defect.

[0301] Adenovirus is easy to grow and manipulate and exhibits broad host range in vitro and in vivo. This group of viruses can be obtained in high titers, e.g., 10⁹-10¹¹ plaque-forming units per ml, and they are highly infective. The life cycle of adenovirus does not require integration into the host cell genome. The foreign genes delivered by adenovirus vectors are episomal and, therefore, have low genotoxicity to host cells. No side effects have been reported in studies of vaccination with wild-type adenovirus (Couch et al., 1963; Top et al., 1971), demonstrating their safety and therapeutic potential as in vivo gene transfer vectors.

[0302] Adenovirus vectors have been used in eukaryotic gene expression (Levrero et al., 1991; Gomez-Foix et al., 1992) and vaccine development (Grunhaus and Horwitz, 1992; Graham and Prevec, 1992). Recently, animal studies suggested that recombinant adenovirus could be used for gene therapy (Stratford-Perricaudet and Perricaudet, 1991; Stratford-Perricaudet et al., 1990; Rich et al., 1993). Studies in administering recombinant adenovirus to different tissues include trachea instillation (Rosenfeld et al., 1991; Rosenfeld et al., 1992), muscle injection (Ragot et al., 1993), peripheral intravenous injections (Herz and Gerard, 1993) and stereotactic inoculation into the brain (Le Gal La Salle et al., 1993).

[0303] Retroviruses

[0304] The retroviruses are a group of single-stranded RNA viruses characterized by an ability to convert their RNA to double-stranded DNA in infected cells by a process of reverse-transcription (Coffin, 1990). The resulting DNA then stably integrates into cellular chromosomes as a provirus and directs synthesis of viral proteins. The integration results in the retention of the viral gene sequences in the recipient cell and its descendants. The retroviral genome contains three genes, gag, pol, and env that code for capsid proteins, polymerase enzyme, and envelope components, respectively. A sequence found upstream from the gag gene contains a signal for packaging of the genome into virions. Two long terminal repeat (LTR) sequences are present at the 5′ and 3′ ends of the viral genome. These contain strong promoter and enhancer sequences and are also required for integration in the host cell genome (Coffin, 1990).

[0305] In order to construct a retroviral vector, a nucleic acid encoding one or more oligonucleotide or polynucleotide sequences of interest is inserted into the viral genome in the place of certain viral sequences to produce a virus that is replication-defective. In order to produce virions, a packaging cell line containing the gag, pol, and env genes but without the LTR and packaging components is constructed (Mann et al., 1983). When a recombinant plasmid containing a cDNA, together with the retroviral LTR and packaging sequences is introduced into this cell line (by calcium phosphate precipitation for example), the packaging sequence allows the RNA transcript of the recombinant plasmid to be packaged into viral particles, which are then secreted into the culture media (Nicolas and Rubenstein, 1988; Temin, 1986; Mann et al., 1983). The media containing the recombinant retroviruses is then collected, optionally concentrated, and used for gene transfer. Retroviral vectors are able to infect a broad variety of cell types. However, integration and stable expression require the division of host cells (Paskind et al., 1975).

[0306] A novel approach designed to allow specific targeting of retrovirus vectors was recently developed based on the chemical modification of a retrovirus by the chemical addition of lactose residues to the viral envelope. This modification could permit the specific infection of hepatocytes via sialoglycoprotein receptors.

[0307] A different approach to targeting of recombinant retroviruses was designed in which biotinylated antibodies against a retroviral envelope protein and against a specific cell receptor were used. The antibodies were coupled via the biotin components by using streptavidin (Roux et al., 1989). Using antibodies against major histocompatibility complex class I and class II antigens, they demonstrated the infection of a variety of human cells that bore those surface antigens with an ecotropic virus in vitro (Roux et al., 1989).

[0308] Adeno-Associated Viruses

[0309] AAV (Ridgeway, 1988; Hermonat and Muzycska, 1984) is a parovirus, discovered as a contamination of adenoviral stocks. It is a ubiquitous virus (antibodies are present in 85% of the US human population) that has not been linked to any disease. It is also classified as a dependovirus, because its replications is dependent on the presence of a helper virus, such as adenovirus. Five serotypes have been isolated, of which AAV-2 is the best characterized. AAV has a single-stranded linear DNA that is encapsidated into capsid proteins VP1, VP2 and VP3 to form an icosahedral virion of 20 to 24 nm in diameter (Muzyczka and McLaughlin, 1988).

[0310] The AAV DNA is approximately 4.7 kilobases long. It contains two open reading frames and is flanked by two ITRs (FIG. 2). There are two major genes in the AAV genome: rep and cap. The rep gene codes for proteins responsible for viral replications, whereas cap codes for capsid protein VP 1-3. Each ITR forms a T-shaped hairpin structure. These terminal repeats are the only essential cis components of the AAV for chromosomal integration. Therefore, the AAV can be used as a vector with all viral coding sequences removed and replaced by the cassette of genes for delivery. Three viral promoters have been identified and named p5, p19, and p40, according to their map position. Transcription from p5 and p19 results in production of rep proteins, and transcription from p40 produces the capsid proteins (Hermonat and Muzyczka, 1984).

[0311] There are several factors that prompted researchers to study the possibility of using rAAV as an expression vector. One is that the requirements for delivering a gene to integrate into the host chromosome are surprisingly few. It is necessary to have the 145-bp ITRs, which are only 6% of the AAV genome. This leaves room in the vector to assemble a 4.5-kb DNA insertion. While this carrying capacity may prevent the AAV from delivering large genes, it is amply suited for delivering the antisense constructs of the present invention.

[0312] AAV is also a good choice of delivery vehicles due to its safety. There is a relatively complicated rescue mechanism: not only wild type adenovirus but also AAV genes are required to mobilize rAAV. Likewise, AAV is not pathogenic and not associated with any disease. The removal of viral coding sequences minimizes immune reactions to viral gene expression, and therefore, rAAV does not evoke an inflammatory response.

[0313] Other Viral Vectors as Expression Constructs

[0314] Other viral vectors may be employed as expression constructs in the present invention for the delivery of oligonucleotide or polynucleotide sequences to a host cell. Vectors derived from viruses such as vaccinia virus (Ridgeway, 1988; Coupar et al., 1988), lentiviruses, polio viruses and herpes viruses may be employed. They offer several attractive features for various mammalian cells (Friedmann, 1989; Ridgeway, 1988; Coupar et al., 1988; Horwich et al., 1990).

[0315] With the recent recognition of defective hepatitis B viruses, new insight was gained into the structure-function relationship of different viral sequences. In vitro studies showed that the virus could retain the ability for helper-dependent packaging and reverse transcription despite the deletion of up to 80% of its genome (Horwich et al., 1990). This suggested that large portions of the genome could be replaced with foreign genetic material. The hepatotropism and persistence (integration) were particularly attractive properties for liver-directed gene transfer. Chang et al. (1991) introduced the chloramphenicol acetyltransferase (CAT) gene into duck hepatitis B virus genome in the place of the polymerase, surface, and pre-surface coding sequences. It was cotransfected with wild-type virus into an avian hepatoma cell line. Culture media containing high titers of the recombinant virus were used to infect primary duckling hepatocytes. Stable CAT gene expression was detected for at least 24 days after transfection (Chang et al., 1991).

[0316] Non-viral Vectors

[0317] In order to effect expression of the oligonucleotide or polynucleotide sequences of the present invention, the expression construct must be delivered into a cell. This delivery may be accomplished in vitro, as in laboratory procedures for transforming cells lines, or in vivo or ex vivo, as in the treatment of certain disease states. As described above, one preferred mechanism for delivery is via viral infection where the expression construct is encapsulated in an infectious viral particle.

[0318] Once the expression construct has been delivered into the cell the nucleic acid encoding the desired oligonucleotide or polynucleotide sequences may be positioned and expressed at different sites. In certain embodiments, the nucleic acid encoding the construct may be stably integrated into the genome of the cell. This integration may be in the specific location and orientation via homologous recombination (gene replacement) or it may be integrated in a random, non-specific location (gene augmentation). In yet further embodiments, the nucleic acid may be stably maintained in the cell as a separate, episomal segment of DNA. Such nucleic acid segments or “episomes” encode sequences sufficient to permit maintenance and replication independent of or in synchronization with the host cell cycle. How the expression construct is delivered to a cell and where in the cell the nucleic acid remains is dependent on the type of expression construct employed.

[0319] In certain embodiments of the invention, the expression construct comprising one or more oligonucleotide or polynucleotide sequences may simply consist of naked recombinant DNA or plasmids. Transfer of the construct may be performed by any of the methods mentioned above which physically or chemically permeabilize the cell membrane. This is particularly applicable for transfer in vitro but it may be applied to in vivo use as well. Dubensky et al. (1984) successfully injected polyomavirus DNA in the form of calcium phosphate precipitates into liver and spleen of adult and newborn mice demonstrating active viral replication and acute infection. Benvenisty and Reshef (1986) also demonstrated that direct intraperitoneal injection of calcium phosphate-precipitated plasmids results in expression of the transfected genes. It is envisioned that DNA encoding a gene of interest may also be transferred in a similar manner in vivo and express the gene product.

[0320] Another embodiment of the invention for transferring a naked DNA expression construct into cells may involve particle bombardment. This method depends on the ability to accelerate DNA-coated microprojectiles to a high velocity allowing them to pierce cell membranes and enter cells without killing them (Klein et al., 1987). Several devices for accelerating small particles have been developed. One such device relies on a high voltage discharge to generate an electrical current, which in turn provides the motive force (Yang et al., 1990). The microprojectiles used have consisted of biologically inert substances such as tungsten or gold beads.

[0321] Selected organs including the liver, skin, and muscle tissue of rats and mice have been bombarded in vivo (Yang et al., 1990; Zelenin et al., 1991). This may require surgical exposure of the tissue or cells, to eliminate any intervening tissue between the gun and the target organ, i.e. ex vivo treatment. Again, DNA encoding a particular gene may be delivered via this method and still be incorporated by the present invention.

[0322] Antisense Oligonucleotides

[0323] The end result of the flow of genetic information is the synthesis of protein. DNA is transcribed by polymerases into messenger RNA and translated on the ribosome to yield a folded, functional protein. Thus there are several steps along the route where protein synthesis can be inhibited. The native DNA segment coding for a polypeptide described herein, as all such mammalian DNA strands, has two strands: a sense strand and an antisense strand held together by hydrogen bonding. The messenger RNA coding for polypeptide has the same nucleotide sequence as the sense DNA strand except that the DNA thymidine is replaced by uridine. Thus, synthetic antisense nucleotide sequences will bind to a mRNA and inhibit expression of the protein encoded by that mRNA.

[0324] The targeting of antisense oligonucleotides to mRNA is thus one mechanism to shut down protein synthesis, and, consequently, represents a powerful and targeted therapeutic approach. For example, the synthesis of polygalactauronase and the muscarine type 2 acetylcholine receptor are inhibited by antisense oligonucleotides directed to their respective mRNA sequences (U.S. Pat. Nos. 5,739,119 and 5,759,829, each specifically incorporated herein by reference in its entirety). Further, examples of antisense inhibition have been demonstrated with the nuclear protein cyclin, the multiple drug resistance gene (MDG1), ICAM-1, E-selectin, STK-1, striatal GABA_{A} receptor and human EGF (Jaskulski et al., 1988; Vasanthakumar and Ahmed, 1989; Peris et al., 1998; U.S. Pat. Nos. 5,801,154; 5,789,573; 5,718,709 and 5,610,288, each specifically incorporated herein by reference in its entirety). Antisense constructs have also been described that inhibit and can be used to treat a variety of abnormal cellular proliferations, e.g. cancer (U.S. Pat. Nos. 5,747,470; 5,591,317 and 5,783,683, each specifically incorporated herein by reference in its entirety).

[0325] Therefore, in exemplary embodiments, the invention provides oligonucleotide sequences that comprise all, or a portion of, any sequence that is capable of specifically binding to polynucleotide sequence described herein, or a complement thereof. In one embodiment, the antisense oligonucleotides comprise DNA or derivatives thereof. In another embodiment, the oligonucleotides comprise RNA or derivatives thereof. In a third embodiment, the oligonucleotides are modified DNAs comprising a phosphorothioated modified backbone. In a fourth embodiment, the oligonucleotide sequences comprise peptide nucleic acids or derivatives thereof. In each case, preferred compositions comprise a sequence region that is complementary, and more preferably substantially-complementary, and even more preferably, completely complementary to one or more portions of polynucleotides disclosed herein.

[0326] Selection of antisense compositions specific for a given gene sequence is based upon analysis of the chosen target sequence (i.e. in these illustrative examples the rat and human sequences) and determination of secondary structure, Tₘ, binding energy, relative stability, and antisense compositions were selected based upon their relative inability to form dimers, hairpins, or other secondary structures that would reduce or prohibit specific binding to the target mRNA in a host cell.

[0327] Highly preferred target regions of the mRNA, are those which are at or near the AUG translation initiation codon, and those sequences which were substantially complementary to 5′ regions of the mRNA. These secondary structure analyses and target site selection considerations were performed using v.4 of the OLIGO primer analysis software (Rychlik, 1997) and the BLASTN 2.0.5 algorithm software (Altschul et al., 1997).

[0328] The use of an antisense delivery method employing a short peptide vector, termed MPG (27 residues), is also contemplated. The MPG peptide contains a hydrophobic domain derived from the fusion sequence of HIV gp41 and a hydrophilic domain from the nuclear localization sequence of SV40 T-antigen (Morris et al., 1997). It has been demonstrated that several molecules of the MPG peptide coat the antisense oligonucleotides and can be delivered into cultured mammalian cells in less than 1 hour with relatively high efficiency (90%). Further, the interaction with MPG strongly increases both the stability of the oligonucleotide to nuclease and the ability to cross the plasma membrane (Morris et al., 1997).

[0329] Ribozymes

[0330] Although proteins traditionally have been used for catalysis of nucleic acids, another class of macromolecules has emerged as useful in this endeavor. Ribozymes are RNA-protein complexes that cleave nucleic acids in a site-specific fashion. Ribozymes have specific catalytic domains that possess endonuclease activity (Kim and Cech, 1987; Gerlach et al., 1987; Forster and Symons, 1987). For example, a large number of ribozymes accelerate phosphoester transfer reactions with a high degree of specificity, often cleaving only one of several phosphoesters in an oligonucleotide substrate (Cech et al., 1981; Michel and Westhof, 1990; Reinhold-Hurek and Shub, 1992). This specificity has been attributed to the requirement that the substrate bind via specific base-pairing interactions to the internal guide sequence (“IGS”) of the ribozyme prior to chemical reaction.

[0331] Ribozyme catalysis has primarily been observed as part of sequence-specific cleavage/ligation reactions involving nucleic acids (Joyce, 1989; Cech et al., 1981). For example, U.S. Pat. No. 5,354,855 (specifically incorporated herein by reference) reports that certain ribozymes can act as endonucleases with a sequence specificity greater than that of known ribonucleases and approaching that of the DNA restriction enzymes. Thus, sequence-specific ribozyme-mediated inhibition of gene expression may be particularly suited to therapeutic applications (Scanlon et al., 1991; Sarver et al., 1990). Recently, it was reported that ribozymes elicited genetic changes in some cells lines to which they were applied; the altered genes included the oncogenes H-ras, c-fos and genes of HIV. Most of this work involved the modification of a target mRNA, based on a specific mutant codon that is cleaved by a specific ribozyme.

[0332] Six basic varieties of naturally-occurring enzymatic RNAs are known presently. Each can catalyze the hydrolysis of RNA phosphodiester bonds in trans (and thus can cleave other RNA molecules) under physiological conditions. In general, enzymatic nucleic acids act by first binding to a target RNA. Such binding occurs through the target binding portion of a enzymatic nucleic acid which is held in close proximity to an enzymatic portion of the molecule that acts to cleave the target RNA. Thus, the enzymatic nucleic acid first recognizes and then binds a target RNA through complementary base-pairing, and once bound to the correct site, acts enzymatically to cut the target RNA. Strategic cleavage of such a target RNA will destroy its ability to direct synthesis of an encoded protein. After an enzymatic nucleic acid has bound and cleaved its RNA target, it is released from that RNA to search for another target and can repeatedly bind and cleave new targets.

[0333] The enzymatic nature of a ribozyme is advantageous over many technologies, such as antisense technology (where a nucleic acid molecule simply binds to a nucleic acid target to block its translation) since the concentration of ribozyme necessary to affect a therapeutic treatment is lower than that of an antisense oligonucleotide. This advantage reflects the ability of the ribozyme to act enzymatically. Thus, a single ribozyme molecule is able to cleave many molecules of target RNA. In addition, the ribozyme is a highly specific inhibitor, with the specificity of inhibition depending not only on the base pairing mechanism of binding to the target RNA, but also on the mechanism of target RNA cleavage. Single mismatches, or base-substitutions, near the site of cleavage can completely eliminate catalytic activity of a ribozyme. Similar mismatches in antisense molecules do not prevent their action (Woolf et al., 1992). Thus, the specificity of action of a ribozyme is greater than that of an antisense oligonucleotide binding the same RNA site.

[0334] The enzymatic nucleic acid molecule may be formed in a hammerhead, hairpin, a hepatitis δ virus, group I intron or RNaseP RNA (in association with an RNA guide sequence) or Neurospora VS RNA motif. Examples of hammerhead motifs are described by Rossi et al. (1992). Examples of hairpin motifs are described by Hampel et al. (Eur. Pat. Appl. Publ. No. EP 0360257), Hampel and Tritz (1989), Hampel et al. (1990) and U.S. Pat. No. 5,631,359 (specifically incorporated herein by reference). An example of the hepatitis 6 virus motif is described by Perrotta and Been (1992); an example of the RNaseP motif is described by Guerrier-Takada et al. (1983); Neurospora VS RNA ribozyme motif is described by Collins (Saville and Collins, 1990; Saville and Collins, 1991; Collins and Olive, 1993); and an example of the Group I intron is described in (U.S. Pat. No. 4,987,071, specifically incorporated herein by reference). All that is important in an enzymatic nucleic acid molecule of this invention is that it has a specific substrate binding site which is complementary to one or more of the target gene RNA regions, and that it have nucleotide sequences within or surrounding that substrate binding site which impart an RNA cleaving activity to the molecule. Thus the ribozyme constructs need not be limited to specific motifs mentioned herein.

[0335] In certain embodiments, it may be important to produce enzymatic cleaving agents which exhibit a high degree of specificity for the RNA of a desired target, such as one of the sequences disclosed herein. The enzymatic nucleic acid molecule is preferably targeted to a highly conserved sequence region of a target mRNA. Such enzymatic nucleic acid molecules can be delivered exogenously to specific cells as required. Alternatively, the ribozymes can be expressed from DNA or RNA vectors that are delivered to specific cells.

[0336] Small enzymatic nucleic acid motifs (e.g., of the hammerhead or the hairpin structure) may also be used for exogenous delivery. The simple structure of these molecules increases the ability of the enzymatic nucleic acid to invade targeted regions of the mRNA structure. Alternatively, catalytic RNA molecules can be expressed within cells from eukaryotic promoters (e.g., Scanlon et al., 1991; Kashani-Sabet et al., 1992; Dropulic et al., 1992; Weerasinghe et al., 1991; Ojwang et al., 1992; Chen et al., 1992; Sarver et al., 1990). Those skilled in the art realize that any ribozyme can be expressed in eukaryotic cells from the appropriate DNA vector. The activity of such ribozymes can be augmented by their release from the primary transcript by a second ribozyme (Int. Pat. Appl. Publ. No. WO 93/23569, and Int. Pat. Appl. Publ. No. WO 94/02595, both hereby incorporated by reference; Ohkawa et al., 1992; Taira et al., 1991; and Ventura et al., 1993).

[0337] Ribozymes may be added directly, or can be complexed with cationic lipids, lipid complexes, packaged within liposomes, or otherwise delivered to target cells. The RNA or RNA complexes can be locally administered to relevant tissues ex vivo, or in vivo through injection, aerosol inhalation, infusion pump or stent, with or without their incorporation in biopolymers.

[0338] Ribozymes may be designed as described in Int. Pat. Appl. Publ. No. WO 93/23569 and Int. Pat. Appl. Publ. No. WO 94/02595, each specifically incorporated herein by reference) and synthesized to be tested in vitro and in vivo, as described. Such ribozymes can also be optimized for delivery. While specific examples are provided, those in the art will recognize that equivalent RNA targets in other species can be utilized when necessary.

[0339] Hammerhead or hairpin ribozymes may be individually analyzed by computer folding (Jaeger et al., 1989) to assess whether the ribozyme sequences fold into the appropriate secondary structure. Those ribozymes with unfavorable intramolecular interactions between the binding arms and the catalytic core are eliminated from consideration. Varying binding arm lengths can be chosen to optimize activity. Generally, at least 5 or so bases on each arm are able to bind to, or otherwise interact with, the target RNA.

[0340] Ribozymes of the hammerhead or hairpin motif may be designed to anneal to various sites in the mRNA message, and can be chemically synthesized. The method of synthesis used follows the procedure for normal RNA synthesis as described in Usman et al. (1987) and in Scaringe et al. (1990) and makes use of common nucleic acid protecting and coupling groups, such as dimethoxytrityl at the 5′-end, and phosphoramidites at the 3′-end. Average stepwise coupling yields are typically >98%. Hairpin ribozymes may be synthesized in two parts and annealed to reconstruct an active ribozyme (Chowrira and Burke, 1992). Ribozymes may be modified extensively to enhance stability by modification with nuclease resistant groups, for example, 2′-amino, 2′-C-allyl, 2′-flouro, 2′-o-methyl, 2′-H (for a review see e.g., Usman and Cedergren, 1992). Ribozymes may be purified by gel electrophoresis using general methods or by high pressure liquid chromatography and resuspended in water.

[0341] Ribozyme activity can be optimized by altering the length of the ribozyme binding arms, or chemically synthesizing ribozymes with modifications that prevent their degradation by serum ribonucleases (see e.g., Int. Pat. Appl. Publ. No. WO 92/07065; Perrault et al., 1990; Pieken et al., 1991; Usman and Cedergren, 1992; Int. Pat. Appl. Publ. No. WO 93/15187; Int. Pat. Appl. Publ. No. WO 91/03162; Eur. Pat. Appl. Publ. No. 92110298.4; U.S. Pat. No. 5,334,711; and Int. Pat. Appl. Publ. No. WO 94/13688, which describe various chemical modifications that can be made to the sugar moieties of enzymatic RNA molecules), modifications which enhance their efficacy in cells, and removal of stem II bases to shorten RNA synthesis times and reduce chemical requirements.

[0342] Sullivan et al. (Int. Pat. Appl. Publ. No. WO 94/02595) describes the general methods for delivery of enzymatic RNA molecules. Ribozymes may be administered to cells by a variety of methods known to those familiar to the art, including, but not restricted to, encapsulation in liposomes, by iontophoresis, or by incorporation into other vehicles, such as hydrogels, cyclodextrins, biodegradable nanocapsules, and bioadhesive microspheres. For some indications, ribozymes may be directly delivered ex vivo to cells or tissues with or without the aforementioned vehicles. Alternatively, the RNA/vehicle combination may be locally delivered by direct inhalation, by direct injection or by use of a catheter, infusion pump or stent. Other routes of delivery include, but are not limited to, intravascular, intramuscular, subcutaneous or joint injection, aerosol inhalation, oral (tablet or pill form), topical, systemic, ocular, intraperitoneal and/or intrathecal delivery. More detailed descriptions of ribozyme delivery and administration are provided in Int. Pat. Appl. Publ. No. WO 94/02595 and Int. Pat. Appl. Publ. No. WO 93/23569, each specifically incorporated herein by reference.

[0343] Another means of accumulating high concentrations of a ribozyme(s) within cells is to incorporate the ribozyme-encoding sequences into a DNA expression vector. Transcription of the ribozyme sequences are driven from a promoter for eukaryotic RNA polymerase I (pol I), RNA polymerase II (pol II), or RNA polymerase III (pol III). Transcripts from pol II or pol III promoters will be expressed at high levels in all cells; the levels of a given pol II promoter in a given cell type will depend on the nature of the gene regulatory sequences (enhancers, silencers, etc.) present nearby. Prokaryotic RNA polymerase promoters may also be used, providing that the prokaryotic RNA polymerase enzyme is expressed in the appropriate cells (Elroy-Stein and Moss, 1990; Gao and Huang, 1993; Lieber et al., 1993; Zhou et al., 1990). Ribozymes expressed from such promoters can function in mammalian cells (e.g. Kashani-Saber et al., 1992; Ojwang et al., 1992; Chen et al., 1992; Yu et al., 1993; L'Huillier et al., 1992; Lisziewicz et al., 1993). Such transcription units can be incorporated into a variety of vectors for introduction into mammalian cells, including but not restricted to, plasmid DNA vectors, viral DNA vectors (such as adenovirus or adeno-associated vectors), or viral RNA vectors (such as retroviral, semliki forest virus, sindbis virus vectors).

[0344] Ribozymes may be used as diagnostic tools to examine genetic drift and mutations within diseased cells. They can also be used to assess levels of the target RNA molecule. The close relationship between ribozyme activity and the structure of the target RNA allows the detection of mutations in any region of the molecule which alters the base-pairing and three-dimensional structure of the target RNA. By using multiple ribozymes, one may map nucleotide changes which are important to RNA structure and function in vitro, as well as in cells and tissues. Cleavage of target RNAs with ribozymes may be used to inhibit gene expression and define the role (essentially) of specified gene products in the progression of disease. In this manner, other genetic targets may be defined as important mediators of the disease. These studies will lead to better treatment of the disease progression by affording the possibility of combinational therapies (e.g., multiple ribozymes targeted to different genes, ribozymes coupled with known small molecule inhibitors, or intermittent treatment with combinations of ribozymes and/or other chemical or biological molecules). Other in vitro uses of ribozymes are well known in the art, and include detection of the presence of mRNA associated with an IL-5 related condition. Such RNA is detected by determining the presence of a cleavage product after treatment with a ribozyme using standard methodology.

[0345] Peptide Nucleic Acids

[0346] In certain embodiments, the inventors contemplate the use of peptide nucleic acids (PNAs) in the practice of the methods of the invention. PNA is a DNA mimic in which the nucleobases are attached to a pseudopeptide backbone (Good and Nielsen, 1997). PNA is able to be utilized in a number methods that traditionally have used RNA or DNA. Often PNA sequences perform better in techniques than the corresponding RNA or DNA sequences and have utilities that are not inherent to RNA or DNA. A review of PNA including methods of making, characteristics of, and methods of using, is provided by Corey (1997) and is incorporated herein by reference. As such, in certain embodiments, one may prepare PNA sequences that are complementary to one or more portions of the ACE mRNA sequence, and such PNA compositions may be used to regulate, alter, decrease, or reduce the translation of ACE-specific mRNA, and thereby alter the level of ACE activity in a host cell to which such PNA compositions have been administered.

[0347] PNAs have 2-aminoethyl-glycine linkages replacing the normal phosphodiester backbone of DNA (Nielsen et al., 1991; Hanvey et al., 1992; Hyrup and Nielsen, 1996; Neilsen, 1996). This chemistry has three important consequences: firstly, in contrast to DNA or phosphorothioate oligonucleotides, PNAs are neutral molecules; secondly, PNAs are achiral, which avoids the need to develop a stereoselective synthesis; and thirdly, PNA synthesis uses standard Boc (Dueholm et al., 1994) or Fmoc (Thomson et al., 1995) protocols for solid-phase peptide synthesis, although other methods, including a modified Merrifield method, have been used (Christensen et al., 1995).

[0348] PNA monomers or ready-made oligomers are commercially available from PerSeptive Biosystems (Framingham, Mass.). PNA syntheses by either Boc or Fmoc protocols are straightforward using manual or automated protocols (Norton et al., 1995). The manual protocol lends itself to the production of chemically modified PNAs or the simultaneous synthesis of families of closely related PNAs.

[0349] As with peptide synthesis, the success of a particular PNA synthesis will depend on the properties of the chosen sequence. For example, while in theory PNAs can incorporate any combination of nucleotide bases, the presence of adjacent purines can lead to deletions of one or more residues in the product. In expectation of this difficulty, it is suggested that, in producing PNAs with adjacent purines, one should repeat the coupling of residues likely to be added inefficiently. This should be followed by the purification of PNAs by reverse-phase high-pressure liquid chromatography (Norton et al., 1995) providing yields and purity of product similar to those observed during the synthesis of peptides.

[0350] Modifications of PNAs for a given application may be accomplished by coupling amino acids during solid-phase synthesis or by attaching compounds that contain a carboxylic acid group to the exposed N-terminal amine. Alternatively, PNAs can be modified after synthesis by coupling to an introduced lysine or cysteine. The ease with which PNAs can be modified facilitates optimization for better solubility or for specific functional requirements. Once synthesized, the identity of PNAs and their derivatives can be confirmed by mass spectrometry. Several studies have made and utilized modifications of PNAs (Norton et al., 1995; Haaima et al., 1996; Stetsenko et al., 1996; Petersen et al., 1995; Ulmann et al., 1996; Koch et al., 1995; Orum et al., 1995; Footer et al., 1996; Griffith et al., 1995; Kremsky et al., 1996; Pardridge et al., 1995; Boffa et al., 1995; Landsdorp et al., 1996; Gambacorti-Passerini et al., 1996; Armitage et al., 1997; Seeger et al., 1997; Ruskowski et al., 1997). U.S. Pat. No. 5,700,922 discusses PNA-DNA-PNA chimeric molecules and their uses in diagnostics, modulating protein in organisms, and treatment of conditions susceptible to therapeutics.

[0351] In contrast to DNA and RNA, which contain negatively charged linkages, the PNA backbone is neutral. In spite of this dramatic alteration, PNAs recognize complementary DNA and RNA by Watson-Crick pairing (Egholm et al., 1993), validating the initial modeling by Nielsen et al. (1991). PNAs lack 3′ to 5′ polarity and can bind in either parallel or antiparallel fashion, with the antiparallel mode being preferred (Egholm et al., 1993).

[0352] Hybridization of DNA oligonucleotides to DNA and RNA is destabilized by electrostatic repulsion between the negatively charged phosphate backbones of the complementary strands. By contrast, the absence of charge repulsion in PNA-DNA or PNA-RNA duplexes increases the melting temperature (Tₘ) and reduces the dependence of Tₘ on the concentration of mono- or divalent cations (Nielsen et al., 1991). The enhanced rate and affinity of hybridization are significant because they are responsible for the surprising ability of PNAs to perform strand invasion of complementary sequences within relaxed double-stranded DNA. In addition, the efficient hybridization at inverted repeats suggests that PNAs can recognize secondary structure effectively within double-stranded DNA. Enhanced recognition also occurs with PNAs immobilized on surfaces, and Wang et al. have shown that support-bound PNAs can be used to detect hybridization events (Wang et al., 1996).

[0353] One might expect that tight binding of PNAs to complementary sequences would also increase binding to similar (but not identical) sequences, reducing the sequence specificity of PNA recognition. As with DNA hybridization, however, selective recognition can be achieved by balancing oligomer length and incubation temperature. Moreover, selective hybridization of PNAs is encouraged by PNA-DNA hybridization being less tolerant of base mismatches than DNA-DNA hybridization. For example, a single mismatch within a 16 bp PNA-DNA duplex can reduce the Tₘ by up to 15° C. (Egholm et al., 1993). This high level of discrimination has allowed the development of several PNA-based strategies for the analysis of point mutations (Wang et al., 1996; Carlsson et al., 1996; Thiede et al., 1996; Webb and Hurskainen, 1996; Perry-O'Keefe et al., 1996).

[0354] High-affinity binding provides clear advantages for molecular recognition and the development of new applications for PNAs. For example, 11-13 nucleotide PNAs inhibit the activity of telomerase, a ribonucleo-protein that extends telomere ends using an essential RNA template, while the analogous DNA oligomers do not (Norton et al., 1996).

[0355] Neutral PNAs are more hydrophobic than analogous DNA oligomers, and this can lead to difficulty solubilizing them at neutral pH, especially if the PNAs have a high purine content or if they have the potential to form secondary structures. Their solubility can be enhanced by attaching one or more positive charges to the PNA termini (Nielsen et al., 1991).

[0356] Findings by Allfrey and colleagues suggest that strand invasion will occur spontaneously at sequences within chromosomal DNA (Boffa et al., 1995; Boffa et al., 1996). These studies targeted PNAs to triplet repeats of the nucleotides CAG and used this recognition to purify transcriptionally active DNA (Boffa et al., 1995) and to inhibit transcription (Boffa et al., 1996). This result suggests that if PNAs can be delivered within cells then they will have the potential to be general sequence-specific regulators of gene expression. Studies and reviews concerning the use of PNAs as antisense and anti-gene agents include Nielsen et al. (1993b), Hanvey et al. (1992), and Good and Nielsen (1997). Koppelhus et al. (1997) have used PNAs to inhibit HIV-1 inverse transcription, showing that PNAs may be used for antiviral therapies.

[0357] Methods of characterizing the antisense binding properties of PNAs are discussed in Rose (1993) and Jensen et al. (1997). Rose uses capillary gel electrophoresis to determine binding of PNAs to their complementary oligonucleotide, measuring the relative binding kinetics and stoichiometry. Similar types of measurements were made by Jensen et al. using BIAcore™ technology.

[0358] Other applications of PNAs include use in DNA strand invasion (Nielsen et al., 1991), antisense inhibition (Hanvey et al., 1992), mutational analysis (Orum et al., 1993), enhancers of transcription (Mollegaard et al., 1994), nucleic acid purification (Orum et al., 1995), isolation of transcriptionally active genes (Boffa et al., 1995), blocking of transcription factor binding (Vickers et al., 1995), genome cleavage (Veselkov et al., 1996), biosensors (Wang et al., 1996), in situ hybridization (Thisted et al., 1996), and in a alternative to Southern blotting (Perry-O'Keefe, 1996).

[0359] Polypeptide, Peptides and Peptide Variants

[0360] The present invention, in other aspects, provides polypeptide compositions. Generally, a polypeptide of the invention will be an isolated polypeptide (or an epitope, variant, or active fragment thereof) derived from a mammalian species. Preferably, the polypeptide is encoded by a polynucleotide sequence disclosed herein or a sequence which hybridizes under moderately stringent conditions to a polynucleotide sequence disclosed herein. Alternatively, the polypeptide may be defined as a polypeptide which comprises a contiguous amino acid sequence from an amino acid sequence disclosed herein, or which polypeptide comprises an entire amino acid sequence disclosed herein.

[0361] In the present invention, a polypeptide composition is also understood to comprise one or more polypeptides that are immunologically reactive with antibodies generated against a polypeptide of the invention, particularly a polypeptide having the amino acid sequence encoded by the polynucleotides disclosed in SEQ ID NO:1-146, or to active fragments, or to variants or biological functional equivalents thereof.

[0362] Likewise, a polypeptide composition of the present invention is understood to comprise one or more polypeptides that are capable of eliciting antibodies that are immunologically reactive with one or more polypeptides encoded by one or more contiguous nucleic acid sequences contained in SEQ ID NO:1-146, or to active fragments, or to variants thereof, or to one or more nucleic acid sequences which hybridize to one or more of these sequences under conditions of moderate to high stringency. Particularly illustrative polypeptides include the amino acid sequences encoded by polynucleotides disclosed in SEQ ID NO:1-146.

[0363] As used herein, an active fragment of a polypeptide includes a whole or a portion of a polypeptide which is modified by conventional techniques, e.g., mutagenesis, or by addition, deletion, or substitution, but which active fragment exhibits substantially the same structure function, antigenicity, etc., as a polypeptide as described herein.

[0364] In certain illustrative embodiments, the polypeptides of the invention will comprise at least an immunogenic portion of a hematological malignancy-related tumor protein or a variant thereof, as described herein. As noted above, a “hematological malignancy-related tumor protein” is a protein that is expressed by hematological malignancy-related tumor cells. Proteins that are hematological malignancy-related tumor proteins also react detectably within an immunoassay (such as an ELISA) with antisera from a patient with hematological malignancy. Polypeptides as described herein may be of any length. Additional sequences derived from the native protein and/or heterologous sequences may be present, and such sequences may (but need not) possess further immunogenic or antigenic properties.

[0365] An “immunogenic portion,” as used herein is a portion of a protein that is recognized (i.e., specifically bound) by a B-cell and/or T-cell surface antigen receptor. Such immunogenic portions generally comprise at least 5 amino acid residues, more preferably at least 10, and still more preferably at least 20 amino acid residues of a hematological malignancy-related tumor protein or a variant thereof. Certain preferred immunogenic portions include peptides in which an N-terminal leader sequence and/or transmembrane domain have been deleted. Other preferred immunogenic portions may contain a small N- and/or C-terminal deletion (e.g., 1-30 amino acids, preferably 5-15 amino acids), relative to the mature protein.

[0366] Immunogenic portions may generally be identified using well known techniques, such as those summarized in Paul, Fundamental Immunology, 3rd ed., 243-247 (Raven Press, 1993) and references cited therein. Such techniques include screening polypeptides for the ability to react with antigen-specific antibodies, antisera and/or T-cell lines or clones. As used herein, antisera and antibodies are “antigen-specific” if they specifically bind to an antigen (i.e., they react with the protein in an ELISA or other immunoassay, and do not react detectably with unrelated proteins). Such antisera and antibodies may be prepared as described herein, and using well known techniques. An immunogenic portion of a native hematological malignancy-related tumor protein is a portion that reacts with such antisera and/or T-cells at a level that is not substantially less than the reactivity of the full length polypeptide (e.g., in an ELISA and/or T-cell reactivity assay). Such immunogenic portions may react within such assays at a level that is similar to or greater than the reactivity of the full length polypeptide. Such screens may generally be performed using methods well known to those of ordinary skill in the art, such as those described in Harlow and Lane, Antibodies: A Laboratory Manual, Cold Spring Harbor Laboratory, 1988. For example, a polypeptide may be immobilized on a solid support and contacted with patient sera to allow binding of antibodies within the sera to the immobilized polypeptide. Unbound sera may then be removed and bound antibodies detected using, for example, ¹²⁵I-labeled Protein A.

[0367] As noted above, a composition may comprise a variant of a native hematological malignancy-related tumor protein. A polypeptide “variant,” as used herein, is a polypeptide that differs from a native hematological malignancy-related tumor protein in one or more substitutions, deletions, additions and/or insertions, such that the immunogenicity of the polypeptide is not substantially diminished. In other words, the ability of a variant to react with antigen-specific antisera may be enhanced or unchanged, relative to the native protein, or may be diminished by less than 50%, and preferably less than 20%, relative to the native protein. Such variants may generally be identified by modifying one of the above polypeptide sequences and evaluating the reactivity of the modified polypeptide with antigen-specific antibodies or antisera as described herein. Preferred variants include those in which one or more portions, such as an N-terminal leader sequence or transmembrane domain, have been removed. Other preferred variants include variants in which a small portion (e.g., 1-30 amino acids, preferably 5-15 amino acids) has been removed from the N- and/or C-terminal of the mature protein.

[0368] Polypeptide variants encompassed by the present invention include those exhibiting at least about 70%, 75%, 80%, 85%, 90%, 91%, 92%, 93%, 94%, 95%, 96%, 97%, 98%, or 99% or more identity (determined as described above) to the polypeptides disclosed herein.

[0369] Preferably, a variant contains conservative substitutions. A “conservative substitution” is one in which an amino acid is substituted for another amino acid that has similar properties, such that one skilled in the art of peptide chemistry would expect the secondary structure and hydropathic nature of the polypeptide to be substantially unchanged. Amino acid substitutions may generally be made on the basis of similarity in polarity, charge, solubility, hydrophobicity, hydrophilicity and/or the amphipathic nature of the residues. For example, negatively charged amino acids include aspartic acid and glutamic acid; positively charged amino acids include lysine and arginine; and amino acids with uncharged polar head groups having similar hydrophilicity values include leucine, isoleucine and valine; glycine and alanine; asparagine and glutamine; and serine, threonine, phenylalanine and tyrosine. Other groups of amino acids that may represent conservative changes include: (1) ala, pro, gly, glu, asp, gln, asn, ser, thr; (2) cys, ser, tyr, thr; (3) val, ile, leu, met, ala, phe; (4) lys, arg, his; and (5) phe, tyr, trp, his. A variant may also, or alternatively, contain nonconservative changes. In a preferred embodiment, variant polypeptides differ from a native sequence by substitution, deletion or addition of five amino acids or fewer. Variants may also (or alternatively) be modified by, for example, the deletion or addition of amino acids that have minimal influence on the immunogenicity, secondary structure and hydropathic nature of the polypeptide.

[0370] As noted above, polypeptides may comprise a signal (or leader) sequence at the N-terminal end of the protein, which co-translationally or post-translationally directs transfer of the protein. The polypeptide may also be conjugated to a linker or other sequence for ease of synthesis, purification or identification of the polypeptide (e.g., poly-His), or to enhance binding of the polypeptide to a solid support. For example, a polypeptide may be conjugated to an immunoglobulin Fc region.

[0371] Polypeptides may be prepared using any of a variety of well known techniques. Recombinant polypeptides encoded by DNA sequences as described above may be readily prepared from the DNA sequences using any of a variety of expression vectors known to those of ordinary skill in the art. Expression may be achieved in any appropriate host cell that has been transformed or transfected with an expression vector containing a DNA molecule that encodes a recombinant polypeptide. Suitable host cells include prokaryotes, yeast, and higher eukaryotic cells, such as mammalian cells and plant cells. Preferably, the host cells employed are E. coli, yeast or a mammalian cell line such as COS or CHO. Supernatants from suitable host/vector systems which secrete recombinant protein or polypeptide into culture media may be first concentrated using a commercially available filter. Following concentration, the concentrate may be applied to a suitable purification matrix such as an affinity matrix or an ion exchange resin. Finally, one or more reverse phase HPLC steps can be employed to further purify a recombinant polypeptide.

[0372] Portions and other variants having less than about 100 amino acids, and generally less than about 50 amino acids, may also be generated by synthetic means, using techniques well known to those of ordinary skill in the art. For example, such polypeptides may be synthesized using any of the commercially available solid-phase techniques, such as the Merrifield solid-phase synthesis method, where amino acids are sequentially added to a growing amino acid chain. See Merrifield, J. Am. Chem. Soc. 85:2149-2146, 1963. Equipment for automated synthesis of polypeptides is commercially available from suppliers such as Perkin Elmer/Applied BioSystems Division (Foster City, Calif.), and may be operated according to the manufacturer's instructions.

[0373] Within certain specific embodiments, a polypeptide may be a fusion protein that comprises multiple polypeptides as described herein, or that comprises at least one polypeptide as described herein and an unrelated sequence, such as a known tumor protein. A fusion partner may, for example, assist in providing T helper epitopes (an immunological fusion partner), preferably T helper epitopes recognized by humans, or may assist in expressing the protein (an expression enhancer) at higher yields than the native recombinant protein. Certain preferred fusion partners are both immunological and expression enhancing fusion partners. Other fusion partners may be selected so as to increase the solubility of the protein or to enable the protein to be targeted to desired intracellular compartments. Still further fusion partners include affinity tags, which facilitate purification of the protein.

[0374] Fusion proteins may generally be prepared using standard techniques, including chemical conjugation. Preferably, a fusion protein is expressed as a recombinant protein, allowing the production of increased levels, relative to a non-fused protein, in an expression system. Briefly, DNA sequences encoding the polypeptide components may be assembled separately, and ligated into an appropriate expression vector. The 3′ end of the DNA sequence encoding one polypeptide component is ligated, with or without a peptide linker, to the 5′ end of a DNA sequence encoding the second polypeptide component so that the reading frames of the sequences are in phase. This permits translation into a single fusion protein that retains the biological activity of both component polypeptides.

[0375] A peptide linker sequence may be employed to separate the first and second polypeptide components by a distance sufficient to ensure that each polypeptide folds into its secondary and tertiary structures. Such a peptide linker sequence is incorporated into the fusion protein using standard techniques well known in the art. Suitable peptide linker sequences may be chosen based on the following factors: (1) their ability to adopt a flexible extended conformation; (2) their inability to adopt a secondary structure that could interact with functional epitopes on the first and second polypeptides; and (3) the lack of hydrophobic or charged residues that might react with the polypeptide functional epitopes. Preferred peptide linker sequences contain Gly, Asn and Ser residues. Other near neutral amino acids, such as Thr and Ala may also be used in the linker sequence. Amino acid sequences which may be usefully employed as linkers include those disclosed in Maratea et al., Gene 40:39-46, 1985; Murphy et al., Proc. Natl. Acad. Sci. USA 83:8258-8262, 1986; U.S. Pat. Nos. 4,935,233 and 4,751,180. The linker sequence may generally be from 1 to about 50 amino acids in length. Linker sequences are not required when the first and second polypeptides have non-essential N-terminal amino acid regions that can be used to separate the functional domains and prevent steric interference.

[0376] The ligated DNA sequences are operably linked to suitable transcriptional or translational regulatory elements. The regulatory elements responsible for expression of DNA are located only 5′ to the DNA sequence encoding the first polypeptides. Similarly, stop codons required to end translation and transcription termination signals are only present 3′ to the DNA sequence encoding the second polypeptide.

[0377] Fusion proteins are also provided. Such proteins comprise a polypeptide as described herein together with an unrelated immunogenic protein. Preferably the immunogenic protein is capable of eliciting a recall response. Examples of such proteins include tetanus, tuberculosis and hepatitis proteins (see, for example, Stoute et al. New Engl. J. Med., 336:86-91, 1997).

[0378] Within preferred embodiments, an immunological fusion partner is derived from protein D, a surface protein of the gram-negative bacterium Haemophilus influenza B (WO 91/18926). Preferably, a protein D derivative comprises approximately the first third of the protein (e.g., the first N-terminal 100-110 amino acids), and a protein D derivative may be lipidated. Within certain preferred embodiments, the first 109 residues of a Lipoprotein D fusion partner is included on the N-terminus to provide the polypeptide with additional exogenous T-cell epitopes and to increase the expression level in E. coli (thus functioning as an expression enhancer). The lipid tail ensures optimal presentation of the antigen to antigen presenting cells. Other fusion partners include the non-structural protein from influenzae virus, NS1 (hemaglutinin). Typically, the N-terminal 81 amino acids are used, although different fragments that include T-helper epitopes may be used.

[0379] In another embodiment, the immunological fusion partner is the protein known as LYTA, or a portion thereof (preferably a C-terminal portion). LYTA is derived from Streptococcus pneumoniae, which synthesizes an N-acetyl-L-alanine amidase known as amidase LYTA (encoded by the LytA gene; Gene 43:265-292, 1986). LYTA is an autolysin that specifically degrades certain bonds in the peptidoglycan backbone. The C-terminal domain of the LYTA protein is responsible for the affinity to the choline or to some choline analogues such as DEAE. This property has been exploited for the development of E. coli C-LYTA expressing plasmids useful for expression of fusion proteins. Purification of hybrid proteins containing the C-LYTA fragment at the amino terminus has been described (see Biotechnology 10:795-798, 1992). Within a preferred embodiment, a repeat portion of LYTA may be incorporated into a fusion protein. A repeat portion is found in the C-terminal region starting at residue 178. A particularly preferred repeat portion incorporates residues 188-305.

[0380] In general, polypeptides (including fusion proteins) and polynucleotides as described herein are isolated. An “isolated” polypeptide or polynucleotide is one that is removed from its original environment. For example, a naturally-occurring protein is isolated if it is separated from some or all of the coexisting materials in the natural system. Preferably, such polypeptides are at least about 90% pure, more preferably at least about 95% pure and most preferably at least about 99% pure. A polynucleotide is considered to be isolated if, for example, it is cloned into a vector that is not a part of the natural environment.

[0381] Binding Agents

[0382] The present invention further employs agents, such as antibodies and antigen-binding fragments thereof, that specifically bind to a hematological malignancy-related antigen. As used herein, an antibody, or antigen-binding fragment thereof, is said to “specifically bind” to a hematological malignancy-related antigen if it reacts at a detectable level (within, for example, an ELISA) with, and does not react detectably with unrelated proteins under similar conditions. As used herein, “binding” refers to a noncovalent association between two separate molecules such that a complex is formed. The ability to bind may be evaluated by, for example, determining a binding constant for the formation of the complex. The binding constant is the value obtained when the concentration of the complex is divided by the product of the component concentrations. In general, two compounds are said to “bind,” in the context of the present invention, when the binding constant for complex formation exceeds about 10³ L/mol. The binding constant maybe determined using methods well known in the art.

[0383] Binding agents may be further capable of differentiating between patients with and without a hematological malignancy. Such binding agents generate a signal indicating the presence of a hematological malignancy in at least about 20% of patients with the disease, and will generate a negative signal indicating the absence of the disease in at least about 90% of individuals without the disease. To determine whether a binding agent satisfies this requirement, biological samples (e.g., blood, sera, urine and/or tumor biopsies) from patients with and without a hematological malignancy (as determined using standard clinical tests) may be assayed as described herein for the presence of polypeptides that bind to the binding agent. It will be apparent that a statistically significant number of samples with and without the disease should be assayed. Each binding agent should satisfy the above criteria; however, those of ordinary skill in the art will recognize that binding agents may be used in combination to improve sensitivity.

[0384] Any agent that satisfies the above requirements may be a binding agent. For example, a binding agent may be a ribosome, with or without a peptide component, an RNA molecule or a polypeptide. In a preferred embodiment, a binding agent is an antibody or an antigen-binding fragment thereof. Antibodies may be prepared by any of a variety of techniques known to those of ordinary skill in the art. See, e.g., Harlow and Lane, Antibodies: A Laboratory Manual, Cold Spring Harbor Laboratory, 1988. In general, antibodies can be produced by cell culture techniques, including the generation of monoclonal antibodies as described herein, or via transfection of antibody genes into suitable bacterial or mammalian cell hosts, in order to allow for the production of recombinant antibodies. In one technique, an immunogen comprising the polypeptide is initially injected into any of a wide variety of mammals (e.g., mice, rats, rabbits, sheep or goats). In this step, the polypeptides of this invention may serve as the immunogen without modification. Alternatively, particularly for relatively short polypeptides, a superior immune response may be elicited if the polypeptide is joined to a carrier protein, such as bovine serum albumin or keyhole limpet hemocyanin. The immunogen is injected into the animal host, preferably according to a predetermined schedule incorporating one or more booster immunizations, and the animals are bled periodically. Polyclonal antibodies specific for the polypeptide may then be purified from such antisera by, for example, affinity chromatography using the polypeptide coupled to a suitable solid support.

[0385] Monoclonal antibodies specific for an antigenic polypeptide of interest may be prepared, for example, using the technique of Kohler and Milstein, Eur. J. Immunol. 6:511-519, 1976, and improvements thereto. Briefly, these methods involve the preparation of immortal cell lines capable of producing antibodies having the desired specificity (i.e., reactivity with the polypeptide of interest). Such cell lines may be produced, for example, from spleen cells obtained from an animal immunized as described above. The spleen cells are then immortalized by, for example, fusion with a myeloma cell fusion partner, preferably one that is syngeneic with the immunized animal. A variety of fusion techniques may be employed. For example, the spleen cells and myeloma cells may be combined with a nonionic detergent for a few minutes and then plated at low density on a selective medium that supports the growth of hybrid cells, but not myeloma cells. A preferred selection technique uses HAT (hypoxanthine, aminopterin, thymidine) selection. After a sufficient time, usually about 1 to 2 weeks, colonies of hybrids are observed. Single colonies are selected and their culture supernatants tested for binding activity against the polypeptide. Hybridomas having high reactivity and specificity are preferred.

[0386] Monoclonal antibodies may be isolated from the supernatants of growing hybridoma colonies. In addition, various techniques may be employed to enhance the yield, such as injection of the hybridoma cell line into the peritoneal cavity of a suitable vertebrate host, such as a mouse. Monoclonal antibodies may then be harvested from the ascites fluid or the blood. Contaminants may be removed from the antibodies by conventional techniques, such as chromatography, gel filtration, precipitation, and extraction. The polypeptides of this invention may be used in the purification process in, for example, an affinity chromatography step.

[0387] Within certain embodiments, the use of antigen-binding fragments of antibodies may be preferred. Such fragments include Fab fragments, which may be prepared using standard techniques. Briefly, immunoglobulins may be purified from rabbit serum by affinity chromatography on Protein A bead columns (Harlow and Lane, Antibodies: A Laboratory Manual, Cold Spring Harbor Laboratory, 1988) and digested by papain to yield Fab and Fc fragments. The Fab and Fc fragments may be separated by affinity chromatography on protein A bead columns.

[0388] Monoclonal antibodies, and fragments thereof, of the present invention may be coupled to one or more therapeutic agents, such as radionuclides, differentiation inducers, drugs, toxins, and derivatives thereof. Preferred radionuclides include ⁹⁰Y, ¹²³I, ¹²⁵I, ¹³¹I, ¹⁸⁶Re, ¹⁸⁸Re, ²¹¹At, and ²¹²Bi. Preferred drugs include methotrexate, and pyrimidine and purine analogs. Preferred differentiation inducers include phorbol esters and butyric acid. Preferred toxins include ricin, abrin, diptheria toxin, cholera toxin, gelonin, Pseudomonas exotoxin, Shigella toxin, and pokeweed antiviral protein. For certain in vivo and ex vivo therapies, an antibody or fragment thereof is preferably coupled to a cytotoxic agent, such as a radioactive or chemotherapeutic moiety.

[0389] A therapeutic agent may be coupled (e.g., covalently bonded) to a suitable monoclonal antibody either directly or indirectly (e.g., via a linker group). A direct reaction between an agent and an antibody is possible when each possesses a substituent capable of reacting with the other. For example, a nucleophilic group, such as an amino or sulfhydryl group, on one may be capable of reacting with a carbonyl-containing group, such as an anhydride or an acid halide, or with an alkyl group containing a good leaving group (e.g., a halide) on the other.

[0390] Alternatively, it may be desirable to couple a therapeutic agent and an antibody via a linker group. A linker group can function as a spacer to distance an antibody from an agent in order to avoid interference with binding capabilities. A linker group can also serve to increase the chemical reactivity of a substituent on an agent or an antibody, and thus increase the coupling efficiency. An increase in chemical reactivity may also facilitate the use of agents, or functional groups on agents, which otherwise would not be possible.

[0391] It will be evident to those skilled in the art that a variety of bifunctional or polyfunctional reagents, both homo- and hetero-functional (such as those described in the catalog of the Pierce Chemical Co., Rockford, Ill.), may be employed as the linker group. Coupling may be effected, for example, through amino groups, carboxyl groups, sulfhydryl groups or oxidized carbohydrate residues. There are numerous references describing such methodology, e.g., U.S. Pat. No. 4,671,958.

[0392] Where a therapeutic agent is more potent when free from the antibody portion of the immunoconjugates of the present invention, it may be desirable to use a linker group which is cleavable during or upon internalization into a cell. A number of different cleavable linker groups have been described. The mechanisms for the intracellular release of an agent from these linker groups include cleavage by reduction of a disulfide bond (e.g., U.S. Pat. No. 4,489,710), by irradiation of a photolabile bond (e.g., U.S. Pat. No. 4,625,014), by hydrolysis of derivatized amino acid side chains (e.g., U.S. Pat. No. 4,638,045), by serum complement-mediated hydrolysis (e.g., U.S. Pat. No. 4,671,958), and acid-catalyzed hydrolysis (e.g., U.S. Pat. No. 4,569,789).

[0393] It may be desirable to couple more than one agent to an antibody. In one embodiment, multiple molecules of an agent are coupled to one antibody molecule. In another embodiment, more than one type of agent may be coupled to one antibody. Regardless of the particular embodiment, immunoconjugates with more than one agent may be prepared in a variety of ways. For example, more than one agent may be coupled directly to an antibody molecule, or linkers which provide multiple sites for attachment can be used. Alternatively, a carrier can be used.

[0394] A carrier may bear the agents in a variety of ways, including covalent bonding either directly or via a linker group. Suitable carriers include proteins such as albumins (e.g., U.S. Pat. No. 4,507,234), peptides and polysaccharides such as aminodextran (e.g., U.S. Pat. No. 4,699,784). A carrier may also bear an agent by noncovalent bonding or by encapsulation, such as within a liposome vesicle (e.g., U.S. Pat. Nos. 4,429,008 and 4,873,088). Carriers specific for radionuclide agents include radiohalogenated small molecules and chelating compounds. For example, U.S. Pat. No. 4,735,792 discloses representative radiohalogenated small molecules and their synthesis. A radionuclide chelate may be formed from chelating compounds that include those containing nitrogen and sulfur atoms as the donor atoms for binding the metal, or metal oxide, radionuclide. For example, U.S. Pat. No. 4,673,562 discloses representative chelating compounds and their synthesis.

[0395] A variety of routes of administration for the antibodies and immunoconjugates may be used. Typically, administration will be intravenous, intramuscular, subcutaneous or in the bed of a resected tumor. It will be evident that the precise dose of the antibody/immunoconjugate will vary depending upon the antibody used, the antigen density on the tumor, and the rate of clearance of the antibody.

[0396] Vaccines

[0397] In certain preferred embodiments of the present invention, vaccines are provided. The vaccines will generally comprise one or more pharmaceutical compositions, such as those discussed above, in combination with an immunostimulant. An immunostimulant may be any substance that enhances or potentiates an immune response (antibody and/or cell-mediated) to an exogenous antigen. Examples of immunostimulants include adjuvants, biodegradable microspheres (e.g., polylactic galactide) and liposomes (into which the compound is incorporated; see e.g., Fullerton, U.S. Pat. No. 4,235,877). Vaccine preparation is generally described in, for example, M. F. Powell and M. J. Newman, eds., “Vaccine Design (the subunit and adjuvant approach),” Plenum Press (NY, 1995). Pharmaceutical compositions and vaccines within the scope of the present invention may also contain other compounds, which may be biologically active or inactive. For example, one or more immunogenic portions of other tumor antigens may be present, either incorporated into a fusion polypeptide or as a separate compound, within the composition or vaccine.

[0398] Illustrative vaccines may contain DNA encoding one or more of the polypeptides as described above, such that the polypeptide is generated in situ. As noted above, the DNA may be present within any of a variety of delivery systems known to those of ordinary skill in the art, including nucleic acid expression systems, bacteria and viral expression systems. Numerous gene delivery techniques are well known in the art, such as those described by Rolland, Crit. Rev. Therap. Drug Carrier Systems 15:143-198, 1998, and references cited therein. Appropriate nucleic acid expression systems contain the necessary DNA sequences for expression in the patient (such as a suitable promoter and terminating signal). Bacterial delivery systems involve the administration of a bacterium (such as Bacillus-Calmette-Guerrin) that expresses an immunogenic portion of the polypeptide on its cell surface or secretes such an epitope. In a preferred embodiment, the DNA may be introduced using a viral expression system (e.g., vaccinia or other pox virus, retrovirus, or adenovirus), which may involve the use of a non-pathogenic (defective), replication competent virus. Suitable systems are disclosed, for example, in Fisher-Hoch et al., Proc. Natl. Acad. Sci. USA 86:317-321, 1989; Flexner et al., Ann. N.Y. Acad. Sci. 569:86-103, 1989; Flexner et al., Vaccine 8:17-21, 1990; U.S. Pat. Nos. 4,603,112, 4,769,330, and 5,017,487; WO 89/01973; U.S. Pat. No. 4,777,127; GB2,200,651; EP0,345,242; WO91/02805; Berkner, Biotechniques 6:616-627, 1988; Rosenfeld et al., Science 252:431-434, 1991; Kolls et al., Proc. Natl. Acad. Sci. USA 91:215-219, 1994; Kass-Eisler et al., Proc. Natl. Acad. Sci. USA 90:11498-11502, 1993; Guzman et al., Circulation 88:2838-2848, 1993; and Guzman et al., Cir. Res. 73:1202-1207, 1993. Techniques for incorporating DNA into such expression systems are well known to those of ordinary skill in the art. The DNA may also be “naked,” as described, for example, in Uhner et al., Science 259:1745-1749, 1993 and reviewed by Cohen, Science 259:1691-1692, 1993. The uptake of naked DNA may be increased by coating the DNA onto biodegradable beads, which are efficiently transported into the cells. It will be apparent that a vaccine may comprise both a polynucleotide and a polypeptide component. Such vaccines may provide for an enhanced immune response.

[0399] It will be apparent that a vaccine may contain pharmaceutically acceptable salts of the polynucleotides and polypeptides provided herein. Such salts may be prepared from pharmaceutically acceptable non-toxic bases, including organic bases (e.g., salts of primary, secondary and tertiary amines and basic amino acids) and inorganic bases (e.g., sodium, potassium, lithium, ammonium, calcium and magnesium salts).

[0400] While any suitable carrier known to those of ordinary skill in the art may be employed in the vaccine compositions of this invention, the type of carrier will vary depending on the mode of administration. Compositions of the present invention may be formulated for any appropriate manner of administration, including for example, topical, oral, nasal, intravenous, intracranial, intraperitoneal, subcutaneous or intramuscular administration. For parenteral administration, such as subcutaneous injection, the carrier preferably comprises water, saline, alcohol, a fat, a wax or a buffer. For oral administration, any of the above carriers or a solid carrier, such as mannitol, lactose, starch, magnesium stearate, sodium saccharine, talcum, cellulose, glucose, sucrose, and magnesium carbonate, may be employed. Biodegradable microspheres (e.g., polylactate polyglycolate) may also be employed as carriers for the pharmaceutical compositions of this invention. Suitable biodegradable microspheres are disclosed, for example, in U.S. Pat. Nos. 4,897,268; 5,075,109; 5,928,647; 5,811,128; 5,820,883; 5,853,763; 5,814,344 and 5,942,252. One may also employ a carrier comprising the particulate-protein complexes described in U.S. Pat. No. 5,928,647, which are capable of inducing a class I-restricted cytotoxic T lymphocyte responses in a host.

[0401] Such compositions may also comprise buffers (e.g., neutral buffered saline or phosphate buffered saline), carbohydrates (e.g., glucose, mannose, sucrose or dextrans), mannitol, proteins, polypeptides or amino acids such as glycine, antioxidants, bacteriostats, chelating agents such as EDTA or glutathione, adjuvants (e.g., aluminum hydroxide), solutes that render the formulation isotonic, hypotonic or weakly hypertonic with the blood of a recipient, suspending agents, thickening agents and/or preservatives. Alternatively, compositions of the present invention may be formulated as a lyophilizate. Compounds may also be encapsulated within liposomes using well known technology.

[0402] Any of a variety of immunostimulants may be employed in the vaccines of this invention. For example, an adjuvant may be included. Most adjuvants contain a substance designed to protect the antigen from rapid catabolism, such as aluminum hydroxide or mineral oil, and a stimulator of immune responses, such as lipid A, Bortadella pertussis or Mycobacterium tuberculosis derived proteins. Suitable adjuvants are commercially available as, for example, Freund's Incomplete Adjuvant and Complete Adjuvant (Difco Laboratories, Detroit, Mich.); Merck Adjuvant 65 (Merck and Company, Inc., Rahway, N.J.); AS-2 (SmithKline Beecham, Philadelphia, Pa.); aluminum salts such as aluminum hydroxide gel (alum) or aluminum phosphate; salts of calcium, iron or zinc; an insoluble suspension of acylated tyrosine; acylated sugars; cationically or anionically derivatized polysaccharides; polyphosphazenes; biodegradable microspheres; monophosphoryl lipid A and quil A. Cytokines, such as GM-CSF or interleukin-2, -7, or -12, may also be used as adjuvants.

[0403] Within the vaccines provided herein, the adjuvant composition is preferably designed to induce an immune response predominantly of the Th1 type. High levels of Th1-type cytokines (e.g., IFN-γ, TNFα, IL-2 and IL-12) tend to favor the induction of cell mediated immune responses to an administered antigen. In contrast, high levels of Th2-type cytokines (e.g., IL-4, IL-5, IL-6 and IL-10) tend to favor the induction of humoral immune responses. Following application of a vaccine as provided herein, a patient will support an immune response that includes Th1- and Th2-type responses. Within a preferred embodiment, in which a response is predominantly Th1-type, the level of Th1-type cytokines will increase to a greater extent than the level of Th2-type cytokines. The levels of these cytokines may be readily assessed using standard assays. For a review of the families of cytokines, see Mosmann and Coffman, Ann. Rev. Immunol. 7:145-173, 1989.

[0404] Preferred adjuvants for use in eliciting a predominantly Th1-type response include, for example, a combination of monophosphoryl lipid A, preferably 3-de-O-acylated monophosphoryl lipid A (3D-MPL), together with an aluminum salt. MPL adjuvants are available from Corixa Corporation (Seattle, Wash.; see U.S. Pat. Nos. 4,436,727; 4,877,611; 4,866,034 and 4,912,094). CpG-containing oligonucleotides (in which the CpG dinucleotide is unmethylated) also induce a predominantly Th1 response. Such oligonucleotides are well known and are described, for example, in WO 96/02555, WO 99/33488 and U.S. Pat. Nos. 6,008,200 and 5,856,462. Immunostimulatory DNA sequences are also described, for example, by Sato et al., Science 273:352, 1996. Another preferred adjuvant is a saponin, preferably QS21 (Aquila Biopharmaceuticals Inc., Framingham, Mass.), which may be used alone or in combination with other adjuvants. For example, an enhanced system involves the combination of a monophosphoryl lipid A and saponin derivative, such as the combination of QS21 and 3D-MPL as described in WO 94/00153, or a less reactogenic composition where the QS21 is quenched with cholesterol, as described in WO 96/33739. Other preferred formulations comprise an oil-in-water emulsion and tocopherol. A particularly potent adjuvant formulation involving QS21, 3D-MPL and tocopherol in an oil-in-water emulsion is described in WO 95/17210.

[0405] Other preferred adjuvants include Montanide ISA 720 (Seppic, France), SAF (Chiron, Calif., United States), ISCOMS (CSL), MF-59 (Chiron), the SBAS series of adjuvants (e.g., SBAS-2 or SBAS-4, available from SmithKline Beecham, Rixensart, Belgium), Detox (Corixa, Hamilton, Mont.), RC-529 (Corixa, Hamilton, Mont.) and other aminoalkyl glucosaminide 4-phosphates (AGPs), such as those described in pending U.S. patent application Ser. Nos. 08/853,826 and 09/074,720, the disclosures of which are incorporated herein by reference in their entireties.

[0406] Any vaccine provided herein may be prepared using well known methods that result in a combination of antigen, immune response enhancer and a suitable carrier or excipient. The compositions described herein may be administered as part of a sustained release formulation (i.e., a formulation such as a capsule, sponge or gel (composed of polysaccharides, for example) that effects a slow release of compound following administration). Such formulations may generally be prepared using well known technology (see, e.g., Coombes et al., Vaccine 14:1429-1438, 1996) and administered by, for example, oral, rectal or subcutaneous implantation, or by implantation at the desired target site. Sustained-release formulations may contain a polypeptide, polynucleotide or antibody dispersed in a carrier matrix and/or contained within a reservoir surrounded by a rate controlling membrane.

[0407] Carriers for use within such formulations are biocompatible, and may also be biodegradable; preferably the formulation provides a relatively constant level of active component release. Such carriers include microparticles of poly(lactide-co-glycolide), polyacrylate, latex, starch, cellulose, dextran and the like. Other delayed-release carriers include supramolecular biovectors, which comprise a non-liquid hydrophilic core (e.g., a cross-linked polysaccharide or oligosaccharide) and, optionally, an external layer comprising an amphiphilic compound, such as a phospholipid (see e.g., U.S. Pat. No. 5,151,254 and PCT applications WO 94/20078, WO/94/23701 and WO 96/06638). The amount of active compound contained within a sustained release formulation depends upon the site of implantation, the rate and expected duration of release and the nature of the condition to be treated or prevented.

[0408] Any of a variety of delivery vehicles may be employed within pharmaceutical compositions and vaccines to facilitate production of an antigen-specific immune response that targets tumor cells. Delivery vehicles include antigen presenting cells (APCs), such as dendritic cells, macrophages, B cells, monocytes and other cells that may be engineered to be efficient APCs. Such cells may, but need not, be genetically modified to increase the capacity for presenting the antigen, to improve activation and/or maintenance of the T cell response, to have anti-tumor effects per se and/or to be immunologically compatible with the receiver (i.e., matched HLA haplotype). APCs may generally be isolated from any of a variety of biological fluids and organs, including tumor and peritumoral tissues, and may be autologous, allogeneic, syngeneic or xenogeneic cells.

[0409] Certain preferred embodiments of the present invention use dendritic cells or progenitors thereof as antigen-presenting cells. Dendritic cells are highly potent APCs (Banchereau and Steinman, Nature 392:245-251, 1998) and have been shown to be effective as a physiological adjuvant for eliciting prophylactic or therapeutic antitumor immunity (see Timmerman and Levy, Ann. Rev. Med. 50:507-529, 1999). In general, dendritic cells may be identified based on their typical shape (stellate in situ, with marked cytoplasmic processes (dendrites) visible in vitro), their ability to take up, process and present antigens with high efficiency and their ability to activate naive T cell responses. Dendritic cells may, of course, be engineered to express specific cell-surface receptors or ligands that are not commonly found on dendritic cells in vivo or ex vivo, and such modified dendritic cells are contemplated by the present invention. As an alternative to dendritic cells, secreted vesicles antigen-loaded dendritic cells (called exosomes) may be used within a vaccine (see Zitvogel et al., Nature Med. 4:594-600, 1998).

[0410] Dendritic cells and progenitors may be obtained from peripheral blood, bone marrow, tumor-infiltrating cells, peritumoral tissues-infiltrating cells, lymph nodes, spleen, skin, umbilical cord blood or any other suitable tissue or fluid. For example, dendritic cells may be differentiated ex vivo by adding a combination of cytokines such as GM-CSF, IL-4, IL-13 and/or TNFα to cultures of monocytes harvested from peripheral blood. Alternatively, CD34 positive cells harvested from peripheral blood, umbilical cord blood or bone marrow may be differentiated into dendritic cells by adding to the culture medium combinations of GM-CSF, IL-3, TNFα, CD40 ligand, LPS, flt3 ligand and/or other compound(s) that induce differentiation, maturation and proliferation of dendritic cells.

[0411] Dendritic cells are conveniently categorized as “immature” and “mature” cells, which allows a simple way to discriminate between two well characterized phenotypes. However, this nomenclature should not be construed to exclude all possible intermediate stages of differentiation. Immature dendritic cells are characterized as APC with a high capacity for antigen uptake and processing, which correlates with the high expression of Fcγ receptor and mannose receptor. The mature phenotype is typically characterized by a lower expression of these markers, but a high expression of cell surface molecules responsible for T cell activation such as class I and class II MHC, adhesion molecules (e.g., CD54 and CD 11) and costimulatory molecules (e.g., CD40, CD80, CD86 and 4-1BB).

[0412] APCs may generally be transfected with a polynucleotide encoding a hematological malignancy-related tumor protein (or portion or other variant thereof) such that the hematological malignancy-related tumor polypeptide, or an immunogenic portion thereof, is expressed on the cell surface. Such transfection may take place ex vivo, and a composition or vaccine comprising such transfected cells may then be used for therapeutic purposes, as described herein. Alternatively, a gene delivery vehicle that targets a dendritic or other antigen presenting cell may be administered to a patient, resulting in transfection that occurs in vivo. In vivo and ex vivo transfection of dendritic cells, for example, may generally be performed using any methods known in the art, such as those described in WO 97/24447, or the gene gun approach described by Mahvi et al., Immunology and cell Biology 75:456-460, 1997. Antigen loading of dendritic cells may be achieved by incubating dendritic cells or progenitor cells with the hematological malignancy-related tumor polypeptide, DNA (naked or within a plasmid vector) or RNA; or with antigen-expressing recombinant bacterium or viruses (e.g., vaccinia, fowlpox, adenovirus or lentivirus vectors). Prior to loading, the polypeptide may be covalently conjugated to an immunological partner that provides T cell help (e.g., a carrier molecule). Alternatively, a dendritic cell may be pulsed with a non-conjugated immunological partner, separately or in the presence of the polypeptide.

[0413] Vaccines and pharmaceutical compositions may be presented in unit-dose or multi-dose containers, such as sealed ampoules or vials. Such containers are preferably hermetically sealed to preserve sterility of the formulation until use. In general, formulations may be stored as suspensions, solutions or emulsions in oily or aqueous vehicles. Alternatively, a vaccine or pharmaceutical composition may be stored in a freeze-dried condition requiring only the addition of a sterile liquid carrier immediately prior to use.

[0414] Cancer Therapy

[0415] In further aspects of the present invention, the compositions described herein may be used for immunotherapy of cancer, such as hematological malignancy. Within such methods, pharmaceutical compositions and vaccines are typically administered to a patient. As used herein, a “patient” refers to any warm-blooded animal, preferably a human. A patient may or may not be afflicted with cancer. Accordingly, the above pharmaceutical compositions and vaccines may be used to prevent the development of a cancer or to treat a patient afflicted with a cancer. A cancer may be diagnosed using criteria generally accepted in the art, including the presence of a malignant tumor. Pharmaceutical compositions and vaccines may be administered either prior to or following surgical removal of primary tumors and/or treatment such as administration of radiotherapy or conventional chemotherapeutic drugs. Administration may be by any suitable method, including administration by intravenous, intraperitoneal, intramuscular, subcutaneous, intranasal, intradermal, anal, vaginal, topical and oral routes.

[0416] Within certain embodiments, immunotherapy may be active immunotherapy, in which treatment relies on the in vivo stimulation of the endogenous host immune system to react against tumors with the administration of immune response-modifying agents (such as polypeptides and polynucleotides as provided herein).

[0417] Within other embodiments, immunotherapy may be passive immunotherapy, in which treatment involves the delivery of agents with established tumor-immune reactivity (such as effector cells or antibodies) that can directly or indirectly mediate antitumor effects and does not necessarily depend on an intact host immune system. Examples of effector cells include T cells as discussed above, T lymphocytes (such as CD8⁺ cytotoxic T lymphocytes and CD4⁺ T-helper tumor-infiltrating lymphocytes), killer cells (such as Natural Killer cells and lymphokine-activated killer cells), B cells and antigen-presenting cells (such as dendritic cells and macrophages) expressing a polypeptide provided herein. T cell receptors and antibody receptors specific for the polypeptides recited herein may be cloned, expressed and transferred into other vectors or effector cells for adoptive immunotherapy. The polypeptides provided herein may also be used to generate antibodies or anti-idiotypic antibodies (as described above and in U.S. Pat. No. 4,918,164) for passive immunotherapy.

[0418] Effector cells may generally be obtained in sufficient quantities for adoptive immunotherapy by growth in vitro, as described herein. Culture conditions for expanding single antigen-specific effector cells to several billion in number with retention of antigen recognition in vivo are well known in the art. Such in vitro culture conditions typically use intermittent stimulation with antigen, often in the presence of cytokines (such as IL-2) and non-dividing feeder cells. As noted above, immunoreactive polypeptides as provided herein may be used to rapidly expand antigen-specific T cell cultures in order to generate a sufficient number of cells for immunotherapy. In particular, antigen-presenting cells, such as dendritic, macrophage, monocyte, fibroblast and/or B cells, may be pulsed with immunoreactive polypeptides or transfected with one or more polynucleotides using standard techniques well known in the art. For example, antigen-presenting cells can be transfected with a polynucleotide having a promoter appropriate for increasing expression in a recombinant virus or other expression system. Cultured effector cells for use in therapy must be able to grow and distribute widely, and to survive long term in vivo. Studies have shown that cultured effector cells can be induced to grow in vivo and to survive long term in substantial numbers by repeated stimulation with antigen supplemented with IL-2 (see, for example, Cheever et al., Immunological Reviews 157:177, 1997).

[0419] Alternatively, a vector expressing a polypeptide recited herein may be introduced into antigen presenting cells taken from a patient and clonally propagated ex vivo for transplant back into the same patient. Transfected cells may be reintroduced into the patient using any means known in the art, preferably in sterile form by intravenous, intracavitary, intraperitoneal or intratumor administration.

[0420] Routes and frequency of administration of the therapeutic compositions described herein, as well as dosage, will vary from individual to individual, and may be readily established using standard techniques. In general, the pharmaceutical compositions and vaccines may be administered by injection (e.g., intracutaneous, intramuscular, intravenous or subcutaneous), intranasally (e.g., by aspiration) or orally. Preferably, between 1 and 10 doses may be administered over a 52 week period. Preferably, 6 doses are administered, at intervals of 1 month, and booster vaccinations may be given periodically thereafter. Alternate protocols may be appropriate for individual patients. A suitable dose is an amount of a compound that, when administered as described above, is capable of promoting an anti-tumor immune response, and is at least 10-50% above the basal (i.e., untreated) level. Such response can be monitored by measuring the anti-tumor antibodies in a patient or by vaccine-dependent generation of cytolytic effector cells capable of killing the patient's tumor cells in vitro. Such vaccines should also be capable of causing an immune response that leads to an improved clinical outcome (e.g., more frequent remissions, complete or partial or longer disease-free survival) in vaccinated patients as compared to non-vaccinated patients. In general, for pharmaceutical compositions and vaccines comprising one or more polypeptides, the amount of each polypeptide present in a dose ranges from about 25 μg to 5 mg per kg of host. Suitable dose sizes will vary with the size of the patient, but will typically range from about 0.1 mL to about 5 mL.

[0421] In general, an appropriate dosage and treatment regimen provides the active compound(s) in an amount sufficient to provide therapeutic and/or prophylactic benefit. Such a response can be monitored by establishing an improved clinical outcome (e.g., more frequent remissions, complete or partial, or longer disease-free survival) in treated patients as compared to non-treated patients. Increases in preexisting immune responses to a hematological malignancy-related tumor protein generally correlate with an improved clinical outcome. Such immune responses may generally be evaluated using standard proliferation, cytotoxicity or cytokine assays, which may be performed using samples obtained from a patient before and after treatment.

[0422] Cancer Detection and Diagnosis

[0423] In general, a cancer may be detected in a patient based on the presence of one or more hematological malignancy-related tumor proteins and/or polynucleotides encoding such proteins in a biological sample (for example, blood, sera, sputum urine and/or tumor biopsies) obtained from the patient. In other words, such proteins may be used as markers to indicate the presence or absence of a cancer such as hematological malignancy. In addition, such proteins may be useful for the detection of other cancers. The binding agents provided herein generally permit detection of the level of antigen that binds to the agent in the biological sample. Polynucleotide primers and probes may be used to detect the level of mRNA encoding a tumor protein, which is also indicative of the presence or absence of a cancer. In general, a hematological malignancy-related tumor sequence should be present at a level that is at least three fold higher in tumor tissue than in normal tissue

[0424] There are a variety of assay formats known to those of ordinary skill in the art for using a binding agent to detect polypeptide markers in a sample. See, e.g., Harlow and Lane, Antibodies: A Laboratory Manual, Cold Spring Harbor Laboratory, 1988. In general, the presence or absence of a cancer in a patient may be determined by (a) contacting a biological sample obtained from a patient with a binding agent; (b) detecting in the sample a level of polypeptide that binds to the binding agent; and (c) comparing the level of polypeptide with a predetermined cut-off value.

[0425] In a preferred embodiment, the assay involves the use of binding agent immobilized on a solid support to bind to and remove the polypeptide from the remainder of the sample. The bound polypeptide may then be detected using a detection reagent that contains a reporter group and specifically binds to the binding agent/polypeptide complex. Such detection reagents may comprise, for example, a binding agent that specifically binds to the polypeptide or an antibody or other agent that specifically binds to the binding agent, such as an anti-immunoglobulin, protein G, protein A or a lectin. Alternatively, a competitive assay may be utilized, in which a polypeptide is labeled with a reporter group and allowed to bind to the immobilized binding agent after incubation of the binding agent with the sample. The extent to which components of the sample inhibit the binding of the labeled polypeptide to the binding agent is indicative of the reactivity of the sample with the immobilized binding agent. Suitable polypeptides for use within such assays include full length hematological malignancy-related tumor proteins and portions thereof to which the binding agent binds, as described above.

[0426] The solid support may be any material known to those of ordinary skill in the art to which the tumor protein may be attached. For example, the solid support may be a test well in a microtiter plate or a nitrocellulose or other suitable membrane. Alternatively, the support may be a bead or disc, such as glass, fiberglass, latex or a plastic material such as polystyrene or polyvinylchloride. The support may also be a magnetic particle or a fiber optic sensor, such as those disclosed, for example, in U.S. Pat. No. 5,359,681. The binding agent may be immobilized on the solid support using a variety of techniques known to those of skill in the art, which are amply described in the patent and scientific literature. In the context of the present invention, the term “immobilization” refers to both noncovalent association, such as adsorption, and covalent attachment (which may be a direct linkage between the agent and functional groups on the support or may be a linkage by way of a cross-linking agent). Immobilization by adsorption to a well in a microtiter plate or to a membrane is preferred. In such cases, adsorption may be achieved by contacting the binding agent, in a suitable buffer, with the solid support for a suitable amount of time. The contact time varies with temperature, but is typically between about 1 hour and about 1 day. In general, contacting a well of a plastic microtiter plate (such as polystyrene or polyvinylchloride) with an amount of binding agent ranging from about 10 ng to about 10 μg, and preferably about 100 ng to about 1 μg, is sufficient to immobilize an adequate amount of binding agent.

[0427] Covalent attachment of binding agent to a solid support may generally be achieved by first reacting the support with a bifunctional reagent that will react with both the support and a functional group, such as a hydroxyl or amino group, on the binding agent. For example, the binding agent may be covalently attached to supports having an appropriate polymer coating using benzoquinone or by condensation of an aldehyde group on the support with an amine and an active hydrogen on the binding partner (see, e.g., Pierce Immunotechnology Catalog and Handbook, 1991, at A12-A13).

[0428] In certain embodiments, the assay is a two-antibody sandwich assay. This assay may be performed by first contacting an antibody that has been immobilized on a solid support, commonly the well of a microtiter plate, with the sample, such that polypeptides within the sample are allowed to bind to the immobilized antibody. Unbound sample is then removed from the immobilized polypeptide-antibody complexes and a detection reagent (preferably a second antibody capable of binding to a different site on the polypeptide) containing a reporter group is added. The amount of detection reagent that remains bound to the solid support is then determined using a method appropriate for the specific reporter group.

[0429] More specifically, once the antibody is immobilized on the support as described above, the remaining protein binding sites on the support are typically blocked. Any suitable blocking agent known to those of ordinary skill in the art, such as bovine serum albumin or Tween 20™ (Sigma Chemical Co., St. Louis, Mo.). The immobilized antibody is then incubated with the sample, and polypeptide is allowed to bind to the antibody. The sample may be diluted with a suitable diluent, such as phosphate-buffered saline (PBS) prior to incubation. In general, an appropriate contact time (i.e., incubation time) is a period of time that is sufficient to detect the presence of polypeptide within a sample obtained from an individual with hematological malignancy. Preferably, the contact time is sufficient to achieve a level of binding that is at least about 95% of that achieved at equilibrium between bound and unbound polypeptide. Those of ordinary skill in the art will recognize that the time necessary to achieve equilibrium may be readily determined by assaying the level of binding that occurs over a period of time. At room temperature, an incubation time of about 30 minutes is generally sufficient.

[0430] Unbound sample may then be removed by washing the solid support with an appropriate buffer, such as PBS containing 0.1% Tween 20™. The second antibody, which contains a reporter group, may then be added to the solid support. Preferred reporter groups include those groups recited above.

[0431] The detection reagent is then incubated with the immobilized antibody-polypeptide complex for an amount of time sufficient to detect the bound polypeptide. An appropriate amount of time may generally be determined by assaying the level of binding that occurs over a period of time. Unbound detection reagent is then removed and bound detection reagent is detected using the reporter group. The method employed for detecting the reporter group depends upon the nature of the reporter group. For radioactive groups, scintillation counting or autoradiographic methods are generally appropriate. Spectroscopic methods may be used to detect dyes, luminescent groups and fluorescent groups. Biotin may be detected using avidin, coupled to a different reporter group (commonly a radioactive or fluorescent group or an enzyme). Enzyme reporter groups may generally be detected by the addition of substrate (generally for a specific period of time), followed by spectroscopic or other analysis of the reaction products.

[0432] To determine the presence or absence of a cancer, such as hematological malignancy, the signal detected from the reporter group that remains bound to the solid support is generally compared to a signal that corresponds to a predetermined cut-off value. In one preferred embodiment, the cut-off value for the detection of a cancer is the average mean signal obtained when the immobilized antibody is incubated with samples from patients without the cancer. In general, a sample generating a signal that is three standard deviations above the predetermined cut-off value is considered positive for the cancer. In an alternate preferred embodiment, the cut-off value is determined using a Receiver Operator Curve, according to the method of Sackett et al, Clinical Epidemiology: A Basic Science for Clinical Medicine, Little Brown and Co., 1985, p. 106-7. Briefly, in this embodiment, the cut-off value may be determined from a plot of pairs of true positive rates (i.e., sensitivity) and false positive rates (100%-specificity) that correspond to each possible cut-off value for the diagnostic test result. The cut-off value on the plot that is the closest to the upper left-hand corner (i.e., the value that encloses the largest area) is the most accurate cut-off value, and a sample generating a signal that is higher than the cut-off value determined by this method may be considered positive. Alternatively, the cut-off value may be shifted to the left along the plot, to minimize the false positive rate, or to the right, to minimize the false negative rate. In general, a sample generating a signal that is higher than the cut-off value determined by this method is considered positive for a cancer.

[0433] In a related embodiment, the assay is performed in a flow-through or strip test format, wherein the binding agent is immobilized on a membrane, such as nitrocellulose. In the flow-through test, polypeptides within the sample bind to the immobilized binding agent as the sample passes through the membrane. A second, labeled binding agent then binds to the binding agent-polypeptide complex as a solution containing the second binding agent flows through the membrane. The detection of bound second binding agent may then be performed as described above. In the strip test format, one end of the membrane to which binding agent is bound is immersed in a solution containing the sample. The sample migrates along the membrane through a region containing second binding agent and to the area of immobilized binding agent. Concentration of second binding agent at the area of immobilized antibody indicates the presence of a cancer. Typically, the concentration of second binding agent at that site generates a pattern, such as a line, that can be read visually. The absence of such a pattern indicates a negative result. In general, the amount of binding agent immobilized on the membrane is selected to generate a visually discernible pattern when the biological sample contains a level of polypeptide that would be sufficient to generate a positive signal in the two-antibody sandwich assay, in the format discussed above. Preferred binding agents for use in such assays are antibodies and antigen-binding fragments thereof. Preferably, the amount of antibody immobilized on the membrane ranges from about 25 ng to about 1 μg, and more preferably from about 50 ng to about 500 ng. Such tests can typically be performed with a very small amount of biological sample.

[0434] Of course, numerous other assay protocols exist that are suitable for use with the tumor proteins or binding agents of the present invention. The above descriptions are intended to be exemplary only. For example, it will be apparent to those of ordinary skill in the art that the above protocols may be readily modified to use hematological malignancy-related tumor polypeptides to detect antibodies that bind to such polypeptides in a biological sample. The detection of such hematological malignancy-related tumor protein specific antibodies may correlate with the presence of a cancer.

[0435] A cancer may also, or alternatively, be detected based on the presence of T cells that specifically react with a hematological malignancy-related tumor protein in a biological sample. Within certain methods, a biological sample comprising CD4⁺ and/or CD8⁺ T cells isolated from a patient is incubated with a hematological malignancy-related tumor polypeptide, a polynucleotide encoding such a polypeptide and/or an APC that expresses at least an immunogenic portion of such a polypeptide, and the presence or absence of specific activation of the T cells is detected. Suitable biological samples include, but are not limited to, isolated T cells. For example, T cells may be isolated from a patient by routine techniques (such as by Ficoll/Hypaque density gradient centrifugation of peripheral blood lymphocytes). T cells may be incubated in vitro for 2-9 days (typically 4 days) at 37° C. with polypeptide (e.g., 5-25 μg/ml). It may be desirable to incubate another aliquot of a T cell sample in the absence of hematological malignancy-related tumor polypeptide to serve as a control. For CD4⁺ T cells, activation is preferably detected by evaluating proliferation of the T cells. For CD8⁺ T cells, activation is preferably detected by evaluating cytolytic activity. A level of proliferation that is at least two fold greater and/or a level of cytolytic activity that is at least 20% greater than in disease-free patients indicates the presence of a cancer in the patient.

[0436] As noted above, a cancer may also, or alternatively, be detected based on the level of mRNA encoding a hematological malignancy-related tumor protein in a biological sample. For example, at least two oligonucleotide primers may be employed in a polymerase chain reaction (PCR) based assay to amplify a portion of a hematological malignancy-related tumor cDNA derived from a biological sample, wherein at least one of the oligonucleotide primers is specific for (i.e., hybridizes to) a polynucleotide encoding the hematological malignancy-related tumor protein. The amplified cDNA is then separated and detected using techniques well known in the art, such as gel electrophoresis. Similarly, oligonucleotide probes that specifically hybridize to a polynucleotide encoding a hematological malignancy-related tumor protein may be used in a hybridization assay to detect the presence of polynucleotide encoding the tumor protein in a biological sample.

[0437] To permit hybridization under assay conditions, oligonucleotide primers and probes should comprise an oligonucleotide sequence that has at least about 60%, preferably at least about 75% and more preferably at least about 90%, identity to a portion of a polynucleotide encoding a hematological malignancy-related tumor protein that is at least 10 nucleotides, and preferably at least 20 nucleotides, in length. Preferably, oligonucleotide primers and/or probes hybridize to a polynucleotide encoding a polypeptide described herein under moderately stringent conditions, as defined above. Oligonucleotide primers and/or probes which may be usefully employed in the diagnostic methods described herein preferably are at least 10-40 nucleotides in length. In a preferred embodiment, the oligonucleotide primers comprise at least contiguous nucleotides, more preferably at least 15 contiguous nucleotides, of a DNA molecule having a sequence recited in SEQ ID NO:1-146. Techniques for both PCR based assays and hybridization assays are well known in the art (see, for example, Mullis et al., Cold Spring Harbor Symp. Quant. Biol., 51:263, 1987; Erlich ed., PCR Technology, Stockton Press, NY, 1989).

[0438] One preferred assay employs RT-PCR, in which PCR is applied in conjunction with reverse transcription. Typically, RNA is extracted from a biological sample, such as biopsy tissue, and is reverse transcribed to produce cDNA molecules. PCR amplification using at least one specific primer generates a cDNA molecule, which may be separated and visualized using, for example, gel electrophoresis. Amplification may be performed on biological samples taken from a test patient and from an individual who is not afflicted with a cancer. The amplification reaction may be performed on several dilutions of cDNA spanning two orders of magnitude. A two-fold or greater increase in expression in several dilutions of the test patient sample as compared to the same dilutions of the non-cancerous sample is typically considered positive.

[0439] In another embodiment, the compositions described herein may be used as markers for the progression of cancer. In this embodiment, assays as described above for the diagnosis of a cancer may be performed over time, and the change in the level of reactive polypeptide(s) or polynucleotide(s) evaluated. For example, the assays may be performed every 24-72 hours for a period of 6 months to 1 year, and thereafter performed as needed. In general, a cancer is progressing in those patients in whom the level of polypeptide or polynucleotide detected increases over time. In contrast, the cancer is not progressing when the level of reactive polypeptide or polynucleotide either remains constant or decreases with time.

[0440] Certain in vivo diagnostic assays may be performed directly on a tumor. One such assay involves contacting tumor cells with a binding agent. The bound binding agent may then be detected directly or indirectly via a reporter group. Such binding agents may also be used in histological applications. Alternatively, polynucleotide probes may be used within such applications.

[0441] As noted above, to improve sensitivity, multiple hematological malignancy-related tumor protein markers may be assayed within a given sample. It will be apparent that binding agents specific for different proteins provided herein may be combined within a single assay. Further, multiple primers or probes may be used concurrently. The selection of tumor protein markers may be based on routine experiments to determine combinations that results in optimal sensitivity. In addition, or alternatively, assays for tumor proteins provided herein may be combined with assays for other known tumor antigens.

[0442] Preparation of DNA Sequences

[0443] Certain nucleic acid sequences of cDNA molecules encoding portions of hematological malignancy-related antigens were isolated by PCR™-based subtraction. This technique serves to normalize differentially expressed cDNAs, facilitating the recovery of rare transcripts, and also has the advantage of permitting enrichment of cDNAs with small amounts of polyA RNA material and without multiple rounds of hybridization. To obtain antigens overexpressed in non-Hodgkin's lymphomas, two subtractions were performed with a tester library prepared from a pool of three T cell non-Hodgkin's lymphoma mRNAs. The two libraries were independently subtracted with different pools of driver cDNAs. Driver #1 contained cDNA prepared from specific normal tissues (lymph node, bone marrow, T cells, heart and brain), and this subtraction generated the library TCS-D1 (T cell non-Hodgkin's lymphoma subtracted library with driver #1). Driver #2 contained non-specific normal tissues (colon, large intestine, lung, pancreas, spinal cord, skeletal muscle, liver, kidney, skin and brain), and this subtraction generated the library TCS-D2 (T cell non-Hodgkin's lymphoma subtraction library with driver #2). Two other subtractions were performed with a tester library prepared from a pool of three B cell non-Hodgkin's lymphoma mRNAs. The two libraries were independently subtracted with different pools of driver cDNAs. Driver #1 contained cDNA prepared from specific normal tissues (lymph node, bone marrow, B cells, heart and brain), and this subtraction generated the library BCNHL/D1 (B cell non-Hodgkin's lymphoma subtracted library with driver #1). Driver #2 contained non-specific normal tissues (brain, lung, pancreas, spinal cord, skeletal muscle, colon, spleen, large intestine and PBMC), and this subtraction generated the library BCNHL/D2 (B cell non-Hodgkin's lymphoma subtraction library with driver #2). PCR™-amplified pools were generated from the subtracted libraries and clones were sequenced.

[0444] Hematological malignancy-related antigen sequences may be further characterized using any of a variety of well known techniques. For example, PCR™ amplified clones may be arrayed onto glass slides for microarray analysis. To determine tissue distribution, the arrayed clones may be used as targets to be hybridized with different first strand cDNA probes, including lymphoma probes, leukemia probes and probes from different normal tissues. Leukemia and lymphoma probes may be generated from cryopreserved samples obtained at the time of diagnosis from NHL, Hodgkin's disease, AML, CML, CLL, ALL, MDS and myeloma patients with poor outcome (patients who failed to achieve complete remission following conventional chemotherapy or relapsed) or good outcome (patients who achieved long term remission). To analyze gene expression during hematopoetic differentiation, probes may be generated from >95% pure fractions of CD34+, CD2+, CD14+, CD15+ and CD19+ cells derived from healthy individuals.

[0445] Polynucleotide variants may generally be prepared by any method known in the art, including chemical synthesis by, for example, solid phase phosphoramidite chemical synthesis. Modifications in a polynucleotide sequence may also be introduced using standard mutagenesis techniques, such as oligonucleotide-directed site-specific mutagenesis (see Adelman et al., DNA 2:183, 1983). Alternatively, RNA molecules may be generated by in vitro or in vivo transcription of DNA sequences, provided that the DNA is incorporated into a vector with a suitable RNA polymerase promoter (such as T7 or SP6). Certain portions may be used to prepare an encoded polypeptide, as described herein. In addition, or alternatively, a portion may be administered to a patient such that the encoded polypeptide is generated in vivo (e.g., by transfecting antigen-presenting cells, such as dendritic cells, with a cDNA construct encoding a hematological malignancy-related antigen, and administering the transfected cells to the patient).

[0446] A portion of a sequence complementary to a coding sequence (i.e., an antisense polynucleotide) may also be used as a probe or to modulate hematological malignancy-related antigen expression. cDNA constructs that can be transcribed into antisense RNA may also be introduced into cells or tissues to facilitate the production of antisense RNA. An antisense polynucleotide may be used, as described herein, to inhibit expression of a hematological malignancy-related antigen. Antisense technology can be used to control gene expression through triple-helix formation, which compromises the ability of the double helix to open sufficiently for the binding of polymerases, transcription factors or regulatory molecules (see Gee et al., In Huber and Carr, Molecular and Immunologic Approaches, Futura Publishing Co. (Mt. Kisco, N.Y.; 1994)). Alternatively, an antisense molecule may be designed to hybridize with a control region of a gene (e.g., promoter, enhancer or transcription initiation site), and block transcription of the gene; or to block translation by inhibiting binding of a transcript to ribosomes.

[0447] A portion of a coding sequence or of a complementary sequence may also be designed as a probe or primer to detect gene expression. Probes may be labeled with a variety of reporter groups, such as radionuclides and enzymes, and are preferably at least 10 nucleotides in length, more preferably at least 20 nucleotides in length and still more preferably at least 30 nucleotides in length. Primers, as noted above, are preferably 22-30 nucleotides in length.

[0448] Any polynucleotide may be further modified to increase stability in vivo. Possible modifications include, but are not limited to, the addition of flanking sequences at the 5′ and/or 3′ ends; the use of phosphorothioate or 2′ O-methyl rather than phosphodiesterase linkages in the backbone; and/or the inclusion of nontraditional bases such as inosine, queosine and wybutosine, as well as acetyl- methyl-, thio- and other modified forms of adenine, cytidine, guanine, thymine and uridine.

[0449] Hematological malignancy-related antigen polynucleotides may be joined to a variety of other nucleotide sequences using established recombinant DNA techniques. For example, a polynucleotide may be cloned into any of a variety of cloning vectors, including plasmids, phagemids, lambda phage derivatives and cosmids. Vectors of particular interest include expression vectors, replication vectors, probe generation vectors and sequencing vectors. In general, a vector will contain an origin of replication functional in at least one organism, convenient restriction endonuclease sites and one or more selectable markers. Other elements will depend upon the desired use, and will be apparent to those of ordinary skill in the art.

[0450] Within certain embodiments, polynucleotides may be formulated so as to permit entry into a cell of a mammal, and expression therein. Such formulations are particularly useful for therapeutic purposes, as described below. Those of ordinary skill in the art will appreciate that there are many ways to achieve expression of a polynucleotide in a target cell, and any suitable method may be employed. For example, a polynucleotide may be incorporated into a viral vector such as, but not limited to, adenovirus, adeno-associated virus, retrovirus, or vaccinia or other pox virus (e.g., avian pox virus). Techniques for incorporating DNA into such vectors are well known to those of ordinary skill in the art. A retroviral vector may additionally transfer or incorporate a gene for a selectable marker (to aid in the identification or selection of transduced cells) and/or a targeting moiety, such as a gene that encodes a ligand for a receptor on a specific target cell, to render the vector target specific. Targeting may also be accomplished using an antibody, by methods known to those of ordinary skill in the art.

[0451] Other formulations for therapeutic purposes include colloidal dispersion systems, such as macromolecule complexes, nanocapsules, microspheres, beads, and lipid-based systems including oil-in-water emulsions, micelles, mixed micelles, and liposomes. A preferred colloidal system for use as a delivery vehicle in vitro and in vivo is a liposome (i.e., an artificial membrane vesicle). The preparation and use of such systems is well known in the art.

[0452] Therapeutic Methods

[0453] In further aspects of the present invention, the compositions described herein may be used for immunotherapy of hematological malignancies including adult and pediatric AML, CML, ALL, CLL, myelodysplastic syndromes (MDS), myeloproliferative syndromes (MPS), secondary leukemia, multiple myeloma, Hodgkin's lymphoma and Non-Hodgkin's lymphomas. In addition, compositions described herein may be used for therapy of diseases associated with an autoimmune response against hematopoetic precursor cells, such as severe aplastic anemia.

[0454] Immunotherapy may be performed using any of a variety of techniques, in which compounds or cells provided herein function to remove hematological malignancy-related antigen-expressing cells from a patient. Such removal may take place as a result of enhancing or inducing an immune response in a patient specific for hematological malignancy-related antigen or a cell expressing hematological malignancy-related antigen. Alternatively, hematological malignancy-related antigen-expressing cells may be removed ex vivo (e.g., by treatment of autologous bone marrow, peripheral blood or a fraction of bone marrow or peripheral blood). Fractions of bone marrow or peripheral blood may be obtained using any standard technique in the art.

[0455] Within such methods, pharmaceutical compositions and vaccines are typically administered to a patient. As used herein, a “patient” refers to any warm-blooded animal, preferably a human. A patient may or may not be afflicted with a hematological malignancy. Accordingly, the above pharmaceutical compositions and vaccines may be used to prevent the development of a malignancy or to treat a patient afflicted with a malignancy. A hematological malignancy may be diagnosed using criteria generally accepted in the art. Pharmaceutical compositions and vaccines may be administered either prior to or following surgical removal of primary tumors and/or treatment such as administration of radiotherapy or conventional chemotherapeutic drugs, or bone marrow transplantation (autologous, allogeneic or syngeneic).

[0456] Within certain embodiments, immunotherapy may be active immunotherapy, in which treatment relies on the in vivo stimulation of the endogenous host immune system to react against tumors with the administration of immune response-modifying agents (such as polypeptides and polynucleotides as provided herein).

[0457] Within other embodiments, immunotherapy may be passive immunotherapy, in which treatment involves the delivery of agents with established tumor-immune reactivity (such as effector cells or antibodies) that can directly or indirectly mediate antitumor effects and does not necessarily depend on an intact host immune system. Examples of effector cells include T cells as discussed above, T lymphocytes (such as CD8⁺ cytotoxic T lymphocytes and CD4⁺ T-helper tumor-infiltrating lymphocytes), killer cells (such as Natural Killer cells and lymphokine-activated killer cells), B cells and antigen-presenting cells (such as dendritic cells and macrophages) expressing a polypeptide provided herein. T cell receptors and antibody receptors specific for the polypeptides recited herein may be cloned, expressed and transferred into other vectors or effector cells for adoptive immunotherapy. The polypeptides provided herein may also be used to generate antibodies or anti-idiotypic antibodies (as described above and in U.S. Pat. No. 4,918,164) for passive immunotherapy.

[0458] Effector cells may generally be obtained in sufficient quantities for adoptive immunotherapy by growth in vitro, as described herein. Culture conditions for expanding single antigen-specific effector cells to several billion in number with retention of antigen recognition in vivo are well known in the art. Such in vitro culture conditions typically use intermittent stimulation with antigen, often in the presence of cytokines (such as IL-2) and non-dividing feeder cells. As noted above, immunoreactive polypeptides as provided herein may be used to rapidly expand antigen-specific T cell cultures in order to generate a sufficient number of cells for immunotherapy. In particular, antigen-presenting cells, such as dendritic, macrophage or B cells, may be pulsed with immunoreactive polypeptides or transfected with one or more polynucleotides using standard techniques well known in the art. For example, antigen-presenting cells can be transfected with a polynucleotide having a promoter appropriate for increasing expression in a recombinant virus or other expression system. Cultured effector cells for use in therapy must be able to grow and distribute widely, and to survive long term in vivo. Studies have shown that cultured effector cells can be induced to grow in vivo and to survive long term in substantial numbers by repeated stimulation with antigen supplemented with IL-2 (see, for example, Cheever et al., Immunological Reviews 157:177, 1997).

[0459] Alternatively, a vector expressing a polypeptide recited herein may be introduced into antigen presenting cells taken from a patient and clonally propagated ex vivo for transplant back into the same patient. Transfected cells may be reintroduced into the patient using any means known in the art, preferably in sterile form by intravenous, intracavitary, intraperitoneal or intratumor administration.

[0460] The compositions provided herein may be used alone or in combination with conventional therapeutic regimens such as surgery, irradiation, chemotherapy and/or bone marrow transplantation (autologous, syngeneic, allogeneic or unrelated). As discussed in greater detail below, binding agents and T cells as provided herein may be used for purging of autologous stem cells. Such purging may be beneficial prior to, for example, bone marrow transplantation or transfusion of blood or components thereof. Binding agents, T cells, antigen presenting cells (APC) and compositions provided herein may further be used for expanding and stimulating (or priming) autologous, allogeneic, syngeneic or unrelated hematological malignancy-related antigen-specific T-cells in vitro and/or in vivo. Such hematological malignancy-related antigen-specific T cells may be used, for example, within donor lymphocyte infusions.

[0461] Routes and frequency of administration of the therapeutic compositions described herein, as well as dosage, will vary from individual to individual, and may be readily established using standard techniques. In general, the pharmaceutical compositions and vaccines may be administered by injection (e.g., intracutaneous, intramuscular, intravenous or subcutaneous), intranasally (e.g., by aspiration) or orally. Preferably, between 1 and 10 doses may be administered over a 52 week period. Preferably, 6 doses are administered, at intervals of 1 month, and booster vaccinations may be given periodically thereafter. Alternate protocols may be appropriate for individual patients. A suitable dose is an amount of a compound that, when administered as described above, is capable of promoting an anti-tumor immune response, and is at least 10-50% above the basal (i.e., untreated) level. Such response can be monitored by measuring the anti-tumor antibodies in a patient or by vaccine-dependent generation of cytolytic effector cells capable of killing the patient's tumor cells in vitro. Such vaccines should also be capable of causing an immune response that leads to an improved clinical outcome (e.g., more frequent remissions, complete or partial or longer disease-free survival) in vaccinated patients as compared to non-vaccinated patients. In general, for pharmaceutical compositions and vaccines comprising one or more polypeptides, the amount of each polypeptide present in a dose ranges from about 100 μg to 5 mg per kg of host. Suitable dose sizes will vary with the size of the patient, but will typically range from about 0.1 mL to about 5 mL.

[0462] In general, an appropriate dosage and treatment regimen provides the active compound(s) in an amount sufficient to provide therapeutic and/or prophylactic benefit. Such a response can be monitored by establishing an improved clinical outcome (e.g., more frequent remissions, complete or partial, or longer disease-free survival) in treated patients as compared to non-treated patients. Increases in preexisting immune responses to a hematological malignancy-related antigen generally correlate with an improved clinical outcome. Such immune responses may generally be evaluated using standard proliferation, cytotoxicity or cytokine assays, which may be performed using samples obtained from a patient before and after treatment.

[0463] Within further aspects, methods for inhibiting the development of a malignant disease associated with hematological malignancy-related antigen expression involve the administration of autologous T cells that have been activated in response to a hematological malignancy-related antigen polypeptide or hematological malignancy-related antigen-expressing APC, as described above. Such T cells may be CD4⁺ and/or CD8⁺, and may be proliferated as described above. The T cells may be administered to the individual in an amount effective to inhibit the development of a malignant disease. Typically, about 1×10⁹ to 1×10¹¹ T cells/M² are administered intravenously, intracavitary or in the bed of a resected tumor. It will be evident to those skilled in the art that the number of cells and the frequency of administration will be dependent upon the response of the patient.

[0464] Within certain embodiments, T cells may be stimulated prior to an autologous bone marrow transplantation. Such stimulation may take place in vivo or in vitro. For in vitro stimulation, bone marrow and/or peripheral blood (or a fraction of bone marrow or peripheral blood) obtained from a patient may be contacted with a hematological malignancy-related antigen polypeptide, a polynucleotide encoding a hematological malignancy-related antigen polypeptide and/or an APC that expresses a hematological malignancy-related antigen polypeptide under conditions and for a time sufficient to permit the stimulation of T cells as described above. Bone marrow, peripheral blood stem cells and/or hematological malignancy-related antigen-specific T cells may then be administered to a patient using standard techniques.

[0465] Within related embodiments, T cells of a related or unrelated donor may be stimulated prior to a syngeneic or allogeneic (related or unrelated) bone marrow transplantation. Such stimulation may take place in vivo or in vitro. For in vitro stimulation, bone marrow and/or peripheral blood (or a fraction of bone marrow or peripheral blood) obtained from a related or unrelated donor may be contacted with a hematological malignancy-related antigen polypeptide, hematological malignancy-related antigen polynucleotide and/or APC that expresses a hematological malignancy-related antigen polypeptide under conditions and for a time sufficient to permit the stimulation of T cells as described above. Bone marrow, peripheral blood stem cells and/or hematological malignancy-related antigen-specific T cells may then be administered to a patient using standard techniques.

[0466] Within other embodiments, hematological malignancy-related antigen-specific T cells, antibodies or antigen-binding fragments thereof as described herein may be used to remove cells expressing hematological malignancy-related antigen from a biological sample, such as autologous bone marrow, peripheral blood or a fraction of bone marrow or peripheral blood (e.g., CD34⁺ enriched peripheral blood (PB) prior to administration to a patient). Such methods may be performed by contacting the biological sample with such T cells, antibodies or antibody fragments under conditions and for a time sufficient to permit the reduction of hematological malignancy-related antigen expressing cells to less than 10%, preferably less than 5% and more preferably less than 1%, of the total number of myeloid or lymphatic cells in the bone marrow or peripheral blood. Such contact may be achieved, for example, using a column to which antibodies are attached using standard techniques. Antigen-expressing cells are retained on the column. The extent to which such cells have been removed may be readily determined by standard methods such as, for example, qualitative and quantitative PCR analysis, morphology, immunohistochemistry and FACS analysis. Bone marrow or PB (or a fraction thereof) may then be administered to a patient using standard techniques.

[0467] Diagnostic Methods

[0468] In general, a hematological malignancy may be detected in a patient based on the presence of hematological malignancy-related antigen and/or polynucleotide in a biological sample (such as blood, sera, urine and/or tumor biopsies) obtained from the patient. In other words, hematological malignancy-related antigens may be used as a marker to indicate the presence or absence of such a malignancy. The binding agents provided herein generally permit detection of the level of antigen that binds to the agent in the biological sample. Polynucleotide primers and probes may be used to detect the level of mRNA encoding hematological malignancy-related antigen, which is also indicative of the presence or absence of a hematological malignancy. In general, hematological malignancy-related antigen should be present at a level that is at least three fold higher in a sample obtained from a patient afflicted with a hematological malignancy than in the sample obtained from an individual not so afflicted.

[0469] There are a variety of assay formats known to those of ordinary skill in the art for using a binding agent to detect polypeptide markers in a sample. See, e.g., Harlow and Lane, Antibodies: A Laboratory Manual, Cold Spring Harbor Laboratory, 1988. In general, the presence or absence of a hematological malignancy in a patient may be determined by (a) contacting a biological sample obtained from a patient with a binding agent; (b) detecting in the sample a level of polypeptide that binds to the binding agent; and (c) comparing the level of polypeptide with a predetermined cut-off value.

[0470] In a preferred embodiment, the assay involves the use of binding agent immobilized on a solid support to bind to and remove the polypeptide from the remainder of the sample. The bound polypeptide may then be detected using a detection reagent that contains a reporter group and specifically binds to the binding agent/polypeptide complex. Such detection reagents may comprise, for example, a binding agent that specifically binds to the polypeptide or an antibody or other agent that specifically binds to the binding agent, such as an anti-immunoglobulin, protein G, protein A or a lectin. Alternatively, a competitive assay may be utilized, in which a polypeptide is labeled with a reporter group and allowed to bind to the immobilized binding agent after incubation of the binding agent with the sample. The extent to which components of the sample inhibit the binding of the labeled polypeptide to the binding agent is indicative of the reactivity of the sample with the immobilized binding agent. Suitable polypeptides for use within such assays include full length hematological malignancy-related antigens and portions thereof to which the binding agent binds, as described above.

[0471] The solid support may be any material known to those of ordinary skill in the art to which the hematological malignancy-related antigen polypeptide may be attached. For example, the solid support may be a test well in a microtiter plate or a nitrocellulose or other suitable membrane. Alternatively, the support may be a bead or disc, such as glass, fiberglass, latex or a plastic material such as polystyrene or polyvinylchloride. The support may also be a magnetic particle or a fiber optic sensor, such as those disclosed, for example, in U.S. Pat. No. 5,359,681. The binding agent may be immobilized on the solid support using a variety of techniques known to those of skill in the art, which are amply described in the patent and scientific literature. In the context of the present invention, the term “immobilization” refers to both noncovalent association, such as adsorption, and covalent attachment (which may be a direct linkage between the agent and functional groups on the support or may be a linkage by way of a cross-linking agent). Immobilization by adsorption to a well in a microtiter plate or to a membrane is preferred. In such cases, adsorption may be achieved by contacting the binding agent, in a suitable buffer, with the solid support for a suitable amount of time. The contact time varies with temperature, but is typically between about 1 hour and about 1 day. In general, contacting a well of a plastic microtiter plate (such as polystyrene or polyvinylchloride) with an amount of binding agent ranging from about 10 ng to about 10 μg, and preferably about 100 ng to about 1 μg, is sufficient to immobilize an adequate amount of binding agent.

[0472] Covalent attachment of binding agent to a solid support may generally be achieved by first reacting the support with a bifunctional reagent that will react with both the support and a functional group, such as a hydroxyl or amino group, on the binding agent. For example, the binding agent may be covalently attached to supports having an appropriate polymer coating using benzoquinone or by condensation of an aldehyde group on the support with an amine and an active hydrogen on the binding partner (see, e.g., Pierce Immunotechnology Catalog and Handbook, 1991, at A12-A13).

[0473] In certain embodiments, the assay is a two-antibody sandwich assay. This assay may be performed by first contacting an antibody that has been immobilized on a solid support, commonly the well of a microtiter plate, with the sample, such that polypeptides within the sample are allowed to bind to the immobilized antibody. Unbound sample is then removed from the immobilized polypeptide-antibody complexes and a detection reagent (preferably a second antibody capable of binding to a different site on the polypeptide) containing a reporter group is added. The amount of detection reagent that remains bound to the solid support is then determined using a method appropriate for the specific reporter group.

[0474] More specifically, once the antibody is immobilized on the support as described above, the remaining protein binding sites on the support are typically blocked. Any suitable blocking agent known to those of ordinary skill in the art, such as bovine serum albumin or Tween 20™ (Sigma Chemical Co., St. Louis, Mo.). The immobilized antibody is then incubated with the sample, and polypeptide is allowed to bind to the antibody. The sample may be diluted with a suitable diluent, such as phosphate-buffered saline (PBS) prior to incubation. In general, an appropriate contact time (i.e., incubation time) is a period of time that is sufficient to detect the presence of polypeptide within a sample obtained from an individual with a hematological malignancy. Preferably, the contact time is sufficient to achieve a level of binding that is at least about 95% of that achieved at equilibrium between bound and unbound polypeptide. Those of ordinary skill in the art will recognize that the time necessary to achieve equilibrium may be readily determined by assaying the level of binding that occurs over a period of time. At room temperature, an incubation time of about 30 minutes is generally sufficient.

[0475] Unbound sample may then be removed by washing the solid support with an appropriate buffer, such as PBS containing 0.1% Tween 20™. The second antibody, which contains a reporter group, may then be added to the solid support. Preferred reporter groups include those groups recited above.

[0476] The detection reagent is then incubated with the immobilized antibody-polypeptide complex for an amount of time sufficient to detect the bound polypeptide. An appropriate amount of time may generally be determined by assaying the level of binding that occurs over a period of time. Unbound detection reagent is then removed and bound detection reagent is detected using the reporter group. The method employed for detecting the reporter group depends upon the nature of the reporter group. For radioactive groups, scintillation counting or autoradiographic methods are generally appropriate. Spectroscopic methods may be used to detect dyes, luminescent groups and fluorescent groups. Biotin may be detected using avidin, coupled to a different reporter group (commonly a radioactive or fluorescent group or an enzyme). Enzyme reporter groups may generally be detected by the addition of substrate (generally for a specific period of time), followed by spectroscopic or other analysis of the reaction products.

[0477] To determine the presence or absence of a hematological malignancy, the signal detected from the reporter group that remains bound to the solid support is generally compared to a signal that corresponds to a predetermined cut-off value. In one preferred embodiment, the cut-off value for the detection of a hematological malignancy is the average mean signal obtained when the immobilized antibody is incubated with samples from patients without the malignancy. In general, a sample generating a signal that is three standard deviations above the predetermined cut-off value is considered positive for the malignancy. In an alternate preferred embodiment, the cut-off value is determined using a Receiver Operator Curve, according to the method of Sackett et al., Clinical Epidemiology: A Basic Science for Clinical Medicine, Little Brown and Co., 1985, p. 106-7. Briefly, in this embodiment, the cut-off value may be determined from a plot of pairs of true positive rates (i.e., sensitivity) and false positive rates (100%-specificity) that correspond to each possible cut-off value for the diagnostic test result. The cut-off value on the plot that is the closest to the upper left-hand corner (i.e., the value that encloses the largest area) is the most accurate cut-off value, and a sample generating a signal that is higher than the cut-off value determined by this method may be considered positive. Alternatively, the cut-off value may be shifted to the left along the plot, to minimize the false positive rate, or to the right, to minimize the false negative rate. In general, a sample generating a signal that is higher than the cut-off value determined by this method is considered positive for a malignancy.

[0478] In a related embodiment, the assay is performed in a flow-through or strip test format, wherein the binding agent is immobilized on a membrane, such as nitrocellulose. In the flow-through test, polypeptides within the sample bind to the immobilized binding agent as the sample passes through the membrane. A second, labeled binding agent then binds to the binding agent-polypeptide complex as a solution containing the second binding agent flows through the membrane. The detection of bound second binding agent may then be performed as described above. In the strip test format, one end of the membrane to which binding agent is bound is immersed in a solution containing the sample. The sample migrates along the membrane through a region containing second binding agent and to the area of immobilized binding agent. Concentration of second binding agent at the area of immobilized antibody indicates the presence of a hematological malignancy. Typically, the concentration of second binding agent at that site generates a pattern, such as a line, that can be read visually. The absence of such a pattern indicates a negative result. In general, the amount of binding agent immobilized on the membrane is selected to generate a visually discernible pattern when the biological sample contains a level of polypeptide that would be sufficient to generate a positive signal in the two-antibody sandwich assay, in the format discussed above. Preferred binding agents for use in such assays are antibodies and antigen-binding fragments thereof. Preferably, the amount of antibody immobilized on the membrane ranges from about 25 ng to about 1 μg, and more preferably from about 50 ng to about 500 ng. Such tests can typically be performed with a very small amount of biological sample.

[0479] Of course, numerous other assay protocols exist that are suitable for use with the hematological malignancy-related antigen sequences or binding agents of the present invention. The above descriptions are intended to be exemplary only. For example, it will be apparent to those of ordinary skill in the art that the above protocols may be readily modified to use hematological malignancy-related antigen polypeptides to detect antibodies that bind to such polypeptides in a biological sample. The detection of hematological malignancy-related antigen-specific antibodies may correlate with the presence of a hematological.

[0480] A malignancy may also, or alternatively, be detected based on the presence of T cells that specifically react with hematological malignancy-related antigen in a biological sample. Within certain methods, a biological sample comprising CD4⁺ and/or CD8⁺ T cells isolated from a patient is incubated with a hematological malignancy-related antigen polypeptide, a polynucleotide encoding such a polypeptide and/or an APC that expresses such a polypeptide, and the presence or absence of specific activation of the T cells is detected. Suitable biological samples include, but are not limited to, isolated T cells. For example, T cells may be isolated from a patient by routine techniques (such as by Ficoll/Hypaque density gradient centrifugation of peripheral blood lymphocytes). T cells may be incubated in vitro for 2-9 days (typically 4 days) at 37° C. with Mtb-81 or Mtb-67.2 polypeptide (e.g., 5-25 μg/ml). It may be desirable to incubate another aliquot of a T cell sample in the absence of hematological malignancy-related antigen polypeptide to serve as a control. For CD4⁺ T cells, activation is preferably detected by evaluating proliferation of the T cells. For CD8⁺ T cells, activation is preferably detected by evaluating cytolytic activity. A level of proliferation that is at least two fold greater and/or a level of cytolytic activity that is at least 20% greater than in disease-free patients indicates the presence of a hematological malignancy in the patient.

[0481] As noted above, a hematological malignancy may also, or alternatively, be detected based on the level of mRNA encoding hematological malignancy-related antigen in a biological sample. For example, at least two oligonucleotide primers may be employed in a polymerase chain reaction (PCR) based assay to amplify a portion of hematological malignancy-related antigen cDNA derived from a biological sample, wherein at least one of the oligonucleotide primers is specific for (i.e., hybridizes to) a polynucleotide encoding the hematological malignancy-related antigen protein. The amplified cDNA is then separated and detected using techniques well known in the art, such as gel electrophoresis. Similarly, oligonucleotide probes that specifically hybridize to a polynucleotide encoding hematological malignancy-related antigen may be used in a hybridization assay to detect the presence of polynucleotide encoding hematological malignancy-related antigen in a biological sample.

[0482] To permit hybridization under assay conditions, oligonucleotide primers and probes should comprise an oligonucleotide sequence that has at least about 60%, preferably at least about 75% and more preferably at least about 90%, identity to a portion of a polynucleotide encoding hematological malignancy-related antigen that is at least 10 nucleotides, and preferably at least 20 nucleotides, in length. Preferably, oligonucleotide primers and/or probes hybridize to a polynucleotide encoding a polypeptide described herein under moderately stringent conditions, as defined above. Oligonucleotide primers and/or probes which may be usefully employed in the diagnostic methods described herein preferably are at least 10-40 nucleotides in length. Techniques for both PCR based assays and hybridization assays are well known in the art (see, for example, Mullis et al., Cold Spring Harbor Symp. Quant. Biol., 51:263, 1987; Erlich ed., PCR Technology, Stockton Press, NY, 1989).

[0483] One preferred assay employs RT-PCR, in which PCR is applied in conjunction with reverse transcription. Typically, RNA is extracted from a biological sample such as a biopsy tissue and is reverse transcribed to produce cDNA molecules. PCR amplification using at least one specific primer generates a cDNA molecule, which may be separated and visualized using, for example, gel electrophoresis. Amplification may be performed on biological samples taken from a test patient and from an individual who is not afflicted with a hematological malignancy. The amplification reaction may be performed on several dilutions of cDNA spanning two orders of magnitude. A two-fold or greater increase in expression in several dilutions of the test patient sample as compared to the same dilutions of the sample from a normal individual is typically considered positive.

[0484] In preferred embodiments, such assays may be performed using samples enriched for cells expressing the hematological malignancy-related antigen(s) of interest. Such enrichment may be achieved, for example, using a binding agent as provided herein to remove the cells from the remainder of the biological sample. The removed cells may then be assayed as described above for biological samples.

[0485] In further embodiments, hematological malignancy-related antigens may be used as markers for monitoring disease progression or the response to therapy of a hematological malignancy. In this embodiment, assays as described above for the diagnosis of a hematological malignancy may be performed over time, and the change in the level of reactive polypeptide(s) evaluated. For example, the assays may be performed every 24-72 hours for a period of 6 months to 1 year, and thereafter performed as needed. In general, a malignancy is progressing in those patients in whom the level of polypeptide detected by the binding agent increases over time. In contrast, the malignancy is not progressing when the level of reactive polypeptide either remains constant or decreases with time.

[0486] Certain in vivo diagnostic assays may be performed directly on a tumor. One such assay involves contacting tumor cells with a binding agent. The bound binding agent may then be detected directly or indirectly via a reporter group. Such binding agents may also be used in histological applications. Alternatively, polynucleotide probes may be used within such applications.

[0487] As noted above, to improve sensitivity, multiple markers may be assayed within a given sample. It will be apparent that binding agents specific for different proteins provided herein may be combined within a single assay. Further, multiple primers or probes may be used concurrently. The selection of markers may be based on routine experiments to determine combinations that results in optimal sensitivity.

[0488] Further diagnostic applications include the detection of extramedullary disease (e.g., cerebral infiltration of blasts in leukemias). Within such methods, a binding agent may be coupled to a tracer substance, and the diagnosis is performed in vivo using well known techniques. Coupled binding agent may be administered as described above, and extramedullary disease may be detected based on assaying the presence of tracer substance. Alternatively, a tracer substance may be associated with a T cell specific for hematological malignancy-related antigen, permitting detection of extramedullary disease based on assays to detect the location of the tracer substance.

[0489] Exemplary Definitions

[0490] In accordance with the present invention, nucleic acid sequences include, but are not limited to, DNAs (including and not limited to genomic or extragenomic DNAs), genes, peptide nucleic acids (PNAs) RNAs (including, but not limited to, rRNAs, mRNAs and tRNAs), nucleosides, and suitable nucleic acid segments either obtained from native sources, chemically synthesized, modified, or otherwise prepared in whole or in part by the hand of man.

[0491] Unless defined otherwise, all technical and scientific terms used herein have the same meaning as commonly understood by one of ordinary skill in the art to which this invention belongs. Although any methods and compositions similar or equivalent to those described herein can be used in the practice or testing of the present invention, the preferred methods and compositions are described herein. For purposes of the present invention, the following terms are defined below:

[0492] A, an: In accordance with long standing patent law convention, the words “a” and “an” when used in this application, including the claims, denotes “one or more”.

[0493] Expression: The combination of intracellular processes, including transcription and translation undergone by a polynucleotide such as a structural gene to synthesize the encoded peptide or polypeptide.

[0494] Promoter: a term used to generally describe the region or regions of a nucleic acid sequence that regulates transcription.

[0495] Regulatory Element: a term used to generally describe the region or regions of a nucleic acid sequence that regulates transcription.

[0496] Structural gene: A gene or sequence region that is expressed to produce an encoded peptide or polypeptide.

[0497] Transformation: A process of introducing an exogenous polynucleotide sequence (e.g., a vector, a recombinant DNA or RNA molecule) into a host cell or protoplast in which that exogenous nucleic acid segment is incorporated into at least a first chromosome or is capable of autonomous replication within the transformed host cell. Transfection, electroporation, and naked nucleic acid uptake all represent examples of techniques used to transform a host cell with one or more polynucleotides.

[0498] Transformed cell: A host cell whose nucleic acid complement has been altered by the introduction of one or more exogenous polynucleotides into that cell.

[0499] Transgenic cell: Any cell derived or regenerated from a transformed cell or derived from a transgenic cell, or from the progeny or offspring of any generation of such a transformed host cell.

[0500] Transgenic animal: An animal or a progeny or an offspring of any generation thereof that is derived from a transformed animal cell, wherein the animal's DNA contains an introduced exogenous nucleic acid molecule not originally present in a native, wild type, non-transgenic animal of the same species. The terms “transgenic animal” and “transformed animal” have sometimes been used in the art as synonymous terms to define an animal, the genetic contents of which has been modified to contain one or more exogenous nucleic acid segments.

[0501] Vector: A nucleic acid molecule, typically comprised of DNA, capable of replication in a host cell and/or to which another nucleic acid segment can be operatively linked so as to bring about replication of the attached segment. A plasmid, cosmid, or a virus is an exemplary vector.

[0502] The terms “substantially corresponds to”, “substantially homologous”, or “substantial identity” as used herein denotes a characteristic of a nucleic acid or an amino acid sequence, wherein a selected nucleic acid or amino acid sequence has at least about 70 or about 75 percent sequence identity as compared to a selected reference nucleic acid or amino acid sequence. More typically, the selected sequence and the reference sequence will have at least about 76, 77, 78, 79, 80, 81, 82, 83, 84 or even 85 percent sequence identity, and more preferably at least about 86, 87, 88, 89, 90, 91, 92, 93, 94, or 95 percent sequence identity. More preferably still, highly homologous sequences often share greater than at least about 96, 97, 98, or 99 percent sequence identity between the selected sequence and the reference sequence to which it was compared. The percentage of sequence identity may be calculated over the entire length of the sequences to be compared, or may be calculated by excluding small deletions or additions which total less than about 25 percent or so of the chosen reference sequence. The reference sequence may be a subset of a larger sequence, such as a portion of a gene or flanking sequence, or a repetitive portion of a chromosome. However, in the case of sequence homology of two or more polynucleotide sequences, the reference sequence will typically comprise at least about 18-25 nucleotides, more typically at least about 26 to 35 nucleotides, and even more typically at least about 40, 50, 60, 70, 80, 90, or even 100 or so nucleotides. Desirably, which highly homologous fragments are desired, the extent of percent identity between the two sequences will be at least about 80%, preferably at least about 85%, and more preferably about 90% or 95% or higher, as readily determined by one or more of the sequence comparison algorithms well-known to those of skill in the art, such as e.g., the FASTA program analysis described by Pearson and Lipman (1988).

[0503] The term “naturally occurring” as used herein as applied to an object refers to the fact that an object can be found in nature. For example, a polypeptide or polynucleotide sequence that is present in an organism (including viruses) that can be isolated from a source in nature and which has not been intentionally modified by the hand of man in a laboratory is naturally-occurring. As used herein, laboratory strains of rodents that may have been selectively bred according to classical genetics are considered naturally occurring animals.

[0504] As used herein, a “heterologous” is defined in relation to a predetermined referenced gene sequence. For example, with respect to a structural gene sequence, a heterologous promoter is defined as a promoter which does not naturally occur adjacent to the referenced structural gene, but which is positioned by laboratory manipulation. Likewise, a heterologous gene or nucleic acid segment is defined as a gene or segment that does not naturally occur adjacent to the referenced promoter and/or enhancer elements.

[0505] “Transcriptional regulatory element” refers to a polynucleotide sequence that activates transcription alone or in combination with one or more other nucleic acid sequences. A transcriptional regulatory element can, for example, comprise one or more promoters, one or more response elements, one or more negative regulatory elements, and/or one or more enhancers.

[0506] As used herein, a “transcription factor recognition site” and a “transcription factor binding site” refer to a polynucleotide sequence(s) or sequence motif(s) which are identified as being sites for the sequence-specific interaction of one or more transcription factors, frequently taking the form of direct protein-DNA binding. Typically, transcription factor binding sites can be identified by DNA footprinting, gel mobility shift assays, and the like, and/or can be predicted on the basis of known consensus sequence motifs, or by other methods known to those of skill in the art.

[0507] As used herein, the term “operably linked” refers to a linkage of two or more polynucleotides or two or more nucleic acid sequences in a functional relationship. A nucleic acid is “operably linked” when it is placed into a functional relationship with another nucleic acid sequence. For instance, a promoter or enhancer is operably linked to a coding sequence if it affects the transcription of the coding sequence. Operably linked means that the DNA sequences being linked are typically contiguous and, where necessary to join two protein coding regions, contiguous and in reading frame. However, since enhancers generally function when separated from the promoter by several kilobases and intronic sequences may be of variable lengths, some polynucleotide elements may be operably linked but not contiguous.

[0508] “Transcriptional unit” refers to a polynucleotide sequence that comprises at least a first structural gene operably linked to at least a first cis-acting promoter sequence and optionally linked operably to one or more other cis-acting nucleic acid sequences necessary for efficient transcription of the structural gene sequences, and at least a first distal regulatory element as may be required for the appropriate tissue-specific and developmental transcription of the structural gene sequence operably positioned under the control of the promoter and/or enhancer elements, as well as any additional cis sequences that are necessary for efficient transcription and translation (e.g., polyadenylation site(s), mRNA stability controlling sequence(s), etc.

[0509] As noted above, the present invention is generally directed to compositions and methods for using the compositions, for example in the therapy and diagnosis of cancer, such as hematological malignancy. Certain illustrative compositions described herein include hematological malignancy-related tumor polypeptides, polynucleotides encoding such polypeptides, binding agents such as antibodies, antigen presenting cells (APCs) and/or immune system cells (e.g., T cells). A “hematological malignancy-related tumor protein,” as the term is used herein, refers generally to a protein that is expressed in hematological malignancy-related tumor cells at a level that is at least two fold, and preferably at least five fold, greater than the level of expression in a normal tissue, as determined using a representative assay provided herein. Certain hematological malignancy-related tumor proteins are tumor proteins that react detectably (within an immunoassay, such as an ELISA or Western blot) with antisera of a patient afflicted with hematological malignancy.

[0510] Biological Functional Equivalents

[0511] Modification and changes may be made in the structure of the polynucleotides and peptides of the present invention and still obtain a functional molecule that encodes a peptide with desirable characteristics, or still obtain a genetic construct with the desirable expression specificity and/or properties. As it is often desirable to introduce one or more mutations into a specific polynucleotide sequence, various means of introducing mutations into a polynucleotide or peptide sequence known to those of skill in the art may be employed for the preparation of heterologous sequences that may be introduced into the selected cell or animal species. In certain circumstances, the resulting encoded peptide sequence is altered by this mutation, or in other cases, the sequence of the peptide is unchanged by one or more mutations in the encoding polynucleotide. In other circumstances, one or more changes are introduced into the promoter and/or enhancer regions of the polynucleotide constructs to alter the activity, or specificity of the expression elements and thus alter the expression of the heterologous therapeutic nucleic acid segment operably positioned under the control of the elements.

[0512] When it is desirable to alter the amino acid sequence of one or more of the heterologous peptides encoded by the expression construct to create an equivalent, or even an improved, second-generation molecules, the amino acid changes may be achieved by changing one or more of the codons of the encoding DNA sequence, according to Table 1.

[0513] For example, certain amino acids may be substituted for other amino acids in a protein structure without appreciable loss of interactive binding capacity with structures such as, for example, antigen-binding regions of antibodies or binding sites on substrate molecules. Since it is the interactive capacity and nature of a protein that defines that protein's biological functional activity, certain amino acid sequence substitutions can be made in a protein sequence, and, of course, its underlying DNA coding sequence, and nevertheless obtain a protein with like properties. It is thus contemplated by the inventors that various changes may be made in the peptide sequences of the disclosed compositions, or corresponding DNA sequences which encode said peptides without appreciable loss of their biological utility or activity.

TABLE 1

| Amino Acids | | | Codons | | | | | |
|---|---|---|---|---|---|---|---|---|
| Alanine | Ala | A | GCA | GCC | GCG | GCU | | |
| Cysteine | Cys | C | UGC | UGU | | | | |
| Aspartic acid | Asp | D | GAC | GAU | | | | |
| Glutamic acid | Glu | E | GAA | GAG | | | | |
| Phenylalanine | Phe | F | UUC | UUU | | | | |
| Glycine | Gly | G | GGA | GGC | GGG | GGU | | |
| Histidine | His | H | CAC | CAU | | | | |
| Isoleucine | Ile | I | AUA | AUC | AUU | | | |
| Lysine | Lys | K | AAA | AAG | | | | |
| Leucine | Leu | L | UUA | UUG | CUA | CUC | CUG | CUU |
| Methionine | Met | M | AUG | | | | | |
| Asparagine | Asn | N | AAC | AAU | | | | |
| Proline | Pro | P | CCA | CCC | CCG | CCU | | |
| Glutamine | Gln | Q | CAA | CAG | | | | |
| Arginine | Arg | R | AGA | AGG | CGA | CGC | CGG | CGU |
| Serine | Ser | S | AGC | AGU | UCA | UCC | UCG | UCU |
| Threonine | Thr | T | ACA | ACC | ACG | ACU | | |
| Valine | Val | V | GUA | GUC | GUG | GUU | | |
| Tryptophan | Trp | W | UGG | | | | | |
| Tyrosine | Tyr | Y | UAC | UAU | | | | |

[0514] In making such changes, the hydropathic index of amino acids may be considered. The importance of the hydropathic amino acid index in conferring interactive biologic function on a protein is generally understood in the art (Kyte and Doolittle, 1982, incorporate herein by reference). It is accepted that the relative hydropathic character of the amino acid contributes to the secondary structure of the resultant protein, which in turn defines the interaction of the protein with other molecules, for example, enzymes, substrates, receptors, DNA, antibodies, antigens, and the like. Each amino acid has been assigned a hydropathic index on the basis of their hydrophobicity and charge characteristics (Kyte and Doolittle, 1982), these are: isoleucine (+4.5); valine (+4.2); leucine (+3.8); phenylalanine (+2.8); cysteine/cystine (+2.5); methionine (+1.9); alanine (+1.8); glycine (−0.4); threonine (−0.7); serine (−0.8); tryptophan (−0.9); tyrosine (−1.3); proline (−1.6); histidine (−3.2); glutamate (−3.5); glutamine (−3.5); aspartate (−3.5); asparagine (−3.5); lysine (−3.9); and arginine (−4.5).

[0515] It is known in the art that certain amino acids may be substituted by other amino acids having a similar hydropathic index or score and still result in a protein with similar biological activity, i.e. still obtain a biological functionally equivalent protein. In making such changes, the substitution of amino acids whose hydropathic indices are within ±2 is preferred, those that are within ±1 are particularly preferred, and those within ±0.5 are even more particularly preferred. It is also understood in the art that the substitution of like amino acids can be made effectively on the basis of hydrophilicity. U.S. Pat. No. 4,554,101, incorporated herein by reference, states that the greatest local average hydrophilicity of a protein, as governed by the hydrophilicity of its adjacent amino acids, correlates with a biological property of the protein.

[0516] As detailed in U.S. Pat. No. 4,554,101, the following hydrophilicity values have been assigned to amino acid residues: arginine (+3.0); lysine (+3.0); aspartate (+3.0±1); glutamate (+3.0±1); serine (+0.3); asparagine (+0.2); glutamine (+0.2); glycine (0); threonine (−0.4); proline (−0.5±1); alanine (−0.5); histidine (−0.5); cysteine (−1.0); methionine (−1.3); valine (−1.5); leucine (−1.8); isoleucine (−1.8); tyrosine (−2.3); phenylalanine (−2.5); tryptophan (−3.4). It is understood that an amino acid can be substituted for another having a similar hydrophilicity value and still obtain a biologically equivalent, and in particular, an immunologically equivalent protein. In such changes, the substitution of amino acids whose hydrophilicity values are within ±2 is preferred, those that are within ±1 are particularly preferred, and those within ±0.5 are even more particularly preferred.

[0517] As outlined above, amino acid substitutions are generally therefore based on the relative similarity of the amino acid side-chain substituents, for example, their hydrophobicity, hydrophilicity, charge, size, and the like. Exemplary substitutions which take several of the foregoing characteristics into consideration are well known to those of skill in the art and include: arginine and lysine; glutamate and aspartate; serine and threonine; glutamine and asparagine; and valine, leucine and isoleucine.

### EXAMPLES

[0518] The following examples are included to demonstrate preferred embodiments of the invention. However, those of skill in the art should, in light of the present disclosure, appreciate that many changes can be made in the specific embodiments which are disclosed and still obtain a like or similar result without departing from the spirit and scope of the invention described in the appended claims.

### Example 1

### Identification of Hematological Malignancy-Related Antigen Polynucleotides

[0519] This Example illustrates the identification of hematological malignancy-related antigen polynucleotides from non-Hodgkin's lymphomas.

[0520] Hematological malignancy-related antigen polynucleotides were isolated by PCR-based subtraction. PolyA mRNA was prepared from T cell non-Hodgkin's lymphomas, B cell non-Hodgkin's lymphomas and normal tissues. Six cDNA libraries were constructed, PCR-subtracted and analyzed. Two libraries were constructed using pools of three T cell non-Hodgkin's lymphoma mRNAs (referred to herein as TCS libraries). Two others were constructed using pools of three B cell non-Hodgkin's lymphoma mRNAs (referred to herein as BCNHL libraries). Two other libraries were constructed using a pool of 2 Hodgkin's lymphoma mRNAs (referred to herein as HLS libraries. cDNA synthesis, hybridization and PCR amplification were performed according to Clontech's user manual (PCR-Select cDNA Subtraction), with the following changes: 1) cDNA was restricted with a mixture of enzymes, including MscI, PvuII, StuI and DraI, instead of the single enzyme RsaI; and 2) the ratio of driver to tester cDNA was increased in the hybridization steps (to 76:1) to give a more stringent subtraction.

[0521] The two TCS libraries were independently subtracted with different pools of driver cDNAs. Driver #1 contained cDNA prepared from specific normal tissues (lymph node, bone marrow, T cells, heart and brain), and this subtraction generated the library TCS-D1 (T cell non-Hodgkin's lymphoma subtracted library with driver #1). Driver #2 contained non-specific normal tissues (colon, large intestine, lung, pancreas, spinal cord, skeletal muscle, liver, kidney, skin and brain), and this subtraction generated the library TCS-D2 (T cell non-Hodgkin's lymphoma subtraction library with driver #2).

[0522] Similarly, the two BCNHL libraries were independently subtracted with different pools of driver cDNAs. Driver #1 contained cDNA prepared from specific normal tissues (lymph node, bone marrow, B cells, heart and brain), and this subtraction generated the library BCNHL/D1 (B cell non-Hodgkin's lymphoma subtracted library with driver #1). Driver #2 contained non-specific normal tissues (brain, lung, pancreas, spinal cord, skeletal muscle, colon, spleen, large intestine and PBMC), and this subtraction generated the library BCNHL/D2 (B cell non-Hodgkin's lymphoma subtraction library with driver #2).

[0523] The two HLS libraries were independently subtracted with different pools of driver cDNAs. Driver #1 contained cDNA prepared from specific normal tissues (lymph node, bone marrow, B cells and lung) and this subtraction generated HLS-D1 (Hodgkin's lymphoma subtraction library with driver #1). Driver #2 contained non-specific normal tissues (colon, large intestine, lung, pancreas, spinal cord, skeletal muscle, liver, kidney, skin and brain) and this generated the library HLS-D2 (Hodgkin's lymphoma subtraction library with driver #2).

[0524] To analyze the efficiency of the subtraction, actin (a housekeeping gene) was PCR amplified from dilutions of subtracted as well as unsubtracted PCR samples. Furthermore, the complexity and redundancy of each library was characterized by sequencing 96 clones from each of the PCR subtraction libraries (TCS-D1, TCS-D2, BCNHL/D1, BCNHL/D2, HLS-D1 and HLS-D2). These analyses indicated that the libraries are enriched for genes overexpressed in leukemia tissues and specifically T cell and B cell non-Hodgkin's lymphoma and M. Hodgkin's lymphoma samples.

[0525] Following PCR amplification, the cDNAs were cloned into the pCR2.1-TOPO plasmid vector (Invitrogen).

[0526] Sequences obtained from these analyses were searched against known sequences in the publicly available databases using the BLAST 2.0 release. The default BLAST parameters used were as follows: GAP PARAMETERS: Open Gap=0, Extended Gap=0; OUTPUT PARAMETERS: Expect=10.0, Threshold=0, Number of Alignments=250; For BLASTN, the search parameters were as follows: Mismatch=−3, Reward=1, Word size=0. The alignments were presented pair-wise, with a window percent identity=22. All available protein and nucleotide databases were searched, including, PIR, SwissPROT, GenBank, Mouse EST, Human EST, Other EST, Human repeat and high throughput sequences, and published patents and patent application database.

[0527] From these, a number of unique sequences were identified that represented novel polynucleotide sequences that had not previously been described in the GenBank and other sequence databases. A number of other sequences were identified that appeared to contain significant homology with one or more sequences previously identified in the databases, although they were described only as genomic or cDNA clones, and had no known function. The remaining sequences corresponded to known genes. The clones obtained from this analysis are summarized in Tables 2-5.

TABLE 2
T CELL NON-HODGKIN'S LYMPHOMA SUBTRACTED PCR ™
LIBRARY - SPECIFIC TISSUE DRIVER

| Clone No. | Comments |
|---|---|
| TCD1_F1 | Previously Unknown |
| TCD1_C2 | Previously Unknown |
| TCD1_D6 | Previously Unknown |
| TCD1_F8 | Previously Unknown |
| TCD1_G8 | Previously Unknown |
| TCD1_H12 | Previously Unknown |
| TCD1_B12 | Previously Unknown |
| TCD1_F12 | Previously Unknown |
| TCD1_H5 | Previously Unknown |
| TCD1_A6 | Previously Unknown |
| TCD1_B1 | Previously Unknown |
| TCD1_E1 | Previously Unknown |
| TCD1_D2 | Previously Unknown |
| TCD1_H2 | Previously Unknown |
| TCD1_C4 | Previously Unknown |
| TCD1_F5 | Previously Unknown |
| TCD1_C6 | Previously Unknown |
| TCD1_A7 | Previously Unknown |
| TCD1_B7 | Previously Unknown |
| TCD1_F7 | Previously Unknown |
| TCD1_A8 | Previously Unknown |
| TCD1_D8 | Previously Unknown |
| TCD1_E8 | Previously Unknown |
| TCD1_H9 | Previously Unknown |
| TCD1_C10 | Previously Unknown |
| TCD1_G11 | Previously Unknown |
| TCD1_A12 | Previously Unknown |
| TCD1_D12 | Previously Unknown |
| TCD1_G6 | H. sapiens mRNA; cDNA DKFZp566A201 |
| TCD1_C11 | H. sapiens mRNA; cDNA DKFZp566A201 |
| TCD1_F2 | H. sapiens chromosome 11 from 11p15.5 region |
| TCD1_G12 | H. sapiens chromosome 11 from 11p15.5 region |
| TCD1_D4 | H. sapiens mRNA for T cell leukemia/lymphoma 1 |
| TCD1_B6 | H. sapiens mRNA for T cell leukemia/lymphoma 1 |
| TCD1_A2 | Human chromosome 14 DNA sequence |
| TCD1_B2 | H. sapiens clone 25226 mLRNA sequence |
| TCD1_E3 | Human DNA sequence from clone 686C3 on chr. 20 |
| TCD1_C5 | H. sapiens upregulated by 1,25-dihydroxyvitamin D-3 |
| | (VDUP1) |
| TCD1_D5 | H. sapiens DNA sequence from PAC 63G5 on chr. |
| | 22q12.3-13.1 |
| TCD1_H6 | H. sapiens chr. 17, clone hRPK.318_A_15 |
| TCD1_G7 | Genomic sequence from human 9q34 |
| TCD1_D9 | Human mRNA for KIAA0386 gene |
| TCD1_E9 | H. sapiens DNA sequence from PAC 434O14 on chr. |
| | 1q32.3.-41 |
| TCD1_E11 | H. sapiens chr. 22q12 BAC clone bk256d12 in MDR region |
| TCD1_E12 | H. sapiens mRNA for KIAA1055 protein |
| TCD1_G3 | H. sapiens tumor necrosis factor receptor superfamily |
| | member 8 (TNFRSF8) |
| TCD1_B8 | H. sapiens tumor necrosis factor receptor superfamily |
| | member 8 (TNFRSF8) |
| TCD1_A1 | H. sapiens mRNA for GS3955 (putative serine/threonine |
| | kinase) |
| TCD1_C1 | H. sapiens mRNA for IRC1 protein |
| TCD1_D1 | H. sapiens nucleolar phosphoprotein p130 |
| TCD1_G1 | H. sapiens splicing factor (45kD) (SPF45) |
| TCD1_E2 | H. sapiens cAMP phosphodiesterase PDE7 (PDE7A1) |
| TCD1_A3 | H. sapiens CDC13 (cell division cycle 16, S. cerevisiae, |
| | homolog) |
| TCD1_B3 | H. sapiens cyclin Cd |
| TCD1_A4 | H. sapiens retinoblastoma-like 2 (P130) (RBL2) |
| TCD1_B5 | Human lymphocyte associated receptor of death 8 mRNA, |
| | altern. splice |
| TCD1_G5 | H. sapiens clathrin, heavy polypeptide-like 2 (CLTCL2) |
| TCD1_F6 | Human tumor necrosis factor type 1 receptor assoc. protein |
| | (TRAP1) |
| TCD1_C7 | H. sapiens phospholipase C, beta 2 (PLCB2) |
| TCD1_D7 | H. sapiens NADH: ubiquinone dehydrogenase 51 kDa |
| | subunit (NDUFV1) |
| TCD1_E7 | H. sapiens T-cell gamma receptor locus |
| TCD1_H8 | Rbr-2 = retinoblastoma susceptibility gene |
| TCD1_B9 | H. sapiens mRNA for eukaryotic initiation factor 4All |
| TCD1_C9 | H. sapiens asparaginyl-tRNA synthetase (NARS) |
| TCD1_F10 | H. sapiens coatomer protein complex, subunit alpha |
| | (COPA) mRNA |
| TCD1_G10 | H. sapiens enterocyte differentiation associated factor |
| | EDAF-1 mRNA |
| TCD1_A11 | H. sapiens ATP synthase, subunit b-like (ATP-BL) |
| TCD1_D11 | H. sapiens butyrophilin, subfamily 3, member A3 |
| | (BTN3A3) mRNA |
| TCD1_H11 | H. sapiens T cell receptor alpha delta locus |
| TCD1_H7 | H. sapiens ribosomal protein L31, exons |

[0528] TABLE 3
T CELL NON-HODGKIN'S LYMPHOMA SUBTRACTED
PCR ™ LIBRARY - NONSPECIFIC TISSUE DRIVER

| Clone No. | Comments |
|---|---|
| TCD2_D7 | Previously Unknown |
| TCD2_E7 | Previously Unknown |
| TCD2_H8 | Previously Unknown |
| TCD2_E5 | Previously Unknown |
| TCD2_B11 | Previously Unknown |
| TCD2_D1 | Previously Unknown |
| TCD2_B3 | Previously Unknown |
| TCD2_D3 | Previously Unknown |
| TCD2_D4 | Previously Unknown |
| TCD2_C5 | Previously Unknown |
| TCD2_G5 | Previously Unknown |
| TCD2_H5 | Previously Unknown |
| TCD2_A6 | Previously Unknown |
| TCD2_G6 | Previously Unknown |
| TCD2_B7 | Previously Unknown |
| TCD2_F8 | Previously Unknown |
| TCD2_G8 | Previously Unknown |
| TCD2_E9 | Previously Unknown |
| TCD2_D10 | Previously Unknown |
| TCD2_H10 | Previously Unknown |
| TCD2_D2 | H. sapiens mRNA for KIAA0855 protein |
| TCD2_D9 | H. sapiens mRNA for KIAA0855 protein |
| TCD2_H1 | H. sapiens mRNA for KIAA0810 protein |
| TCD2_A2 | Human DNA sequence from clone bG279B7 on chr. |
| | 1q25.1-31.1 |
| TCD2_B2 | H. sapiens mRNA for KIAA1049 protein |
| TCD2_H3 | H. sapiens mRNA for KIAA0955 protein |
| TCD2_A4 | H. sapiens chr. 17, clone hRPC.1171_I_10 |
| TCD2_B4 | H. sapiens mRNA for KIAA1068 protein |
| TCD2_B6 | H. sapiens chr. 4 clone B266E3 map 4q25 |
| TCD2_E8 | H. sapiens chr. 11 from 11p15.5 region |
| TCD2_F9 | H. sapiens mRNA for KIAA0926 protein |
| TCD2_E10 | Human DNA seq from clone 328E19 on chr. 1q12-21.2 |
| TCD2_D11 | H. sapiens clone DJ0876A24 |
| TCD2_E1 | Human mRNA for T cell receptor alpha chain (TCR-alpha) |
| TCD2_G3 | Human T-cell receptor active alpha-chain mRNA |
| TCD2_F7 | H. sapiens mRNA for T-cell antigen receptor alpha-chain |
| TCD2_A8 | H. sapiens mRNA for T-cell antigen receptor alpha-chain |
| TCD2_F10 | Human T-cell receptor rearranged alpha-chain V-region |
| TCD2_G10 | Human T-cell receptor active alpha-chain mRNA |
| TCD2_C11 | Human mRNA for T-cell receptor alpha chain |
| TCD2_E11 | Human mRNA for T-cell receptor alpha chain (TCR-alpha) |
| TCD2_G1 | Human T-cell receptor beta |
| TCD2_F4 | Human T-cell receptor beta |
| TCD2_B8 | H. sapiens (clone HVB 15) germline T-cell receptor beta |
| | chain variable seq. |
| TCD2_F3 | H. sapiens interleukin 16 |
| TCD2_C9 | H. sapiens interleukin 16 |
| TCD2_A11 | H. sapiens small inducible cytokine subfamily A (Cys-Cys), |
| | member 21 (SCYA21) |
| TCD2_E12 | H. sapiens small inducible cytokine subfamily A (Cys-Cys), |
| | member 21 (SCYA21) |
| TCD2_E4 | Human mRNA for CD8 beta-chain glycoprotein beta chain |
| TCD2_C8 | Human mRNA for CD8 T lymphocyte surface glycoprotein |
| | beta chain |
| TCD2_F1 | H. sapiens T cell receptor alpha delta locus |
| TCD2_C2 | H. sapiens WD repeat domain 1 (WDR1) mRNA |
| TCD2_E2 | H. sapiens gene for TMEM1 and PWP2 |
| TCD2_F2 | H. sapiens chemokine receptor-4 (CXCR4) mRNA |
| TCD2_G2 | H. sapiens glycogenin-2 like mRNA sequence |
| TCD2_H2 | H. sapiens core-binding factor, runt domain, alpha subunit |
| | 3 (CBFA3) mRNA |
| TCD2_C4 | H. sapiens EWS gene, intron 8 |
| TCD2_G4 | Human GT334 protein (GT334) gene mRNA |
| TCD2_H4 | H. sapiens mRNA for squamous cell carcinoma antigen |
| | SART-3 |
| TCD2_A5 | H. sapiens mRNA for leucocyte adhesion receptor, |
| | L-selectin |
| TCD2_D5 | H. sapiens nuclear factor related to kappa B binding |
| | protein (NFRKB) mRNA |
| TCD2_F5 | H. sapiens T-cell receptor alpha delta locus |
| TCD2_E6 | Human DNA for T-cell receptor constant region |
| | alpha-chain exon4 |
| TCD2_F6 | H. sapiens CD48 antigen |
| TCD2_G7 | H. sapiens CXCR4 gene |
| TCD2_A9 | Human APRT gene for adenine phosphoribosyltransferase |
| TCD2_B9 | Human nuclear pore complex-associated protein TPR (tpr) |
| | mRNA |
| TCD2_H9 | H. sapiens mRNA for YSK1 |
| TCD2_B10 | H. sapiens inositol polyphosphate-5-phosphatase, 145 kD |
| TCD2_C10 | H. sapiens FUS/TLS protein gene, altern. spliced products |
| TCD2_F11 | H. sapiens RH gene, promoter region |
| TCD2_G11 | H. sapiens IL2-inducible T-cell kinase (ITK) mRNA |
| TCD2_H11 | H. sapiens transcription factor 7 (T-cell specific, |
| | HMG-box) (TCF7) |
| TCD2_A12 | Human O-linked GlcNAc transferase mRNA |
| TCD2_B12 | Human tyrosine kinase TXK (txk) gene |
| TCD2_D12 | Human T-cell antigen receptor gene T3 delta |
| TCD2_G12 | H. sapiens proteasome subunit, alpha type, 3 (PSMA3) |
| | mRNA |
| TCD2_H12 | H. sapiens integrin, alpha L (antigen CD11A (p180), |
| | lymphocyte function-assoc.) |
| TCD2_C12 | H. sapiens ribosomal protein S20 (RPS20) mRNA |
| TCD2_H7 | Unknown (sequence withdrawn by NCBI) |
| TCD2_C3 | Human repeat |

[0529] TABLE 4
B CELL NON-HODGKIN'S LYMPHOMA SUBTRACTED
PCR ™ LIBRARY - DRIVER #1

| Clone No. | Comments |
|---|---|
| BCNHL/D1_B11 | Previously Unknown |
| BCNHL/D1_F7 | Previously Unknown |
| BCNHL/D1_H4 | Previously Unknown |
| BCNHL/D1_H10 | Previously Unknown |
| BCNHL/D1_H12 | Previously Unknown |
| BCNHL/D1_A3 | Previously Unknown |
| BCNHL/D1_A9 | Previously Unknown |
| BCNHL/D1_A12 | Previously Unknown |
| BCNHL/D1_B1 | Previously Unknown |
| BCNHL/D1_B5 | Previously Unknown |
| BCNHL/D1_B12 | Previously Unknown |
| BCNHL/D1_C1 | Previously Unknown |
| BCNHL/D1_C7 | Previously Unknown |
| BCNHL/D1_D7 | Previously Unknown |
| BCNHL/D1_D8 | Previously Unknown |
| BCNHL/D1_D11 | Previously Unknown |
| BCNHL/D1_E4 | Previously Unknown |
| BCNHL/D1_E7 | Previously Unknown |
| BCNHL/D1_E11 | Previously Unknown |
| BCNHL/D1_G4 | Previously Unknown |
| BCNHL/D1_G5 | Previously Unknown |
| BCNHL/D1_G8 | Previously Unknown |
| BCNHL/D1_H5 | Previously Unknown |
| BCNHL/D1_A4 | cDNA clone DKFZp564C1563, from fetal brain |
| BCNHL/D1_A6 | cDNA clone DKFZp586E1120, from uterus |
| BCNHL/D1_A8 | cDNA clone KIAA0663, from adult brain |
| BCNHL/D1_B9 | Chromosome 19, cosmid R29882 |
| BCNHL/D1_B10 | cDNA clone KIAA1082, from brain |
| BCNHL/D1_D3 | cDNA clone KIAA0084, from myeloblast cell line |
| | KG-1 |
| BCNHL/D1_D4 | cDNA clone 23851, from infant brain |
| BCNHL/D1_D12 | cDNA clone DKFZp434B103, from adult testis |
| BCNHL/D1_E3 | cDNA clone KIAA0008, from myeloblast cell line |
| | KG-1 |
| BCNHL/D1_E12 | cDNA clone DKFZp586J0917, from uterus |
| BCNHL/D1_F6 | Chromosome 1, clone 97P20, Previously Unknown |
| | CDS |
| BCNHL/D1_G3 | cDNA clone KIAA0981, from adult brain |
| BCNHL/D1_H2 | cDNA clone DKFZp434L1435, from adult testis |
| BCNHL/D1_H6 | cDNA clone DKFZp564B0262, from fetal brain |
| BCNHL/D1_H11 | cDNA clone KIAA0372, from brain |
| BCNHL/D1_A7 | CD20 (B1) B lymphocyte cell surface antigen |
| BCNHL/D1_G6 | CD20 (B1) B lymphocyte cell surface antigen |
| BCNHL/D1_H9 | CD20 (B1) B lymphocyte cell surface antigen |
| BCNHL/D1_D6 | Ig lambda light chain |
| BCNHL/D1_E5 | Ig lambda light chain |
| BCNHL/D1_D1 | Lymphoid-restricted membrane protein (LRMP) |
| BCNHL/D1_G12 | Lymphoid-restricted membrane protein (LRMP) |
| BCNHL/D1_A1 | Nucleoporin |
| BCNHL/D1_A5 | Kinesin-related protein |
| BCNHL/D1_B6 | Methyl-CpG binding protein 1 (MBD4) |
| BCNHL/D1_B7 | Heterogeneous nuclear ribonucleoprotein H1 (H) |
| BCNHL/D1_B8 | Ubiquitin-specific protease homolog (UPH) |
| BCNHL/D1_C2 | GTPase activating protein (GAP), 100% 86/423 bp |
| BCNHL/D1_C3 | TCP1 ring complex, polypeptide 5 (TRIC5), |
| | cytoplasmic chaperonin |
| BCNHL/D1_C5 | Nuclear distribution protein C homolog (NUDC) |
| BCNHL/D1_C6 | BAX (apoptosis regulator) |
| BCNHL/D1_C12 | Centromeric autoantigen (27 kD) (P27) |
| BCNHL/D1_D10 | Ig kappa light chain |
| BCNHL/D1_F1 | Serine/Threonine-protein kinase PRP4 homolog |
| BCNHL/D1_F4 | Myocyte-specific enhancer factor 2 (XMEF2) |
| BCNHL/D1_F9 | mRNA for 130 kD protein (p130), Rb family member |
| BCNHL/D1_F10 | CD53 cell surface glycoprotein |
| BCNHL/D1_F11 | Synovial sarcoma, translocated to X chromosome |
| | (SYT..SSXT) |
| BCNHL/D1_F12 | Cyclin B |
| BCNHL/D1_G7 | Regulator of G protein signaling (RGS13) |
| BCNHL/D1_G9 | DEAD/H box polypeptide 16 (DDX16), mRNA |
| | helicase |
| BCNHL/D1_G10 | Pre-mRNA splicing factor (PRP16), a putative helicase |
| BCNHL/D1_G11 | hn ribonucleoprotein D-like gene (JKTBP1/2) |
| BCNHL/D1_H1 | SH2 containing inositol-5-phosphatase (SHIP) |
| BCNHL/D1_H3 | Dystrophin-related protein, utrophin (UTRN) |
| BCNHL/D1_H7 | Inter-alpha-trypsin inhibitor H4 (ITIH4) |
| BCNHL/D1_H8 | Ig heavy chain |

[0530] TABLE 5
B CELL NON-HODGKIN'S LYMPHOMA SUBTRACTED
PCR ™ LIBRARY—DRIVER #2

| Clone No. | Comments |
|---|---|
| BCNHL/D2_A4 | Previously Unknown |
| BCNHL/D2_C12 | Previously Unknown |
| BCNHL/D2_D11 | Previously Unknown |
| BCNHL/D2_E6 | Previously Unknown |
| BCNHL/D2_E9 | Previously Unknown |
| BCNHL/D2_E12 | Previously Unknown |
| BCNHL/D2_F4 | Previously Unknown |
| BCNHL/D2_G11 | Previously Unknown |
| BCNHL/D2_H4 | Previously Unknown |
| BCNHL/D2_H11 | Previously Unknown |
| BCNHL/D2_A2 | Previously Unknown |
| BCNHL/D2_A7 | Previously Unknown |
| BCNHL/D2_B2 | Previously Unknown |
| BCNHL/D2_C5 | Previously Unknown |
| BCNHL/D2_C6 | Previously Unknown |
| BCNHL/D2_C11 | Previously Unknown |
| BCNHL/D2_D1 | Previously Unknown |
| BCNHL/D2_D3 | Previously Unknown |
| BCNHL/D2_D12 | Previously Unknown |
| BCNHL/D2_E4 | Previously Unknown |
| BCNHL/D2_E11 | Previously Unknown |
| BCNHL/D2_F3 | Previously Unknown |
| BCNHL/D2_F5 | Previously Unknown |
| BCNHL/D2_F10 | Previously Unknown |
| BCNHL/D2_G7 | Previously Unknown |
| BCNHL/D2_H12 | Previously Unknown |
| BCNHL/D2_B8 | cDNA clone DKFZp586E0518 from uterus |
| | (telomerase, hTLP2) |
| BCNHL/D2_C8 | cDNA clone DKFZp586E0518 from uterus |
| | (telomerase, hTLP2) |
| BCNHL/D2_A5 | cDNA clone KIAA0101 from myeloblast cell line |
| | KG-1 |
| BCNHL/D2_B6 | Chromosome 22 (also chromosome 21 and 4) |
| BCNHL/D2_C2 | cDNA clone DKFZp566L034, from fetal kidney |
| BCNHL/D2_C3 | Chromosome 16, clone RPCI-11 |
| BCNHL/D2_C10 | cDNA clone KJAA0121 from myeloblast cell line |
| | KG-1 |
| BCNHL/D2_F11 | cDNA clone KIAA0185 (KG-1); apoptosis-linked |
| | gene 4 (Alg-4) |
| BCNHL/D2_G8 | cDNA clone DKFZp434C171, from adult testis |
| BCNHL/D2_G9 | cDNA clone KIAA0209, from myeloblast cell line |
| | KG-1 |
| BCNHL/D2_H8 | cDNA clone KIAA0855, from adult brain |
| BCNHL/D2_H10 | Chromosome 19, cosmid R28051 |
| BCNHL/D2_B1 | Ig lambda light chain |
| BCNHL/D2_C1 | Ig lambda light chain |
| BCNHL/D2_C4 | Ig lambda light chain |
| BCNHL/D2_D8 | Ig lambda light chain |
| BCNHL/D2_E7 | Ig lambda light chain |
| BCNHL/D2_E8 | Ig lambda light chain |
| BCNHL/D2_F8 | Ig lambda light chain |
| BCNHL/D2_G4 | Ig lambda light chain |
| BCNHL/D2_H3 | Ig lambda light chain |
| BCNHL/D2_A8 | Ig kappa light chain (82% identity) |
| BCNHL/D2_H7 | Ig kappa light chain |
| BCNHL/D2_A10 | CD20 (B1) B lymphocyte cell-surface antigen |
| BCNHL/D2_E5 | CD20 (B1) B lymphocyte cell-surface antigen |
| BCNHL/D2_A6 | CD37 antigen (CD37) |
| BCNHL/D2_A12 | 5′-end (221/408) is 100% part of histone deacetylase |
| | (HD1) CDS |
| BCNHL/D2_B5 | p56Ick (Ick), protein tyrosine kinase (membrane) |
| BCNHL/D2_B7 | Lymphoid-restricted membrane protein |
| BCNHL/D2_B9 | Interferon consensus sequence binding protein 1 |
| | (ICSBP1) |
| BCNHL/D2_C7 | Dp-1 transcription factor (TFDP1) |
| BCNHL/D2_D10 | Transcription termination factor, RNA polymerase II |
| | (TTF2) |
| BCNHL/D2_E2 | BCL2-related protein A1 (BCL2A1) |
| BCNHL/D2_E10 | RNA helicase p68 (HUMP68) |
| BCNHL/D2_F7 | Phosphate carrier, mitochondrial (PHC), nt#1-138; |
| | SWAP-70 (Ig switching), nt#135-311 |
| BCNHL/D2_F9 | TNF-induced protein (GG2-1); dendritic cell |
| | differentiation factor |
| BCNHL/D2_G3 | Hepatocyte nuclear factor-3/forke head homolog |
| | 11B (HFH-11B) |
| BCNHL/D2_G5 | MHC class II HLA-DQA1 |
| BCNHL/D2_G6 | 90 kD heat shock protein |
| BCNHL/D2_G12 | 5′-end (120/347) is 100% part of Gamma 2-adaptin |
| | (G2AD) CDS |
| BCNHL/H5_H5 | Ras homolog gene family, member H (ARHH) |

[0531] TABLE 6
HODGKIN'S LYMPHOMA SUBTRACTED PCR ™ LIBRARY

| Clone No. | Comments |
|---|---|
| HLS_E3 | Previously Unknown |
| HLS_C4 | Previously Unknown |
| HLS_G8 | Previously Unknown |
| HLS_D11 | Previously Unknown |
| HLS_C1 | Previously Unknown |
| HLS_E1 | Previously Unknown |
| HLS_B2 | Previously Unknown |
| HLS_A3 | Previously Unknown |
| HLS_G3 | Previously Unknown |
| HLS_H4 | Previously Unknown |
| HLS_H5 | Previously Unknown |
| HLS_D6 | Previously Unknown |
| HLS_H7 | Previously Unknown |
| HLS_B8 | Previously Unknown |
| HLS_C8 | Previously Unknown |
| HLS_D8 | Previously Unknown |
| HLS_F9 | Previously Unknown |
| HLS_F11 | Previously Unknown |
| HLS_E5 | Previously Unknown |
| HLS_B7 | Previously Unknown |
| HLS_H9 | Previously Unknown |
| HLS_H10 | Previously Unknown |
| HLS_H1 | Human mRNA for KIAA0143 gene |
| HLS_E2 | H. sapiens DNA seq from PAC 163M9 on chr 1p35.1-p36.21. |
| HLS_H3 | Human DNA seq ft clone CTA-407F11 on chr. 22q12 |
| HLS_G5 | Human HMG-17 gene for non-histone chr. protein HMG-17 |
| HLS_B6 | Human Chr. 11q12.2 PAC clone pDJ606g6 |
| HLS_H6 | H. sapiens mRNA; cDNA DKFZp564A132 |
| HLS_D7 | Human DNA sequence from clone RP1-506 on chr 22q12 |
| HLS_E7 | H. sapiens chr. 17, clone hRPC.1028_K_7 |
| HLS_F8 | H. sapiens 12p13.3-2.7-4.6 BAC RP11-372B4 |
| HLS_H8 | Human Chr. 16 BAC clone CIT987SK-A-355G7 |
| HLS_A9 | H. sapiens PAC clone DJ0320J15 from Xq23 |
| HLS_B9 | Human interferon-inducible mRNA (cDNA 6-26) |
| HLS_C12 | Human DNA seq ft clone RP1-90L6 on chr. 22q11.21-11.23 |
| HLS_D12 | Human Chr. 16 BAC clone CIT987SK-A-735G6 |
| HLS_E12 | H. sapiens hypothetical protein SBBI42 mRNA |
| HLS_F12 | H. sapiens DNA sequence from PAC 747L4 on chr. 1 q23-24 |
| HLS_G12 | H. sapiens mRNA; cDNA DKFZp586H0519 |
| HLS_H12 | H. sapiens clone 25114 mRNA sequence |
| HLS_G1 | H. sapiens mRNA for KIAA0776 protein |
| HLS_A7 | H. sapiens mRNA for KIAA0776 protein |
| HLS_A1 | H. sapiens protective protein for beta-galactosidase |
| HLS_B1 | Human proliferating cell nuclear antigen (PCNA) gene |
| HLS_A2 | Human mRNA for myoblast cell surface antigen 24.1D5 |
| HLS_F2 | Human mRNA for interferon regulatory factor-2 (IRF-2) |
| HLS_C3 | H. sapiens ADP/ATP carrier protein (ANT-2) gene |
| HLS_F3 | Human GDP-dissociation inhibitor protein (Ly-GDI) mRNA |
| HLS_A4 | H. sapiens microfibrillar-associated protein 1 (MFAP1) |
| | mRNA |
| HLS_B4 | H. sapiens caspase 3, apoptosis-related cysteine protease |
| | (CASP3) |
| HLS_D4 | Human thymosin beta-4 mRNA, complete cds |
| HLS_E4 | Human lymphocyte specific INF regul. factor/INF reg. |
| | factor 4 (LSIRF/IRF4) |
| HLS_F4 | H. sapiens integrin, beta 1 (fibronectin receptor, antigen |
| | CD29) (ITGB1) |
| HLS_G4 | H. sapiens proteasome (prosome, macropain) subunit, alpha |
| | type, 3 (PSMA3) |
| HLS_A5 | H. sapiens mRNA for Prer protein |
| HLS_B5 | H. sapiens purinergic receptor P2X, ligand-gated ion |
| | channel, 5 (P2RX5) |
| HLS_D5 | H. sapiens IRLB gene (3′-region) |
| HLS_A6 | H. sapiens initiation factor 4B cDNA |
| HLS_C6 | Human poly(A)-binding protein (PABP) gene, exon 15 |
| HLS_G6 | Rat proto-oncogene (Ets-1) mRNA, complete cds |
| HLS_G7 | Human 78 kdalton glucose-regulated protein (GRP78) gene |
| HLS_A8 | Human t-complex polypeptide 1 gene |
| HLS_E8 | Human TRAF-interacting protein 1-TRAF mRNA |
| HLS_C9 | H. sapiens collagen, type III, alpha 1 (Ehlers-Danlos |
| | syndrome type IV) |
| HLS_D9 | H. sapiens E46 protein mRNA, complete cds |
| HLS_E9 | H. sapiens chromodomain helicase DNA binding protein 4 |
| | (CHD4) |
| HLS_G9 | H. sapiens DNA for monoamine oxidase type A (14) (partial) |
| HLS_A10 | H. sapiens ATP binding protein assoc. with cell |
| | differentiation (APACD) |
| HLS_D10 | Human non-histone dir. protein HMG-14 gene, complete cds |
| HLS_F10 | Human protein phosphatase-1 gamma 1 mRNA |
| HLS_C11 | Human hnRNP B1 protein mRNA |
| HLS_E11 | H. sapiens epithelial protein lost in neoplasm alpha (EPLIN) |
| HLS_G11 | Human ferritin heavy chain mRNA |
| HLS_H11 | H. sapiens foocen-s mRNA |
| HLS_B12 | Human myocyte-specific enhancer factor 2A (MEF2A) gene |
| HLS_D1 | H. sapiens osf-2 mRNA for osteoblast specific factor 2 |
| | (OSF-2p1) |
| HLS_H2 | H. sapiens osf-2 mRNA for osteoblast specific factor 2 |
| | (OSF-2p1) |
| HLS_D3 | H. sapiens osf-2 mRNA for osteoblast specific factor 2 |
| | (OSF-2p1) |
| HLS_B10 | H. sapiens osf-2 mRNA for osteoblast specific factor 2 |
| | (OSF-2p1) |
| HLS_C10 | H. sapiens osf-2 mRNA for osteoblast specific factor 2 |
| | (OSF-2p1) |
| HLS_G10 | H. sapiens osf-2 mRNA for osteoblast specific factor 2 |
| | (OSF-2p1) |
| HLS_F1 | Hu Ig superfamily cytotoxic T-lymphocyte-assoc. protein |
| | (CTLA-4) gene |
| HLS_C2 | Hu Ig superfamily cytotoxic T-lymphocyte-assoc. protein |
| | (CTLA-4) gene |
| HLS_G2 | H. sapiens beta-2-microglobulin (B2M) mRNA |
| HLS_F6 | H. sapiens beta-2-microglobulin (B2M) mRNA |
| HLS_C5 | Hu common acute lymphoblastic leukemia antigen (CALLA) |
| HLS_C7 | Hu common acute lymphoblastic leukemia antigen (CALLA) |
| HLS_E10 | H. sapiens B-cell-homing chemokine (ligand for Burkitt's |
| | lymp. Receptor-1) (BLC) |
| HLS_A11 | H. sapiens B-cell-homing chemokine (ligand for Burkitt's |
| | lymp. Receptor-1) (BLC) |
| HLS_D2 | H. sapiens genes for ribosomal protein L13a |
| HLS_F5 | H. sapiens ribosomal protein S7 (RPS7) |
| HLS_F7 | H. sapiens ribosomal protein S17 (RPS17) mRNA |
| HLS_A12 | H. sapiens ribosomal protein S17 (RPS17) mRNA |

### Example 2

### Analysis of Subtracted cDNA Sequences by Microarray Analysis

[0532] Subtracted cDNA sequences were analyzed by microarray analysis to evaluate their expression in hematological malignancies and normal tissues. Using this approach, cDNA sequences were PCR amplified and their mRNA expression profiles in hematological malignancies and normal tissues are examined using cDNA microarray technology essentially as described (Shena et al., 1995).

[0533] In brief, the clones identified from the subtracted cDNA libraries analyses were immobilized and arrayed onto glass slides as multiple replicas on microarray slides and the slides were hybridized with two different sets of probes. , with each location corresponding to a unique cDNA clone (as many as 5500 clones can be arrayed on a single slide, or chip). Each chip is hybridized with a pair of cDNA probes that are fluorescence-labeled with Cy3 and Cy5, respectively. The set of probes derived from the hematological malignancies was labeled with cy3 while the other set of probes derived from a pool of normal tissues was labeled with cy5. Typically, 1 μg of polyA⁺ RNA was used to generate each cDNA probe. After hybridization, the chips were scanned and the fluorescence intensity recorded for both Cy3 and Cy5 channels. The difference in intensities (i.e., cy3/cy5 ratios) following hybridization with both probe sets provided the information on the relative expression level of each cDNA sequences immobilized on the slide in tumor versus normal tissues. There are multiple built-in quality control steps. First, the probe quality is monitored using a panel of ubiquitously expressed genes. Secondly, the control plate also can include yeast DNA fragments of which complementary RNA may be spiked into the probe synthesis for measuring the quality of the probe and the sensitivity of the analysis. This methodology provides a sensitivity of 1 in 100,000 copies of mRNA, and the reproducibility of the technology may be ensured by including duplicated control cDNA elements at different locations.

[0534] Analysis of hematological malignancy subtracted clones by microarray analyses on a variety of microarray chips identified the sequences set forth in SEQ ID NO:1 through SEQ ID NO:668 as being at least two-fold overexpressed in hematological malignancies versus normal tissues.

### Example 3

### Polynucleotide and Polypeptide Compositions: Brief Description of the cDNA Clones and Open Reading Frames Identified by Subtractive Hybridization and Microarray Analysis

[0535] Table 7 lists the sequences of the polynucleotides obtained during the analyses of the present invention. Shown are the 669 polynucleotide sequences, along with their clone name identifiers, as well as the serial number and filing date of the priority provisional patent application in which the clone was first identified.

TABLE 7
POLYNUCLEOTIDE SEQUENCES OF THE PRESENT INVENTION

| | | Priority | |
|---|---|---|---|
| | | Application | |
| SEQ ID NO: | Clone Identifier | Number | Filing Date |
| SEQ ID NO:1 | ′41567.1_gaiger.ABI′ | 60/190,479 | Mar. 17, 2000 |
| SEQ ID NO:2 | ′41557.1_gaiger.ABI′ | 60/190,479 | Mar. 17, 2000 |
| SEQ ID NO:3 | ′41577.1_gaiger.ABI′ | 60/190,479 | Mar. 17, 2000 |
| SEQ ID NO:4 | ′41571.1_gaiger.ABI′ | 60/190,479 | Mar. 17, 2000 |
| SEQ ID NO:5 | ′41594.1_gaiger.ABI′ | 60/190,479 | Mar. 17, 2000 |
| SEQ ID NO:6 | ′41605.1_gaiger.ABI′ | 60/190,479 | Mar. 17, 2000 |
| SEQ ID NO:7 | ′41627.1_gaiger.ABI′ | 60/190,479 | Mar. 17, 2000 |
| SEQ ID NO:8 | ′41620.1_gaiger.ABI′ | 60/190,479 | Mar. 17, 2000 |
| SEQ ID NO:9 | ′41628.1_gaiger.ABI′ | 60/190,479 | Mar. 17, 2000 |
| SEQ ID NO:10 | ′41635.1_gaiger.ABI′ | 60/190,479 | Mar. 17, 2000 |
| SEQ ID NO:11 | ′41649.1_gaiger.ABI′ | 60/190,479 | Mar. 17, 2000 |
| SEQ ID NO:12 | ′41648.1_gaiger.ABI′ | 60/190,479 | Mar. 17, 2000 |
| SEQ ID NO:13 | ′41653.1_gaiger.ABI′ | 60/190,479 | Mar. 17, 2000 |
| SEQ ID NO:14 | ′41664.1_gaiger.ABI′ | 60/190,479 | Mar. 17, 2000 |
| SEQ ID NO:15 | ′41667.1_gaiger.ABI′ | 60/190,479 | Mar. 17, 2000 |
| SEQ ID NO:16 | ′41687.1_gaiger.ABI′ | 60/190,479 | Mar. 17, 2000 |
| SEQ ID NO:17 | ′41708.1_gaiger.ABI′ | 60/190,479 | Mar. 17, 2000 |
| SEQ ID NO:18 | ′41721.1_gaiger.ABI′ | 60/190,479 | Mar. 17, 2000 |
| SEQ ID NO:19 | ′41746.1_gaiger.ABI′ | 60/190,479 | Mar. 17, 2000 |
| SEQ ID NO:20 | ′41751.1_gaiger.ABI′ | 60/190,479 | Mar. 17, 2000 |
| SEQ ID NO:21 | ′41762.1_gaiger.ABI′ | 60/190,479 | Mar. 17, 2000 |
| SEQ ID NO:22 | ′41764.1_gaiger.ABI′ | 60/190,479 | Mar. 17, 2000 |
| SEQ ID NO:23 | ′41793.1_gaiger.ABI′ | 60/190,479 | Mar. 17, 2000 |
| SEQ ID NO:24 | ′41794.1_gaiger.ABI′ | 60/190,479 | Mar. 17, 2000 |
| SEQ ID NO:25 | ′41807.1_gaiger.ABI′ | 60/190,479 | Mar. 17, 2000 |
| SEQ ID NO:26 | ′41802.1_gaiger.ABI′ | 60/190,479 | Mar. 17, 2000 |
| SEQ ID NO:27 | ′41804.1_gaiger.ABI′ | 60/190,479 | Mar. 17, 2000 |
| SEQ ID NO:28 | ′41810.1_gaiger.ABI′ | 60/190,479 | Mar. 17, 2000 |
| SEQ ID NO:29 | ′41847.1_gaiger.ABI′ | 60/190,479 | Mar. 17, 2000 |
| SEQ ID NO:30 | ′41865.1_gaiger.ABI′ | 60/190,479 | Mar. 17, 2000 |
| SEQ ID NO:31 | ′41859.1_gaiger.ABI′ | 60/190,479 | Mar. 17, 2000 |
| SEQ ID NO:32 | ′41878.1_gaiger.ABI′ | 60/190,479 | Mar. 17, 2000 |
| SEQ ID NO:33 | ′41869.1_gaiger.ABI′ | 60/190,479 | Mar. 17, 2000 |
| SEQ ID NO:34 | ′41888.1_gaiger.ABI′ | 60/190,479 | Mar. 17, 2000 |
| SEQ ID NO:35 | ′41907.1_gaiger.ABI′ | 60/190,479 | Mar. 17, 2000 |
| SEQ ID NO:36 | ′41908.1_gaiger.ABI′ | 60/190,479 | Mar. 17, 2000 |
| SEQ ID NO:37 | ′41912.1_gaiger.ABI′ | 60/190,479 | Mar. 17, 2000 |
| SEQ ID NO:38 | ′41916.1_gaiger.ABI′ | 60/190,479 | Mar. 17, 2000 |
| SEQ ID NO:39 | ′41925.1_gaiger.ABI′ | 60/190,479 | Mar. 17, 2000 |
| SEQ ID NO:40 | ′41929.1_gaiger.ABI′ | 60/190,479 | Mar. 17, 2000 |
| SEQ ID NO:41 | ′41930.1_gaiger.ABI′ | 60/190,479 | Mar. 17, 2000 |
| SEQ ID NO:42 | ′41933.1_gaiger.ABI′ | 60/190,479 | Mar. 17, 2000 |
| SEQ ID NO:43 | ′41944.1_gaiger.ABI′ | 60/190,479 | Mar. 17, 2000 |
| SEQ ID NO:44 | ′41986.1_gaiger.ABI′ | 60/190,479 | Mar. 17, 2000 |
| SEQ ID NO:45 | ′42017.1_gaiger.ABI′ | 60/190,479 | Mar. 17, 2000 |
| SEQ ID NO:46 | ′42033.1_gaiger.ABI′ | 60/190,479 | Mar. 17, 2000 |
| SEQ ID NO:47 | ′42040.1_gaiger.ABI′ | 60/190,479 | Mar. 17, 2000 |
| SEQ ID NO:48 | ′42041.1_gaiger.ABI′ | 60/190,479 | Mar. 17, 2000 |
| SEQ ID NO:49 | ′42053.1_gaiger.ABI′ | 60/190,479 | Mar. 17, 2000 |
| SEQ ID NO:50 | ′42101.1_gaiger.ABI′ | 60/190,479 | Mar. 17, 2000 |
| SEQ ID NO:51 | ′42131.1_gaiger.ABI′ | 60/190,479 | Mar. 17, 2000 |
| SEQ ID NO:52 | R0232:A08 | 60/206,201 | May 22, 2000 |
| SEQ ID NO:53 | R0232:C10 | 60/206,201 | May 22, 2000 |
| SEQ ID NO:54 | R0232:H11 | 60/206,201 | May 22, 2000 |
| SEQ ID NO:55 | R0232:H03 | 60/206,201 | May 22, 2000 |
| SEQ ID NO:56 | R0233:A12 | 60/206,201 | May 22, 2000 |
| SEQ ID NO:57 | R0233:A06 | 60/206,201 | May 22, 2000 |
| SEQ ID NO:58 | R0233:A08 | 60/206,201 | May 22, 2000 |
| SEQ ID NO:59 | R0233:B10 | 60/206,201 | May 22, 2000 |
| SEQ ID NO:60 | R0233:B04 | 60/206,201 | May 22, 2000 |
| SEQ ID NO:61 | R0233:C04 | 60/206,201 | May 22, 2000 |
| SEQ ID NO:62 | R0233:D01 | 60/206,201 | May 22, 2000 |
| SEQ ID NO:63 | R0233:D02 | 60/206,201 | May 22, 2000 |
| SEQ ID NO:64 | R0233:F10 | 60/206,201 | May 22, 2000 |
| SEQ ID NO:65 | R0233:F05 | 60/206,201 | May 22, 2000 |
| SEQ ID NO:66 | R0233:F07 | 60/206,201 | May 22, 2000 |
| SEQ ID NO:67 | ′42324.1_gaiger.ABI′ | 60/200,779 | May 22, 2000 |
| SEQ ID NO:68 | ′42349.1_gaiger.ABI′ | 60/200,779 | May 22, 2000 |
| SEQ ID NO:69 | ′42379.1_gaiger.ABI′ | 60/200,779 | May 22, 2000 |
| SEQ ID NO:70 | ′42394.1_gaiger.ABI′ | 60/200,779 | May 22, 2000 |
| SEQ ID NO:71 | ′42387.1_gaiger.ABI′ | 60/200,779 | May 22, 2000 |
| SEQ ID NO:72 | ′42396.1_gaiger.ABI′ | 60/200,779 | May 22, 2000 |
| SEQ ID NO:73 | ′42424.1_gaiger.ABI′ | 60/200,779 | May 22, 2000 |
| SEQ ID NO:74 | ′42438.1_gaiger.ABI′ | 60/200,779 | May 22, 2000 |
| SEQ ID NO:75 | ′42447.1_gaiger.ABI′ | 60/200,779 | May 22, 2000 |
| SEQ ID NO:76 | ′42524.1;gaiger.ABI′ | 60/200,779 | May 22, 2000 |
| SEQ ID NO:77 | ′42555.1;gaiger.ABI′ | 60/200,779 | May 22, 2000 |
| SEQ ID NO:78 | ′42560.1;gaiger.ABI′ | 60/200,779 | May 22, 2000 |
| SEQ ID NO:79 | ′42594.1_gaiger.ABI′ | 60/200,779 | May 22, 2000 |
| SEQ ID NO:80 | ′42595.1_gaiger.ABI′ | 60/200,779 | May 22, 2000 |
| SEQ ID NO:81 | ′42602.1_gaiger.ABI′ | 60/200,779 | May 22, 2000 |
| SEQ ID NO:82 | ′42665.1_gaiger.ABI′ | 60/200,779 | May 22, 2000 |
| SEQ ID NO:83 | ′42703.1_gaiger.ABI′ | 60/200,779 | May 22, 2000 |
| SEQ ID NO:84 | ′42709.1_gaiger.ABI′ | 60/200,779 | May 22, 2000 |
| SEQ ID NO:85 | ′42756.1_gaiger.ABI′ | 60/200,779 | May 22, 2000 |
| SEQ ID NO:86 | ′42802.1_gaiger.ABI′ | 60/200,779 | May 22, 2000 |
| SEQ ID NO:87 | R0234:A06 | 60/206,201 | May 22, 2000 |
| SEQ ID NO:88 | R0234:A07 | 60/206,201 | May 22, 2000 |
| SEQ ID NO:89 | R0234:B03 | 60/206,201 | May 22, 2000 |
| SEQ ID NO:90 | R0234:B06 | 60/206,201 | May 22, 2000 |
| SEQ ID NO:91 | R0234:B09 | 60/206,201 | May 22, 2000 |
| SEQ ID NO:92 | R0234:C02 | 60/206,201 | May 22, 2000 |
| SEQ ID NO:93 | R0234:C06 | 60/206,201 | May 22, 2000 |
| SEQ ID NO:94 | R0234:D06 | 60/206,201 | May 22, 2000 |
| SEQ ID NO:95 | R0234:D08 | 60/206,201 | May 22, 2000 |
| SEQ ID NO:96 | R0234:E01 | 60/206,201 | May 22, 2000 |
| SEQ ID NO:97 | R0234:E12 | 60/206,201 | May 22, 2000 |
| SEQ ID NO:98 | R0234:E02 | 60/206,201 | May 22, 2000 |
| SEQ ID NO:99 | R0234:E04 | 60/206,201 | May 22, 2000 |
| SEQ ID NO:100 | R0234:E05 | 60/206,201 | May 22, 2000 |
| SEQ ID NO:101 | R0234:F01 | 60/206,201 | May 22, 2000 |
| SEQ ID NO:102 | R0234:F02 | 60/206,201 | May 22, 2000 |
| SEQ ID NO:103 | R0234:F04 | 60/206,201 | May 22, 2000 |
| SEQ ID NO:104 | R0234:G01 | 60/206,201 | May 22, 2000 |
| SEQ ID NO:105 | R0234:G11 | 60/206,201 | May 22, 2000 |
| SEQ ID NO:106 | R0234:G12 | 60/206,201 | May 22, 2000 |
| SEQ ID NO:107 | R0234:G02 | 60/206,201 | May 22, 2000 |
| SEQ ID NO:108 | R0234:G03 | 60/206,201 | May 22, 2000 |
| SEQ ID NO:109 | R0234:G04 | 60/206,201 | May 22, 2000 |
| SEQ ID NO:110 | R0234:G09 | 60/206,201 | May 22, 2000 |
| SEQ ID NO:111 | R0234:H01 | 60/206,201 | May 22, 2000 |
| SEQ ID NO:112 | R0234:H06 | 60/206,201 | May 22, 2000 |
| SEQ ID NO:113 | R0235:A11 | 60/206,201 | May 22, 2000 |
| SEQ ID NO:114 | R0235:A07 | 60/206,201 | May 22, 2000 |
| SEQ ID NO:115 | R0235:B01 | 60/206,201 | May 22, 2000 |
| SEQ ID NO:116 | R0235:B11 | 60/206,201 | May 22, 2000 |
| SEQ ID NO:117 | R0235:B04 | 60/206,201 | May 22, 2000 |
| SEQ ID NO:118 | R0235:B05 | 60/206,201 | May 22, 2000 |
| SEQ ID NO:119 | R0235:B07 | 60/206,201 | May 22, 2000 |
| SEQ ID NO:120 | R0235:B09 | 60/206,201 | May 22, 2000 |
| SEQ ID NO:121 | R0235:C07 | 60/206,201 | May 22, 2000 |
| SEQ ID NO:122 | R0235:C09 | 60/206,201 | May 22, 2000 |
| SEQ ID NO:123 | R0235:D11 | 60/206,201 | May 22, 2000 |
| SEQ ID NO:124 | R0235:E10 | 60/206,201 | May 22, 2000 |
| SEQ ID NO:125 | R0235:E12 | 60/206,201 | May 22, 2000 |
| SEQ ID NO:126 | R0235:E02 | 60/206,201 | May 22, 2000 |
| SEQ ID NO:127 | R0235:F01 | 60/206,201 | May 22, 2000 |
| SEQ ID NO:128 | R0235:F02 | 60/206,201 | May 22, 2000 |
| SEQ ID NO:129 | R0235:F06 | 60/206,201 | May 22, 2000 |
| SEQ ID NO:130 | R0235:F07 | 60/206,201 | May 22, 2000 |
| SEQ ID NO:131 | R0235:F09 | 60/206,201 | May 22, 2000 |
| SEQ ID NO:132 | R0235:G07 | 60/206,201 | May 22, 2000 |
| SEQ ID NO:133 | R0235:H06 | 60/206,201 | May 22, 2000 |
| SEQ ID NO:134 | R0235:H08 | 60/206,201 | May 22, 2000 |
| SEQ ID NO:135 | R0236:A06 | 60/206,201 | May 22, 2000 |
| SEQ ID NO:136 | R0236:A09 | 60/206,201 | May 22, 2000 |
| SEQ ID NO:137 | R0236:B06 | 60/206,201 | May 22, 2000 |
| SEQ ID NO:138 | R0236:C01 | 60/206,201 | May 22, 2000 |
| SEQ ID NO:139 | R0236:E05 | 60/206,201 | May 22, 2000 |
| SEQ ID NO:140 | R0236:F12 | 60/206,201 | May 22, 2000 |
| SEQ ID NO:141 | R0236:F05 | 60/206,201 | May 22, 2000 |
| SEQ ID NO:142 | R0236:F06 | 60/206,201 | May 22, 2000 |
| SEQ ID NO:143 | R0236:G08 | 60/206,201 | May 22, 2000 |
| SEQ ID NO:144 | R0249:A11 | 60/222,903 | Aug. 03, 2000 |
| SEQ ID NO:145 | R0249:B02 | 60/222,903 | Aug. 03, 2000 |
| SEQ ID NO:146 | R0249:B04 | 60/222,903 | Aug. 03, 2000 |
| SEQ ID NO:147 | R0249:B06 | 60/222,903 | Aug. 03, 2000 |
| SEQ ID NO:148 | R0249:D11 | 60/222,903 | Aug. 03, 2000 |
| SEQ ID NO:149 | R0249:E11 | 60/222,903 | Aug. 03, 2000 |
| SEQ ID NO:150 | R0249:E06 | 60/222,903 | Aug. 03, 2000 |
| SEQ ID NO:151 | R0249:H09 | 60/222,903 | Aug. 03, 2000 |
| SEQ ID NO:152 | R0250:C09 | 60/222,903 | Aug. 03, 2000 |
| SEQ ID NO:153 | R0250:D10 | 60/222,903 | Aug. 03, 2000 |
| SEQ ID NO:154 | R0250:D03 | 60/222,903 | Aug. 03, 2000 |
| SEQ ID NO:155 | R0250:E09 | 60/222,903 | Aug. 03, 2000 |
| SEQ ID NO:156 | R0250:F09 | 60/222,903 | Aug. 03, 2000 |
| SEQ ID NO:157 | R0250:G01 | 60/222,903 | Aug. 03, 2000 |
| SEQ ID NO:158 | R0251:A12 | 60/222,903 | Aug. 03, 2000 |
| SEQ ID NO:159 | R0251:A05 | 60/222,903 | Aug. 03, 2000 |
| SEQ ID NO:160 | R0251:B09 | 60/222,903 | Aug. 03, 2000 |
| SEQ ID NO:161 | R0251:D01 | 60/222,903 | Aug. 03, 2000 |
| SEQ ID NO:162 | R0251:E03 | 60/222,903 | Aug. 03, 2000 |
| SEQ ID NO:163 | R0251:E06 | 60/222,903 | Aug. 03, 2000 |
| SEQ ID NO:164 | R0251:F12 | 60/222,903 | Aug. 03, 2000 |
| SEQ ID NO:165 | R0251:G06 | 60/222,903 | Aug. 03, 2000 |
| SEQ ID NO:166 | R0252:A08 | 60/222,903 | Aug. 03, 2000 |
| SEQ ID NO:167 | R0252:D02 | 60/222,903 | Aug. 03, 2000 |
| SEQ ID NO:168 | R0252:E11 | 60/222,903 | Aug. 03, 2000 |
| SEQ ID NO:169 | R0252:E04 | 60/222,903 | Aug. 03, 2000 |
| SEQ ID NO:170 | R0252:E06 | 60/222,903 | Aug. 03, 2000 |
| SEQ ID NO:171 | R0252:E07 | 60/222,903 | Aug. 03, 2000 |
| SEQ ID NO:172 | R0252:F11 | 60/222,903 | Aug. 03, 2000 |
| SEQ ID NO:173 | R0252:F02 | 60/222,903 | Aug. 03, 2000 |
| SEQ ID NO:174 | R0252:F03 | 60/222,903 | Aug. 03, 2000 |
| SEQ ID NO:175 | R0252:H01 | 60/222,903 | Aug. 03, 2000 |
| SEQ ID NO:176 | R0252:H03 | 60/222,903 | Aug. 03, 2000 |
| SEQ ID NO:177 | R0253:B04 | 60/222,903 | Aug. 03, 2000 |
| SEQ ID NO:178 | R0253:C10 | 60/222,903 | Aug. 03, 2000 |
| SEQ ID NO:179 | R0253:C04 | 60/222,903 | Aug. 03, 2000 |
| SEQ ID NO:180 | R0253:C05 | 60/222,903 | Aug. 03, 2000 |
| SEQ ID NO:181 | R0253:C06 | 60/222,903 | Aug. 03, 2000 |
| SEQ ID NO:182 | R0253:D02 | 60/222,903 | Aug. 03, 2000 |
| SEQ ID NO:183 | R0253:D08 | 60/222,903 | Aug. 03, 2000 |
| SEQ ID NO:184 | R0253:E06 | 60/222,903 | Aug. 03, 2000 |
| SEQ ID NO:185 | R0253:E09 | 60/222,903 | Aug. 03, 2000 |
| SEQ ID NO:186 | R0253:F01 | 60/222,903 | Aug. 03, 2000 |
| SEQ ID NO:187 | R0253:F11 | 60/222,903 | Aug. 03, 2000 |
| SEQ ID NO:188 | R0253:F02 | 60/222,903 | Aug. 03, 2000 |
| SEQ ID NO:189 | R0253:F05 | 60/222,903 | Aug. 03, 2000 |
| SEQ ID NO:190 | R0253:F07 | 60/222,903 | Aug. 03, 2000 |
| SEQ ID NO:191 | R0253:G01 | 60/222,903 | Aug. 03, 2000 |
| SEQ ID NO:192 | R0253:G10 | 60/222,903 | Aug. 03, 2000 |
| SEQ ID NO:193 | R0253:G11 | 60/222,903 | Aug. 03, 2000 |
| SEQ ID NO:194 | R0253:G12 | 60/222,903 | Aug. 03, 2000 |
| SEQ ID NO:195 | R0253:G04 | 60/222,903 | Aug. 03, 2000 |
| SEQ ID NO:196 | R0253:G05 | 60/222,903 | Aug. 03, 2000 |
| SEQ ID NO:197 | R0253:G06 | 60/222,903 | Aug. 03, 2000 |
| SEQ ID NO:198 | R0253:H02 | 60/222,903 | Aug. 03, 2000 |
| SEQ ID NO:199 | R0253:H07 | 60/222,903 | Aug. 03, 2000 |
| SEQ ID NO:200 | R0254:F07 | 60/223,416 | Aug. 04, 2000 |
| SEQ ID NO:201 | R0254:G11 | 60/223,416 | Aug. 04, 2000 |
| SEQ ID NO:202 | R0254:G04 | 60/223,416 | Aug. 04, 2000 |
| SEQ ID NO:203 | R0254:H01 | 60/223,416 | Aug. 04, 2000 |
| SEQ ID NO:204 | R0238:C03 | 60/223,416 | Aug. 04, 2000 |
| SEQ ID NO:205 | R0255:C02 | 60/223,416 | Aug. 04, 2000 |
| SEQ ID NO:206 | R0255:F12 | 60/223,416 | Aug. 04, 2000 |
| SEQ ID NO:207 | R0258:G10 | 60/223,416 | Aug. 04, 2000 |
| SEQ ID NO:208 | R0261:A12 | 60/223,416 | Aug. 04, 2000 |
| SEQ ID NO:209 | R0261:A09 | 60/223,416 | Aug. 04, 2000 |
| SEQ ID NO:210 | R0261:B12 | 60/223,416 | Aug. 04, 2000 |
| SEQ ID NO:211 | R0261:C10 | 60/223,416 | Aug. 04, 2000 |
| SEQ ID NO:212 | R0261:D06 | 60/223,416 | Aug. 04, 2000 |
| SEQ ID NO:213 | R0261:E04 | 60/223,416 | Aug. 04, 2000 |
| SEQ ID NO:214 | R0261:F05 | 60/223,416 | Aug. 04, 2000 |
| SEQ ID NO:215 | R0261:G04 | 60/223,416 | Aug. 04, 2000 |
| SEQ ID NO:216 | R0261:H03 | 60/223,416 | Aug. 04, 2000 |
| SEQ ID NO:217 | R0262:A12 | 60/223,416 | Aug. 04, 2000 |
| SEQ ID NO:218 | R0262:A02 | 60/223,416 | Aug. 04, 2000 |
| SEQ ID NO:219 | R0262:D12 | 60/223,416 | Aug. 04, 2000 |
| SEQ ID NO:220 | R0262:D04 | 60/223,416 | Aug. 04, 2000 |
| SEQ ID NO:221 | R0262:D07 | 60/223,416 | Aug. 04, 2000 |
| SEQ ID NO:222 | R0262:E02 | 60/223,416 | Aug. 04, 2000 |
| SEQ ID NO:223 | R0262:E03 | 60/223,416 | Aug. 04, 2000 |
| SEQ ID NO:224 | R0262:F06 | 60/223,416 | Aug. 04, 2000 |
| SEQ ID NO:225 | R0263:B03 | 60/223,416 | Aug. 04, 2000 |
| SEQ ID NO:226 | R0263:B09 | 60/223,416 | Aug. 04, 2000 |
| SEQ ID NO:227 | R0263:E03 | 60/223,416 | Aug. 04, 2000 |
| SEQ ID NO:228 | R0263:F08 | 60/223,416 | Aug. 04, 2000 |
| SEQ ID NO:229 | R0263:G10 | 60/223,416 | Aug. 04, 2000 |
| SEQ ID NO:230 | R0263:G02 | 60/223,416 | Aug. 04, 2000 |
| SEQ ID NO:231 | R0263:G03 | 60/223,416 | Aug. 04, 2000 |
| SEQ ID NO:232 | R0263:H10 | 60/223,416 | Aug. 04, 2000 |
| SEQ ID NO:233 | R0264:A02 | 60/223,416 | Aug. 04, 2000 |
| SEQ ID NO:234 | R0264:B11 | 60/223,416 | Aug. 04, 2000 |
| SEQ ID NO:235 | R0264:E12 | 60/223,416 | Aug. 04, 2000 |
| SEQ ID NO:236 | R0264:F11 | 60/223,416 | Aug. 04, 2000 |
| SEQ ID NO:237 | R0264:F09 | 60/223,416 | Aug. 04, 2000 |
| SEQ ID NO:238 | R0264:G01 | 60/223,416 | Aug. 04, 2000 |
| SEQ ID NO:239 | R0264:G11 | 60/223,416 | Aug. 04, 2000 |
| SEQ ID NO:240 | R0264:G04 | 60/223,416 | Aug. 04, 2000 |
| SEQ ID NO:241 | R0265:F07 | 60/223,416 | Aug. 04, 2000 |
| SEQ ID NO:242 | R0265:G01 | 60/223,416 | Aug. 04, 2000 |
| SEQ ID NO:243 | R0265:G10 | 60/223,416 | Aug. 04, 2000 |
| SEQ ID NO:244 | R0265:G11 | 60/223,416 | Aug. 04, 2000 |
| SEQ ID NO:245 | R0265:H09 | 60/223,416 | Aug. 04, 2000 |
| SEQ ID NO:246 | R0266:A11 | 60/223,416 | Aug. 04, 2000 |
| SEQ ID NO:247 | R0266:A12 | 60/223,416 | Aug. 04, 2000 |
| SEQ ID NO:248 | R0266:B01 | 60/223,416 | Aug. 04, 2000 |
| SEQ ID NO:249 | R0266:C12 | 60/223,416 | Aug. 04, 2000 |
| SEQ ID NO:250 | R0266:E01 | 60/223,416 | Aug. 04, 2000 |
| SEQ ID NO:251 | R0266:E03 | 60/223,416 | Aug. 04, 2000 |
| SEQ ID NO:252 | R0266:F03 | 60/223,416 | Aug. 04, 2000 |
| SEQ ID NO:253 | R0266:F07 | 60/223,416 | Aug. 04, 2000 |
| SEQ ID NO:254 | R0266:G10 | 60/223,416 | Aug. 04, 2000 |
| SEQ ID NO:255 | R0266:G09 | 60/223,416 | Aug. 04, 2000 |
| SEQ ID NO:256 | R0266:H09 | 60/223,416 | Aug. 04, 2000 |
| SEQ ID NO:257 | R0243:F07 | 60/223,416 | Aug. 04, 2000 |
| SEQ ID NO:258 | R0244:C02 | 60/223,416 | Aug. 04, 2000 |
| SEQ ID NO:259 | R0244:C04 | 60/223,416 | Aug. 04, 2000 |
| SEQ ID NO:260 | R0245:A02 | 60/223,416 | Aug. 04, 2000 |
| SEQ ID NO:261 | ′46802.1_gaiger.ABI′ | 60/200,545 | Apr. 27, 2000 |
| SEQ ID NO:262 | ′46816.1_gaiger.ABI′ | 60/200,545 | Apr. 27, 2000 |
| SEQ ID NO:263 | ′46880.1_gaiger.ABI′ | 60/200,545 | Apr. 27, 2000 |
| SEQ ID NO:264 | ′47011.1_gaiger.ABI′ | 60/200,545 | Apr. 27, 2000 |
| SEQ ID NO:265 | ′51658.1_gaiger.ABI′ | 60/206,201 | May. 22, 2000 |
| SEQ ID NO:266 | ′51713.1_gaiger.ABI′ | 60/206,201 | May. 22, 2000 |
| SEQ ID NO:267 | ′51731.1_gaiger.ABI′ | 60/206,201 | May. 22, 2000 |
| SEQ ID NO:268 | ′51734.1_gaiger.ABI′ | 60/206,201 | May. 22, 2000 |
| SEQ ID NO:269 | ′51735.1_gaiger.ABI′ | 60/206,201 | May. 22, 2000 |
| SEQ ID NO:270 | ′51788.1_gaiger.ABI′ | 60/206,201 | May. 22, 2000 |
| SEQ ID NO:271 | ′51892.1_gaiger.ABI′ | 60/206,201 | May. 22, 2000 |
| SEQ ID NO:272 | ′51900.1_gaiger.ABI′ | 60/206,201 | May. 22, 2000 |
| SEQ ID NO:273 | ′51903.1_gaiger.ABI′ | 60/206,201 | May. 22, 2000 |
| SEQ ID NO:274 | 1404:D07 | 60/218,950 | Jul. 14, 2000 |
| SEQ ID NO:275 | 1405:C04 | 60/218,950 | Jul. 14, 2000 |
| SEQ ID NO:276 | 1405:D12 | 60/218,950 | Jul. 14, 2000 |
| SEQ ID NO:277 | 1405:E11 | 60/218,950 | Jul. 14, 2000 |
| SEQ ID NO:278 | ′52333.1_gaiger.ABI′ | 60/206,201 | May. 22, 2000 |
| SEQ ID NO:279 | ′41557.1_gaiger.ABI′ | 60/190,479 | Mar. 17, 2000 |
| SEQ ID NO:280 | ′41579.1_gaiger.ABI′ | 60/190,479 | Mar. 17, 2000 |
| SEQ ID NO:281 | ′41571.1_gaiger.ABI′ | 60/190,479 | Mar. 17, 2000 |
| SEQ ID NO:282 | ′41613.1_gaiger.ABI′ | 60/190,479 | Mar. 17, 2000 |
| SEQ ID NO:283 | ′41650.1_gaiger.ABI′ | 60/190,479 | Mar. 17, 2000 |
| SEQ ID NO:284 | ′41663.1_gaiger.ABI′ | 60/190,479 | Mar. 17, 2000 |
| SEQ ID NO:285 | ′41659.1_gaiger.ABI′ | 60/190,479 | Mar. 17, 2000 |
| SEQ ID NO:286 | ′41687.1_gaiger.ABI′ | 60/190,479 | Mar. 17, 2000 |
| SEQ ID NO:287 | ′41717.1_gaiger.ABI′ | 60/190,479 | Mar. 17, 2000 |
| SEQ ID NO:288 | ′41751.1_gaiger.ABI′ | 60/190,479 | Mar. 17, 2000 |
| SEQ ID NO:289 | ′41818.1_gaiger.ABI′ | 60/190,479 | Mar. 17, 2000 |
| SEQ ID NO:290 | ′41828.1_gaiger.ABI′ | 60/190,479 | Mar. 17, 2000 |
| SEQ ID NO:291 | ′41849.1_gaiger.ABI′ | 60/190,479 | Mar. 17, 2000 |
| SEQ ID NO:292 | ′41881.1_gaiger.ABI′ | 60/190,479 | Mar. 17, 2000 |
| SEQ ID NO:293 | ′41912.1_gaiger.ABI′ | 60/190,479 | Mar. 17, 2000 |
| SEQ ID NO:294 | ′41927.1_gaiger.ABI′ | 60/190,479 | Mar. 17, 2000 |
| SEQ ID NO:295 | ′41929.1_gaiger.ABI′ | 60/190,479 | Mar. 17, 2000 |
| SEQ ID NO:296 | ′41944.1_gaiger.ABI′ | 60/190,479 | Mar. 17, 2000 |
| SEQ ID NO:297 | ′41987.1_gaiger.ABI′ | 60/190,479 | Mar. 17, 2000 |
| SEQ ID NO:298 | ′41995.1_gaiger.ABI′ | 60/190,479 | Mar. 17, 2000 |
| SEQ ID NO:299 | ′42012.1_gaiger.ABI′ | 60/190,479 | Mar. 17, 2000 |
| SEQ ID NO:300 | ′42039.1_gaiger.ABI′ | 60/190,479 | Mar. 17, 2000 |
| SEQ ID NO:301 | ′42097.1_gaiger.ABI′ | 60/190,479 | Mar. 17, 2000 |
| SEQ ID NO:302 | ′42103.1_gaiger.ABI′ | 60/190,479 | Mar. 17, 2000 |
| SEQ ID NO:303 | ′42108.1_gaiger.ABI′ | 60/190,479 | Mar. 17, 2000 |
| SEQ ID NO:304 | R0233:A06 | 60/206,201 | May. 22, 2000 |
| SEQ ID NO:305 | R0233:A08 | 60/206,201 | May. 22, 2000 |
| SEQ ID NO:306 | R0233:C02 | 60/206,201 | May. 22, 2000 |
| SEQ ID NO:307 | R0233:E06 | 60/206,201 | May. 22, 2000 |
| SEQ ID NO:308 | R0233:F08 | 60/206,201 | May. 22, 2000 |
| SEQ ID NO:309 | ′42324.1_gaiger.ABI′ | 60/200,779 | May. 22, 2000 |
| SEQ ID NO:310 | ′42335.1_gaiger.ABI′ | 60/200,779 | May. 22, 2000 |
| SEQ ID NO:311 | ′42325.1_gaiger.ABI′ | 60/200,779 | May. 22, 2000 |
| SEQ ID NO:312 | ′42401.1_gaiger.ABI′ | 60/200,779 | May. 22, 2000 |
| SEQ ID NO:313 | ′42469.1;gaiger.ABI′ | 60/200,779 | May. 22, 2000 |
| SEQ ID NO:314 | ′42514.1;gaiger.ABI′ | 60/200,779 | May. 22, 2000 |
| SEQ ID NO:315 | ′42554.1;gaiger.ABI′ | 60/200,779 | May. 22, 2000 |
| SEQ ID NO:316 | ′42560.1;gaiger.ABI′ | 60/200,779 | May. 22, 2000 |
| SEQ ID NO:317 | ′42588.1_gaiger.ABI′ | 60/200,779 | May. 22, 2000 |
| SEQ ID NO:318 | ′42595.1_gaiger.ABI′ | 60/200,779 | May 22, 2000 |
| SEQ ID NO:319 | ′42609.1_gaiger.ABI′ | 60/200,779 | May 22, 2000 |
| SEQ ID NO:320 | ′42703.1_gaiger.ABI′ | 60/200,779 | May 22, 2000 |
| SEQ ID NO:321 | R0234:E06 | 60/206,201 | May 22, 2000 |
| SEQ ID NO:322 | R0234:F09 | 60/206,201 | May 22, 2000 |
| SEQ ID NO:323 | R0235:A09 | 60/206,201 | May 22, 2000 |
| SEQ ID NO:324 | R0235:D01 | 60/206,201 | May 22, 2000 |
| SEQ ID NO:325 | R0236:D04 | 60/206,201 | May 22, 2000 |
| SEQ ID NO:326 | R0236:F10 | 60/206,201 | May 22, 2000 |
| SEQ ID NO:327 | R0236:G10 | 60/206,201 | May 22, 2000 |
| SEQ ID NO:328 | R0236:G08 | 60/206,201 | May 22, 2000 |
| SEQ ID NO:329 | R0249:D01 | 60/222,903 | Aug. 03, 2000 |
| SEQ ID NO:330 | R0249:G04 | 60/222,903 | Aug. 03, 2000 |
| SEQ ID NO:331 | R0250:A10 | 60/222,903 | Aug. 03, 2000 |
| SEQ ID NO:332 | R0250:E12 | 60/222,903 | Aug. 03, 2000 |
| SEQ ID NO:333 | R0250:F12 | 60/222,903 | Aug. 03, 2000 |
| SEQ ID NO:334 | R0251:B08 | 60/222,903 | Aug. 03, 2000 |
| SEQ ID NO:335 | R0252:A08 | 60/222,903 | Aug. 03, 2000 |
| SEQ ID NO:336 | R0252:F11 | 60/222,903 | Aug. 03, 2000 |
| SEQ ID NO:337 | R0252:F02 | 60/222,903 | Aug. 03, 2000 |
| SEQ ID NO:338 | R0252:F08 | 60/222,903 | Aug. 03, 2000 |
| SEQ ID NO:339 | R0252:G11 | 60/222,903 | Aug. 03, 2000 |
| SEQ ID NO:340 | R0253:E10 | 60/222,903 | Aug. 03, 2000 |
| SEQ ID NO:341 | R0253:G11 | 60/222,903 | Aug. 03, 2000 |
| SEQ ID NO:342 | R0254:A08 | 60/223,416 | Aug. 04, 2000 |
| SEQ ID NO:343 | R0254:E04 | 60/223,416 | Aug. 04, 2000 |
| SEQ ID NO:344 | R0254:F07 | 60/223,416 | Aug. 04, 2000 |
| SEQ ID NO:345 | R0237:F12 | 60/206,201 | May 22, 2000 |
| SEQ ID NO:346 | R0238:B02 | 60/223,416 | Aug. 04, 2000 |
| SEQ ID NO:347 | R0238:D06 | 60/223,416 | Aug. 04, 2000 |
| SEQ ID NO:348 | R0238:F03 | 60/223,416 | Aug. 04, 2000 |
| SEQ ID NO:349 | R0239:H02 | 60/206,201 | May 22, 2000 |
| SEQ ID NO:350 | R0255:F12 | 60/223,416 | Aug. 04, 2000 |
| SEQ ID NO:351 | R0258:B10 | 60/223,416 | Aug. 04, 2000 |
| SEQ ID NO:352 | R0259:C06 | 60/223,416 | Aug. 04, 2000 |
| SEQ ID NO:353 | R0261:A09 | 60/223,416 | Aug. 04, 2000 |
| SEQ ID NO:354 | R0261:B10 | 60/223,416 | Aug. 04, 2000 |
| SEQ ID NO:355 | R0261:C10 | 60/223,416 | Aug. 04, 2000 |
| SEQ ID NO:356 | R0261:D03 | 60/223,416 | Aug. 04, 2000 |
| SEQ ID NO:357 | R0261:D06 | 60/223,416 | Aug. 04, 2000 |
| SEQ ID NO:358 | R0261:E10 | 60/223,416 | Aug. 04, 2000 |
| SEQ ID NO:359 | R0261:F10 | 60/223,416 | Aug. 04, 2000 |
| SEQ ID NO:360 | R0261:G04 | 60/223,416 | Aug. 04, 2000 |
| SEQ ID NO:361 | R0262:A12 | 60/223,416 | Aug. 04, 2000 |
| SEQ ID NO:362 | R0262:A03 | 60/223,416 | Aug. 04, 2000 |
| SEQ ID NO:363 | R0262:B09 | 60/223,416 | Aug. 04, 2000 |
| SEQ ID NO:364 | R0262:C04 | 60/223,416 | Aug. 04, 2000 |
| SEQ ID NO:365 | R0262:D11 | 60/223,416 | Aug. 04, 2000 |
| SEQ ID NO:366 | R0262:D12 | 60/223,416 | Aug. 04, 2000 |
| SEQ ID NO:367 | R0262:D04 | 60/223,416 | Aug. 04, 2000 |
| SEQ ID NO:368 | R0262:D07 | 60/223,416 | Aug. 04, 2000 |
| SEQ ID NO:369 | R0262:E02 | 60/223,416 | Aug. 04, 2000 |
| SEQ ID NO:370 | R0262:G05 | 60/223,416 | Aug. 04, 2000 |
| SEQ ID NO:371 | R0263:B10 | 60/223,416 | Aug. 04, 2000 |
| SEQ ID NO:372 | R0263:B06 | 60/223,416 | Aug. 04, 2000 |
| SEQ ID NO:373 | R0263:B09 | 60/223,416 | Aug. 04, 2000 |
| SEQ ID NO:374 | R0263:D11 | 60/223,416 | Aug. 04, 2000 |
| SEQ ID NO:375 | R0263:D07 | 60/223,416 | Aug. 04, 2000 |
| SEQ ID NO:376 | R0263:E03 | 60/223,416 | Aug. 04, 2000 |
| SEQ ID NO:377 | R0263:F08 | 60/223,416 | Aug. 04, 2000 |
| SEQ ID NO:378 | R0263:G03 | 60/223,416 | Aug. 04, 2000 |
| SEQ ID NO:379 | R0263:H10 | 60/223,416 | Aug. 04, 2000 |
| SEQ ID NO:380 | R0263:H02 | 60/223,416 | Aug. 04, 2000 |
| SEQ ID NO:381 | R0264:B11 | 60/223,416 | Aug. 04, 2000 |
| SEQ ID NO:382 | R0264:D03 | 60/223,416 | Aug. 04, 2000 |
| SEQ ID NO:383 | R0264:E12 | 60/223,416 | Aug. 04, 2000 |
| SEQ ID NO:384 | R0264:F11 | 60/223,416 | Aug. 04, 2000 |
| SEQ ID NO:385 | R0264:F09 | 60/223,416 | Aug. 04, 2000 |
| SEQ ID NO:386 | R0264:G03 | 60/223,416 | Aug. 04, 2000 |
| SEQ ID NO:387 | R0264:G04 | 60/223,416 | Aug. 04, 2000 |
| SEQ ID NO:388 | R0264:G06 | 60/223,416 | Aug. 04, 2000 |
| SEQ ID NO:389 | R0264:G09 | 60/223,416 | Aug. 04, 2000 |
| SEQ ID NO:390 | R0264:H04 | 60/223,416 | Aug. 04, 2000 |
| SEQ ID NO:391 | R0265:A09 | 60/223,416 | Aug. 04, 2000 |
| SEQ ID NO:392 | R0265:D10 | 60/223,416 | Aug. 04, 2000 |
| SEQ ID NO:393 | R0265:D07 | 60/223,416 | Aug. 04, 2000 |
| SEQ ID NO:394 | R0265:E12 | 60/223,416 | Aug. 04, 2000 |
| SEQ ID NO:395 | R0265:F12 | 60/223,416 | Aug. 04, 2000 |
| SEQ ID NO:396 | R0265:H04 | 60/223,416 | Aug. 04, 2000 |
| SEQ ID NO:397 | R0265:H09 | 60/223,416 | Aug. 04, 2000 |
| SEQ ID NO:398 | R0266:A10 | 60/223,416 | Aug. 04, 2000 |
| SEQ ID NO:399 | R0266:A12 | 60/223,416 | Aug. 04, 2000 |
| SEQ ID NO:400 | R0266:B02 | 60/223,416 | Aug. 04, 2000 |
| SEQ ID NO:401 | R0266:C12 | 60/223,416 | Aug. 04, 2000 |
| SEQ ID NO:402 | R0266:E08 | 60/223,416 | Aug. 04, 2000 |
| SEQ ID NO:403 | R0266:F03 | 60/223,416 | Aug. 04, 2000 |
| SEQ ID NO:404 | R0266:F06 | 60/223,416 | Aug. 04, 2000 |
| SEQ ID NO:405 | R0266:F07 | 60/223,416 | Aug. 04, 2000 |
| SEQ ID NO:406 | R0266:G12 | 60/223,416 | Aug. 04, 2000 |
| SEQ ID NO:407 | R0266:G09 | 60/223,416 | Aug. 04, 2000 |
| SEQ ID NO:408 | R0266:H06 | 60/223,416 | Aug. 04, 2000 |
| SEQ ID NO:409 | R0242:E03 | 60/223,416 | Aug. 04, 2000 |
| SEQ ID NO:410 | R0244:C04 | 60/223,416 | Aug. 04, 2000 |
| SEQ ID NO:411 | R0244:C06 | 60/223,416 | Aug. 04, 2000 |
| SEQ ID NO:412 | R0245:A02 | 60/223,416 | Aug. 04, 2000 |
| SEQ ID NO:413 | R0245:D12 | 60/223,416 | Aug. 04, 2000 |
| SEQ ID NO:414 | R0246:D10 | 60/223,416 | Aug. 04, 2000 |
| SEQ ID NO:415 | ′46377.1_gaiger.ABI′ | 60/200,545 | Apr. 27, 2000 |
| SEQ ID NO:416 | ′46403.1_gaiger.ABI′ | 60/200,545 | Apr. 27, 2000 |
| SEQ ID NO:417 | ′46489.1;gaiger.ABI′ | 60/200,545 | Apr. 27, 2000 |
| SEQ ID NO:418 | ′46872.1_gaiger.ABI′ | 60/200,545 | Apr. 27, 2000 |
| SEQ ID NO:419 | ′46883.1_gaiger.ABI′ | 60/200,545 | Apr. 27, 2000 |
| SEQ ID NO:420 | ′46880.1_gaiger.ABI′ | 60/200,545 | Apr. 27, 2000 |
| SEQ ID NO:421 | ′46977.1_gaiger.ABI′ | 60/200,545 | Apr. 27, 2000 |
| SEQ ID NO:422 | ′47011.1_gaiger.ABI′ | 60/200,545 | Apr. 27, 2000 |
| SEQ ID NO:423 | ′51658.1_gaiger.ABI′ | 60/206,201 | May 22, 2000 |
| SEQ ID NO:424 | ′51713.1_gaiger.ABI′ | 60/206,201 | May 22, 2000 |
| SEQ ID NO:425 | ′51734.1_gaiger.ABI′ | 60/206,201 | May 22, 2000 |
| SEQ ID NO:426 | ′51766.1_gaiger.ABI′ | 60/206,201 | May 22, 2000 |
| SEQ ID NO:427 | ′51870.1_gaiger.ABI′ | 60/206,201 | May 22, 2000 |
| SEQ ID NO:428 | ′51924.1_gaiger.ABI′ | 60/206,201 | May 22, 2000 |
| SEQ ID NO:429 | 1404:A06 | 60/218,950 | Jul. 14, 2000 |
| SEQ ID NO:430 | 1404:B12 | 60/218,950 | Jul. 14, 2000 |
| SEQ ID NO:431 | 1404:D12 | 60/218,950 | Jul. 14, 2000 |
| SEQ ID NO:432 | 1404:E11 | 60/218,950 | Jul. 14, 2000 |
| SEQ ID NO:433 | 1405:A11 | 60/218,950 | Jul. 14, 2000 |
| SEQ ID NO:434 | ′52280.1_gaiger.ABI′ | 60/206,201 | May 22, 2000 |
| SEQ ID NO:435 | ′52345.1_gaiger.ABI′ | 60/206,201 | May 22, 2000 |
| SEQ ID NO:436 | ′52373.1_gaiger.ABI′ | 60/206,20 1 | May 22, 2000 |
| SEQ ID NO:437 | R0238:F03 | 60/223,416 | Aug. 04, 2000 |
| SEQ ID NO:438 | R0263:E03 | 60/223,416 | Aug. 04, 2000 |
| SEQ ID NO:439 | ′41557.1_gaiger.ABI′ | 60/190,479 | Mar. 17, 2000 |
| SEQ ID NO:440 | ′41650.1_gaiger.ABI′ | 60/190,479 | Mar. 17, 2000 |
| SEQ ID NO:441 | ′41663.1_gaiger.ABI′ | 60/190,479 | Mar. 17, 2000 |
| SEQ ID NO:442 | ′41659.1_gaiger.ABI′ | 60/190,479 | Mar. 17, 2000 |
| SEQ ID NO:443 | ′41667.1_gaiger.ABI′ | 60/190,479 | Mar. 17, 2000 |
| SEQ ID NO:444 | ′41729.1_gaiger.ABI′ | 60/190,479 | Mar. 17, 2000 |
| SEQ ID NO:445 | ′41751.1_gaiger.ABI′ | 60/190,479 | Mar. 17, 2000 |
| SEQ ID NO:446 | ′41818.1_gaiger.ABI′ | 60/190,479 | Mar. 17, 2000 |
| SEQ ID NO:447 | ′41828.1_gaiger.ABI′ | 60/190,479 | Mar. 17, 2000 |
| SEQ ID NO:448 | ′41847.1_gaiger.ABI′ | 60/190,479 | Mar. 17, 2000 |
| SEQ ID NO:449 | ′41849.1_gaiger.ABI′ | 60/190,479 | Mar. 17, 2000 |
| SEQ ID NO:450 | ′41927.1_gaiger.ABI′ | 60/190,479 | Mar. 17, 2000 |
| SEQ ID NO:451 | ′41929.1_gaiger.ABI′ | 60/190,479 | Mar. 17, 2000 |
| SEQ ID NO:452 | ′41995.1_gaiger.ABI′ | 60/190,479 | Mar. 17, 2000 |
| SEQ ID NO:453 | ′42012.1_gaiger.ABI′ | 60/190,479 | Mar. 17, 2000 |
| SEQ ID NO:454 | ′42039.1_gaiger.ABI′ | 60/190,479 | Mar. 17, 2000 |
| SEQ ID NO:455 | ′42097.1_gaiger.ABI′ | 60/190,479 | Mar. 17, 2000 |
| SEQ ID NO:456 | ′42108.1_gaiger.ABI′ | 60/190,479 | Mar. 17, 2000 |
| SEQ ID NO:457 | R0233:A06 | 60/206,201 | May 22, 2000 |
| SEQ ID NO:458 | R0233:C02 | 60/206,201 | May 22, 2000 |
| SEQ ID NO:459 | R0233:E06 | 60/206,201 | May 22, 2000 |
| SEQ ID NO:460 | R0233:F08 | 60/206,201 | May 22, 2000 |
| SEQ ID NO:461 | ′42325.1_gaiger.ABI′ | 60/200,779 | May 22, 2000 |
| SEQ ID NO:462 | ′42328.1_gaiger.ABI′ | 60/200,779 | May 22, 2000 |
| SEQ ID NO:463 | ′42401.1_gaiger.ABI′ | 60/200,779 | May 22, 2000 |
| SEQ ID NO:464 | ′42588.1_gaiger.ABI′ | 60/200,779 | May 22, 2000 |
| SEQ ID NO:465 | ′42595.1_gaiger.ABI′ | 60/200,779 | May 22, 2000 |
| SEQ ID NO:466 | ′42703.1_gaiger.ABI′ | 60/200,779 | May 22, 2000 |
| SEQ ID NO:467 | R0234:B07 | 60/206,201 | May 22, 2000 |
| SEQ ID NO:468 | R0234:E06 | 60/206,201 | May 22, 2000 |
| SEQ ID NO:469 | R0234:F09 | 60/206,201 | May 22, 2000 |
| SEQ ID NO:470 | R0235:B03 | 60/206,201 | May 22, 2000 |
| SEQ ID NO:471 | R0235:E05 | 60/206,201 | May 22, 2000 |
| SEQ ID NO:472 | R0236:A06 | 60/206,201 | May 22, 2000 |
| SEQ ID NO:473 | R0236:D04 | 60/206,201 | May 22, 2000 |
| SEQ ID NO:474 | R0250:A10 | 60/222,903 | Aug. 03, 2000 |
| SEQ ID NO:475 | R0251:E09 | 60/222,903 | Aug. 03, 2000 |
| SEQ ID NO:476 | R0252:F11 | 60/222,903 | Aug. 03, 2000 |
| SEQ ID NO:477 | R0238:B02 | 60/223,416 | Aug. 04, 2000 |
| SEQ ID NO:478 | R0239:H02 | 60/206,201 | May 22, 2000 |
| SEQ ID NO:479 | R0255:F12 | 60/223,416 | Aug. 04, 2000 |
| SEQ ID NO:480 | R0259:C06 | 60/223,416 | Aug. 04, 2000 |
| SEQ ID NO:481 | R0261:B10 | 60/223,416 | Aug. 04, 2000 |
| SEQ ID NO:482 | R0261:D06 | 60/223,416 | Aug. 04, 2000 |
| SEQ ID NO:483 | R0261:E10 | 60/223,416 | Aug. 04, 2000 |
| SEQ ID NO:484 | R0261:H08 | 60/223,416 | Aug. 04, 2000 |
| SEQ ID NO:485 | R0262:A12 | 60/223,416 | Aug. 04, 2000 |
| SEQ ID NO:486 | R0262:A03 | 60/223,416 | Aug. 04, 2000 |
| SEQ ID NO:487 | R0262:D11 | 60/223,416 | Aug. 04, 2000 |
| SEQ ID NO:488 | R0262:E03 | 60/223,416 | Aug. 04, 2000 |
| SEQ ID NO:489 | R0262:G05 | 60/223,416 | Aug. 04, 2000 |
| SEQ ID NO:490 | R0263:B11 | 60/223,416 | Aug. 04, 2000 |
| SEQ ID NO:491 | R0263:D11 | 60/223,416 | Aug. 04, 2000 |
| SEQ ID NO:492 | R0263:D07 | 60/223,416 | Aug. 04, 2000 |
| SEQ ID NO:493 | R0263:F08 | 60/223,416 | Aug. 04, 2000 |
| SEQ ID NO:494 | R0263:H02 | 60/223,416 | Aug. 04, 2000 |
| SEQ ID NO:495 | R0264:D03 | 60/223,416 | Aug. 04, 2000 |
| SEQ ID NO:496 | R0264:E12 | 60/223,416 | Aug. 04, 2000 |
| SEQ ID NO:497 | R0264:F11 | 60/223,416 | Aug. 04, 2000 |
| SEQ ID NO:498 | R0264:H03 | 60/223,416 | Aug. 04, 2000 |
| SEQ ID NO:499 | R0265:D07 | 60/223,416 | Aug. 04, 2000 |
| SEQ ID NO:500 | R0265:E12 | 60/223,416 | Aug. 04, 2000 |
| SEQ ID NO:501 | R0265:F12 | 60/223,416 | Aug. 04, 2000 |
| SEQ ID NO:502 | R0265:H04 | 60/223,416 | Aug. 04, 2000 |
| SEQ ID NO:503 | R0265:H09 | 60/223,416 | Aug. 04, 2000 |
| SEQ ID NO:504 | R0266:A10 | 60/223,416 | Aug. 04, 2000 |
| SEQ ID NO:505 | R0266:A12 | 60/223,416 | Aug. 04, 2000 |
| SEQ ID NO:506 | R0266:F03 | 60/223,416 | Aug. 04, 2000 |
| SEQ ID NO:507 | R0266:F07 | 60/223,416 | Aug. 04, 2000 |
| SEQ ID NO:508 | R0266:G12 | 60/223,416 | Aug. 04, 2000 |
| SEQ ID NO:509 | R0266:G09 | 60/223,416 | Aug. 04, 2000 |
| SEQ ID NO:510 | R0266:H06 | 60/223,416 | Aug. 04, 2000 |
| SEQ ID NO:511 | R0244:C04 | 60/223,416 | Aug. 04, 2000 |
| SEQ ID NO:512 | R0245:A02 | 60/223,416 | Aug. 04, 2000 |
| SEQ ID NO:513 | R0246:D10 | 60/223,416 | Aug. 04, 2000 |
| SEQ ID NO:514 | ′46403.1_gaiger.ABI′ | 60/200,545 | Apr. 27, 2000 |
| SEQ ID NO:515 | ′46458.1_gaiger.ABI′ | 60/200,545 | Apr. 27, 2000 |
| SEQ ID NO:516 | ′46489.1;gaiger.ABI′ | 60/200,545 | Apr. 27, 2000 |
| SEQ ID NO:517 | ′46802.1_gaiger.ABI′ | 60/200,545 | Apr. 27, 2000 |
| SEQ ID NO:518 | ′46872.1_gaiger.ABI′ | 60/200,545 | Apr. 27, 2000 |
| SEQ ID NO:519 | ′46880.1_gaiger.ABI′ | 60/200,545 | Apr. 27, 2000 |
| SEQ ID NO:520 | ′46977.1_gaiger.ABI′ | 60/200,545 | Apr. 27, 2000 |
| SEQ ID NO:521 | ′51658.1_gaiger.ABI′ | 60/206,201 | May 22, 2000 |
| SEQ ID NO:522 | ′51713.1_gaiger.ABI′ | 60/206,201 | May 22, 2000 |
| SEQ ID NO:523 | ′51734.1_gaiger.ABI′ | 60/206,201 | May 22, 2000 |
| SEQ ID NO:524 | ′51924.1_gaiger.ABI′ | 60/206,201 | May 22, 2000 |
| SEQ ID NO:525 | 1405:C04 | 60/218,950 | Jul. 14, 2000 |
| SEQ ID NO:526 | 1405:E11 | 60/218,950 | Jul. 14, 2000 |
| SEQ ID NO:527 | ′52246.1_gaiger.ABI′ | 60/206,201 | May 22, 2000 |
| SEQ ID NO:528 | ′52333.1_gaiger.ABI′ | 60/206,201 | May 22, 2000 |
| SEQ ID NO:529 | ′41557.1_gaiger.ABI′ | 60/190,479 | Mar. 17, 2000 |
| SEQ ID NO:530 | ′41579.1_gaiger.ABI′ | 60/190,479 | Mar. 17, 2000 |
| SEQ ID NO:531 | ′41571.1_gaiger.ABI′ | 60/190,479 | Mar. 17, 2000 |
| SEQ ID NO:532 | ′41573.1_gaiger.ABI′ | 60/190,479 | Mar. 17, 2000 |
| SEQ ID NO:533 | ′41628.1_gaiger.ABI′ | 60/190,479 | Mar. 17, 2000 |
| SEQ ID NO:534 | ′41635.1_gaiger.ABI′ | 60/190,479 | Mar. 17, 2000 |
| SEQ ID NO:535 | ′41663.1_gaiger.ABI′ | 60/190,479 | Mar. 17, 2000 |
| SEQ ID NO:536 | ′41667.1_gaiger.ABI′ | 60/190,479 | Mar. 17, 2000 |
| SEQ ID NO:537 | ′41751.1_gaiger.ABI′ | 60/190,479 | Mar. 17, 2000 |
| SEQ ID NO:538 | ′41944.1_gaiger.ABI′ | 60/190,479 | Mar. 17, 2000 |
| SEQ ID NO:539 | ′41986.1_gaiger.ABI′ | 60/190,479 | Mar. 17, 2000 |
| SEQ ID NO:540 | ′42101.1_gaiger.ABI′ | 60/190,479 | Mar. 17, 2000 |
| SEQ ID NO:541 | R0232:E07 | 60/206,201 | May 22, 2000 |
| SEQ ID NO:542 | R0233:A06 | 60/206,201 | May 22, 2000 |
| SEQ ID NO:543 | ′42324.1_gaiger.ABI′ | 60/200,779 | May 22, 2000 |
| SEQ ID NO:544 | ′42438.1_gaiger.ABI′ | 60/200,779 | May 22, 2000 |
| SEQ ID NO:545 | ′42625.1_gaiger.ABI′ | 60/200,779 | May 22, 2000 |
| SEQ ID NO:546 | ′42702.1_gaiger.ABI′ | 60/200,779 | May 22, 2000 |
| SEQ ID NO:547 | ′42709.1_gaiger.ABI′ | 60/200,779 | May 22, 2000 |
| SEQ ID NO:548 | R0234:E07 | 60/206,201 | May 22, 2000 |
| SEQ ID NO:549 | R0234:G11 | 60/206,201 | May 22, 2000 |
| SEQ ID NO:550 | R0236:A09 | 60/206,201 | May 22, 2000 |
| SEQ ID NO:551 | R0250:A05 | 60/222,903 | Aug. 03, 2000 |
| SEQ ID NO:552 | R0251:A07 | 60/222,903 | Aug. 03, 2000 |
| SEQ ID NO:553 | R0251:D01 | 60/222,903 | Aug. 03, 2000 |
| SEQ ID NO:554 | R0252:A08 | 60/222,903 | Aug. 03, 2000 |
| SEQ ID NO:555 | R0252:F11 | 60/222,903 | Aug. 03, 2000 |
| SEQ ID NO:556 | R0252:H01 | 60/222,903 | Aug. 03, 2000 |
| SEQ ID NO:557 | R0253:E09 | 60/222,903 | Aug. 03, 2000 |
| SEQ ID NO:558 | R0253:G05 | 60/222,903 | Aug. 03, 2000 |
| SEQ ID NO:559 | R0253:G06 | 60/222,903 | Aug. 03, 2000 |
| SEQ ID NO:560 | R0254:F07 | 60/223,416 | Aug. 04, 2000 |
| SEQ ID NO:561 | R0238:D06 | 60/223,416 | Aug. 04, 2000 |
| SEQ ID NO:562 | R0255:F12 | 60/223,416 | Aug. 04, 2000 |
| SEQ ID NO:563 | R0259:C04 | 60/223,416 | Aug. 04, 2000 |
| SEQ ID NO:564 | R0261:A09 | 60/223,416 | Aug. 04, 2000 |
| SEQ ID NO:565 | R0261:C10 | 60/223,416 | Aug. 04, 2000 |
| SEQ ID NO:566 | R0261:D06 | 60/223,416 | Aug. 04, 2000 |
| SEQ ID NO:567 | R0262:D04 | 60/223,416 | Aug. 04, 2000 |
| SEQ ID NO:568 | R0262:E03 | 60/223,416 | Aug. 04, 2000 |
| SEQ ID NO:569 | R0263:B11 | 60/223,416 | Aug. 04, 2000 |
| SEQ ID NO:570 | R0263:B09 | 60/223,416 | Aug. 04, 2000 |
| SEQ ID NO:571 | R0263:C08 | 60/223,416 | Aug. 04, 2000 |
| SEQ ID NO:572 | R0263:D11 | 60/223,416 | Aug. 04, 2000 |
| SEQ ID NO:573 | R0263:H10 | 60/223,416 | Aug. 04, 2000 |
| SEQ ID NO:574 | R0264:A03 | 60/223,416 | Aug. 04, 2000 |
| SEQ ID NO:575 | R0264:B11 | 60/223,416 | Aug. 04, 2000 |
| SEQ ID NO:576 | R0264:F11 | 60/223,416 | Aug. 04, 2000 |
| SEQ ID NO:577 | R0264:F05 | 60/223,416 | Aug. 04, 2000 |
| SEQ ID NO:578 | R0264:F09 | 60/223,416 | Aug. 04, 2000 |
| SEQ ID NO:579 | R0266:B02 | 60/223,416 | Aug. 04, 2000 |
| SEQ ID NO:580 | R0266:B03 | 60/223,416 | Aug. 04, 2000 |
| SEQ ID NO:581 | R0266:B04 | 60/223,416 | Aug. 04, 2000 |
| SEQ ID NO:582 | R0266:B06 | 60/223,416 | Aug. 04, 2000 |
| SEQ ID NO:583 | R0266:D05 | 60/223,416 | Aug. 04, 2000 |
| SEQ ID NO:584 | R0266:E01 | 60/223,416 | Aug. 04, 2000 |
| SEQ ID NO:585 | R0266:E03 | 60/223,416 | Aug. 04, 2000 |
| SEQ ID NO:586 | R0266:F03 | 60/223,416 | Aug. 04, 2000 |
| SEQ ID NO:587 | R0266:F09 | 60/223,416 | Aug. 04, 2000 |
| SEQ ID NO:588 | R0245:A02 | 60/223,416 | Aug. 04, 2000 |
| SEQ ID NO:589 | ′46403.1_gaiger.ABI′ | 60/200,545 | Apr. 27, 2000 |
| SEQ ID NO:590 | ′46458.1_gaiger.ABI′ | 60/200,545 | Apr. 27, 2000 |
| SEQ ID NO:591 | ′46977.1_gaiger.ABI′ | 60/200,545 | Apr. 27, 2000 |
| SEQ ID NO:592 | ′51658.1_gaiger.ABI′ | 60/206,201 | May 22, 2000 |
| SEQ ID NO:593 | ′51713.1_gaiger.ABI′ | 60/206,201 | May 22, 2000 |
| SEQ ID NO:594 | ′51731.1_gaiger.ABI′ | 60/206,201 | May 22, 2000 |
| SEQ ID NO:595 | ′51788.1_gaiger.ABI′ | 60/206,201 | May 22, 2000 |
| SEQ ID NO:596 | ′51850.1_gaiger.ABI′ | 60/206,201 | May 22, 2000 |
| SEQ ID NO:597 | ′51892.1_gaiger.ABI′ | 60/206,201 | May 22, 2000 |
| SEQ ID NO:598 | ′51900.1_gaiger.ABI′ | 60/206,201 | May 22, 2000 |
| SEQ ID NO:599 | ′51903.1_gaiger.ABI′ | 60/206,201 | May 22, 2000 |
| SEQ ID NO:600 | ′51960.1_gaiger.ABI′ | 60/206,201 | May 22, 2000 |
| SEQ ID NO:601 | 1405:A09 | 60/218,950 | Jul. 14, 2000 |
| SEQ ID NO:602 | 1405:D12 | 60/218,950 | Jul. 14, 2000 |
| SEQ ID NO:603 | 1405:D09 | 60/218,950 | Jul. 14, 2000 |
| SEQ ID NO:604 | 1405:E11 | 60/218,950 | Jul. 14, 2000 |
| SEQ ID NO:605 | ′52246.1_gaiger.ABI′ | 60/206,201 | May 22, 2000 |
| SEQ ID NO:606 | ′52333.1_gaiger.ABI′ | 60/206,201 | May 22, 2000 |
| SEQ ID NO:607 | 1408:A09 | 60/218,950 | Jul. 14, 2000 |
| SEQ ID NO:608 | 1408:B02 | 60/218,950 | Jul. 14, 2000 |
| SEQ ID NO:609 | 1408:C12 | 60/218,950 | Jul. 14, 2000 |
| SEQ ID NO:610 | 1408:D06 | 60/218,950 | Jul. 14, 2000 |
| SEQ ID NO:611 | ′41663.1_gaiger.ABI′ | 60/190,479 | Mar. 17, 2000 |
| SEQ ID NO:612 | ′41729.1_gaiger.ABI′ | 60/190,479 | Mar. 17, 2000 |
| SEQ ID NO:613 | ′41888.1_gaiger.ABI′ | 60/190,479 | Mar. 17, 2000 |
| SEQ ID NO:614 | ′41925.1_gaiger.ABI′ | 60/190,479 | Mar. 17, 2000 |
| SEQ ID NO:615 | ′41639.1_gaiger.ABI′ | 60/190,479 | Mar. 17, 2000 |
| SEQ ID NO:616 | ′41853.1_gaiger.ABI′ | 60/190,479 | Mar. 17, 2000 |
| SEQ ID NO:617 | ′41876.1_gaiger.ABI′ | 60/190,479 | Mar. 17, 2000 |
| SEQ ID NO:618 | ′41924.1_gaiger.ABI′ | 60/190,479 | Mar. 17, 2000 |
| SEQ ID NO:619 | ′41638.1_gaiger.ABI′ | 60/190,479 | Mar. 17, 2000 |
| SEQ ID NO:620 | ′41581.1_gaiger.ABI′ | 60/190,479 | Mar. 17, 2000 |
| SEQ ID NO:621 | ′41629.1_gaiger.ABI′ | 60/190,479 | Mar. 17, 2000 |
| SEQ ID NO:622 | ′41678.1_gaiger.ABI′ | 60/190,479 | Mar. 17, 2000 |
| SEQ ID NO:623 | ′41717.1_gaiger.ABI′ | 60/190,479 | Mar. 17, 2000 |
| SEQ ID NO:624 | ′41987.1_gaiger.ABI′ | 60/190,479 | Mar. 17, 2000 |
| SEQ ID NO:625 | R0233:F02 | 60/206,201 | May 22, 2000 |
| SEQ ID NO:626 | R0232:A08 | 60/206,201 | May 22, 2000 |
| SEQ ID NO:627 | R0233:B04 | 60/206,201 | May 22, 2000 |
| SEQ ID NO:628 | ′42041.1_gaiger.ABI′ | 60/190,479 | Mar. 17, 2000 |
| SEQ ID NO:629 | ′42387.1_gaiger.ABI′ | 60/200,779 | May 22, 2000 |
| SEQ ID NO:630 | ′42460.1;gaiger.ABI′ | 60/200,779 | May 22, 2000 |
| SEQ ID NO:631 | ′42407.1_gaiger.ABI′ | 60/200,779 | May 22, 2000 |
| SEQ ID NO:632 | ′42483.1;gaiger.ABI′ | 60/200,779 | May 22, 2000 |
| SEQ ID NO:633 | ′42350.1_gaiger.ABI′ | 60/200,779 | May 22, 2000 |
| SEQ ID NO:634 | ′42530.1;gaiger.ABI′ | 60/200,779 | May 22, 2000 |
| SEQ ID NO:635 | ′42523.1;gaiger.ABI′ | 60/200,779 | May 22, 2000 |
| SEQ ID NO:636 | R0235:D07 | 60/206,201 | May 22, 2000 |
| SEQ ID NO:637 | R0235:D12 | 60/206,201 | May 22, 2000 |
| SEQ ID NO:638 | R0236:H02 | 60/206,201 | May 22, 2000 |
| SEQ ID NO:639 | R0251:B12 | 60/222,903 | Aug. 03, 2000 |
| SEQ ID NO:640 | R0253:D09 | 60/222,903 | Aug. 03, 2000 |
| SEQ ID NO:641 | R0254:F10 | 60/223,416 | Aug. 04, 2000 |
| SEQ ID NO:642 | R0253:G01 | 60/222,903 | Aug. 03, 2000 |
| SEQ ID NO:643 | R0254:D02 | 60/223,416 | Aug. 04, 2000 |
| SEQ ID NO:644 | R0238:B06 | 60/223,416 | Aug. 04, 2000 |
| SEQ ID NO:645 | R0255:D01 | 60/223,416 | Aug. 04, 2000 |
| SEQ ID NO:646 | R0255:C02 | 60/223,416 | Aug. 04, 2000 |
| SEQ ID NO:647 | R0261:H04 | 60/223,416 | Aug. 04, 2000 |
| SEQ ID NO:648 | R0259:C04 | 60/223,416 | Aug. 04, 2000 |
| SEQ ID NO:649 | R0259:C06 | 60/223,416 | Aug. 04, 2000 |
| SEQ ID NO:650 | R0261:H08 | 60/223,416 | Aug. 04, 2000 |
| SEQ ID NO:651 | R0261:D03 | 60/223,416 | Aug. 04, 2000 |
| SEQ ID NO:652 | R0262:C04 | 60/223,416 | Aug. 04, 2000 |
| SEQ ID NO:653 | R0264:B08 | 60/223,416 | Aug. 04, 2000 |
| SEQ ID NO:654 | R0266:D03 | 60/223,416 | Aug. 04, 2000 |
| SEQ ID NO:655 | R0265:F12 | 60/223,416 | Aug. 04, 2000 |
| SEQ ID NO:656 | R0264:C03 | 60/223,416 | Aug. 04, 2000 |
| SEQ ID NO:657 | R0264:C04 | 60/223,416 | Aug. 04, 2000 |
| SEQ ID NO:658 | R0244:C02 | 60/223,416 | Aug. 04, 2000 |
| SEQ ID NO:659 | R0245:A02 | 60/223,416 | Aug. 04, 2000 |
| SEQ ID NO:660 | ′51734.1_gaiger.ABI′ | 60/206,201 | May 22, 2000 |
| SEQ ID NO:661 | ′51870.1_gaiger.ABI′ | 60/206,201 | May 22, 2000 |
| SEQ ID NO:662 | ′51791.1_gaiger.ABI′ | 60/206,201 | May 22, 2000 |
| SEQ ID NO:663 | ′51975.1_gaiger.ABI′ | 60/206,201 | May 22, 2000 |
| SEQ ID NO:664 | ′52260.1_gaiger.ABI′ | 60/206,201 | May 22, 2000 |
| SEQ ID NO:665 | TCL1 DNA | | |
| SEQ ID NO:666 | TCL1 Protein | | |
| SEQ ID NO:667 | Coronin1A DNA | | |
| SEQ ID NO:668 | Coronin1A Protein | | |

[0536] Table 8 identifies the putative open reading frames obtained from analyses of the cDNA sequences obtained in SEQ ID NO:1-SEQ ID NO:668 as described above. Shown are the sequence identifiers, the clone name and translation frame, and the start and stop nucleotides in the corresponding DNA sequence used to generate the polypeptide sequence of the open reading frame.

TABLE 8
TRANSLATION OF OPEN READING FRAMES OF IDENTIFIED cDNAs

| Sequence Identifier | | Translation | Beginning and |
|---|---|---|---|
| Number | ORF Identifier | Frame | Ending |
| SEQ ID NO: 669 | ‘41567.1_gaiger.ABI’_1 | frame 1 | from 1 to 79 |
| SEQ ID NO: 670 | ‘41567.1_gaiger.ABI’_2 | frame 3 from 11 to 134 | |
| SEQ ID NO: 671 | ‘41567.1_gaiger.ABI’_3 | frame −1 | from 86 to 135 |
| SEQ ID NO: 672 | ‘41567.1_gaiger.ABI’_4 | frame −3 | from 1 to 108 |
| SEQ ID NO: 673 | ‘41557.1_gaiger.ABI’_1 | frame 1 | from 16 to 73 |
| SEQ ID NO: 674 | ‘41557.1_gaiger.ABI’_2 | frame 2 | from 1 to 109 |
| SEQ ID NO: 675 | ‘41557.1_gaiger.ABI’_3 | frame −1 | from 11 to 110 |
| SEQ ID NO: 676 | ‘41557.1_gaiger.ABI’_4 | frame −3 | from 1 to 103 |
| SEQ ID NO: 677 | ‘41571.1_gaiger.ABI’_1 | frame 3 | from 1 to 89 |
| SEQ ID NO: 678 | ‘41571.1_gaiger.ABI’_2 | frame −1 | from 1 to 89 |
| SEQ ID NO: 679 | ‘41571.1_gaiger.ABI’_3 | frame −2 | from 27 to 85 |
| SEQ ID NO: 680 | ‘41594.1_gaiger.ABI’_1 | frame 3 | from 1 to 123 |
| SEQ ID NO: 681 | ‘41594.1_gaiger.ABI’_2 | frame −2 | from 1 to 85 |
| SEQ ID NO: 682 | ‘41605.1_gaiger.ABI’_1 | frame 3 | from 1 to 85 |
| SEQ ID NO: 683 | ‘41605.1_gaiger.ABI’_2 | frame −3 | from 1 to 123 |
| SEQ ID NO: 684 | ‘41627.1_gaiger.ABI’_1 | frame 1 | from 1 to 161 |
| SEQ ID NO: 685 | ‘41627.1_gaiger.ABI’_2 | frame 2 | from 102 to 161 |
| SEQ ID NO: 686 | ‘41627.1_gaiger.ABI’_3 | frame 3 | from 1 to 67 |
| SEQ ID NO: 687 | ‘41627.1_gaiger.ABI’_4 | frame 3 from 69 to 136 | |
| SEQ ID NO: 688 | ‘41627.1_gaiger.ABI’_5 | frame −2 | from 1 to 106 |
| SEQ ID NO: 689 | ‘41627.1_gaiger.ABI’_6 | frame −3 | from 67 to 160 |
| SEQ ID NO: 690 | ‘41620.1_gaiger.ABI’_1 | frame 1 | from 1 to 151 |
| SEQ ID NO: 691 | ‘41620.1_gaiger.ABI’_2 | frame 3 | from 1 to 59 |
| SEQ ID NO: 692 | ‘41620.1_gaiger.ABI’_3 | frame −1 | from 1 to 85 |
| SEQ ID NO: 693 | ‘41620.1_gaiger.ABI’_4 | frame −1 | from 100 to 152 |
| SEQ ID NO: 694 | ‘41620.1_gaiger.ABI’_5 | frame −2 | from 48 to 109 |
| SEQ ID NO: 695 | ‘41620.1_gaiger.ABI’_6 | frame −3 | from 69 to 119 |
| SEQ ID NO: 696 | ‘41628.1_gaiger.ABI’_1 | frame 1 | from 51 to 121 |
| SEQ ID NO: 697 | ‘41628.1_gaiger.ABI’_2 | frame 2 | from 1 to 97 |
| SEQ ID NO: 698 | ‘41628.1_gaiger.ABI’_3 | frame −3 | from 47 to 98 |
| SEQ ID NO: 699 | ‘41635.1_gaiger.ABI’_1 | frame 1 | from 1 to 70 |
| SEQ ID NO: 700 | ‘41635.1_gaiger.ABI’_2 | frame 2 | from 31 to 127 |
| SEQ ID NO: 701 | ‘41635.1_gaiger.ABI’_3 | frame −1 | from 56 to 127 |
| SEQ ID NO: 702 | ‘41635.1_gaiger.ABI’_4 | frame −2 | from 76 to 126 |
| SEQ ID NO: 703 | ‘41649.1_gaiger.ABI’_1 | frame 1 | from 17 to 77 |
| SEQ ID NO: 704 | ‘41649.1_gaiger.ABI’_2 | frame 3 | from 1 to 56 |
| SEQ ID NO: 705 | ‘41649.1_gaiger.ABI’_3 | frame −2 | from 12 to 87 |
| SEQ ID NO: 706 | ‘41648.1_gaiger.ABI’_1 | frame 3 | from 1 to 154 |
| SEQ ID NO: 707 | ‘41648.1_gaiger.ABI’_2 | frame −1 | from 1 to 67 |
| SEQ ID NO: 708 | ‘41648.1_gaiger.ABI’_3 | frame −2 | from 1 to 116 |
| SEQ ID NO: 709 | ‘41664.1_gaiger.ABI’_1 | frame 3 | from 1 to 125 |
| SEQ ID NO: 710 | ‘41664.1_gaiger.ABI’_2 | frame −2 | from 18 to 87 |
| SEQ ID NO: 711 | ‘41664.1_gaiger.ABI’_3 | frame −3 | from 1 to 53 |
| SEQ ID NO: 712 | ‘41667.1_gaiger.ABI’_1 | frame 1 | from 1 to 56 |
| SEQ ID NO: 713 | ‘41667.1_gaiger.ABI’_2 | frame 2 | from 1 to 56 |
| SEQ ID NO: 714 | ‘41667.1_gaiger.ABI’_3 | frame −2 | from 1 to 56 |
| SEQ ID NO: 715 | ‘41687.1_gaiger.ABI’_1 | frame 1 | from 35 to 154 |
| SEQ ID NO: 716 | ‘41687.1_gaiger.ABI’_2 | frame 2 | from 102 to 153 |
| SEQ ID NO: 717 | ‘41687.1_gaiger.ABI’_3 | frame −1 | from 50 to 109 |
| SEQ ID NO: 718 | ‘41687.1_gaiger.ABI’_4 | frame −3 | from 102 to 153 |
| SEQ ID NO: 719 | ‘41708.1_gaiger.ABI’_1 | frame 1 | from 1 to 53 |
| SEQ ID NO: 720 | ‘41708.1_gaiger.ABI’_2 | frame 2 | from 1 to 59 |
| SEQ ID NO: 721 | ‘41708.1_gaiger.ABI’_3 | frame 3 | from 1 to 68 |
| SEQ ID NO: 722 | ‘41708.1_gaiger.ABI’_4 | frame −1 | from 1 to 51 |
| SEQ ID NO: 723 | ‘41708.1_gaiger.ABI’_5 | frame −2 | from 17 to 68 |
| SEQ ID NO: 724 | ‘41721.1_gaiger.ABI’_1 | frame −2 | from 1 to 57 |
| SEQ ID NO: 725 | ‘41721.1_gaiger.ABI’_2 | frame −3 | from 1 to 97 |
| SEQ ID NO: 726 | ‘41746.1_gaiger.ABI’_1 | frame 1 | from 1 to 65 |
| SEQ ID NO: 727 | ‘41746.1_gaiger.ABI’_2 | frame 2 | from 1 to 60 |
| SEQ ID NO: 728 | ‘41746.1_gaiger.ABI’_3 | frame −2 | from 7 to 65 |
| SEQ ID NO: 729 | ‘41751.1_gaiger.ABI’_1 | frame 1 | from 27 to 82 |
| SEQ ID NO: 730 | ‘41751.1_gaiger.ABI’_2 | frame 3 | from 1 to 50 |
| SEQ ID NO: 731 | ‘41751.1_gaiger.ABI’_3 | frame −2 | from 1 to 70 |
| SEQ ID NO: 732 | ‘41751.1_gaiger.ABI’_4 | frame −3 | from 1 to 53 |
| SEQ ID NO: 733 | ‘41762.1_gaiger.ABI’_1 | frame 1 | from 1 to 76 |
| SEQ ID NO: 734 | ‘41762.1_gaiger.ABI’_2 | frame 2 | from 1 to 96 |
| SEQ ID NO: 735 | ‘41793.1_gaiger.ABI’_1 | frame 3 | from 1 to 85 |
| SEQ ID NO: 736 | ‘41793.1_gaiger.ABI’_2 | frame −3 | from 1 to 87 |
| SEQ ID NO: 737 | ‘41794.1_gaiger.ABI’_1 | frame 1 | from 1 to 125 |
| SEQ ID NO: 738 | ‘41794.1_gaiger.ABI’_2 | frame −3 | from 1 to 85 |
| SEQ ID NO: 739 | ‘41807.1_gaiger.ABI’_1 | frame 1 | from 1 to 67 |
| SEQ ID NO: 740 | ‘41807.1_gaiger.ABI’_2 | frame 2 | from 11 to 107 |
| SEQ ID NO: 741 | ‘41807.1_gaiger.ABI’_3 | frame −1 | from 51 to 107 |
| SEQ ID NO: 742 | ‘41802.1_gaiger.ABI’_1 | frame 3 | from 1 to 143 |
| SEQ ID NO: 743 | ‘41802.1_gaiger.ABI’_2 | frame −2 | from 4 to 56 |
| SEQ ID NO: 744 | ‘41802.1_gaiger.ABI’_3 | frame −3 | from 1 to 105 |
| SEQ ID NO: 745 | ‘41804.1_gaiger.ABI’_1 | frame 1 | from 1 to 59 |
| SEQ ID NO: 746 | ‘41804.1_gaiger.ABI’_2 | frame 2 | from 15 to 92 |
| SEQ ID NO: 747 | ‘41804.1_gaiger.ABI’_3 | frame 3 | from 33 to 82 |
| SEQ ID NO: 748 | ‘41804.1_gaiger.ABI’_4 | frame 3 | from 84 to 139 |
| SEQ ID NO: 749 | ‘41804.1_gaiger.ABI’_5 | frame −2 | from 22 to 139 |
| SEQ ID NO: 750 | ‘41804.1_gaiger.ABI’_6 | frame −3 | from 1 to 60 |
| SEQ ID NO: 751 | ‘41810.1_gaiger.ABI’_1 | frame 1 | from 1 to 67 |
| SEQ ID NO: 752 | ‘41810.1_gaiger.ABI’_2 | frame −1 | from 1 to 67 |
| SEQ ID NO: 753 | ‘41847.1_gaiger.ABI’_1 | frame −1 | from 1 to 97 |
| SEQ ID NO: 754 | ‘41847.1_gaiger.ABI’_2 | frame −3 | from 1 to 56 |
| SEQ ID NO: 755 | ‘41865.1_gaiger.ABI’_1 | frame 1 | from 1 to 139 |
| SEQ ID NO: 756 | ‘41865.1_gaiger.ABI’_2 | frame 3 | from 58 to 108 |
| SEQ ID NO: 757 | ‘41865.1_gaiger.ABI’_3 | frame −2 | from 1 to 92 |
| SEQ ID NO: 758 | ‘41859.1_gaiger.ABI’_1 | frame 1 | from 86 to 138 |
| SEQ ID NO: 759 | ‘41859.1_gaiger.ABI’_2 | frame 3 | from 1 to 108 |
| SEQ ID NO: 760 | ‘41859.1_gaiger.ABI’_3 | frame −1 | from 18 to 95 |
| SEQ ID NO: 761 | ‘41859.1_gaiger.ABI’_4 | frame −3 | from 27 to 150 |
| SEQ ID NO: 762 | ‘41878.1_gaiger.ABI’_1 | frame 2 | from 70 to 131 |
| SEQ ID NO: 763 | ‘41878.1_gaiger.ABI’_2 | frame −3 | from 30 to 88 |
| SEQ ID NO: 764 | ‘41869.1_gaiger.ABI’_1 | frame 1 | from 41 to 127 |
| SEQ ID NO: 765 | ‘41869.1_gaiger.ABI’_2 | frame 3 | from 1 to 55 |
| SEQ ID NO: 766 | ‘41869.1_gaiger.ABI’_3 | frame −3 | from 1 to 121 |
| SEQ ID NO: 767 | ‘41888.1_gaiger.ABI’_1 | frame 3 | from 22 to 81 |
| SEQ ID NO: 768 | ‘41907.1_gaiger.ABI’_1 | frame 1 | from 1 to 73 |
| SEQ ID NO: 769 | ‘41907.1_gaiger.ABI’_2 | frame 2 | from 29 to 102 |
| SEQ ID NO: 770 | ‘41907.1_gaiger.ABI’_3 | frame 3 | from 47 to 96 |
| SEQ ID NO: 771 | ‘41907.1_gaiger.ABI’_4 | frame −1 | from 42 to 103 |
| SEQ ID NO: 772 | ‘41907.1_gaiger.ABI’_5 | frame −2 | from 44 to 102 |
| SEQ ID NO: 773 | ‘41907.1_gaiger.ABI’_6 | frame −3 | from 1 to 102 |
| SEQ ID NO: 774 | ‘41908.1_gaiger.ABI’_1 | frame 1 | from 1 to 102 |
| SEQ ID NO: 775 | ‘41908.1_gaiger.ABI’_2 | frame 3 | from 67 to 120 |
| SEQ ID NO: 776 | ‘41908.1_gaiger.ABI’_3 | frame −1 | from 54 to 121 |
| SEQ ID NO: 777 | ‘41908.1_gaiger.ABI’_4 | frame −2 | from 1 to 50 |
| SEQ ID NO: 778 | ‘41912.1_gaiger.ABI’_1 | frame 2 | from 1 to 138 |
| SEQ ID NO: 779 | ‘41912.1_gaiger.ABI’_2 | frame −2 | from 34 to 93 |
| SEQ ID NO: 780 | ‘41912.1_gaiger.ABI’_3 | frame −3 | from 60 to 125 |
| SEQ ID NO: 781 | ‘41916.1_gaiger.ABI’_1 | frame 2 | from 1 to 84 |
| SEQ ID NO: 782 | ‘41916.1_gaiger.ABI’_2 | frame −1 | from 1 to 84 |
| SEQ ID NO: 783 | ‘41925.1_gaiger.ABI’_1 | frame 1 | from 9 to 59 |
| SEQ ID NO: 784 | ‘41925.1_gaiger.ABI’_2 | frame 2 | from 1 to 59 |
| SEQ ID NO: 785 | ‘41925.1_gaiger.ABI’_3 | frame −2 | from 1 to 59 |
| SEQ ID NO: 786 | ‘41925.1_gaiger.ABI’_4 | frame −3 | from 1 to 58 |
| SEQ ID NO: 787 | ‘41929.1_gaiger.ABI’_1 | frame 1 | from 1 to 52 |
| SEQ ID NO: 788 | ‘41930.1_gaiger.ABI’_1 | frame −1 | from 1 to 55 |
| SEQ ID NO: 789 | ‘41930.1_gaiger.ABI’_2 | frame −2 | from 1 to 95 |
| SEQ ID NO: 790 | ‘41933.1_gaiger.ABI’_1 | frame 1 | from 1 to 90 |
| SEQ ID NO: 791 | ‘41933.1_gaiger.ABI’_2 | frame 2 from 36 to 90 | |
| SEQ ID NO: 792 | ‘41944.1_gaiger.ABI’_1 | frame 1 | from 1 to 56 |
| SEQ ID NO: 793 | ‘41944.1_gaiger.ABI’_2 | frame 2 from 1 to 177 | |
| SEQ ID NO: 794 | ‘41944.1_gaiger.ABI’_3 | frame 3 | from 37 to 92 |
| SEQ ID NO: 795 | ‘41944.1_gaiger.ABI’_4 | frame −1 | from 47 to 116 |
| SEQ ID NO: 796 | ‘41944.1_gaiger.ABI’_5 | frame −1 | from 125 to 177 |
| SEQ ID NO: 797 | ‘41944.1_gaiger.ABI’_6 | frame −2 | from 32 to 177 |
| SEQ ID NO: 798 | ‘41944.1_gaiger.ABI’_7 | frame −3 | from 120 to 177 |
| SEQ ID NO: 799 | ‘41986.1_gaiger.ABI’_1 | frame 3 | from 1 to 110 |
| SEQ ID NO: 800 | ‘41986.1_gaiger.ABI’_2 | frame −1 | from 1 to 110 |
| SEQ ID NO: 801 | ‘41986.1_gaiger.ABI’_3 | frame −3 | from 22 to 91 |
| SEQ ID NO: 802 | ‘42017.1_gaiger.ABI’_1 | frame 2 | from 78 to 130 |
| SEQ ID NO: 803 | ‘42017.1_gaiger.ABI’_2 | frame 3 | from 1 to 85 |
| SEQ ID NO: 804 | ‘42017.1_gaiger.ABI’_3 | frame −3 | from 1 to 129 |
| SEQ ID NO: 805 | ‘42033.1_gaiger.ABI’_1 | frame 3 | from 1 to 140 |
| SEQ ID NO: 806 | ‘42033.1_gaiger.ABI’_2 | frame −2 | from 1 to 71 |
| SEQ ID NO: 807 | ‘42033.1_gaiger.ABI’_3 | frame −3 | from 1 to 120 |
| SEQ ID NO: 808 | ‘42040.1_gaiger.ABI’_1 | frame 3 | from 1 to 80 |
| SEQ ID NO: 809 | ‘42041.1_gaiger.ABI’_1 | frame −3 | from 1 to 63 |
| SEQ ID NO: 810 | ‘42053.1_gaiger.ABI’_1 | frame 3 | from 1 to 123 |
| SEQ ID NO: 811 | ‘42053.1_gaiger.ABI’_2 | frame −1 | from 17 to 66 |
| SEQ ID NO: 812 | ‘42053.1_gaiger.ABI’_3 | frame −3 | from 1 to 85 |
| SEQ ID NO: 813 | ‘42101.1_gaiger.ABI’_1 | frame 3 | from 53 to 123 |
| SEQ ID NO: 814 | ‘42101.1_gaiger.ABI’_2 | frame −2 | from 1 to 124 |
| SEQ ID NO: 815 | ‘42131.1_gaiger.ABI’_1 | frame 3 | from 1 to 114 |
| SEQ ID NO: 816 | ‘42131.1_gaiger.ABI’_2 | frame −1 | from 8 to 77 |
| SEQ ID NO: 817 | R0232:A08_1 | frame −2 | from 4 to 64 |
| SEQ ID NO: 818 | R0232:C10_1 | frame 3 | from 1 to 65 |
| SEQ ID NO: 819 | R0232:C10_2 | frame −2 | from 1 to 61 |
| SEQ ID NO: 820 | R0233:A12_1 | frame 3 | from 1 to 141 |
| SEQ ID NO: 821 | R0233:A12_2 | frame −3 | from 24 to 124 |
| SEQ ID NO: 822 | R0233:A06_1 | frame 1 | from 12 to 77 |
| SEQ ID NO: 823 | R0233:A06_2 | frame 3 | from 2 to 76 |
| SEQ ID NO: 824 | R0233:A06_3 | frame −3 | from 1 to 59 |
| SEQ ID NO: 825 | R0233:A08_1 | frame 1 | from 1 to 59 |
| SEQ ID NO: 826 | R0233:A08_2 | frame −1 | from 1 to 63 |
| SEQ ID NO: 827 | R0233:B10_1 | frame 3 | from 1 to 85 |
| SEQ ID NO: 828 | R0233:B10_2 | frame −3 | from 1 to 85 |
| SEQ ID NO: 829 | R0233:B04_1 | frame 2 | from 76 to 136 |
| SEQ ID NO: 830 | R0233:B04_2 | frame −3 | from 1 to 103 |
| SEQ ID NO: 831 | R0233:C04_1 | frame 3 | from 1 to 83 |
| SEQ ID NO: 832 | R0233:C04_2 | frame −3 | from 1 to 119 |
| SEQ ID NO: 833 | R0233:D01_1 | frame 3 | from 1 to 85 |
| SEQ ID NO: 834 | R0233:D01_2 | frame −1 | from 2 to 122 |
| SEQ ID NO: 835 | R0233:D02_1 | frame 3 | from 1 to 127 |
| SEQ ID NO: 836 | R0233:D02_2 | frame −1 | from 1 to 127 |
| SEQ ID NO: 837 | R0233:F10_1 | frame 3 | from 1 to 85 |
| SEQ ID NO: 838 | R0233:F10_2 | frame −3 | from 1 to 123 |
| SEQ ID NO: 839 | R0233:F05_1 | frame 3 | from 1 to 85 |
| SEQ ID NO: 840 | R0233:F05_2 | frame −2 | from 58 to 111 |
| SEQ ID NO: 841 | R0233:F05_3 | frame −3 | from 1 to 110 |
| SEQ ID NO: 842 | R0233:F07_1 | frame 3 | from 1 to 85 |
| SEQ ID NO: 843 | R0233:F07_2 | frame −1 | from 1 to 125 |
| SEQ ID NO: 844 | ‘42324.1_gaiger.ABI’_1 | frame 1 | from 1 to 94 |
| SEQ ID NO: 845 | ‘42324.1_gaiger.ABI’_2 | frame 2 | from 1 to 57 |
| SEQ ID NO: 846 | ‘42324.1_gaiger.ABI’_3 | frame 3 | from 38 to 130 |
| SEQ ID NO: 847 | ‘42324.1_gaiger.ABI’_4 | frame −1 | from 10 to 130 |
| SEQ ID NO: 848 | ‘42324.1_gaiger.ABI’_5 | frame −2 | from 1 to 54 |
| SEQ ID NO: 849 | ‘42324.1_gaiger.ABI’_6 | frame −2 | from 72 to 130 |
| SEQ ID NO: 850 | ‘42324.1_gaiger.ABI’_7 | frame −3 | from 1 to 67 |
| SEQ ID NO: 851 | ‘42324.1_gaiger.ABI’_8 | frame −3 | from 76 to 130 |
| SEQ ID NO: 852 | ‘42349.1_gaiger.ABI’_1 | frame 3 | from 1 to 146 |
| SEQ ID NO: 853 | ‘42349.1_gaiger.ABI’_2 | frame −2 | from 1 to 137 |
| SEQ ID NO: 854 | ‘42379.1_gaiger.ABI’_1 | frame 3 | from 1 to 59 |
| SEQ ID NO: 855 | ‘42379.1_gaiger.ABI’_2 | frame −2 | from 1 to 59 |
| SEQ ID NO: 856 | ‘42396.1_gaiger.ABI’_1 | frame −1 | from 1 to 50 |
| SEQ ID NO: 857 | ‘42396.1_gaiger.ABI’_2 | frame −2 | from 22 to 82 |
| SEQ ID NO: 858 | ‘42424.1_gaiger.ABI’_1 | frame 3 | from 1 to 85 |
| SEQ ID NO: 859 | ‘42424.1_gaiger.ABI’_2 | frame −3 | from 1 to 123 |
| SEQ ID NO: 860 | ‘42438.1_gaiger.ABI’_1 | frame 1 | from 1 to 123 |
| SEQ ID NO: 861 | ‘42438.1_gaiger.ABI’_2 | frame −3 | from 53 to 123 |
| SEQ ID NO: 862 | ‘42447.1_gaiger.ABI’_1 | frame 1 | from 1 to 57 |
| SEQ ID NO: 863 | ‘42447.1_gaiger.ABI’_2 | frame 2 | from 33 to 97 |
| SEQ ID NO: 864 | ‘42447.1_gaiger.ABI’_3 | frame 3 | from 1 to 72 |
| SEQ ID NO: 865 | ‘42447.1_gaiger.ABI’_4 | frame −2 | from 26 to 97 |
| SEQ ID NO: 866 | ‘42524.1;gaiger.ABI’_1 | frame 2 | from 1 to 69 |
| SEQ ID NO: 867 | ‘42524.1;gaiger.ABI’_2 | frame 3 | from 1 to 59 |
| SEQ ID NO: 868 | ‘42555.1;gaiger.ABI’_1 | frame 3 | from 1 to 115 |
| SEQ ID NO: 869 | ‘42555.1;gaiger.ABI’_2 | frame −2 | from 35 to 131 |
| SEQ ID NO: 870 | ‘42555.1;gaiger.ABI’_3 | frame −3 | from 1 to 75 |
| SEQ ID NO: 871 | ‘42560.1;gaiger.ABI’_1 | frame 1 | from 1 to 67 |
| SEQ ID NO: 872 | ‘42560.1;gaiger.ABI’_2 | frame −3 | from 1 to 66 |
| SEQ ID NO: 873 | ‘42594.1_gaiger.ABI’_1 | frame 2 | from 56 to 118 |
| SEQ ID NO: 874 | ‘42594.1_gaiger.ABI’_2 | frame −1 | from 42 to 118 |
| SEQ ID NO: 875 | ‘42602.1_gaiger.ABI’_1 | frame 1 | from 1 to 97 |
| SEQ ID NO: 876 | ‘42602.1_gaiger.ABI’_2 | frame 3 | from 1 to 76 |
| SEQ ID NO: 877 | ‘42665.1_gaiger.ABI’_1 | frame 1 | from 1 to 94 |
| SEQ ID NO: 878 | ‘42665.1_gaiger.ABI’_2 | frame 3 | from 35 to 94 |
| SEQ ID NO: 879 | ‘42665.1_gaiger.ABI’_3 | frame −1 | from 35 to 94 |
| SEQ ID NO: 880 | ‘42665.1_gaiger.ABI’_4 | frame −3 | from 12 to 73 |
| SEQ ID NO: 881 | ‘42703.1_gaiger.ABI’_1 | frame 2 | from 25 to 95 |
| SEQ ID NO: 882 | ‘42703.1_gaiger.ABI’_2 | frame −2 | from 10 to 82 |
| SEQ ID NO: 883 | ‘42709.1_gaiger.ABI’_1 | frame 2 | from 1 to 118 |
| SEQ ID NO: 884 | ‘42709.1_gaiger.ABI’_2 | frame −3 | from 53 to 118 |
| SEQ ID NO: 885 | ‘42756.1_gaiger.ABI’_1 | frame 3 | from 1 to 109 |
| SEQ ID NO: 886 | ‘42756.1_gaiger.ABI’_2 | frame −2 | from 1 to 85 |
| SEQ ID NO: 887 | ‘42756.1_gaiger.ABI’_3 | frame −3 | from 1 to 51 |
| SEQ ID NO: 888 | R0234:A06_1 | frame 3 | from 1 to 118 |
| SEQ ID NO: 889 | R0234:A06_2 | frame −2 | from 1 to 80 |
| SEQ ID NO: 890 | R0234:A07_1 | frame 1 | from 1 to 62 |
| SEQ ID NO: 891 | R0234:A07_2 | frame 2 | from 6 to 102 |
| SEQ ID NO: 892 | R0234:A07_3 | frame −1 | from 51 to 102 |
| SEQ ID NO: 893 | R0234:B03_1 | frame 3 | from 1 to 68 |
| SEQ ID NO: 894 | R0234:B03_2 | frame −3 | from 2 to 63 |
| SEQ ID NO: 895 | R0234:B06_1 | frame 3 | from 1 to 85 |
| SEQ ID NO: 896 | R0234:B06_2 | frame −3 | from 1 to 123 |
| SEQ ID NO: 897 | R0234:B09_1 | frame 1 | from 1 to 115 |
| SEQ ID NO: 898 | R0234:B09_2 | frame −3 | from 53 to 115 |
| SEQ ID NO: 899 | R0234:C02_1 | frame 3 | from 1 to 85 |
| SEQ ID NO: 900 | R0234:C02_2 | frame 3 | from 87 to 139 |
| SEQ ID NO: 901 | R0234:C02_3 | frame −3 | from 1 to 139 |
| SEQ ID NO: 902 | R0234:C06_1 | frame 3 | from 1 to 85 |
| SEQ ID NO: 903 | R0234:C06_2 | frame −2 | from 1 to 107 |
| SEQ ID NO: 904 | R0234:D08_1 | frame 3 | from 1 to 55 |
| SEQ ID NO: 905 | R0234:D08_2 | frame −1 | from 1 to 55 |
| SEQ ID NO: 906 | R0234:E01_1 | frame 3 | from 1 to 101 |
| SEQ ID NO: 907 | R0234:E01_2 | frame −3 | from 1 to 101 |
| SEQ ID NO: 908 | R0234:E12_1 | frame 2 | from 78 to 134 |
| SEQ ID NO: 909 | R0234:E12_2 | frame 3 | from 1 to 189 |
| SEQ ID NO: 910 | R0234:E12_3 | frame −2 | from 8 to 120 |
| SEQ ID NO: 911 | R0234:E12_4 | frame −3 | from 28 to 77 |
| SEQ ID NO: 912 | R0234:E12_5 | frame −3 | from 105 to 189 |
| SEQ ID NO: 913 | R0234:E02_1 | frame 3 | from 1 to 85 |
| SEQ ID NO: 914 | R0234:E02_2 | frame −3 | from 1 to 111 |
| SEQ ID NO: 915 | R0234:E04_1 | frame 1 | from 40 to 114 |
| SEQ ID NO: 916 | R0234:E04_2 | frame 3 | from 1 to 54 |
| SEQ ID NO: 917 | R0234:E04_3 | frame −1 | from 1 to 109 |
| SEQ ID NO: 918 | R0234:E05_1 | frame 3 | from 1 to 85 |
| SEQ ID NO: 919 | R0234:E05_2 | frame −1 | from 1 to 52 |
| SEQ ID NO: 920 | R0234:E05_3 | frame −2 | from 1 to 121 |
| SEQ ID NO: 921 | R0234:F02_1 | frame 3 | from 1 to 109 |
| SEQ ID NO: 922 | R0234:F02_2 | frame −2 | from 1 to 109 |
| SEQ ID NO: 923 | R0234:F04_1 | frame 3 | from 1 to 83 |
| SEQ ID NO: 924 | R0234:F04_2 | frame −2 | from 1 to 122 |
| SEQ ID NO: 925 | R0234:G01_1 | frame 3 | from 1 to 84 |
| SEQ ID NO: 926 | R0234:G11_1 | frame 3 | from 1 to 121 |
| SEQ ID NO: 927 | R0234:G11_2 | frame −2 | from 51 to 121 |
| SEQ ID NO: 928 | R0234:G12_1 | frame 2 | from 1 to 150 |
| SEQ ID NO: 929 | R0234:G12_2 | frame −2 | from 61 to 113 |
| SEQ ID NO: 930 | R0234:G12_3 | frame −3 | from 24 to 124 |
| SEQ ID NO: 931 | R0234:G02_1 | frame 3 | from 1 to 123 |
| SEQ ID NO: 932 | R0234:G02_2 | frame −3 | from 1 to 85 |
| SEQ ID NO: 933 | R0234:G04_1 | frame 2 | from 1 to 150 |
| SEQ ID NO: 934 | R0234:G04_2 | frame −3 | from 24 to 124 |
| SEQ ID NO: 935 | R0234:G09_1 | frame 1 | from 1 to 61 |
| SEQ ID NO: 936 | R0234:G09_2 | frame 1 | from 74 to 187 |
| SEQ ID NO: 937 | R0234:G09_3 | frame 2 | from 123 to 186 |
| SEQ ID NO: 938 | R0234:G09_4 | frame 3 | from 1 to 82 |
| SEQ ID NO: 939 | R0234:G09_5 | frame 3 | from 84 to 171 |
| SEQ ID NO: 940 | R0234:G09_6 | frame −2 | from 90 to 155 |
| SEQ ID NO: 941 | R0234:G09_7 | frame −3 | from 29 to 164 |
| SEQ ID NO: 942 | R0234:H01_1 | frame 3 | from 1 to 84 |
| SEQ ID NO: 943 | R0234:H06_1 | frame 3 | from 1 to 85 |
| SEQ ID NO: 944 | R0234:H06_2 | frame −1 | from 1 to 121 |
| SEQ ID NO: 945 | R0235:B01_1 | frame 3 | from 1 to 119 |
| SEQ ID NO: 946 | R0235:B01_2 | frame −1 | from 8 to 128 |
| SEQ ID NO: 947 | R0235:B01_3 | frame −3 | from 3 to 58 |
| SEQ ID NO: 948 | R0235:B11_1 | frame 3 | from 1 to 62 |
| SEQ ID NO: 949 | R0235:B04_1 | frame 3 | from 1 to 101 |
| SEQ ID NO: 950 | R0235:B04_2 | frame −1 | from 1 to 102 |
| SEQ ID NO: 951 | R0235:B05_1 | frame 3 | from 1 to 67 |
| SEQ ID NO: 952 | R0235:B05_2 | frame −1 | from 1 to 67 |
| SEQ ID NO: 953 | R0235:B07_1 | frame 3 | from 1 to 83 |
| SEQ ID NO: 954 | R0235:B09_1 | frame 1 | from 1 to 58 |
| SEQ ID NO: 955 | R0235:B09_2 | frame 2 | from 2 to 78 |
| SEQ ID NO: 956 | R0235:B09_3 | frame 3 | from 34 to 88 |
| SEQ ID NO: 957 | R0235:C07_1 | frame 3 | from 1 to 69 |
| SEQ ID NO: 958 | R0235:C07_2 | frame −2 | from 1 to 69 |
| SEQ ID NO: 959 | R0235:C09_1 | frame −1 | from 1 to 97 |
| SEQ ID NO: 960 | R0235:C09_2 | frame −3 | from 1 to 56 |
| SEQ ID NO: 961 | R0235:D11_1 | frame 1 | from 1 to 87 |
| SEQ ID NO: 962 | R0235:D11_2 | frame 2 | from 74 to 136 |
| SEQ ID NO: 963 | R0235:D11_3 | frame 3 | from 1 to 76 |
| SEQ ID NO: 964 | R0235:D11_4 | frame −1 | from 15 to 85 |
| SEQ ID NO: 965 | R0235:D11_5 | frame −2 | from 6 to 94 |
| SEQ ID NO: 966 | R0235:E10_1 | frame 3 | from 1 to 66 |
| SEQ ID NO: 967 | R0235:E12_1 | frame 3 | from 1 to 51 |
| SEQ ID NO: 968 | R0235:E12_2 | frame −1 | from 1 to 51 |
| SEQ ID NO: 969 | R0235:E02_1 | frame 3 | from 1 to 52 |
| SEQ ID NO: 970 | R0235:F01_1 | frame 3 | from 1 to 66 |
| SEQ ID NO: 971 | R0235:F02_1 | frame 3 | from 1 to 56 |
| SEQ ID NO: 972 | R0235:F02_2 | frame −2 | from 11 to 65 |
| SEQ ID NO: 973 | R0235:F06_1 | frame 3 | from 24 to 124 |
| SEQ ID NO: 974 | R0235:F06_2 | frame −2 | from 1 to 150 |
| SEQ ID NO: 975 | R0235:F09_1 | frame 3 | from 1 to 53 |
| SEQ ID NO: 976 | R0235:F09_2 | frame −1 | from 1 to 53 |
| SEQ ID NO: 977 | R0235:G07_1 | frame 3 | from 1 to 97 |
| SEQ ID NO: 978 | R0235:G07_2 | frame −2 | from 1 to 59 |
| SEQ ID NO: 979 | R0235:H06_1 | frame 3 | from 1 to 83 |
| SEQ ID NO: 980 | R0235:H06_2 | frame −3 | from 1 to 60 |
| SEQ ID NO: 981 | R0235:H08_1 | frame 3 | from 1 to 123 |
| SEQ ID NO: 982 | R0235:H08_2 | frame −3 | from 1 to 123 |
| SEQ ID NO: 983 | R0236:A06_1 | frame 2 | from 1 to 150 |
| SEQ ID NO: 984 | R0236:A06_2 | frame −2 | from 25 to 125 |
| SEQ ID NO: 985 | R0236:A09_1 | frame 3 | from 1 to 122 |
| SEQ ID NO: 986 | R0236:A09_2 | frame −1 | from 54 to 122 |
| SEQ ID NO: 987 | R0236:C01_1 | frame 3 | from 1 to 118 |
| SEQ ID NO: 988 | R0236:C01_2 | frame −2 | from 1 to 80 |
| SEQ ID NO: 989 | R0236:F12_1 | frame 1 | from 17 to 79 |
| SEQ ID NO: 990 | R0236:F12_2 | frame 3 | from 1 to 56 |
| SEQ ID NO: 991 | R0236:F05_1 | frame 3 | from 1 to 123 |
| SEQ ID NO: 992 | R0236:F05_2 | frame −3 | from 1 to 85 |
| SEQ ID NO: 993 | R0236:F06_1 | frame 3 | from 1 to 123 |
| SEQ ID NO: 994 | R0236:F06_2 | frame −3 | from 1 to 85 |
| SEQ ID NO: 995 | R0236:G08_1 | frame 2 | from 1 to 88 |
| SEQ ID NO: 996 | R0236:G08_2 | frame 3 | from 34 to 88 |
| SEQ ID NO: 997 | R0249:A11_1 | frame 3 | from 1 to 83 |
| SEQ ID NO: 998 | R0249:A11_2 | frame −3 | from 1 to 121 |
| SEQ ID NO: 999 | R0249:B04_1 | frame −2 | from 1 to 56 |
| SEQ ID NO: 1000 | R0249:B04_2 | frame −3 | from 1 to 96 |
| SEQ ID NO: 1001 | R0249:B06_1 | frame −1 | from 1 to 81 |
| SEQ ID NO: 1002 | R0249:D11_1 | frame 2 | from 1 to 170 |
| SEQ ID NO: 1003 | R0249:D11_2 | frame 3 | from 41 to 101 |
| SEQ ID NO: 1004 | R0249:D11_3 | frame 3 | from 103 to 153 |
| SEQ ID NO: 1005 | R0249:D11_4 | frame −1 | from 1 to 59 |
| SEQ ID NO: 1006 | R0249:D11_5 | frame −1 | from 79 to 139 |
| SEQ ID NO: 1007 | R0249:D11_6 | frame −3 | from 65 to 170 |
| SEQ ID NO: 1008 | R0249:E11_1 | frame 3 | from 1 to 59 |
| SEQ ID NO: 1009 | R0249:E11_2 | frame −3 | from 1 to 59 |
| SEQ ID NO: 1010 | R0249:E06_1 | frame 3 | from 1 to 85 |
| SEQ ID NO: 1011 | R0249:E06_2 | frame −3 | from 1 to 123 |
| SEQ ID NO: 1012 | R0249:H09_1 | frame 3 | from 1 to 83 |
| SEQ ID NO: 1013 | R0249:H09_2 | frame −2 | from 1 to 83 |
| SEQ ID NO: 1014 | R0250:C09_1 | frame 1 | from 1 to 55 |
| SEQ ID NO: 1015 | R0250:C09_2 | frame 1 | from 117 to 166 |
| SEQ ID NO: 1016 | R0250:C09_3 | frame 3 | from 30 to 88 |
| SEQ ID NO: 1017 | R0250:C09_4 | frame 3 | from 90 to 165 |
| SEQ ID NO: 1018 | R0250:C09_5 | frame −1 | from 74 to 125 |
| SEQ ID NO: 1019 | R0250:C09_6 | frame −3 | from 1 to 165 |
| SEQ ID NO: 1020 | R0250:D10_1 | frame 3 | from 1 to 85 |
| SEQ ID NO: 1021 | R0250:D10_2 | frame −3 | from 1 to 123 |
| SEQ ID NO: 1022 | R0250:D03_1 | frame 1 | from 17 to 66 |
| SEQ ID NO: 1023 | R0250:D03_2 | frame 3 | from 1 to 80 |
| SEQ ID NO: 1024 | R0250:D03_3 | frame −2 | from 1 to 80 |
| SEQ ID NO: 1025 | R0250:E09_1 | frame 3 | from 1 to 101 |
| SEQ ID NO: 1026 | R0250:E09_2 | frame −3 | from 1 to 63 |
| SEQ ID NO: 1027 | R0250:F09_1 | frame 2 | from 62 to 136 |
| SEQ ID NO: 1028 | R0250:F09_2 | frame 3 | from 69 to 145 |
| SEQ ID NO: 1029 | R0250:F09_3 | frame −1 | from 1 to 82 |
| SEQ ID NO: 1030 | R0250:F09_4 | frame −1 | from 84 to 167 |
| SEQ ID NO: 1031 | R0250:F09_5 | frame −2 | from 1 to 60 |
| SEQ ID NO: 1032 | R0250:G01_1 | frame 1 | from 17 to 87 |
| SEQ ID NO: 1033 | R0250:G01_2 | frame 2 | from 1 to 77 |
| SEQ ID NO: 1034 | R0250:G01_3 | frame 2 | from 126 to 179 |
| SEQ ID NO: 1035 | R0250:G01_4 | frame −1 | from 111 to 160 |
| SEQ ID NO: 1036 | R0250:G01_5 | frame −2 | from 33 to 101 |
| SEQ ID NO: 1037 | R0250:G01_6 | frame −3 | from 1 to 61 |
| SEQ ID NO: 1038 | R0250:G01_7 | frame −3 | from 63 to 121 |
| SEQ ID NO: 1039 | R0250:G01_8 | frame −3 | from 123 to 178 |
| SEQ ID NO: 1040 | R0251:A12_1 | frame 3 | from 1 to 85 |
| SEQ ID NO: 1041 | R0251:A12_2 | frame −3 | from 1 to 123 |
| SEQ ID NO: 1042 | R0251:A05_1 | frame 3 | from 1 to 96 |
| SEQ ID NO: 1043 | R0251:A05_2 | frame −1 | from 1 to 96 |
| SEQ ID NO: 1044 | R0251:B09_1 | frame 3 | from 1 to 85 |
| SEQ ID NO: 1045 | R0251:B09_2 | frame −3 | from 1 to 90 |
| SEQ ID NO: 1046 | R0251:D01_1 | frame 2 | from 1 to 124 |
| SEQ ID NO: 1047 | R0251:D01_2 | frame −3 | from 53 to 123 |
| SEQ ID NO: 1048 | R0251:E03_1 | frame 3 | from 1 to 95 |
| SEQ ID NO: 1049 | R0251:E03_2 | frame −2 | from 1 to 57 |
| SEQ ID NO: 1050 | R0251:E06_1 | frame 3 | from 1 to 98 |
| SEQ ID NO: 1051 | R0251:E06_2 | frame −2 | from 1 to 60 |
| SEQ ID NO: 1052 | R0251:F12_1 | frame 1 | from 51 to 110 |
| SEQ ID NO: 1053 | R0251:F12_2 | frame −1 | from 32 to 111 |
| SEQ ID NO: 1054 | R0251:F12_3 | frame −2 | from 35 to 131 |
| SEQ ID NO: 1055 | R0251:G06_1 | frame −1 | from 1 to 97 |
| SEQ ID NO: 1056 | R0251:G06_2 | frame −3 | from 1 to 56 |
| SEQ ID NO: 1057 | R0252:A08_1 | frame 1 | from 1 to 64 |
| SEQ ID NO: 1058 | R0252:A08_2 | frame 2 | from 12 to 64 |
| SEQ ID NO: 1059 | R0252:A08_3 | frame −1 | from 1 to 51 |
| SEQ ID NO: 1060 | R0252:A08_4 | frame −2 | from 1 to 64 |
| SEQ ID NO: 1061 | R0252:D02_1 | frame 3 | from 1 to 85 |
| SEQ ID NO: 1062 | R0252:D02_2 | frame −3 | from 1 to 123 |
| SEQ ID NO: 1063 | R0252:E04_1 | frame 1 | from 1 to 59 |
| SEQ ID NO: 1064 | R0252:E04_2 | frame 2 from 57 to 107 | |
| SEQ ID NO: 1065 | R0252:E04_3 | frame 3 from 35 to 154 | |
| SEQ ID NO: 1066 | R0252:E04_4 | frame −1 | from 22 to 110 |
| SEQ ID NO: 1067 | R0252:E04_5 | frame −3 | from 1 to 60 |
| SEQ ID NO: 1068 | R0252:E04_6 | frame −3 | from 91 to 154 |
| SEQ ID NO: 1069 | R0252:E06_1 | frame 1 | from 1 to 59 |
| SEQ ID NO: 1070 | R0252:E06_2 | frame 2 | from 57 to 107 |
| SEQ ID NO: 1071 | R0252:E06_3 | frame 3 | from 35 to 142 |
| SEQ ID NO: 1072 | R0252:E06_4 | frame −2 | from 79 to 142 |
| SEQ ID NO: 1073 | R0252:E06_5 | frame −3 | from 9 to 97 |
| SEQ ID NO: 1074 | R0252:E07_1 | frame 1 | from 1 to 59 |
| SEQ ID NO: 1075 | R0252:E07_2 | frame 2 | from 57 to 107 |
| SEQ ID NO: 1076 | R0252:E07_3 | frame 2 | from 109 to 184 |
| SEQ ID NO: 1077 | R0252:E07_4 | frame 3 | from 35 to 183 |
| SEQ ID NO: 1078 | R0252:E07_5 | frame −1 | from 51 to 139 |
| SEQ ID NO: 1079 | R0252:E07_6 | frame −3 | from 28 to 89 |
| SEQ ID NO: 1080 | R0252:E07_7 | frame −3 | from 120 to 183 |
| SEQ ID NO: 1081 | R0252:F11_1 | frame 1 | from 1 to 94 |
| SEQ ID NO: 1082 | R0252:F11_2 | frame 3 | from 1 to 61 |
| SEQ ID NO: 1083 | R0252:F11_3 | frame −2 | from 12 to 69 |
| SEQ ID NO: 1084 | R0252:F11_4 | frame −3 | from 1 to 139 |
| SEQ ID NO: 1085 | R0252:F02_1 | frame 1 | from 1 to 66 |
| SEQ ID NO: 1086 | R0252:F02_2 | frame 2 | from 57 to 107 |
| SEQ ID NO: 1087 | R0252:F02_3 | frame 2 | from 109 to 160 |
| SEQ ID NO: 1088 | R0252:F02_4 | frame 3 | from 35 to 159 |
| SEQ ID NO: 1089 | R0252:F02_5 | frame −1 | from 27 to 115 |
| SEQ ID NO: 1090 | R0252:F02_6 | frame −3 | from 4 to 65 |
| SEQ ID NO: 1091 | R0252:F02_7 | frame −3 | from 96 to 159 |
| SEQ ID NO: 1092 | R0252:H01_1 | frame 2 | from 1 to 123 |
| SEQ ID NO: 1093 | R0252:H01_2 | frame −3 | from 53 to 123 |
| SEQ ID NO: 1094 | R0252:H03_1 | frame 3 | from 1 to 85 |
| SEQ ID NO: 1095 | R0252:H03_2 | frame −3 | from 1 to 123 |
| SEQ ID NO: 1096 | R0253:B04_1 | frame 3 | from 1 to 85 |
| SEQ ID NO: 1097 | R0253:B04_2 | frame −3 | from 1 to 102 |
| SEQ ID NO: 1098 | R0253:C04_1 | frame 3 | from 1 to 85 |
| SEQ ID NO: 1099 | R0253:C04_2 | frame −2 | from 1 to 108 |
| SEQ ID NO: 1100 R0253:C05_1 | frame 3 | from 1 to 56 | |
| SEQ ID NO: 1101 | R0253:C05_2 | frame −1 | from 1 to 54 |
| SEQ ID NO: 1102 | R0253:C05_3 | frame −2 | from 9 to 63 |
| SEQ ID NO: 1103 | R0253:C06_1 | frame 3 | from 1 to 56 |
| SEQ ID NO: 1104 | R0253:D02_1 | frame 3 | from 1 to 55 |
| SEQ ID NO: 1105 | R0253:D02_2 | frame −3 | from 1 to 123 |
| SEQ ID NO: 1106 | R0253:D08_1 | frame 2 | from 1 to 194 |
| SEQ ID NO: 1107 | R0253:D08_2 | frame 3 | from 102 to 153 |
| SEQ ID NO: 1108 | R0253:D08_3 | frame −1 | from 1 to 55 |
| SEQ ID NO: 1109 | R0253:D08_4 | frame −1 | from 117 to 182 |
| SEQ ID NO: 1110 | R0253:D08_5 | frame −3 | from 30 to 88 |
| SEQ ID NO: 1111 | R0253:D08_6 | frame −3 | from 90 to 149 |
| SEQ ID NO: 1112 | R0253:E06_1 | frame 1 | from 1 to 51 |
| SEQ ID NO: 1113 | R0253:E06_2 | frame 2 | from 1 to 51 |
| SEQ ID NO: 1114 | R0253:F11_1 | frame 1 | from 1 to 79 |
| SEQ ID NO: 1115 | R0253:F11_2 | frame 3 | from 26 to 79 |
| SEQ ID NO: 1116 | R0253:F11_3 | frame −3 | from 1 to 59 |
| SEQ ID NO: 1117 | R0253:F07_1 | frame 3 | from 1 to 85 |
| SEQ ID NO: 1118 | R0253:F07_2 | frame −3 | from 1 to 93 |
| SEQ ID NO: 1119 | R0253:G11_1 | frame 2 | from 1 to 194 |
| SEQ ID NO: 1120 | R0253:G11_2 | frame 3 | from 102 to 153 |
| SEQ ID NO: 1121 | R0253:G11_3 | frame −1 | from 1 to 55 |
| SEQ ID NO: 1122 | R0253:G11_4 | frame −1 | from 117 to 182 |
| SEQ ID NO: 1123 | R0253:G11_5 | frame −3 | from 30 to 88 |
| SEQ ID NO: 1124 | R0253:G11_6 | frame −3 | from 90 to 149 |
| SEQ ID NO: 1125 | R0253:G12_1 | frame 1 | from 1 to 94 |
| SEQ ID NO: 1126 | R0253:G12_2 | frame 3 | from 1 to 53 |
| SEQ ID NO: 1127 | R0253:G05_1 | frame 3 | from 53 to 123 |
| SEQ ID NO: 1128 | R0253:G05_2 | frame −2 | from 1 to 124 |
| SEQ ID NO: 1129 | R0253:H02_1 | frame 2 | from 1 to 63 |
| SEQ ID NO: 1130 | R0253:H07_1 | frame 2 | from 1 to 73 |
| SEQ ID NO: 1131 | R0253:H07_2 | frame 3 | from 1 to 57 |
| SEQ ID NO: 1132 | R0254:F07_1 | frame 1 | from 69 to 153 |
| SEQ ID NO: 1133 | R0254:F07_2 | frame −1 | from 87 to 142 |
| SEQ ID NO: 1134 | R0254:F07_3 | frame −2 | from 47 to 116 |
| SEQ ID NO: 1135 | R0254:F07_4 | frame −3 | from 1 to 82 |
| SEQ ID NO: 1136 | R0254:F07_5 | frame −3 | from 99 to 154 |
| SEQ ID NO: 1137 | R0254:G11_1 | frame 3 | from 1 to 85 |
| SEQ ID NO: 1138 | R0254:G11_2 | frame −3 | from 1 to 123 |
| SEQ ID NO: 1139 | R0254:G04_1 | frame 3 | from 1 to 123 |
| SEQ ID NO: 1140 | R0254:G04_2 | frame −3 | from 1 to 85 |
| SEQ ID NO: 1141 | R0254:H01_1 | frame 3 | from 1 to 85 |
| SEQ ID NO: 1142 | R0254:H01_2 | frame −3 | from 1 to 123 |
| SEQ ID NO: 1143 | R0238:C03_1 | frame 2 | from 6 to 120 |
| SEQ ID NO: 1144 | R0238:C03_2 | frame 3 | from 103 to 157 |
| SEQ ID NO: 1145 | R0238:C03_3 | frame −1 | from 28 to 78 |
| SEQ ID NO: 1146 | R0255:C02_1 | frame 1 | from 1 to 60 |
| SEQ ID NO: 1147 | R0255:C02_2 | frame 3 | from 23 to 96 |
| SEQ ID NO: 1148 | R0255:C02_3 | frame −1 | from 35 to 108 |
| SEQ ID NO: 1149 | R0255:F12_1 | frame 3 | from 1 to 57 |
| SEQ ID NO: 1150 | R0255:F12_2 | frame −2 | from 1 to 78 |
| SEQ ID NO: 1151 | R0258:G10_1 | frame 1 | from 7 to 121 |
| SEQ ID NO: 1152 | R0258:G10_2 | frame 2 | from 104 to 158 |
| SEQ ID NO: 1153 | R0258:G10_3 | frame −1 | from 34 to 84 |
| SEQ ID NO: 1154 | R0261:A12_1 | frame 2 | from 2 to 60 |
| SEQ ID NO: 1155 | R0261:A12_2 | frame 3 | from 1 to 110 |
| SEQ ID NO: 1156 | R0261:A12_3 | frame −1 | from 1 to 145 |
| SEQ ID NO: 1157 | R0261:A12_4 | frame −3 | from 13 to 144 |
| SEQ ID NO: 1158 | R0261:A09_1 | frame 1 | from 1 to 174 |
| SEQ ID NO: 1159 | R0261:A09_2 | frame 2 | from 34 to 89 |
| SEQ ID NO: 1160 | R0261:A09_3 | frame 3 | from 1 to 52 |
| SEQ ID NO: 1161 | R0261:A09_4 | frame −1 | from 121 to 174 |
| SEQ ID NO: 1162 | R0261:A09_5 | frame −2 | from 47 to 116 |
| SEQ ID NO: 1163 | R0261:A09_6 | frame −2 | from 125 to 174 |
| SEQ ID NO: 1164 | R0261:A09_7 | frame −3 | from 32 to 174 |
| SEQ ID NO: 1165 | R0261:B12_1 | frame 1 | from 51 to 113 |
| SEQ ID NO: 1166 | R0261:B12_2 | frame −2 | from 2 to 51 |
| SEQ ID NO: 1167 | R0261:C10_1 | frame 2 | from 6 to 120 |
| SEQ ID NO: 1168 | R0261:C10_2 | frame 3 | from 103 to 157 |
| SEQ ID NO: 1169 | R0261:C10_3 | frame −1 | from 25 to 75 |
| SEQ ID NO: 1170 | R0261:D06_1 | frame 2 | from 1 to 117 |
| SEQ ID NO: 1171 | R0261:D06_2 | frame −2 | from 1 to 117 |
| SEQ ID NO: 1172 | R0261:D06_3 | frame −3 | from 35 to 117 |
| SEQ ID NO: 1173 | R0261:E04_1 | frame 2 | from 1 to 170 |
| SEQ ID NO: 1174 | R0261:E04_2 | frame −2 | from 32 to 122 |
| SEQ ID NO: 1175 | R0261:E04_3 | frame −3 | from 36 to 144 |
| SEQ ID NO: 1176 | R0261:F05_1 | frame 2 | from 61 to 111 |
| SEQ ID NO: 1177 | R0261:F05_2 | frame −1 | from 1 to 78 |
| SEQ ID NO: 1178 | R0261:F05_3 | frame −1 | from 105 to 157 |
| SEQ ID NO: 1179 | R0261:F05_4 | frame −2 | from 61 to 115 |
| SEQ ID NO: 1180 | R0261:G04_1 | frame 2 | from 13 to 111 |
| SEQ ID NO: 1181 | R0261:G04_2 | frame 3 | from 91 to 147 |
| SEQ ID NO: 1182 | R0261:G04_3 | frame −1 | from 83 to 169 |
| SEQ ID NO: 1183 | R0261:G04_4 | frame −2 | from 4 to 56 |
| SEQ ID NO: 1184 | R0261:G04_5 | frame −3 | from 123 to 181 |
| SEQ ID NO: 1185 | R0261:H03_1 | frame 2 | from 6 to 120 |
| SEQ ID NO: 1186 | R0261:H03_2 | frame 3 | from 103 to 157 |
| SEQ ID NO: 1187 | R0261:H03_3 | frame −1 | from 33 to 83 |
| SEQ ID NO: 1188 | R0262:A12_1 | frame −1 | from 35 to 132 |
| SEQ ID NO: 1189 | R0262:A02_1 | frame 1 | from 1 to 142 |
| SEQ ID NO: 1190 | R0262:A02_2 | frame 2 | from 18 to 81 |
| SEQ ID NO: 1191 | R0262:A02_3 | frame 3 | from 1 to 86 |
| SEQ ID NO: 1192 | R0262:A02_4 | frame −2 | from 1 to 73 |
| SEQ ID NO: 1193 | R0262:A02_5 | frame −3 | from 1 to 52 |
| SEQ ID NO: 1194 | R0262:D12_1 | frame 2 | from 4 to 118 |
| SEQ ID NO: 1195 | R0262:D04_1 | frame 1 | from 26 to 95 |
| SEQ ID NO: 1196 | R0262:D04_2 | frame 3 | from 32 to 94 |
| SEQ ID NO: 1197 | R0262:D04_3 | frame −2 | from 16 to 65 |
| SEQ ID NO: 1198 | R0262:D04_4 | frame −3 | from 1 to 92 |
| SEQ ID NO: 1199 | R0262:D07_1 | frame 1 | from 102 to 156 |
| SEQ ID NO: 1200 | R0262:D07_2 | frame 3 | from 4 to 118 |
| SEQ ID NO: 1201 | R0262:D07_3 | frame −1 | from 20 to 70 |
| SEQ ID NO: 1202 | R0262:E02_1 | frame 1 | from 7 to 121 |
| SEQ ID NO: 1203 | R0262:E02_2 | frame 2 | from 104 to 158 |
| SEQ ID NO: 1204 | R0262:E02_3 | frame −2 | from 27 to 77 |
| SEQ ID NO: 1205 | R0262:E03_1 | frame 1 | from 127 to 176 |
| SEQ ID NO: 1206 | R0262:E03_2 | frame 2 | from 26 to 159 |
| SEQ ID NO: 1207 | R0262:E03_3 | frame 3 | from 1 to 67 |
| SEQ ID NO: 1208 | R0262:E03_4 | frame −1 | from 9 to 68 |
| SEQ ID NO: 1209 | R0262:E03_5 | frame −2 | from 113 to 176 |
| SEQ ID NO: 1210 | R0262:E03_6 | frame −3 | from 107 to 159 |
| SEQ ID NO: 1211 | R0262:F06_1 | frame 1 | from 1 to 99 |
| SEQ ID NO: 1212 | R0262:F06_2 | frame 3 | from 13 to 98 |
| SEQ ID NO: 1213 | R0262:F06_3 | frame −2 | from 1 to 64 |
| SEQ ID NO: 1214 | R0263:B03_1 | frame 1 | from 1 to 84 |
| SEQ ID NO: 1215 | R0263:B03_2 | frame 3 | from 13 to 83 |
| SEQ ID NO: 1216 | R0263:B09_1 | frame 2 | from 1 to 199 |
| SEQ ID NO: 1217 | R0263:B09_2 | frame −1 | from 1 to 76 |
| SEQ ID NO: 1218 | R0263:B09_3 | frame −1 | from 78 to 199 |
| SEQ ID NO: 1219 | R0263:B09_4 | frame −2 | from 140 to 195 |
| SEQ ID NO: 1220 | R0263:E03_1 | frame 3 | from 50 to 111 |
| SEQ ID NO: 1221 | R0263:E03_2 | frame −1 | from 119 to 204 |
| SEQ ID NO: 1222 | R0263:F08_1 | frame 3 | from 1 to 95 |
| SEQ ID NO: 1223 | R0263:G10_1 | frame 1 | from 7 to 121 |
| SEQ ID NO: 1224 | R0263:G10_2 | frame 1 from 148 to 198 | |
| SEQ ID NO: 1225 | R0263:G10_3 | frame 2 | from 14 to 77 |
| SEQ ID NO: 1226 | R0263:G10_4 | frame 2 | from 104 to 158 |
| SEQ ID NO: 1227 | R0263:G10_5 | frame −1 | from 37 to 87 |
| SEQ ID NO: 1228 | R0263:G02_1 | frame 1 | from 54 to 126 |
| SEQ ID NO: 1229 | R0263:G02_2 | frame 2 | from 1 to 70 |
| SEQ ID NO: 1230 | R0263:G02_3 | frame −2 | from 109 to 190 |
| SEQ ID NO: 1231 | R0263:G02_4 | frame −3 | from 34 to 105 |
| SEQ ID NO: 1232 | R0263:G03_1 | frame 1 | from 90 to 139 |
| SEQ ID NO: 1233 | R0263:G03_2 | frame 2 | from 13 to 106 |
| SEQ ID NO: 1234 | R0263:G03_3 | frame −1 | from 3 to 55 |
| SEQ ID NO: 1235 | R0263:G03_4 | frame −2 | from 122 to 180 |
| SEQ ID NO: 1236 | R0263:G03_5 | frame −3 | from 77 to 167 |
| SEQ ID NO: 1237 | R0263:H10_1 | frame 1 | from 1 to 55 |
| SEQ ID NO: 1238 | R0263:H10_2 | frame 1 | from 99 to 152 |
| SEQ ID NO: 1239 | R0263:H10_3 | frame 3 | from 1 to 147 |
| SEQ ID NO: 1240 | R0263:H10_4 | frame −1 | from 6 to 140 |
| SEQ ID NO: 1241 | R0263:H10_5 | frame −3 | from 1 to 151 |
| SEQ ID NO: 1242 | R0264:A02_1 | frame 1 | from 1 to 85 |
| SEQ ID NO: 1243 | R0264:A02_2 | frame 3 | from 13 to 84 |
| SEQ ID NO: 1244 | R0264:A02_3 | frame −3 | from 1 to 50 |
| SEQ ID NO: 1245 | R0264:B11_1 | frame 2 | from 6 to 120 |
| SEQ ID NO: 1246 | R0264:B11_2 | frame 3 | from 103 to 157 |
| SEQ ID NO: 1247 | R0264:B11_3 | frame −1 | from 30 to 80 |
| SEQ ID NO: 1248 | R0264:E12_1 | frame 3 | from 50 to 111 |
| SEQ ID NO: 1249 | R0264:E12_2 | frame −1 | from 78 to 163 |
| SEQ ID NO: 1250 | R0264:F11_1 | frame 1 | from 13 to 81 |
| SEQ ID NO: 1251 | R0264:F11_2 | frame −1 | from 1 to 102 |
| SEQ ID NO: 1252 | R0264:F11_3 | frame −2 | from 25 to 101 |
| SEQ ID NO: 1253 | R0264:F11_4 | frame −3 | from 42 to 101 |
| SEQ ID NO: 1254 | R0264:F09_1 | frame 1 | from 7 to 121 |
| SEQ ID NO: 1255 | R0264:F09_2 | frame 2 | from 104 to 158 |
| SEQ ID NO: 1256 | R0264:F09_3 | frame −3 | from 25 to 75 |
| SEQ ID NO: 1257 | R0264:G01_1 | frame 2 | from 61 to 124 |
| SEQ ID NO: 1258 | R0264:G01_2 | frame 3 | from 24 to 82 |
| SEQ ID NO: 1259 | R0264:G01_3 | frame −1 | from 80 to 150 |
| SEQ ID NO: 1260 | R0264:G01_4 | frame −2 | from 1 to 94 |
| SEQ ID NO: 1261 | R0264:G11_1 | frame 1 | from 1 to 164 |
| SEQ ID NO: 1262 | R0264:G11_2 | frame 2 | from 74 to 145 |
| SEQ ID NO: 1263 | R0264:G11_3 | frame −2 | from 1 to 120 |
| SEQ ID NO: 1264 | R0264:G11_4 | frame −3 | from 50 to 163 |
| SEQ ID NO: 1265 | R0264:G04_1 | frame 2 | from 6 to 93 |
| SEQ ID NO: 1266 | R0265:F07_1 | frame 1 | from 1 to 75 |
| SEQ ID NO: 1267 | R0265:F07_2 | frame 1 | from 102 to 154 |
| SEQ ID NO: 1268 | R0265:F07_3 | frame 2 | from 58 to 112 |
| SEQ ID NO: 1269 | R0265:F07_4 | frame 2 | from 116 to 167 |
| SEQ ID NO: 1270 | R0265:F07_5 | frame −2 | from 61 to 111 |
| SEQ ID NO: 1271 | R0265:G01_1 | frame 1 | from 1 to 112 |
| SEQ ID NO: 1272 | R0265:G01_2 | frame 3 | from 3 to 61 |
| SEQ ID NO: 1273 | R0265:G01_3 | frame −1 | from 1 to 146 |
| SEQ ID NO: 1274 | R0265:G01_4 | frame −3 | from 13 to 146 |
| SEQ ID NO: 1275 | R0265:G10_1 | frame 1 | from 1 to 115 |
| SEQ ID NO: 1276 | R0265:G10_2 | frame 3 | from 13 to 114 |
| SEQ ID NO: 1277 | R0265:G10_3 | frame −2 | from 1 to 80 |
| SEQ ID NO: 1278 | R0265:G11_1 | frame 1 | from 59 to 122 |
| SEQ ID NO: 1279 | R0265:G11_2 | frame 3 | from 25 to 103 |
| SEQ ID NO: 1280 | R0265:G11_3 | frame −1 | from 14 to 91 |
| SEQ ID NO: 1281 | R0265:H09_1 | frame 1 | from 1 to 191 |
| SEQ ID NO: 1282 | R0265:H09_2 | frame −1 | from 1 to 51 |
| SEQ ID NO: 1283 | R0265:H09_3 | frame −1 | from 91 to 141 |
| SEQ ID NO: 1284 | R0265:H09_4 | frame −2 | from 98 to 152 |
| SEQ ID NO: 1285 | R0266:A11_1 | frame 1 | from 1 to 107 |
| SEQ ID NO: 1286 | R0266:A11_2 | frame 3 | from 1 to 56 |
| SEQ ID NO: 1287 | R0266:A11_3 | frame −1 | from 1 to 141 |
| SEQ ID NO: 1288 | R0266:A11_4 | frame −3 | from 13 to 125 |
| SEQ ID NO: 1289 | R0266:A12_1 | frame 1 | from 1 to 106 |
| SEQ ID NO: 1290 | R0266:A12_2 | frame 1 from 133 to 185 | |
| SEQ ID NO: 1291 | R0266:A12_3 | frame 2 | from 89 to 143 |
| SEQ ID NO: 1292 | R0266:A12_4 | frame 2 | from 147 to 197 |
| SEQ ID NO: 1293 | R0266:A12_5 | frame −3 | from 51 to 101 |
| SEQ ID NO: 1294 | R0266:B01_1 | frame 1 | from 20 to 93 |
| SEQ ID NO: 1295 | R0266:B01_2 | frame 2 | from 1 to 56 |
| SEQ ID NO: 1296 | R0266:B01_3 | frame −3 | from 31 to 104 |
| SEQ ID NO: 1297 | R0266:C12_1 | frame 1 | from 7 to 121 |
| SEQ ID NO: 1298 | R0266:C12_2 | frame 1 | from 148 to 200 |
| SEQ ID NO: 1299 | R0266:C12_3 | frame 2 | from 104 to 158 |
| SEQ ID NO: 1300 | R0266:C12_4 | frame −3 | from 41 to 93 |
| SEQ ID NO: 1301 | R0266:E01_1 | frame 3 | from 1 to 125 |
| SEQ ID NO: 1302 | R0266:E01_2 | frame −1 | from 75 to 133 |
| SEQ ID NO: 1303 | R0266:E01_3 | frame −2 | from 34 to 133 |
| SEQ ID NO: 1304 | R0266:E03_1 | frame 3 | from 81 to 130 |
| SEQ ID NO: 1305 | R0266:E03_2 | frame −1 | from 1 to 131 |
| SEQ ID NO: 1306 | R0266:E03_3 | frame −3 | from 1 to 53 |
| SEQ ID NO: 1307 | R0266:F03_1 | frame 1 | from 64 to 141 |
| SEQ ID NO: 1308 | R0266:F03_2 | frame 2 | from 8 to 141 |
| SEQ ID NO: 1309 | R0266:F03_3 | frame 3 | from 39 to 104 |
| SEQ ID NO: 1310 | R0266:F03_4 | frame −2 | from 1 to 141 |
| SEQ ID NO: 1311 | R0266:F07_1 | frame −3 | from 37 to 97 |
| SEQ ID NO: 1312 | R0266:F07_2 | frame −3 | from 138 to 188 |
| SEQ ID NO: 1313 | R0266:G10_1 | frame 3 | from 24 to 124 |
| SEQ ID NO: 1314 | R0266:G10_2 | frame −2 | from 1 to 150 |
| SEQ ID NO: 1315 | R0266:G09_1 | frame 1 | from 7 to 121 |
| SEQ ID NO: 1316 | R0266:G09_2 | frame 2 | from 104 to 158 |
| SEQ ID NO: 1317 | R0266:G09_3 | frame −2 | from 28 to 78 |
| SEQ ID NO: 1318 | R0266:H09_1 | frame 1 | from 1 to 68 |
| SEQ ID NO: 1319 | R0266:H09_2 | frame 3 | from 48 to 148 |
| SEQ ID NO: 1320 | R0266:H09_3 | frame −2 | from 1 to 137 |
| SEQ ID NO: 1321 | R0243:F07_1 | frame 1 | from 19 to 77 |
| SEQ ID NO: 1322 | R0243:F07_2 | frame 2 | from 13 to 76 |
| SEQ ID NO: 1323 | R0243:F07_3 | frame 3 | from 20 to 76 |
| SEQ ID NO: 1324 | R0243:F07_4 | frame −1 | from 15 to 65 |
| SEQ ID NO: 1325 | R0244:C02_1 | frame 1 | from 1 to 64 |
| SEQ ID NO: 1326 | R0244:C02_2 | frame −1 | from 8 to 107 |
| SEQ ID NO: 1327 | R0244:C02_3 | frame −2 | from 19 to 70 |
| SEQ ID NO: 1328 | R0244:C04_1 | frame 1 | from 19 to 77 |
| SEQ ID NO: 1329 | R0244:C04_2 | frame 2 | from 13 to 76 |
| SEQ ID NO: 1330 | R0244:C04_3 | frame 3 | from 20 to 76 |
| SEQ ID NO: 1331 | R0244:C04_4 | frame −1 | from 15 to 65 |
| SEQ ID NO: 1332 | R0245:A02_1 | frame 2 | from 12 to 61 |
| SEQ ID NO: 1333 | R0245:A02_2 | frame −3 | from 42 to 92 |
| SEQ ID NO: 1334 | ‘46802.1_gaiger.ABI’_1 | frame 1 | from 1 to 90 |
| SEQ ID NO: 1335 | ‘46802.1_gaiger.ABI’_2 | frame −1 | from 1 to 52 |
| SEQ ID NO: 1336 | ‘46816.1_gaiger.ABI’_1 | frame 2 | from 1 to 166 |
| SEQ ID NO: 1337 | ‘46816.1_gaiger.ABI’_2 | frame −2 | from 16 to 91 |
| SEQ ID NO: 1338 | ‘46816.1_gaiger.ABI’_3 | frame −2 | from 94 to 166 |
| SEQ ID NO: 1339 | ‘46816.1_gaiger.ABI’_4 | frame −3 | from 99 to 166 |
| SEQ ID NO: 1340 | ‘46880.1_gaiger.ABI’_1 | frame 2 | from 36 to 95 |
| SEQ ID NO: 1341 | ‘46880.1_gaiger.ABI’_2 | frame 3 from 1 to 95 | |
| SEQ ID NO: 1342 | ‘46880.1_gaiger.ABI’_3 | frame −1 | from 32 to 81 |
| SEQ ID NO: 1343 | ‘47011.1_gaiger.ABI’_1 | frame 1 | from 1 to 102 |
| SEQ ID NO: 1344 | ‘47011.1_gaiger.ABI’_2 | frame 3 | from 42 to 101 |
| SEQ ID NO: 1345 | ‘47011.1_gaiger.ABI’_3 | frame −1 | from 32 to 81 |
| SEQ ID NO: 1346 | ‘51658.1_gaiger.ABI’_1 | frame 2 | from 5 to 80 |
| SEQ ID NO: 1347 | ‘51658.1_gaiger.ABI’_2 | frame 3 | from 10 to 77 |
| SEQ ID NO: 1348 | ‘51734.1_gaiger.ABI’_1 | frame 1 | from 12 to 98 |
| SEQ ID NO: 1349 | ‘51734.1_gaiger.ABI’_2 | frame 3 | from 22 to 76 |
| SEQ ID NO: 1350 | ‘51734.1_gaiger.ABI’_3 | frame −2 | from 18 to 137 |
| SEQ ID NO: 1351 | ‘51735.1_gaiger.ABI’_1 | frame 1 | from 30 to 153 |
| SEQ ID NO: 1352 | ‘51735.1_gaiger.ABI’_2 | frame 3 | from 1 to 69 |
| SEQ ID NO: 1353 | ‘51735.1_gaiger.ABI’_3 | frame −2 | from 44 to 123 |
| SEQ ID NO: 1354 | ‘51788.1_gaiger.ABI’_1 | frame 1 | from 1 to 59 |
| SEQ ID NO: 1355 | ‘51788.1_gaiger.ABI’_2 | frame −2 | from 1 to 68 |
| SEQ ID NO: 1356 | ‘51892.1_gaiger.ABI’_1 | frame 1 | from 1 to 158 |
| SEQ ID NO: 1357 | ‘51892.1_gaiger.ABI’_2 | frame 2 | from 2 to 69 |
| SEQ ID NO: 1358 | ‘51892.1_gaiger.ABI’_3 | frame −1 | from 76 to 139 |
| SEQ ID NO: 1359 | ‘51892.1_gaiger.ABI’_4 | frame −2 | from 35 to 137 |
| SEQ ID NO: 1360 | ‘51900.1_gaiger.ABI’_1 | frame 2 | from 1 to 123 |
| SEQ ID NO: 1361 | ‘51900.1_gaiger.ABI’_2 | frame 3 | from 3 to 70 |
| SEQ ID NO: 1362 | ‘51900.1_gaiger.ABI’_3 | frame −2 | from 78 to 141 |
| SEQ ID NO: 1363 | ‘51900.1_gaiger.ABI’_4 | frame −3 | from 36 to 139 |
| SEQ ID NO: 1364 | 1404:D07_1 | frame 1 | from 3 to 150 |
| SEQ ID NO: 1365 | 1404:D07_2 | frame 2 | from 8 to 75 |
| SEQ ID NO: 1366 | 1404:D07_3 | frame −1 | from 13 to 115 |
| SEQ ID NO: 1367 | 1404:D07_4 | frame −3 | from 53 to 116 |
| SEQ ID NO: 1368 | 1405:C04_1 | frame 2 | from 1 to 50 |
| SEQ ID NO: 1369 | 1405:C04_2 | frame 3 | from 10 to 102 |
| SEQ ID NO: 1370 | 1405:C04_3 | frame −2 | from 76 to 140 |
| SEQ ID NO: 1371 | 1405:D12_1 | frame 1 | from 4 to 71 |
| SEQ ID NO: 1372 | 1405:D12_2 | frame 3 | from 1 to 143 |
| SEQ ID NO: 1373 | 1405:D12_3 | frame −1 | from 52 to 115 |
| SEQ ID NO: 1374 | 1405:D12_4 | frame −2 | from 11 to 113 |
| SEQ ID NO: 1375 | 1405:E11_1 | frame 1 | from 87 to 159 |
| SEQ ID NO: 1376 | 1405:E11_2 | frame 3 | from 92 to 143 |
| SEQ ID NO: 1377 | 1405:E11_3 | frame −2 | from 48 to 111 |
| SEQ ID NO: 1378 | 1405:E11_4 | frame −3 | from 1 to 55 |
| SEQ ID NO: 1379 | ‘52333.1_gaiger.ABI’_1 | frame 1 | from 1 to 69 |
| SEQ ID NO: 1380 | ‘52333.1_gaiger.ABI’_2 | frame 2 from 1 to 66 | |
| SEQ ID NO: 1381 | ‘41557.1_gaiger.ABI’_1 | frame 1 | from 16 to 73 |
| SEQ ID NO: 1382 | ‘41557.1_gaiger.ABI’_2 | frame 2 | from 1 to 109 |
| SEQ ID NO: 1383 | ‘41557.1_gaiger.ABI’_3 | frame −1 | from 11 to 110 |
| SEQ ID NO: 1384 | ‘41557.1_gaiger.ABI’_4 | frame −3 | from 1 to 103 |
| SEQ ID NO: 1385 | ‘41579.1_gaiger.ABI’_1 | frame 3 | from 43 to 97 |
| SEQ ID NO: 1386 | ‘41579.1_gaiger.ABI’_2 | frame −2 | from 1 to 97 |
| SEQ ID NO: 1387 | ‘41579.1_gaiger.ABI’_3 | frame −3 | from 43 to 97 |
| SEQ ID NO: 1388 | ‘41571.1_gaiger.ABI’_1 | frame 3 | from 1 to 89 |
| SEQ ID NO: 1389 | ‘41571.1_gaiger.ABI’_2 | frame −1 | from 1 to 89 |
| SEQ ID NO: 1390 | ‘41571.1_gaiger.ABI’_3 | frame −2 | from 27 to 85 |
| SEQ ID NO: 1391 | ‘41613.1_gaiger.ABI’_1 | frame 3 | from 1 to 136 |
| SEQ ID NO: 1392 | ‘41613.1_gaiger.ABI’_2 | frame −1 | from 40 to 163 |
| SEQ ID NO: 1393 | ‘41613.1_gaiger.ABI’_3 | frame −2 | from 49 to 100 |
| SEQ ID NO: 1394 | ‘41613.1_gaiger.ABI’_4 | frame −3 | from 3 to 61 |
| SEQ ID NO: 1395 | ‘41650.1_gaiger.ABI’_1 | frame 1 | from 22 to 109 |
| SEQ ID NO: 1396 | ‘41650.1_gaiger.ABI’_2 | frame 2 | from 1 to 157 |
| SEQ ID NO: 1397 | ‘41650.1_gaiger.ABI’_3 | frame 3 | from 1 to 156 |
| SEQ ID NO: 1398 | ‘41650.1_gaiger.ABI’_4 | frame −1 | from 25 to 99 |
| SEQ ID NO: 1399 | ‘41650.1_gaiger.ABI’_5 | frame −2 | from 47 to 157 |
| SEQ ID NO: 1400 | ‘41650.1_gaiger.ABI’_6 | frame −3 | from 53 to 156 |
| SEQ ID NO: 1401 | ‘41663.1_gaiger.ABI’_1 | frame −2 | from 64 to 116 |
| SEQ ID NO: 1402 | ‘41663.1_gaiger.ABI’_2 | frame −3 | from 1 to 67 |
| SEQ ID NO: 1403 | ‘41687.1_gaiger.ABI’_1 | frame 1 | from 35 to 154 |
| SEQ ID NO: 1404 | ‘41687.1_gaiger.ABI’_2 | frame 2 | from 102 to 153 |
| SEQ ID NO: 1405 | ‘41687.1_gaiger.ABI’_3 | frame −1 | from 50 to 109 |
| SEQ ID NO: 1406 | ‘41687.1_gaiger.ABI’_4 | frame −3 | from 102 to 153 |
| SEQ ID NO: 1407 | ‘41717.1_gaiger.ABI’_1 | frame 1 | from 55 to 129 |
| SEQ ID NO: 1408 | ‘41717.1_gaiger.ABI’_2 | frame 2 | from 1 to 63 |
| SEQ ID NO: 1409 | ‘41717.1_gaiger.ABI’_3 | frame −3 | from 1 to 68 |
| SEQ ID NO: 1410 | ‘41751.1_gaiger.ABI’_1 | frame 1 | from 27 to 82 |
| SEQ ID NO: 1411 | ‘41751.1_gaiger.ABI’_2 | frame 3 | from 1 to 50 |
| SEQ ID NO: 1412 | ‘41751.1_gaiger.ABI’_3 | frame −2 | from 1 to 70 |
| SEQ ID NO: 1413 | ‘41751.1_gaiger.ABI’_4 | frame −3 | from 1 to 53 |
| SEQ ID NO: 1414 | ‘41818.1_gaiger.ABI’_1 | frame 2 | from 1 to 69 |
| SEQ ID NO: 1415 | ‘41818.1_gaiger.ABI’_2 | frame −1 | from 30 to 93 |
| SEQ ID NO: 1416 | ‘41818.1_gaiger.ABI’_3 | frame −3 | from 1 to 92 |
| SEQ ID NO: 1417 | ‘41828.1_gaiger.ABI’_1 | frame −3 | from 1 to 77 |
| SEQ ID NO: 1418 | ‘41849.1_gaiger.ABI’_1 | frame 1 | from 1 to 75 |
| SEQ ID NO: 1419 | ‘41849.1_gaiger.ABI’_2 | frame 3 | from 4 to 77 |
| SEQ ID NO: 1420 | ‘41849.1_gaiger.ABI’_3 | frame −1 | from 12 to 77 |
| SEQ ID NO: 1421 | ‘41881.1_gaiger.ABI’_1 | frame −1 | from 1 to 127 |
| SEQ ID NO: 1422 | ‘41881.1_gaiger.ABI’_2 | frame −2 | from 73 to 126 |
| SEQ ID NO: 1423 | ‘41881.1_gaiger.ABI’_3 | frame −3 | from 1 to 76 |
| SEQ ID NO: 1424 | ‘41912.1_gaiger.ABI’_1 | frame 2 | from 1 to 138 |
| SEQ ID NO: 1425 | ‘41912.1_gaiger.ABI’_2 | frame −2 | from 34 to 93 |
| SEQ ID NO: 1426 | ‘41912.1_gaiger.ABI’_3 | frame −3 | from 60 to 125 |
| SEQ ID NO: 1427 | ‘41927.1_gaiger.ABI’_1 | frame 3 | from 20 to 74 |
| SEQ ID NO: 1428 | ‘41929.1_gaiger.ABI’_1 | frame 1 | from 1 to 52 |
| SEQ ID NO: 1429 | ‘41944.1_gaiger.ABI’_1 | frame 1 | from 1 to 56 |
| SEQ ID NO: 1430 | ‘41944.1_gaiger.ABI’_2 | frame 2 | from 1 to 177 |
| SEQ ID NO: 1431 | ‘41944.1_gaiger.ABI’_3 | frame 3 | from 37 to 92 |
| SEQ ID NO: 1432 | ‘41944.1_gaiger.ABI’_4 | frame −1 | from 47 to 116 |
| SEQ ID NO: 1433 | ‘41944.1_gaiger.ABI’_5 | frame −1 | from 125 to 177 |
| SEQ ID NO: 1434 | ‘41944.1_gaiger.ABI’_6 | frame −2 | from 32 to 177 |
| SEQ ID NO: 1435 | ‘41944.1_gaiger.ABI’_7 | frame −3 | from 120 to 177 |
| SEQ ID NO: 1436 | ‘41987.1_gaiger.ABI’_1 | frame 1 | from 48 to 116 |
| SEQ ID NO: 1437 | ‘41987.1_gaiger.ABI’_2 | frame 2 | from 1 to 50 |
| SEQ ID NO: 1438 | ‘41987.1_gaiger.ABI’_3 | frame 2 | from 96 to 154 |
| SEQ ID NO: 1439 | ‘41987.1_gaiger.ABI’_4 | frame 3 | from 53 to 120 |
| SEQ ID NO: 1440 | ‘41987.1_gaiger.ABI’_5 | frame 3 | from 122 to 175 |
| SEQ ID NO: 1441 | ‘41987.1_gaiger.ABI’_6 | frame −1 | from 37 to 136 |
| SEQ ID NO: 1442 | ‘41987.1_gaiger.ABI’_7 | frame −2 | from 1 to 72 |
| SEQ ID NO: 1443 | ‘41995.1_gaiger.ABI’_1 | frame 1 | from 1 to 115 |
| SEQ ID NO: 1444 | ‘41995.1_gaiger.ABI’_2 | frame 3 | from 60 to 109 |
| SEQ ID NO: 1445 | ‘41995.1_gaiger.ABI’_3 | frame −2 | from 1 to 114 |
| SEQ ID NO: 1446 | ‘41995.1_gaiger.ABI’_4 | frame −3 | from 35 to 108 |
| SEQ ID NO: 1447 | ‘42012.1_gaiger.ABI’_1 | frame 2 | from 1 to 60 |
| SEQ ID NO: 1448 | ‘42012.1_gaiger.ABI’_2 | frame −3 | from 1 to 60 |
| SEQ ID NO: 1449 | ‘42039.1_gaiger.ABI’_1 | frame 2 | from 70 to 127 |
| SEQ ID NO: 1450 | ‘42039.1_gaiger.ABI’_2 | frame 3 | from 1 to 146 |
| SEQ ID NO: 1451 | ‘42039.1_gaiger.ABI’_3 | frame −2 | from 39 to 100 |
| SEQ ID NO: 1452 | ‘42097.1_gaiger.ABI’_1 | frame 1 | from 24 to 132 |
| SEQ ID NO: 1453 | ‘42097.1_gaiger.ABI’_2 | frame −1 | from 52 to 132 |
| SEQ ID NO: 1454 | ‘42097.1_gaiger.ABI’_3 | frame −3 | from 34 to 92 |
| SEQ ID NO: 1455 | ‘42103.1_gaiger.ABI’_1 | frame 1 | from 1 to 153 |
| SEQ ID NO: 1456 | ‘42103.1_gaiger.ABI’_2 | frame 2 | from 24 to 83 |
| SEQ ID NO: 1457 | ‘42103.1_gaiger.ABI’_3 | frame 2 | from 85 to 182 |
| SEQ ID NO: 1458 | ‘42103.1_gaiger.ABI’_4 | frame −2 | from 27 to 99 |
| SEQ ID NO: 1459 | ‘42103.1_gaiger.ABI’_5 | frame −2 | from 113 to 174 |
| SEQ ID NO: 1460 | ‘42103.1_gaiger.ABI’_6 | frame −3 | from 38 to 126 |
| SEQ ID NO: 1461 | ‘42108.1_gaiger.ABI’_1 | frame −2 | from 4 to 77 |
| SEQ ID NO: 1462 | R0233:A06_1 | frame 1 | from 12 to 77 |
| SEQ ID NO: 1463 | R0233:A06_2 | frame 3 | from 2 to 76 |
| SEQ ID NO: 1464 | R0233:A06_3 | frame −3 | from 1 to 59 |
| SEQ ID NO: 1465 | R0233:A08_1 | frame 1 | from 1 to 59 |
| SEQ ID NO: 1466 | R0233:A08_2 | frame −1 | from 1 to 63 |
| SEQ ID NO: 1467 | R0233:C02_1 | frame 3 | from 26 to 90 |
| SEQ ID NO: 1468 | R0233:C02_2 | frame −2 | from 1 to 107 |
| SEQ ID NO: 1469 | R0233:C02_3 | frame −3 | from 1 to 74 |
| SEQ ID NO: 1470 | R0233:E06_1 | frame 1 | from 84 to 146 |
| SEQ ID NO: 1471 | R0233:E06_2 | frame 3 | from 1 to 181 |
| SEQ ID NO: 1472 | R0233:E06_3 | frame −2 | from 49 to 157 |
| SEQ ID NO: 1473 | R0233:F08_1 | frame 1 | from 11 to 110 |
| SEQ ID NO: 1474 | R0233:F08_2 | frame 3 | from 1 to 103 |
| SEQ ID NO: 1475 | R0233:F08_3 | frame −1 | from 16 to 73 |
| SEQ ID NO: 1476 | R0233:F08_4 | frame −2 | from 1 to 109 |
| SEQ ID NO: 1477 | ‘42324.1_gaiger.ABI’_1 | frame 1 | from 1 to 94 |
| SEQ ID NO: 1478 | ‘42324.1_gaiger.ABI’_2 | frame 2 | from 1 to 57 |
| SEQ ID NO: 1479 | ‘42324.1_gaiger.ABI’_3 | frame 3 from 38 to 130 | |
| SEQ ID NO: 1480 | ‘42324.1_gaiger.ABI’_4 | frame −1 | from 10 to 130 |
| SEQ ID NO: 1481 | ‘42324.1_gaiger.ABI’_5 | frame −2 | from 1 to 54 |
| SEQ ID NO: 1482 | ‘42324.1_gaiger.ABI’_6 | frame −2 | from 72 to 130 |
| SEQ ID NO: 1483 | ‘42324.1_gaiger.ABI’_7 | frame −3 | from 1 to 67 |
| SEQ ID NO: 1484 | ‘42324.1_gaiger.ABI’_8 | frame −3 | from 76 to 130 |
| SEQ ID NO: 1485 | ‘42469.1;gaiger.ABI’_1 | frame 3 | from 11 to 90 |
| SEQ ID NO: 1486 | ‘42514.1;gaiger.ABI’_1 | frame 2 | from 14 to 89 |
| SEQ ID NO: 1487 | ‘42514.1;gaiger.ABI’_2 | frame −2 | from 10 to 76 |
| SEQ ID NO: 1488 | ‘42554.1;gaiger.ABI’_1 | frame 1 | from 1 to 67 |
| SEQ ID NO: 1489 | ‘42554.1;gaiger.ABI’_2 | frame 2 | from 6 to 63 |
| SEQ ID NO: 1490 | ‘42554.1;gaiger.ABI’_3 | frame −1 | from 7 to 67 |
| SEQ ID NO: 1491 | ‘42554.1;gaiger.ABI’_4 | frame −2 | from 1 to 56 |
| SEQ ID NO: 1492 | ‘42560.1;gaiger.ABI’_1 | frame 1 | from 1 to 67 |
| SEQ ID NO: 1493 | ‘42560.1;gaiger.ABI’_2 | frame −3 | from 1 to 66 |
| SEQ ID NO: 1494 | ‘42588.1_gaiger.ABI’_1 | frame 1 | from 1 to 60 |
| SEQ ID NO: 1495 | ‘42588.1_gaiger.ABI’_2 | frame 2 from 1 to 60 | |
| SEQ ID NO: 1496 | ‘42588.1_gaiger.ABI’_3 | frame 3 | from 1 to 60 |
| SEQ ID NO: 1497 | ‘42588.1_gaiger.ABI’_4 | frame −1 | from 1 to 60 |
| SEQ ID NO: 1498 | ‘42588.1_gaiger.ABI’_5 | frame −2 | from 1 to 53 |
| SEQ ID NO: 1499 | ‘42609.1_gaiger.ABI’_1 | frame 1 | from 1 to 51 |
| SEQ ID NO: 1500 | ‘42609.1_gaiger.ABI’_2 | frame 2 | from 1 to 79 |
| SEQ ID NO: 1501 | ‘42609.1_gaiger.ABI’_3 | frame −1 | from 10 to 80 |
| SEQ ID NO: 1502 | ‘42609.1_gaiger.ABI’_4 | frame −3 | from 2 to 68 |
| SEQ ID NO: 1503 | ‘42703.1_gaiger.ABI’_1 | frame 2 | from 25 to 95 |
| SEQ ID NO: 1504 | ‘42703.1_gaiger.ABI’_2 | frame −2 | from 10 to 82 |
| SEQ ID NO: 1505 | R0234:E06_1 | frame 3 | from 4 to 77 |
| SEQ ID NO: 1506 | R0234:E06_2 | frame −1 | from 1 to 66 |
| SEQ ID NO: 1507 | R0235:A09_1 | frame 3 | from 1 to 98 |
| SEQ ID NO: 1508 | R0235:A09_2 | frame −1 | from 15 to 76 |
| SEQ ID NO: 1509 | R0235:A09_3 | frame −2 | from 2 to 98 |
| SEQ ID NO: 1510 | R0235:A09_4 | frame −3 | from 1 to 54 |
| SEQ ID NO: 1511 | R0235:D01_1 | frame 1 | from 1 to 137 |
| SEQ ID NO: 1512 | R0235:D01_2 | frame 3 | from 1 to 67 |
| SEQ ID NO: 1513 | R0235:D01_3 | frame −1 | from 1 to 137 |
| SEQ ID NO: 1514 | R0235:D01_4 | frame −2 | from 1 to 61 |
| SEQ ID NO: 1515 | R0236:D04_1 | frame 1 | from 1 to 87 |
| SEQ ID NO: 1516 | R0236:D04_2 | frame 2 | from 1 to 113 |
| SEQ ID NO: 1517 | R0236:D04_3 | frame −1 | from 1 to 79 |
| SEQ ID NO: 1518 | R0236:F10_1 | frame 1 | from 1 to 51 |
| SEQ ID NO: 1519 | R0236:F10_2 | frame 2 | from 1 to 79 |
| SEQ ID NO: 1520 | R0236:F10_3 | frame −1 | from 10 to 80 |
| SEQ ID NO: 1521 | R0236:F10_4 | frame −3 | from 1 to 68 |
| SEQ ID NO: 1522 | R0236:G10_1 | frame 2 | from 1 to 117 |
| SEQ ID NO: 1523 | R0236:G10_2 | frame −3 | from 42 to 109 |
| SEQ ID NO: 1524 | R0236:G08_1 | frame 2 | from 1 to 88 |
| SEQ ID NO: 1525 | R0236:G08_2 | frame 3 | from 34 to 88 |
| SEQ ID NO: 1526 | R0249:D01_1 | frame 1 | from 25 to 76 |
| SEQ ID NO: 1527 | R0249:D01_2 | frame 2 | from 1 to 75 |
| SEQ ID NO: 1528 | R0249:D01_3 | frame −1 | from 1 to 76 |
| SEQ ID NO: 1529 | R0249:D01_4 | frame −2 | from 1 to 52 |
| SEQ ID NO: 1530 | R0249:G04_1 | frame 1 | from 1 to 96 |
| SEQ ID NO: 1531 | R0249:G04_2 | frame 2 | from 30 to 83 |
| SEQ ID NO: 1532 | R0249:G04_3 | frame 3 | from 13 to 71 |
| SEQ ID NO: 1533 | R0249:G04_4 | frame 3 | from 120 to 174 |
| SEQ ID NO: 1534 | R0249:G04_5 | frame −3 | from 1 to 66 |
| SEQ ID NO: 1535 | R0250:A10_1 | frame 1 | from 127 to 180 |
| SEQ ID NO: 1536 | R0250:A10_2 | frame −1 | from 1 to 55 |
| SEQ ID NO: 1537 | R0250:A10_3 | frame −2 | from 20 to 80 |
| SEQ ID NO: 1538 | R0250:A10_4 | frame −3 | from 1 to 96 |
| SEQ ID NO: 1539 | R0250:E12_1 | frame 1 | from 1 to 115 |
| SEQ ID NO: 1540 | R0250:E12_2 | frame 3 | from 60 to 109 |
| SEQ ID NO: 1541 | R0250:E12_3 | frame −2 | from 1 to 114 |
| SEQ ID NO: 1542 | R0250:E12_4 | frame −3 | from 35 to 108 |
| SEQ ID NO: 1543 | R0250:F12_1 | frame 1 | from 1 to 55 |
| SEQ ID NO: 1544 | R0250:F12_2 | frame 2 | from 20 to 80 |
| SEQ ID NO: 1545 | R0250:F12_3 | frame 3 | from 1 to 96 |
| SEQ ID NO: 1546 | R0250:F12_4 | frame −1 | from 127 to 180 |
| SEQ ID NO: 1547 | R0251:B08_1 | frame 1 | from 121 to 172 |
| SEQ ID NO: 1548 | R0251:B08_2 | frame −2 | from 61 to 122 |
| SEQ ID NO: 1549 | R0251:B08_3 | frame −3 | from 9 to 70 |
| SEQ ID NO: 1550 | R0251:B08_4 | frame −3 | from 72 to 133 |
| SEQ ID NO: 1551 | R0252:A08_1 | frame 1 | from 1 to 64 |
| SEQ ID NO: 1552 | R0252:A08_2 | frame 2 | from 12 to 64 |
| SEQ ID NO: 1553 | R0252:A08_3 | frame −1 | from 1 to 51 |
| SEQ ID NO: 1554 | R0252:A08_4 | frame −2 | from 1 to 64 |
| SEQ ID NO: 1555 | R0252:F11_1 | frame 1 | from 1 to 94 |
| SEQ ID NO: 1556 | R0252:F11_2 | frame 3 | from 1 to 61 |
| SEQ ID NO: 1557 | R0252:F11_3 | frame −2 | from 12 to 69 |
| SEQ ID NO: 1558 | R0252:F11_4 | frame −3 | from 1 to 139 |
| SEQ ID NO: 1559 | R0252:F02_1 | frame 1 | from 1 to 66 |
| SEQ ID NO: 1560 | R0252:F02_2 | frame 2 | from 57 to 107 |
| SEQ ID NO: 1561 | R0252:F02_3 | frame 2 | from 109 to 160 |
| SEQ ID NO: 1562 | R0252:F02_4 | frame 3 | from 35 to 159 |
| SEQ ID NO: 1563 | R0252:F02_5 | frame −1 | from 27 to 115 |
| SEQ ID NO: 1564 | R0252:F02_6 | frame −3 | from 4 to 65 |
| SEQ ID NO: 1565 | R0252:F02_7 | frame −3 | from 96 to 159 |
| SEQ ID NO: 1566 | R0252:G11_1 | frame 1 | from 1 to 131 |
| SEQ ID NO: 1567 | R0252:G11_2 | frame 2 | from 51 to 105 |
| SEQ ID NO: 1568 | R0252:G11_3 | frame −1 | from 13 to 131 |
| SEQ ID NO: 1569 | R0252:G11_4 | frame −2 | from 61 to 113 |
| SEQ ID NO: 1570 | R0253:E10_1 | frame 2 | from 46 to 118 |
| SEQ ID NO: 1571 | R0253:E10_2 | frame −1 | from 84 to 139 |
| SEQ ID NO: 1572 | R0253:G11_1 | frame 2 | from 1 to 194 |
| SEQ ID NO: 1573 | R0253:G11_2 | frame 3 | from 102 to 153 |
| SEQ ID NO: 1574 | R0253:G11_3 | frame −1 | from 1 to 55 |
| SEQ ID NO: 1575 | R0253:G11_4 | frame −1 | from 117 to 182 |
| SEQ ID NO: 1576 | R0253:G11_5 | frame −3 | from 30 to 88 |
| SEQ ID NO: 1577 | R0253:G11_6 | frame −3 | from 90 to 149 |
| SEQ ID NO: 1578 | R0254:A08_1 | frame 3 | from 1 to 85 |
| SEQ ID NO: 1579 | R0254:A08_2 | frame −1 | from 47 to 98 |
| SEQ ID NO: 1580 | R0254:E04_1 | frame 2 | from 12 to 65 |
| SEQ ID NO: 1581 | R0254:E04_2 | frame 3 | from 49 to 135 |
| SEQ ID NO: 1582 | R0254:F07_1 | frame 1 | from 69 to 153 |
| SEQ ID NO: 1583 | R0254:F07_2 | frame −1 | from 87 to 142 |
| SEQ ID NO: 1584 | R0254:F07_3 | frame −2 | from 47 to 116 |
| SEQ ID NO: 1585 | R0254:F07_4 | frame −3 | from 1 to 82 |
| SEQ ID NO: 1586 | R0254:F07_5 | frame −3 | from 99 to 154 |
| SEQ ID NO: 1587 | R0237:F12_1 | frame 2 | from 64 to 115 |
| SEQ ID NO: 1588 | R0237:F12_2 | frame 3 | from 1 to 99 |
| SEQ ID NO: 1589 | R0237:F12_3 | frame −1 | from 1 to 145 |
| SEQ ID NO: 1590 | R0237:F12_4 | frame −2 | from 19 to 134 |
| SEQ ID NO: 1591 | R0238:B02_1 | frame 3 | from 50 to 111 |
| SEQ ID NO: 1592 | R0238:B02_2 | frame −2 | from 102 to 187 |
| SEQ ID NO: 1593 | R0239:H02_1 | frame 3 | from 1 to 97 |
| SEQ ID NO: 1594 | R0255:F12_1 | frame 3 | from 1 to 57 |
| SEQ ID NO: 1595 | R0255:F12_2 | frame −2 | from 1 to 78 |
| SEQ ID NO: 1596 | R0258:B10_1 | frame 2 | from 1 to 130 |
| SEQ ID NO: 1597 | R0258:B10_2 | frame 3 | from 1 to 73 |
| SEQ ID NO: 1598 | R0258:B10_3 | frame −2 | from 86 to 142 |
| SEQ ID NO: 1599 | R0258:B10_4 | frame −3 | from 1 to 69 |
| SEQ ID NO: 1600 | R0259:C06_1 | frame −1 | from 36 to 100 |
| SEQ ID NO: 1601 | R0259:C06_2 | frame −2 | from 124 to 187 |
| SEQ ID NO: 1602 | R0261:A09_1 | frame 1 | from 1 to 174 |
| SEQ ID NO: 1603 | R0261:A09_2 | frame 2 | from 34 to 89 |
| SEQ ID NO: 1604 | R0261:A09_3 | frame 3 | from 1 to 52 |
| SEQ ID NO: 1605 | R0261:A09_4 | frame −1 | from 121 to 174 |
| SEQ ID NO: 1606 | R0261:A09_5 | frame −2 | from 47 to 116 |
| SEQ ID NO: 1607 | R0261:A09_6 | frame −2 | from 125 to 174 |
| SEQ ID NO: 1608 | R0261:A09_7 | frame −3 | from 32 to 174 |
| SEQ ID NO: 1609 | R0261:B10_1 | frame 1 | from 1 to 79 |
| SEQ ID NO: 1610 | R0261:B10_2 | frame −1 | from 1 to 87 |
| SEQ ID NO: 1611 | R0261:B10_3 | frame −2 | from 1 to 113 |
| SEQ ID NO: 1612 | R0261:C10_1 | frame 2 | from 6 to 120 |
| SEQ ID NO: 1613 | R0261:C10_2 | frame 3 | from 103 to 157 |
| SEQ ID NO: 1614 | R0261:C10_3 | frame −1 | from 25 to 75 |
| SEQ ID NO: 1615 | R0261:D03_1 | frame 1 | from 44 to 179 |
| SEQ ID NO: 1616 | R0261:D03_2 | frame 2 | from 12 to 90 |
| SEQ ID NO: 1617 | R0261:D03_3 | frame 2 | from 92 to 164 |
| SEQ ID NO: 1618 | R0261:D03_4 | frame 3 | from 40 to 96 |
| SEQ ID NO: 1619 | R0261:D03_5 | frame 3 | from 98 to 186 |
| SEQ ID NO: 1620 | R0261:D03_6 | frame −1 | from 37 to 160 |
| SEQ ID NO: 1621 | R0261:D03_7 | frame −2 | from 22 to 144 |
| SEQ ID NO: 1622 | R0261:D06_1 | frame 2 | from 1 to 117 |
| SEQ ID NO: 1623 | R0261:D06_2 | frame −2 | from 1 to 117 |
| SEQ ID NO: 1624 | R0261:D06_3 | frame −3 | from 35 to 117 |
| SEQ ID NO: 1625 | R0261:E10_1 | frame 1 | from 1 to 67 |
| SEQ ID NO: 1626 | R0261:F10_1 | frame 1 | from 103 to 154 |
| SEQ ID NO: 1627 | R0261:F10_2 | frame 2 | from 5 to 106 |
| SEQ ID NO: 1628 | R0261:F10_3 | frame 3 | from 24 to 109 |
| SEQ ID NO: 1629 | R0261:F10_4 | frame −1 | from 93 to 154 |
| SEQ ID NO: 1630 | R0261:G04_1 | frame 2 | from 13 to 111 |
| SEQ ID NO: 1631 | R0261:G04_2 | frame 3 | from 91 to 147 |
| SEQ ID NO: 1632 | R0261:G04_3 | frame −1 | from 83 to 169 |
| SEQ ID NO: 1633 | R0261:G04_4 | frame −2 | from 4 to 56 |
| SEQ ID NO: 1634 | R0261:G04_5 | frame −3 | from 123 to 181 |
| SEQ ID NO: 1635 | R0262:A12_1 | frame −1 | from 35 to 132 |
| SEQ ID NO: 1636 | R0262:A03_1 | frame 2 | from 1 to 66 |
| SEQ ID NO: 1637 | R0262:A03_2 | frame −1 | from 1 to 84 |
| SEQ ID NO: 1638 | R0262:A03_3 | frame −3 | from 1 to 64 |
| SEQ ID NO: 1639 | R0262:B09_1 | frame 1 | from 1 to 59 |
| SEQ ID NO: 1640 | R0262:B09_2 | frame 2 | from 57 to 107 |
| SEQ ID NO: 1641 | R0262:B09_3 | frame 2 | from 109 to 190 |
| SEQ ID NO: 1642 | R0262:B09_4 | frame 3 | from 35 to 189 |
| SEQ ID NO: 1643 | R0262:B09_5 | frame −1 | from 1 to 55 |
| SEQ ID NO: 1644 | R0262:B09_6 | frame −1 | from 57 to 145 |
| SEQ ID NO: 1645 | R0262:B09_7 | frame −3 | from 34 to 95 |
| SEQ ID NO: 1646 | R0262:B09_8 | frame −3 | from 126 to 189 |
| SEQ ID NO: 1647 | R0262:C04_1 | frame 1 | from 18 to 75 |
| SEQ ID NO: 1648 | R0262:C04_2 | frame 2 | from 7 to 77 |
| SEQ ID NO: 1649 | R0262:C04_3 | frame −2 | from 67 to 139 |
| SEQ ID NO: 1650 | R0262:C04_4 | frame −3 | from 1 to 88 |
| SEQ ID NO: 1651 | R0262:D11_1 | frame 1 | from 22 to 90 |
| SEQ ID NO: 1652 | R0262:D11_2 | frame 2 | from 1 to 57 |
| SEQ ID NO: 1653 | R0262:D11_3 | frame 2 | from 59 to 124 |
| SEQ ID NO: 1654 | R0262:D11_4 | frame −2 | from 1 to 67 |
| SEQ ID NO: 1655 | R0262:D11_5 | frame −3 | from 26 to 124 |
| SEQ ID NO: 1656 | R0262:D12_1 | frame 2 | from 4 to 118 |
| SEQ ID NO: 1657 | R0262:D04_1 | frame 1 | from 26 to 95 |
| SEQ ID NO: 1658 | R0262:D04_2 | frame 3 | from 32 to 94 |
| SEQ ID NO: 1659 | R0262:D04_3 | frame −2 | from 16 to 65 |
| SEQ ID NO: 1660 | R0262:D04_4 | frame −3 | from 1 to 92 |
| SEQ ID NO: 1661 | R0262:D07_1 | frame 1 | from 102 to 156 |
| SEQ ID NO: 1662 | R0262:D07_2 | frame 3 | from 4 to 118 |
| SEQ ID NO: 1663 | R0262:D07_3 | frame −1 | from 20 to 70 |
| SEQ ID NO: 1664 | R0262:E02_1 | frame 1 | from 7 to 121 |
| SEQ ID NO: 1665 | R0262:E02_2 | frame 2 | from 104 to 158 |
| SEQ ID NO: 1666 | R0262:E02_3 | frame −2 | from 27 to 77 |
| SEQ ID NO: 1667 | R0262:G05_1 | frame 3 | from 50 to 111 |
| SEQ ID NO: 1668 | R0262:G05_2 | frame −1 | from 49 to 134 |
| SEQ ID NO: 1669 | R0263:B10_1 | frame 2 | from 46 to 115 |
| SEQ ID NO: 1670 | R0263:B10_2 | frame −2 | from 12 to 61 |
| SEQ ID NO: 1671 | R0263:B06_1 | frame 3 | from 1 to 115 |
| SEQ ID NO: 1672 | R0263:B06_2 | frame −1 | from 52 to 116 |
| SEQ ID NO: 1673 | R0263:B06_3 | frame −2 | from 2 to 78 |
| SEQ ID NO: 1674 | R0263:B06_4 | frame −3 | from 15 to 87 |
| SEQ ID NO: 1675 | R0263:B09_1 | frame 2 | from 1 to 199 |
| SEQ ID NO: 1676 | R0263:B09_2 | frame −1 | from 1 to 76 |
| SEQ ID NO: 1677 | R0263:B09_3 | frame −1 | from 78 to 199 |
| SEQ ID NO: 1678 | R0263:B09_4 | frame −2 from 140 to 195 | |
| SEQ ID NO: 1679 | R0263:D11_1 | frame 1 | from 12 to 98 |
| SEQ ID NO: 1680 | R0263:D11_2 | frame 3 | from 22 to 76 |
| SEQ ID NO: 1681 | R0263:D11_3 | frame −2 | from 4 to 126 |
| SEQ ID NO: 1682 | R0263:D07_1 | frame 1 | from 1 to 191 |
| SEQ ID NO: 1683 | R0263:D07_2 | frame −1 | from 1 to 51 |
| SEQ ID NO: 1684 | R0263:D07_3 | frame −1 | from 91 to 141 |
| SEQ ID NO: 1685 | R0263:D07_4 | frame −2 | from 98 to 152 |
| SEQ ID NO: 1686 | R0263:E03_1 | frame 3 | from 50 to 111 |
| SEQ ID NO: 1687 | R0263:E03_2 | frame −1 | from 119 to 204 |
| SEQ ID NO: 1688 | R0263:F08_1 | frame 3 | from 1 to 95 |
| SEQ ID NO: 1689 | R0263:G03_1 | frame 1 | from 90 to 139 |
| SEQ ID NO: 1690 | R0263:G03_2 | frame 2 | from 13 to 106 |
| SEQ ID NO: 1691 | R0263:G03_3 | frame −1 | from 3 to 55 |
| SEQ ID NO: 1692 | R0263:G03_4 | frame −2 | from 122 to 180 |
| SEQ ID NO: 1693 | R0263:G03_5 | frame −3 | from 77 to 167 |
| SEQ ID NO: 1694 | R0263:H10_1 | frame 1 | from 1 to 55 |
| SEQ ID NO: 1695 | R0263:H10_2 | frame 1 | from 99 to 152 |
| SEQ ID NO: 1696 | R0263:H10_3 | frame 3 | from 1 to 147 |
| SEQ ID NO: 1697 | R0263:H10_4 | frame −1 | from 6 to 140 |
| SEQ ID NO: 1698 | R0263:H10_5 | frame −3 | from 1 to 151 |
| SEQ ID NO: 1699 | R0263:H02_1 | frame 1 | from 4 to 63 |
| SEQ ID NO: 1700 | R0263:H02_2 | frame 1 | from 65 to 121 |
| SEQ ID NO: 1701 | R0263:H02_3 | frame 2 | from 1 to 50 |
| SEQ ID NO: 1702 | R0263:H02_4 | frame 2 | from 52 to 104 |
| SEQ ID NO: 1703 | R0263:H02_5 | frame −1 | from 13 to 77 |
| SEQ ID NO: 1704 | R0263:H02_6 | frame −1 | from 98 to 161 |
| SEQ ID NO: 1705 | R0263:H02_7 | frame −2 | from 3 to 54 |
| SEQ ID NO: 1706 | R0263:H02_8 | frame −2 | from 56 to 122 |
| SEQ ID NO: 1707 | R0264:B11_1 | frame 2 | from 6 to 120 |
| SEQ ID NO: 1708 | R0264:B11_2 | frame 3 | from 103 to 157 |
| SEQ ID NO: 1709 | R0264:B11_3 | frame −1 | from 30 to 80 |
| SEQ ID NO: 1710 | R0264:D03_1 | frame 1 | from 100 to 157 |
| SEQ ID NO: 1711 | R0264:D03_2 | frame 3 | from 16 to 91 |
| SEQ ID NO: 1712 | R0264:D03_3 | frame 3 | from 94 to 156 |
| SEQ ID NO: 1713 | R0264:D03_4 | frame −2 | from 1 to 156 |
| SEQ ID NO: 1714 | R0264:E12_1 | frame 3 | from 50 to 111 |
| SEQ ID NO: 1715 | R0264:E12_2 | frame −1 | from 78 to 163 |
| SEQ ID NO: 1716 | R0264:F11_1 | frame 1 | from 13 to 81 |
| SEQ ID NO: 1717 | R0264:F11_2 | frame −1 | from 1 to 102 |
| SEQ ID NO: 1718 | R0264:F11_3 | frame −2 | from 25 to 101 |
| SEQ ID NO: 1719 | R0264:F11_4 | frame −3 | from 42 to 101 |
| SEQ ID NO: 1720 | R0264:F09_1 | frame 1 | from 7 to 121 |
| SEQ ID NO: 1721 | R0264:F09_2 | frame 2 | from 104 to 158 |
| SEQ ID NO: 1722 | R0264:F09_3 | frame −3 | from 25 to 75 |
| SEQ ID NO: 1723 | R0264:G03_1 | frame 1 | from 1 to 62 |
| SEQ ID NO: 1724 | R0264:G03_2 | frame −1 | from 1 to 62 |
| SEQ ID NO: 1725 | R0264:G03_3 | frame −2 | from 2 to 61 |
| SEQ ID NO: 1726 | R0264:G04_1 | frame 2 | from 6 to 93 |
| SEQ ID NO: 1727 | R0264:G06_1 | frame 1 | from 50 to 106 |
| SEQ ID NO: 1728 | R0264:G09_1 | frame 2 | from 46 to 110 |
| SEQ ID NO: 1729 | R0264:G09_2 | frame −2 | from 1 to 56 |
| SEQ ID NO: 1730 | R0264:H04_1 | frame 1 | from 58 to 130 |
| SEQ ID NO: 1731 | R0264:H04_2 | frame 3 | from 78 to 129 |
| SEQ ID NO: 1732 | R0264:H04_3 | frame −1 | from 67 to 130 |
| SEQ ID NO: 1733 | R0264:H04_4 | frame −3 | from 44 to 95 |
| SEQ ID NO: 1734 | R0265:A09_1 | frame 1 | from 1 to 59 |
| SEQ ID NO: 1735 | R0265:A09_2 | frame 2 | from 54 to 107 |
| SEQ ID NO: 1736 | R0265:A09_3 | frame 3 | from 35 to 153 |
| SEQ ID NO: 1737 | R0265:A09_4 | frame −2 | from 1 to 59 |
| SEQ ID NO: 1738 | R0265:A09_5 | frame −2 | from 90 to 153 |
| SEQ ID NO: 1739 | R0265:A09_6 | frame −3 | from 20 to 108 |
| SEQ ID NO: 1740 | R0265:D10_1 | frame 1 | from 118 to 175 |
| SEQ ID NO: 1741 | R0265:D10_2 | frame 3 | from 7 to 100 |
| SEQ ID NO: 1742 | R0265:D10_3 | frame −2 | from 77 to 169 |
| SEQ ID NO: 1743 | R0265:D07_1 | frame 3 | from 50 to 111 |
| SEQ ID NO: 1744 | R0265:D07_2 | frame −1 | from 70 to 185 |
| SEQ ID NO: 1745 | R0265:E12_1 | frame 1 | from 1 to 87 |
| SEQ ID NO: 1746 | R0265:E12_2 | frame 2 | from 1 to 113 |
| SEQ ID NO: 1747 | R0265:E12_3 | frame −1 | from 1 to 79 |
| SEQ ID NO: 1748 | R0265:F12_1 | frame 1 | from 75 to 126 |
| SEQ ID NO: 1749 | R0265:F12_2 | frame 2 | from 46 to 160 |
| SEQ ID NO: 1750 | R0265:F12_3 | frame −1 | from 36 to 87 |
| SEQ ID NO: 1751 | R0265:F12_4 | frame −3 | from 78 to 133 |
| SEQ ID NO: 1752 | R0265:H04_1 | frame 2 | from 64 to 149 |
| SEQ ID NO: 1753 | R0265:H04_2 | frame −3 | from 50 to 111 |
| SEQ ID NO: 1754 | R0265:H09_1 | frame 1 | from 1 to 191 |
| SEQ ID NO: 1755 | R0265:H09_2 | frame −1 | from 1 to 51 |
| SEQ ID NO: 1756 | R0265:H09_3 | frame −1 | from 91 to 141 |
| SEQ ID NO: 1757 | R0265:H09_4 | frame −2 | from 98 to 152 |
| SEQ ID NO: 1758 | R0266:A10_1 | frame 1 | from 1 to 87 |
| SEQ ID NO: 1759 | R0266:A10_2 | frame 2 | from 1 to 113 |
| SEQ ID NO: 1760 | R0266:A10_3 | frame −1 | from 1 to 79 |
| SEQ ID NO: 1761 | R0266:A12_1 | frame 1 | from 1 to 106 |
| SEQ ID NO: 1762 | R0266:A12_2 | frame 1 | from 133 to 185 |
| SEQ ID NO: 1763 | R0266:A12_3 | frame 2 | from 89 to 143 |
| SEQ ID NO: 1764 | R0266:A12_4 | frame 2 | from 147 to 197 |
| SEQ ID NO: 1765 | R0266:A12_5 | frame −3 | from 51 to 101 |
| SEQ ID NO: 1766 | R0266:B02_1 | frame 1 | from 68 to 168 |
| SEQ ID NO: 1767 | R0266:B02_2 | frame 2 | from 44 to 167 |
| SEQ ID NO: 1768 | R0266:B02_3 | frame −1 | from 1 to 100 |
| SEQ ID NO: 1769 | R0266:C12_1 | frame 1 | from 7 to 121 |
| SEQ ID NO: 1770 | R0266:C12_2 | frame 1 | from 148 to 200 |
| SEQ ID NO: 1771 | R0266:C12_3 | frame 2 | from 104 to 158 |
| SEQ ID NO: 1772 | R0266:C12_4 | frame −3 | from 41 to 93 |
| SEQ ID NO: 1773 | R0266:E08_1 | frame 1 | from 1 to 54 |
| SEQ ID NO: 1774 | R0266:E08_2 | frame 3 | from 1 to 63 |
| SEQ ID NO: 1775 | R0266:E08_3 | frame 3 | from 128 to 195 |
| SEQ ID NO: 1776 | R0266:E08_4 | frame −1 | from 51 to 122 |
| SEQ ID NO: 1777 | R0266:E08_5 | frame −1 | from 124 to 175 |
| SEQ ID NO: 1778 | R0266:E08_6 | frame −3 | from 9 to 68 |
| SEQ ID NO: 1779 | R0266:E08_7 | frame −3 | from 83 to 134 |
| SEQ ID NO: 1780 | R0266:F03_1 | frame 1 | from 64 to 141 |
| SEQ ID NO: 1781 | R0266:F03_2 | frame 2 | from 8 to 141 |
| SEQ ID NO: 1782 | R0266:F03_3 | frame 3 | from 39 to 104 |
| SEQ ID NO: 1783 | R0266:F03_4 | frame −2 | from 1 to 141 |
| SEQ ID NO: 1784 | R0266:F06_1 | frame 1 | from 23 to 75 |
| SEQ ID NO: 1785 | R0266:F06_2 | frame 3 | from 150 to 200 |
| SEQ ID NO: 1786 | R0266:F06_3 | frame −1 | from 109 to 175 |
| SEQ ID NO: 1787 | R0266:F06_4 | frame −2 | from 143 to 200 |
| SEQ ID NO: 1788 | R0266:F07_1 | frame −3 | from 37 to 97 |
| SEQ ID NO: 1789 | R0266:F07_2 | frame −3 | from 138 to 188 |
| SEQ ID NO: 1790 | R0266:G12_1 | frame 1 | from 1 to 192 |
| SEQ ID NO: 1791 | R0266:G12_2 | frame 2 | from 94 to 168 |
| SEQ ID NO: 1792 | R0266:G12_3 | frame −2 | from 65 to 128 |
| SEQ ID NO: 1793 | R0266:G12_4 | frame −3 | from 17 to 120 |
| SEQ ID NO: 1794 | R0266:G12_5 | frame −3 | from 122 to 192 |
| SEQ ID NO: 1795 | R0266:G09_1 | frame 1 | from 7 to 121 |
| SEQ ID NO: 1796 | R0266:G09_2 | frame 2 | from 104 to 158 |
| SEQ ID NO: 1797 | R0266:G09_3 | frame −2 | from 28 to 78 |
| SEQ ID NO: 1798 | R0242:E03_1 | frame 1 | from 1 to 54 |
| SEQ ID NO: 1799 | R0242:E03_2 | frame 2 | from 38 to 93 |
| SEQ ID NO: 1800 | R0244:C04_1 | frame 1 | from 19 to 77 |
| SEQ ID NO: 1801 | R0244:C04_2 | frame 2 | from 13 to 76 |
| SEQ ID NO: 1802 | R0244:C04_3 | frame 3 | from 20 to 76 |
| SEQ ID NO: 1803 | R0244:C04_4 | frame −1 | from 15 to 65 |
| SEQ ID NO: 1804 | R0244:C06_1 | frame 2 | from 38 to 111 |
| SEQ ID NO: 1805 | R0244:C06_2 | frame −1 | from 58 to 134 |
| SEQ ID NO: 1806 | R0244:C06_3 | frame −2 | from 14 to 98 |
| SEQ ID NO: 1807 | R0245:A02_1 | frame 2 | from 12 to 61 |
| SEQ ID NO: 1808 | R0245:A02_2 | frame −3 | from 42 to 92 |
| SEQ ID NO: 1809 | R0245:D12_1 | frame 2 | from 1 to 92 |
| SEQ ID NO: 1810 | R0245:D12_2 | frame −3 | from 4 to 53 |
| SEQ ID NO: 1811 | R0246:D10_1 | frame 3 | from 30 to 95 |
| SEQ ID NO: 1812 | R0246:D10_2 | frame −1 | from 1 to 83 |
| SEQ ID NO: 1813 | R0246:D10_3 | frame −2 | from 14 to 95 |
| SEQ ID NO: 1814 | R0246:D10_4 | frame −3 | from 1 to 53 |
| SEQ ID NO: 1815 | ‘46377.1_gaiger.ABI’_1 | frame 1 | from 1 to 116 |
| SEQ ID NO: 1816 | ‘46377.1_gaiger.ABI’_2 | frame −1 | from 16 to 66 |
| SEQ ID NO: 1817 | ‘46377.1_gaiger.ABI’_3 | frame −2 | from 23 to 77 |
| SEQ ID NO: 1818 | ‘46403.1_gaiger.ABI’_1 | frame 1 | from 1 to 63 |
| SEQ ID NO: 1819 | ‘46403.1_gaiger.ABI’_2 | frame 2 | from 25 to 94 |
| SEQ ID NO: 1820 | ‘46403.1_gaiger.ABI’_3 | frame −3 | from 19 to 94 |
| SEQ ID NO: 1821 | ‘46489.1;gaiger.ABI’_1 | frame 1 | from 1 to 70 |
| SEQ ID NO: 1822 | ‘46489.1;gaiger.ABI’_2 | frame −1 | from 1 to 70 |
| SEQ ID NO: 1823 | ‘46489.1;gaiger.ABI’_3 | frame −2 | from 1 to 64 |
| SEQ ID NO: 1824 | ‘46872.1_gaiger.ABI’_1 | frame 3 | from 4 to 77 |
| SEQ ID NO: 1825 | ‘46872.1_gaiger.ABI’_2 | frame −1 | from 1 to 66 |
| SEQ ID NO: 1826 | ‘46883.1_gaiger.ABI’_1 | frame −1 | from 1 to 76 |
| SEQ ID NO: 1827 | ‘46880.1_gaiger.ABI’_1 | frame 2 | from 36 to 95 |
| SEQ ID NO: 1828 | ‘46880.1_gaiger.ABI’_2 | frame 3 | from 1 to 95 |
| SEQ ID NO: 1829 | ‘46880.1_gaiger.ABI’_3 | frame −1 | from 32 to 81 |
| SEQ ID NO: 1830 | ‘46977.1_gaiger.ABI’_1 | frame −2 | from 1 to 62 |
| SEQ ID NO: 1831 | ‘46977.1_gaiger.ABI’_2 | frame −3 | from 1 to 94 |
| SEQ ID NO: 1832 | ‘47011.1_gaiger.ABI’_1 | frame 1 | from 1 to 102 |
| SEQ ID NO: 1833 | ‘47011.1_gaiger.ABI’_2 | frame 3 | from 42 to 101 |
| SEQ ID NO: 1834 | ‘47011.1_gaiger.ABI’_3 | frame −1 | from 32 to 81 |
| SEQ ID NO: 1835 | ‘51658.1_gaiger.ABI’_1 | frame 2 | from 5 to 80 |
| SEQ ID NO: 1836 | ‘51658.1_gaiger.ABI’_2 | frame 3 | from 10 to 77 |
| SEQ ID NO: 1837 | ‘51734.1_gaiger.ABI’_1 | frame 1 | from 12 to 98 |
| SEQ ID NO: 1838 | ‘51734.1_gaiger.ABI’_2 | frame 3 | from 22 to 76 |
| SEQ ID NO: 1839 | ‘51734.1_gaiger.ABI’_3 | frame −2 | from 18 to 137 |
| SEQ ID NO: 1840 | ‘51870.1_gaiger.ABI’_1 | frame 3 | from 33 to 107 |
| SEQ ID NO: 1841 | ‘51870.1_gaiger.ABI’_2 | frame −2 | from 27 to 85 |
| SEQ ID NO: 1842 | ‘51870.1_gaiger.ABI’_3 | frame −3 | from 65 to 115 |
| SEQ ID NO: 1843 | 1404:A06_1 | frame 1 | from 29 to 102 |
| SEQ ID NO: 1844 | 1404:A06_2 | frame −3 | from 10 to 59 |
| SEQ ID NO: 1845 | 1404:B12_1 | frame 2 | from 1 to 93 |
| SEQ ID NO: 1846 | 1404:B12_2 | frame −2 | from 76 to 131 |
| SEQ ID NO: 1847 | 1404:E11_1 | frame 3 | from 1 to 64 |
| SEQ ID NO: 1848 | 1404:E11_2 | frame 3 | from 106 to 158 |
| SEQ ID NO: 1849 | 1404:E11_3 | frame −2 | from 28 to 81 |
| SEQ ID NO: 1850 | 1405:A11_1 | frame 2 | from 1 to 188 |
| SEQ ID NO: 1851 | 1405:A11_2 | frame −1 | from 20 to 69 |
| SEQ ID NO: 1852 | 1405:A11_3 | frame −2 | from 34 to 99 |
| SEQ ID NO: 1853 | 1405:A11_4 | frame −3 | from 1 to 71 |
| SEQ ID NO: 1854 | ‘52280.1_gaiger.ABI’_1 | frame 2 | from 1 to 80 |
| SEQ ID NO: 1855 | ‘52280.1_gaiger.ABI’_2 | frame 3 | from 16 to 127 |
| SEQ ID NO: 1856 | ‘52280.1_gaiger.ABI’_3 | frame −2 | from 1 to 127 |
| SEQ ID NO: 1857 | ‘52280.1_gaiger.ABI’_4 | frame −3 | from 1 to 51 |
| SEQ ID NO: 1858 | ‘52345.1_gaiger.ABI’_1 | frame 3 | from 74 to 126 |
| SEQ ID NO: 1859 | ‘52345.1_gaiger.ABI’_2 | frame −2 | from 85 to 141 |
| SEQ ID NO: 1860 | R0263:E03_1 | frame 3 | from 50 to 111 |
| SEQ ID NO: 1861 | R0263:E03_2 | frame −1 | from 119 to 204 |
| SEQ ID NO: 1862 | ‘41557.1_gaiger.ABI’_1 | frame 1 | from 16 to 73 |
| SEQ ID NO: 1863 | ‘41557.1_gaiger.ABI’_2 | frame 2 | from 1 to 109 |
| SEQ ID NO: 1864 | ‘41557.1_gaiger.ABI’_3 | frame −1 | from 11 to 110 |
| SEQ ID NO: 1865 | ‘41557.1_gaiger.ABI’_4 | frame −3 | from 1 to 103 |
| SEQ ID NO: 1866 | ‘41650.1_gaiger.ABI’_1 | frame 1 | from 22 to 109 |
| SEQ ID NO: 1867 | ‘41650.1_gaiger.ABI’_2 | frame 2 | from 1 to 157 |
| SEQ ID NO: 1868 | ‘41650.1_gaiger.ABI’_3 | frame 3 | from 1 to 156 |
| SEQ ID NO: 1869 | ‘41650.1_gaiger.ABI’_4 | frame −1 | from 25 to 99 |
| SEQ ID NO: 1870 | ‘41650.1_gaiger.ABI’_5 | frame −2 | from 47 to 157 |
| SEQ ID NO: 1871 | ‘41650.1_gaiger.ABI’_6 | frame −3 | from 53 to 156 |
| SEQ ID NO: 1872 | ‘41663.1_gaiger.ABI’_1 | frame −2 | from 64 to 116 |
| SEQ ID NO: 1873 | ‘41663.1_gaiger.ABI’_2 | frame −3 | from 1 to 67 |
| SEQ ID NO: 1874 | ‘41667.1_gaiger.ABI’_1 | frame 1 | from 1 to 56 |
| SEQ ID NO: 1875 | ‘41667.1_gaiger.ABI’_2 | frame 2 | from 1 to 56 |
| SEQ ID NO: 1876 | ‘41667.1_gaiger.ABI’_3 | frame −2 | from 1 to 56 |
| SEQ ID NO: 1877 | ‘41729.1_gaiger.ABI’_1 | frame 1 | from 64 to 114 |
| SEQ ID NO: 1878 | ‘41751.1_gaiger.ABI’_1 | frame 1 | from 27 to 82 |
| SEQ ID NO: 1879 | ‘41751.1_gaiger.ABI’_2 | frame 3 | from 1 to 50 |
| SEQ ID NO: 1880 | ‘41751.1_gaiger.ABI’_3 | frame −2 | from 1 to 70 |
| SEQ ID NO: 1881 | ‘41751.1_gaiger.ABI’_4 | frame −3 | from 1 to 53 |
| SEQ ID NO: 1882 | ‘41818.1_gaiger.ABI’_1 | frame 2 | from 1 to 69 |
| SEQ ID NO: 1883 | ‘41818.1_gaiger.ABI’_2 | frame −1 | from 30 to 93 |
| SEQ ID NO: 1884 | ‘41818.1_gaiger.ABI’_3 | frame −3 | from 1 to 92 |
| SEQ ID NO: 1885 | ‘41828.1_gaiger.ABI’_1 | frame −3 | from 1 to 77 |
| SEQ ID NO: 1886 | ‘41847.1_gaiger.ABI’_1 | frame −1 | from 1 to 97 |
| SEQ ID NO: 1887 | ‘41847.1_gaiger.ABI’_2 | frame −3 | from 1 to 56 |
| SEQ ID NO: 1888 | ‘41849.1_gaiger.ABI’_1 | frame 1 | from 1 to 75 |
| SEQ ID NO: 1889 | ‘41849.1_gaiger.ABI’_2 | frame 3 | from 4 to 77 |
| SEQ ID NO: 1890 | ‘41849.1_gaiger.ABI’_3 | frame −1 | from 12 to 77 |
| SEQ ID NO: 1891 | ‘41927.1_gaiger.ABI’_1 | frame 3 | from 20 to 74 |
| SEQ ID NO: 1892 | ‘41929.1_gaiger.ABI’_1 | frame 1 | from 1 to 52 |
| SEQ ID NO: 1893 | ‘41995.1_gaiger.ABI’_1 | frame 1 | from 1 to 115 |
| SEQ ID NO: 1894 | ‘41995.1_gaiger.ABI’_2 | frame 3 | from 60 to 109 |
| SEQ ID NO: 1895 | ‘41995.1_gaiger.ABI’_3 | frame −2 | from 1 to 114 |
| SEQ ID NO: 1896 | ‘41995.1_gaiger.ABI’_4 | frame −3 | from 35 to 108 |
| SEQ ID NO: 1897 | ‘42012.1_gaiger.ABI’_1 | frame 2 | from 1 to 60 |
| SEQ ID NO: 1898 | ‘42012.1_gaiger.ABI’_2 | frame −3 | from 1 to 60 |
| SEQ ID NO: 1899 | ‘42039.1_gaiger.ABI’_1 | frame 2 | from 70 to 127 |
| SEQ ID NO: 1900 | ‘42039.1_gaiger.ABI’_2 | frame 3 | from 1 to 146 |
| SEQ ID NO: 1901 | ‘42039.1_gaiger.ABI’_3 | frame −2 | from 39 to 100 |
| SEQ ID NO: 1902 | ‘42097.1_gaiger.ABI’_1 | frame 1 | from 24 to 132 |
| SEQ ID NO: 1903 | ‘42097.1_gaiger.ABI’_2 | frame −1 | from 52 to 132 |
| SEQ ID NO: 1904 | ‘42097.1_gaiger.ABI’_3 | frame −3 | from 34 to 92 |
| SEQ ID NO: 1905 | ‘42108.1_gaiger.ABI’_1 | frame −2 | from 4 to 77 |
| SEQ ID NO: 1906 | R0233:A06_1 | frame 1 | from 12 to 77 |
| SEQ ID NO: 1907 | R0233:A06_2 | frame 3 | from 2 to 76 |
| SEQ ID NO: 1908 | R0233:A06_3 | frame −3 | from 1 to 59 |
| SEQ ID NO: 1909 | R0233:C02_1 | frame 3 | from 26 to 90 |
| SEQ ID NO: 1910 | R0233:C02_2 | frame −2 | from 1 to 107 |
| SEQ ID NO: 1911 | R0233:C02_3 | frame −3 | from 1 to 74 |
| SEQ ID NO: 1912 | R0233:E06_1 | frame 1 | from 84 to 146 |
| SEQ ID NO: 1913 | R0233:E06_2 | frame 3 | from 1 to 181 |
| SEQ ID NO: 1914 | R0233:E06_3 | frame −2 | from 49 to 157 |
| SEQ ID NO: 1915 | R0233:F08_1 | frame 1 | from 11 to 110 |
| SEQ ID NO: 1916 | R0233:F08_2 | frame 3 | from 1 to 103 |
| SEQ ID NO: 1917 | R0233:F08_3 | frame −1 | from 16 to 73 |
| SEQ ID NO: 1918 | R0233:F08_4 | frame −2 | from 1 to 109 |
| SEQ ID NO: 1919 | ‘42328.1_gaiger.ABI’_1 | frame 2 | from 26 to 103 |
| SEQ ID NO: 1920 | ‘42328.1_gaiger.ABI’_2 | frame −2 | from 1 to 103 |
| SEQ ID NO: 1921 | ‘42588.1_gaiger.ABI’_1 | frame 1 | from 1 to 60 |
| SEQ ID NO: 1922 | ‘42588.1_gaiger.ABI’_2 | frame 2 | from 1 to 60 |
| SEQ ID NO: 1923 | ‘42588.1_gaiger.ABI’_3 | frame 3 | from 1 to 60 |
| SEQ ID NO: 1924 | ‘42588.1_gaiger.ABI’_4 | frame −1 | from 1 to 60 |
| SEQ ID NO: 1925 | ‘42588.1_gaiger.ABI’_5 | frame −2 | from 1 to 53 |
| SEQ ID NO: 1926 | ‘42703.1_gaiger.ABI’_1 | frame 2 | from 25 to 95 |
| SEQ ID NO: 1927 | ‘42703.1_gaiger.ABI’_2 | frame −2 | from 10 to 82 |
| SEQ ID NO: 1928 | R0234:B07_1 | frame 1 | from 84 to 146 |
| SEQ ID NO: 1929 | R0234:B07_2 | frame 3 | from 1 to 181 |
| SEQ ID NO: 1930 | R0234:B07_3 | frame −2 | from 49 to 157 |
| SEQ ID NO: 1931 | R0234:E06_1 | frame 3 | from 4 to 77 |
| SEQ ID NO: 1932 | R0234:E06_2 | frame −1 | from 1 to 66 |
| SEQ ID NO: 1933 | R0235:B03_1 | frame 1 | from 84 to 146 |
| SEQ ID NO: 1934 | R0235:B03_2 | frame 3 | from 1 to 169 |
| SEQ ID NO: 1935 | R0235:B03_3 | frame −1 | from 38 to 146 |
| SEQ ID NO: 1936 | R0235:E05_1 | frame 2 | from 2 to 57 |
| SEQ ID NO: 1937 | R0235:E05_2 | frame 2 | from 67 to 145 |
| SEQ ID NO: 1938 | R0235:E05_3 | frame −1 | from 74 to 187 |
| SEQ ID NO: 1939 | R0235:E05_4 | frame −2 | from 64 to 121 |
| SEQ ID NO: 1940 | R0236:A06_1 | frame 2 | from 1 to 150 |
| SEQ ID NO: 1941 | R0236:A06_2 | frame −2 | from 25 to 125 |
| SEQ ID NO: 1942 | R0236:D04_1 | frame 1 | from 1 to 87 |
| SEQ ID NO: 1943 | R0236:D04_2 | frame 2 | from 1 to 113 |
| SEQ ID NO: 1944 | R0236:D04_3 | frame −1 | from 1 to 79 |
| SEQ ID NO: 1945 | R0250:A10_1 | frame 1 | from 127 to 180 |
| SEQ ID NO: 1946 | R0250:A10_2 | frame −1 | from 1 to 55 |
| SEQ ID NO: 1947 | R0250:A10_3 | frame −2 | from 20 to 80 |
| SEQ ID NO: 1948 | R0250:A10_4 | frame −3 | from 1 to 96 |
| SEQ ID NO: 1949 | R0251:E09_1 | frame 3 | from 26 to 90 |
| SEQ ID NO: 1950 | R0251:E09_2 | frame −2 | from 1 to 107 |
| SEQ ID NO: 1951 | R0251:E09_3 | frame −3 | from 1 to 74 |
| SEQ ID NO: 1952 | R0252:F11_1 | frame 1 | from 1 to 94 |
| SEQ ID NO: 1953 | R0252:F11_2 | frame 3 | from 1 to 61 |
| SEQ ID NO: 1954 | R0252:F11_3 | frame −2 | from 12 to 69 |
| SEQ ID NO: 1955 | R0252:F11_4 | frame −3 | from 1 to 139 |
| SEQ ID NO: 1956 | R0238:B02_1 | frame 3 | from 50 to 111 |
| SEQ ID NO: 1957 | R0238:B02_2 | frame −2 | from 102 to 187 |
| SEQ ID NO: 1958 | R0239:H02_1 | frame 3 | from 1 to 97 |
| SEQ ID NO: 1959 | R0255:F12_1 | frame 3 | from 1 to 57 |
| SEQ ID NO: 1960 | R0255:F12_2 | frame −2 | from 1 to 78 |
| SEQ ID NO: 1961 | R0259:C06_1 | frame −1 | from 36 to 100 |
| SEQ ID NO: 1962 | R0259:C06_2 | frame −2 | from 124 to 187 |
| SEQ ID NO: 1963 | R0261:B10_1 | frame 1 | from 1 to 79 |
| SEQ ID NO: 1964 | R0261:B10_2 | frame −1 | from 1 to 87 |
| SEQ ID NO: 1965 | R0261:B10_3 | frame −2 | from 1 to 113 |
| SEQ ID NO: 1966 | R0261:D06_1 | frame 2 | from 1 to 117 |
| SEQ ID NO: 1967 | R0261:D06_2 | frame −2 | from 1 to 117 |
| SEQ ID NO: 1968 | R0261:D06_3 | frame −3 | from 35 to 117 |
| SEQ ID NO: 1969 | R0261:E10_1 | frame 1 | from 1 to 67 |
| SEQ ID NO: 1970 | R0261:H08_1 | frame 1 | from 29 to 102 |
| SEQ ID NO: 1971 | R0261:H08_2 | frame 2 | from 1 to 101 |
| SEQ ID NO: 1972 | R0261:H08_3 | frame 3 | from 1 to 101 |
| SEQ ID NO: 1973 | R0261:H08_4 | frame −2 | from 1 to 74 |
| SEQ ID NO: 1974 | R0261:H08_5 | frame −3 | from 38 to 101 |
| SEQ ID NO: 1975 | R0262:A12_1 | frame −1 | from 35 to 132 |
| SEQ ID NO: 1976 | R0262:A03_1 | frame 2 | from 1 to 66 |
| SEQ ID NO: 1977 | R0262:A03_2 | frame −1 | from 1 to 84 |
| SEQ ID NO: 1978 | R0262:A03_3 | frame −3 | from 1 to 64 |
| SEQ ID NO: 1979 R0262:D11_1 | frame 1 | from 22 to 90 | |
| SEQ ID NO: 1980 R0262:D11_2 | frame 2 | from 1 to 57 | |
| SEQ ID NO: 1981 | R0262:D11_3 | frame 2 | from 59 to 124 |
| SEQ ID NO: 1982 | R0262:D11_4 | frame −2 | from 1 to 67 |
| SEQ ID NO: 1983 | R0262:D11_5 | frame −3 | from 26 to 124 |
| SEQ ID NO: 1984 | R0262:E03_1 | frame 1 | from 127 to 176 |
| SEQ ID NO: 1985 | R0262:E03_2 | frame 2 | from 26 to 159 |
| SEQ ID NO: 1986 | R0262:E03_3 | frame 3 | from 1 to 67 |
| SEQ ID NO: 1987 | R0262:E03_4 | frame −1 | from 9 to 68 |
| SEQ ID NO: 1988 | R0262:E03_5 | frame −2 | from 113 to 176 |
| SEQ ID NO: 1989 | R0262:E03_6 | frame −3 | from 107 to 159 |
| SEQ ID NO: 1990 | R0262:G05_1 | frame 3 | from 50 to 111 |
| SEQ ID NO: 1991 | R0262:G05_2 | frame −1 | from 49 to 134 |
| SEQ ID NO: 1992 | R0263:B11_1 | frame 2 | from 1 to 185 |
| SEQ ID NO: 1993 | R0263:B11_2 | frame 3 | from 42 to 106 |
| SEQ ID NO: 1994 | R0263:B11_3 | frame −1 | from 74 to 185 |
| SEQ ID NO: 1995 | R0263:D11_1 | frame 1 | from 12 to 98 |
| SEQ ID NO: 1996 | R0263:D11_2 | frame 3 | from 22 to 76 |
| SEQ ID NO: 1997 | R0263:D11_3 | frame −2 | from 4 to 126 |
| SEQ ID NO: 1998 | R0263:D07_1 | frame 1 | from 1 to 191 |
| SEQ ID NO: 1999 | R0263:D07_2 | frame −1 | from 1 to 51 |
| SEQ ID NO: 2000 | R0263:D07_3 | frame −1 | from 91 to 141 |
| SEQ ID NO: 2001 | R0263:D07_4 | frame −2 | from 98 to 152 |
| SEQ ID NO: 2002 | R0263:F08_1 | frame 3 | from 1 to 95 |
| SEQ ID NO: 2003 | R0263:H02_1 | frame 1 | from 4 to 63 |
| SEQ ID NO: 2004 | R0263:H02_2 | frame 1 | from 65 to 121 |
| SEQ ID NO: 2005 | R0263:H02_3 | frame 2 | from 1 to 50 |
| SEQ ID NO: 2006 | R0263:H02_4 | frame 2 | from 52 to 104 |
| SEQ ID NO: 2007 | R0263:H02_5 | frame −1 | from 13 to 77 |
| SEQ ID NO: 2008 | R0263:H02_6 | frame −1 | from 98 to 161 |
| SEQ ID NO: 2009 | R0263:H02_7 | frame −2 | from 3 to 54 |
| SEQ ID NO: 2010 | R0263:H02_8 | frame −2 | from 56 to 122 |
| SEQ ID NO: 2011 | R0264:D03_1 | frame 1 | from 100 to 157 |
| SEQ ID NO: 2012 | R0264:D03_2 | frame 3 | from 16 to 91 |
| SEQ ID NO: 2013 | R0264:D03_3 | frame 3 | from 94 to 156 |
| SEQ ID NO: 2014 | R0264:D03_4 | frame −2 | from 1 to 156 |
| SEQ ID NO: 2015 | R0264:E12_1 | frame 3 | from 50 to 111 |
| SEQ ID NO: 2016 | R0264:E12_2 | frame −1 | from 78 to 163 |
| SEQ ID NO: 2017 | R0264:F11_1 | frame 1 | from 13 to 81 |
| SEQ ID NO: 2018 | R0264:F11_2 | frame −1 | from 1 to 102 |
| SEQ ID NO: 2019 | R0264:F11_3 | frame −2 | from 25 to 101 |
| SEQ ID NO: 2020 | R0264:F11_4 | frame −3 | from 42 to 101 |
| SEQ ID NO: 2021 | R0264:H03_1 | frame 1 | from 1 to 115 |
| SEQ ID NO: 2022 | R0264:H03_2 | frame 3 | from 60 to 109 |
| SEQ ID NO: 2023 | R0264:H03_3 | frame −2 | from 1 to 114 |
| SEQ ID NO: 2024 | R0264:H03_4 | frame −3 | from 35 to 108 |
| SEQ ID NO: 2025 | R0265:D07_1 | frame 3 | from 50 to 111 |
| SEQ ID NO: 2026 | R0265:D07_2 | frame −1 | from 70 to 185 |
| SEQ ID NO: 2027 | R0265:E12_1 | frame 1 | from 1 to 87 |
| SEQ ID NO: 2028 | R0265:E12_2 | frame 2 | from 1 to 113 |
| SEQ ID NO: 2029 | R0265:E12_3 | frame −1 | from 1 to 79 |
| SEQ ID NO: 2030 | R0265:F12_1 | frame 1 | from 75 to 126 |
| SEQ ID NO: 2031 | R0265:F12_2 | frame 2 | from 46 to 160 |
| SEQ ID NO: 2032 | R0265:F12_3 | frame −1 | from 36 to 87 |
| SEQ ID NO: 2033 | R0265:F12_4 | frame −3 | from 78 to 133 |
| SEQ ID NO: 2034 | R0265:H04_1 | frame 2 | from 64 to 149 |
| SEQ ID NO: 2035 | R0265:H04_2 | frame −3 | from 50 to 111 |
| SEQ ID NO: 2036 | R0265:H09_1 | frame 1 | from 1 to 191 |
| SEQ ID NO: 2037 | R0265:H09_2 | frame −1 | from 1 to 51 |
| SEQ ID NO: 2038 | R0265:H09_3 | frame −1 | from 91 to 141 |
| SEQ ID NO: 2039 | R0265:H09_4 | frame −2 | from 98 to 152 |
| SEQ ID NO: 2040 | R0266:A10_1 | frame 1 | from 1 to 87 |
| SEQ ID NO: 2041 | R0266:A10_2 | frame 2 | from 1 to 113 |
| SEQ ID NO: 2042 | R0266:A10_3 | frame −1 | from 1 to 79 |
| SEQ ID NO: 2043 | R0266:A12_1 | frame 1 | from 1 to 106 |
| SEQ ID NO: 2044 | R0266:A12_2 | frame 1 | from 133 to 185 |
| SEQ ID NO: 2045 | R0266:A12_3 | frame 2 | from 89 to 143 |
| SEQ ID NO: 2046 | R0266:A12_4 | frame 2 | from 147 to 197 |
| SEQ ID NO: 2047 | R0266:A12_5 | frame −3 | from 51 to 101 |
| SEQ ID NO: 2048 | R0266:F03_1 | frame 1 | from 64 to 141 |
| SEQ ID NO: 2049 | R0266:F03_2 | frame 2 | from 8 to 141 |
| SEQ ID NO: 2050 | R0266:F03_3 | frame 3 | from 39 to 104 |
| SEQ ID NO: 2051 | R0266:F03_4 | frame −2 | from 1 to 141 |
| SEQ ID NO: 2052 | R0266:F07_1 | frame −3 | from 37 to 97 |
| SEQ ID NO: 2053 | R0266:F07_2 | frame −3 | from 138 to 188 |
| SEQ ID NO: 2054 | R0266:G12_1 | frame 1 | from 1 to 192 |
| SEQ ID NO: 2055 | R0266:G12_2 | frame 2 | from 94 to 168 |
| SEQ ID NO: 2056 | R0266:G12_3 | frame −2 | from 65 to 128 |
| SEQ ID NO: 2057 | R0266:G12_4 | frame −3 | from 17 to 120 |
| SEQ ID NO: 2058 | R0266:G12_5 | frame −3 | from 122 to 192 |
| SEQ ID NO: 2059 | R0266:G09_1 | frame 1 | from 7 to 121 |
| SEQ ID NO: 2060 | R0266:G09_2 | frame 2 | from 104 to 158 |
| SEQ ID NO: 2061 | R0266:G09_3 | frame −2 | from 28 to 78 |
| SEQ ID NO: 2062 | R0244:C04_1 | frame 1 | from 19 to 77 |
| SEQ ID NO: 2063 | R0244:C04_2 | frame 2 | from 13 to 76 |
| SEQ ID NO: 2064 | R0244:C04_3 | frame 3 | from 20 to 76 |
| SEQ ID NO: 2065 | R0244:C04_4 | frame −1 | from 15 to 65 |
| SEQ ID NO: 2066 | R0245:A02_1 | frame 2 | from 12 to 61 |
| SEQ ID NO: 2067 | R0245:A02_2 | frame −3 | from 42 to 92 |
| SEQ ID NO: 2068 | R0246:D10_1 | frame 3 | from 30 to 95 |
| SEQ ID NO: 2069 | R0246:D10_2 | frame −1 | from 1 to 83 |
| SEQ ID NO: 2070 | R0246:D10_3 | frame −2 | from 14 to 95 |
| SEQ ID NO: 2071 | R0246:D10_4 | frame −3 | from 1 to 53 |
| SEQ ID NO: 2072 | ‘46403.1_gaiger.ABI’_1 | frame 1 | from 1 to 63 |
| SEQ ID NO: 2073 | ‘46403.1_gaiger.ABI’_2 | frame 2 | from 25 to 94 |
| SEQ ID NO: 2074 | ‘46403.1_gaiger.ABI’_3 | frame −3 | from 19 to 94 |
| SEQ ID NO: 2075 | ‘46458.1_gaiger.ABI’_1 | frame −3 | from 1 to 67 |
| SEQ ID NO: 2076 | ‘46489.1;gaiger.ABI’_1 | frame 1 | from 1 to 70 |
| SEQ ID NO: 2077 | ‘46489.1;gaiger.ABI’_2 | frame −1 | from 1 to 70 |
| SEQ ID NO: 2078 | ‘46489.1;gaiger.ABI’_3 | frame −2 | from 1 to 64 |
| SEQ ID NO: 2079 | ‘46802.1_gaiger.ABI’_1 | frame 1 | from 1 to 90 |
| SEQ ID NO: 2080 | ‘46802.1_gaiger.ABI’_2 | frame −1 | from 1 to 52 |
| SEQ ID NO: 2081 | ‘46872.1_gaiger.ABI’_1 | frame 3 | from 4 to 77 |
| SEQ ID NO: 2082 | ‘46872.1_gaiger.ABI’_2 | frame −1 | from 1 to 66 |
| SEQ ID NO: 2083 | ‘46880.1_gaiger.ABI’_1 | frame 2 | from 36 to 95 |
| SEQ ID NO: 2084 | ‘46880.1_gaiger.ABI’_2 | frame 3 | from 1 to 95 |
| SEQ ID NO: 2085 | ‘46880.1_gaiger.ABI’_3 | frame −1 | from 32 to 81 |
| SEQ ID NO: 2086 | ‘46977.1_gaiger.ABI’_1 | frame −2 | from 1 to 62 |
| SEQ ID NO: 2087 | ‘46977.1_gaiger.ABI’_2 | frame −3 | from 1 to 94 |
| SEQ ID NO: 2088 | ‘51658.1_gaiger.ABI’_1 | frame 2 | from 5 to 80 |
| SEQ ID NO: 2089 | ‘51658.1_gaiger.ABI’_2 | frame 3 | from 10 to 77 |
| SEQ ID NO: 2090 | ‘51734.1_gaiger.ABI’_1 | frame 1 | from 12 to 98 |
| SEQ ID NO: 2091 | ‘51734.1_gaiger.ABI’_2 | frame 3 | from 22 to 76 |
| SEQ ID NO: 2092 | ‘51734.1_gaiger.ABI’_3 | frame −2 | from 18 to 137 |
| SEQ ID NO: 2093 | 1405:C04_1 | frame 2 | from 1 to 50 |
| SEQ ID NO: 2094 | 1405:C04_2 | frame 3 | from 10 to 102 |
| SEQ ID NO: 2095 | 1405:C04_3 | frame −2 | from 76 to 140 |
| SEQ ID NO: 2096 | 1405:E11_1 | frame 1 | from 87 to 159 |
| SEQ ID NO: 2097 | 1405:E11_2 | frame 3 | from 92 to 143 |
| SEQ ID NO: 2098 | 1405:E11_3 | frame −2 | from 48 to 111 |
| SEQ ID NO: 2099 | 1405:E11_4 | frame −3 | from 1 to 55 |
| SEQ ID NO: 2100 | ‘52246.1_gaiger.ABI’_1 | frame 1 | from 12 to 98 |
| SEQ ID NO: 2101 | ‘52246.1_gaiger.ABI’_2 | frame 3 | from 22 to 76 |
| SEQ ID NO: 2102 | ‘52246.1_gaiger.ABI’_3 | frame 3 | from 78 to 127 |
| SEQ ID NO: 2103 | ‘52246.1_gaiger.ABI’_4 | frame −2 | from 5 to 127 |
| SEQ ID NO: 2104 | ‘52333.1_gaiger.ABI’_1 | frame 1 | from 1 to 69 |
| SEQ ID NO: 2105 | ‘52333.1_gaiger.ABI’_2 | frame 2 | from 1 to 66 |
| SEQ ID NO: 2106 | ‘41557.1_gaiger.ABI’_1 | frame 1 | from 16 to 73 |
| SEQ ID NO: 2107 | ‘41557.1_gaiger.ABI’_2 | frame 2 | from 1 to 109 |
| SEQ ID NO: 2108 | ‘41557.1_gaiger.ABI’_3 | frame −1 | from 11 to 110 |
| SEQ ID NO: 2109 | ‘41557.1_gaiger.ABI’_4 | frame −3 | from 1 to 103 |
| SEQ ID NO: 2110 | ‘41579.1_gaiger.ABI’_1 | frame 3 | from 43 to 97 |
| SEQ ID NO: 2111 | ‘41579.1_gaiger.ABI’_2 | frame −2 | from 1 to 97 |
| SEQ ID NO: 2112 | ‘41579.1_gaiger.ABI’_3 | frame −3 | from 43 to 97 |
| SEQ ID NO: 2113 | ‘41571.1_gaiger.ABI’_1 | frame 3 | from 1 to 89 |
| SEQ ID NO: 2114 | ‘41571.1_gaiger.ABI’_2 | frame −1 | from 1 to 89 |
| SEQ ID NO: 2115 | ‘41571.1_gaiger.ABI’_3 | frame −2 | from 27 to 85 |
| SEQ ID NO: 2116 | ‘41628.1_gaiger.ABI’_1 | frame 1 | from 51 to 121 |
| SEQ ID NO: 2117 | ‘41628.1_gaiger.ABI’_2 | frame 2 | from 1 to 97 |
| SEQ ID NO: 2118 | ‘41628.1_gaiger.ABI’_3 | frame −3 | from 47 to 98 |
| SEQ ID NO: 2119 | ‘41635.1_gaiger.ABI’_1 | frame 1 | from 1 to 70 |
| SEQ ID NO: 2120 | ‘41635.1_gaiger.ABI’_2 | frame 2 | from 31 to 127 |
| SEQ ID NO: 2121 | ‘41635.1_gaiger.ABI’_3 | frame −1 | from 56 to 127 |
| SEQ ID NO: 2122 | ‘41635.1_gaiger.ABI’_4 | frame −2 | from 76 to 126 |
| SEQ ID NO: 2123 | ‘41663.1_gaiger.ABI’_1 | frame −2 | from 64 to 116 |
| SEQ ID NO: 2124 | ‘41663.1_gaiger.ABI’_2 | frame −3 | from 1 to 67 |
| SEQ ID NO: 2125 | ‘41667.1_gaiger.ABI’_1 | frame 1 | from 1 to 56 |
| SEQ ID NO: 2126 | ‘41667.1_gaiger.ABI’_2 | frame 2 | from 1 to 56 |
| SEQ ID NO: 2127 | ‘41667.1_gaiger.ABI’_3 | frame −2 | from 1 to 56 |
| SEQ ID NO: 2128 | ‘41751.1_gaiger.ABI’_1 | frame 1 | from 27 to 82 |
| SEQ ID NO: 2129 | ‘41751.1_gaiger.ABI’_2 | frame 3 | from 1 to 50 |
| SEQ ID NO: 2130 | ‘41751.1_gaiger.ABI’_3 | frame −2 | from 1 to 70 |
| SEQ ID NO: 2131 | ‘41751.1_gaiger.ABI’_4 | frame −3 | from 1 to 53 |
| SEQ ID NO: 2132 | ‘41944.1_gaiger.ABI’_1 | frame 1 | from 1 to 56 |
| SEQ ID NO: 2133 | ‘41944.1_gaiger.ABI’_2 | frame 2 | from 1 to 177 |
| SEQ ID NO: 2134 | ‘41944.1_gaiger.ABI’_3 | frame 3 | from 37 to 92 |
| SEQ ID NO: 2135 | ‘41944.1_gaiger.ABI’_4 | frame −1 | from 47 to 116 |
| SEQ ID NO: 2136 | ‘41944.1_gaiger.ABI’_5 | frame −1 | from 125 to 177 |
| SEQ ID NO: 2137 | ‘41944.1_gaiger.ABI’_6 | frame −2 | from 32 to 177 |
| SEQ ID NO: 2138 | ‘41944.1_gaiger.ABI’_7 | frame −3 | from 120 to 177 |
| SEQ ID NO: 2139 | ‘41986.1_gaiger.ABI’_1 | frame 3 | from 1 to 110 |
| SEQ ID NO: 2140 | ‘41986.1_gaiger.ABI’_2 | frame −1 | from 1 to 110 |
| SEQ ID NO: 2141 | ‘41986.1_gaiger.ABI’_3 | frame −3 | from 22 to 91 |
| SEQ ID NO: 2142 | ‘42101.1_gaiger.ABI’_1 | frame 3 | from 53 to 123 |
| SEQ ID NO: 2143 | ‘42101.1_gaiger.ABI’_2 | frame −2 | from 1 to 124 |
| SEQ ID NO: 2144 | R0232:E07_1 | frame 2 | from 1 to 51 |
| SEQ ID NO: 2145 | R0232:E07_2 | frame −1 | from 1 to 51 |
| SEQ ID NO: 2146 | R0233:A06_1 | frame 1 | from 12 to 77 |
| SEQ ID NO: 2147 | R0233:A06_2 | frame 3 | from 2 to 76 |
| SEQ ID NO: 2148 | R0233:A06_3 | frame −3 | from 1 to 59 |
| SEQ ID NO: 2149 | ‘42324.1_gaiger.ABI’_1 | frame 1 | from 1 to 94 |
| SEQ ID NO: 2150 | ‘42324.1_gaiger.ABI’_2 | frame 2 | from 1 to 57 |
| SEQ ID NO: 2151 | ‘42324.1_gaiger.ABI’_3 | frame 3 | from 38 to 130 |
| SEQ ID NO: 2152 | ‘42324.1_gaiger.ABI’_4 | frame −1 | from 10 to 130 |
| SEQ ID NO: 2153 | ‘42324.1_gaiger.ABI’_5 | frame −2 | from 1 to 54 |
| SEQ ID NO: 2154 | ‘42324.1_gaiger.ABI’_6 | frame −2 | from 72 to 130 |
| SEQ ID NO: 2155 | ‘42324.1_gaiger.ABI’_7 | frame −3 | from 1 to 67 |
| SEQ ID NO: 2156 | ‘42324.1_gaiger.ABI’_8 | frame −3 | from 76 to 130 |
| SEQ ID NO: 2157 | ‘42438.1_gaiger.ABI’_1 | frame 1 | from 1 to 123 |
| SEQ ID NO: 2158 | ‘42438.1_gaiger.ABI’_2 | frame −3 | from 53 to 123 |
| SEQ ID NO: 2159 | ‘42625.1_gaiger.ABI’_1 | frame 1 | from 1 to 62 |
| SEQ ID NO: 2160 | ‘42702.1_gaiger.ABI’_1 | frame 1 | from 1 to 53 |
| SEQ ID NO: 2161 | ‘42702.1_gaiger.ABI’_2 | frame 2 | from 19 to 101 |
| SEQ ID NO: 2162 | ‘42702.1_gaiger.ABI’_3 | frame 3 | from 35 to 149 |
| SEQ ID NO: 2163 | ‘42702.1_gaiger.ABI’_4 | frame −1 | from 4 to 168 |
| SEQ ID NO: 2164 | ‘42702.1_gaiger.ABI’_5 | frame −2 | from 28 to 118 |
| SEQ ID NO: 2165 | ‘42702.1_gaiger.ABI’_6 | frame −2 | from 120 to 185 |
| SEQ ID NO: 2166 | ‘42702.1_gaiger.ABI’_7 | frame −3 | from 104 to 185 |
| SEQ ID NO: 2167 | ‘42709.1_gaiger.ABI’_1 | frame 2 | from 1 to 118 |
| SEQ ID NO: 2168 | ‘42709.1_gaiger.ABI’_2 | frame −3 | from 53 to 118 |
| SEQ ID NO: 2169 | R0234:E07_1 | frame 2 | from 1 to 86 |
| SEQ ID NO: 2170 | R0234:E07_2 | frame 3 | from 27 to 86 |
| SEQ ID NO: 2171 | R0234:E07_3 | frame −1 | from 1 to 51 |
| SEQ ID NO: 2172 | R0234:G11_1 | frame 3 | from 1 to 121 |
| SEQ ID NO: 2173 | R0234:G11_2 | frame −2 | from 51 to 121 |
| SEQ ID NO: 2174 | R0236:A09_1 | frame 3 | from 1 to 122 |
| SEQ ID NO: 2175 | R0236:A09_2 | frame −1 | from 54 to 122 |
| SEQ ID NO: 2176 | R0250:A05_1 | frame 1 | from 22 to 85 |
| SEQ ID NO: 2177 | R0250:A05_2 | frame 3 | from 1 to 179 |
| SEQ ID NO: 2178 | R0250:A05_3 | frame −1 | from 96 to 159 |
| SEQ ID NO: 2179 | R0250:A05_4 | frame −2 | from 34 to 85 |
| SEQ ID NO: 2180 | R0250:A05_5 | frame −2 | from 87 to 150 |
| SEQ ID NO: 2181 | R0251:A07_1 | frame 1 | from 43 to 176 |
| SEQ ID NO: 2182 | R0251:A07_2 | frame 2 | from 48 to 176 |
| SEQ ID NO: 2183 | R0251:A07_3 | frame −2 | from 1 to 129 |
| SEQ ID NO: 2184 | R0251:A07_4 | frame −3 | from 80 to 134 |
| SEQ ID NO: 2185 | R0251:D01_1 | frame 2 | from 1 to 124 |
| SEQ ID NO: 2186 | R0251:D01_2 | frame −3 | from 53 to 123 |
| SEQ ID NO: 2187 | R0252:A08_1 | frame 1 | from 1 to 64 |
| SEQ ID NO: 2188 | R0252:A08_2 | frame 2 | from 12 to 64 |
| SEQ ID NO: 2189 | R0252:A08_3 | frame −1 | from 1 to 51 |
| SEQ ID NO: 2190 | R0252:A08_4 | frame −2 | from 1 to 64 |
| SEQ ID NO: 2191 | R0252:F11_1 | frame 1 | from 1 to 94 |
| SEQ ID NO: 2192 | R0252:F11_2 | frame 3 | from 1 to 61 |
| SEQ ID NO: 2193 | R0252:F11_3 | frame −2 | from 12 to 69 |
| SEQ ID NO: 2194 | R0252:F11_4 | frame −3 | from 1 to 139 |
| SEQ ID NO: 2195 | R0252:H01_1 | frame 2 | from 1 to 123 |
| SEQ ID NO: 2196 | R0252:H01_2 | frame −3 | from 53 to 123 |
| SEQ ID NO: 2197 | R0253:G05_1 | frame 3 | from 53 to 123 |
| SEQ ID NO: 2198 | R0253:G05_2 | frame −2 | from 1 to 124 |
| SEQ ID NO: 2199 | R0254:F07_1 | frame 1 | from 69 to 153 |
| SEQ ID NO: 2200 | R0254:F07_2 | frame −1 | from 87 to 142 |
| SEQ ID NO: 2201 | R0254:F07_3 | frame −2 | from 47 to 116 |
| SEQ ID NO: 2202 | R0254:F07_4 | frame −3 | from 1 to 82 |
| SEQ ID NO: 2203 | R0254:F07_5 | frame −3 | from 99 to 154 |
| SEQ ID NO: 2204 | R0255:F12_1 | frame 3 | from 1 to 57 |
| SEQ ID NO: 2205 | R0255:F12_2 | frame −2 | from 1 to 78 |
| SEQ ID NO: 2206 | R0259:C04_1 | frame 1 | from 16 to 78 |
| SEQ ID NO: 2207 | R0259:C04_2 | frame −2 | from 53 to 139 |
| SEQ ID NO: 2208 | R0261:A09_1 | frame 1 | from 1 to 174 |
| SEQ ID NO: 2209 | R0261:A09_2 | frame 2 | from 34 to 89 |
| SEQ ID NO: 2210 | R0261:A09_3 | frame 3 | from 1 to 52 |
| SEQ ID NO: 2211 | R0261:A09_4 | frame −1 | from 121 to 174 |
| SEQ ID NO: 2212 | R0261:A09_5 | frame −2 | from 47 to 116 |
| SEQ ID NO: 2213 | R0261:A09_6 | frame −2 | from 125 to 174 |
| SEQ ID NO: 2214 | R0261:A09_7 | frame −3 | from 32 to 174 |
| SEQ ID NO: 2215 | R0261:C10_1 | frame 2 | from 6 to 120 |
| SEQ ID NO: 2216 | R0261:C10_2 | frame 3 | from 103 to 157 |
| SEQ ID NO: 2217 | R0261:C10_3 | frame −1 | from 25 to 75 |
| SEQ ID NO: 2218 | R0261:D06_1 | frame 2 | from 1 to 117 |
| SEQ ID NO: 2219 | R0261:D06_2 | frame −2 | from 1 to 117 |
| SEQ ID NO: 2220 | R0261:D06_3 | frame −3 | from 35 to 117 |
| SEQ ID NO: 2221 | R0262:D04_1 | frame 1 | from 26 to 95 |
| SEQ ID NO: 2222 | R0262:D04_2 | frame 3 | from 32 to 94 |
| SEQ ID NO: 2223 | R0262:D04_3 | frame −2 | from 16 to 65 |
| SEQ ID NO: 2224 | R0262:D04_4 | frame −3 | from 1 to 92 |
| SEQ ID NO: 2225 | R0262:E03_1 | frame 1 | from 127 to 176 |
| SEQ ID NO: 2226 | R0262:E03_2 | frame 2 | from 26 to 159 |
| SEQ ID NO: 2227 | R0262:E03_3 | frame 3 | from 1 to 67 |
| SEQ ID NO: 2228 | R0262:E03_4 | frame −1 | from 9 to 68 |
| SEQ ID NO: 2229 | R0262:E03_5 | frame −2 | from 113 to 176 |
| SEQ ID NO: 2230 | R0262:E03_6 | frame −3 | from 107 to 159 |
| SEQ ID NO: 2231 | R0263:B11_1 | frame 2 | from 1 to 185 |
| SEQ ID NO: 2232 | R0263:B11_2 | frame 3 | from 42 to 106 |
| SEQ ID NO: 2233 | R0263:B11_3 | frame −1 | from 74 to 185 |
| SEQ ID NO: 2234 | R0263:B09_1 | frame 2 | from 1 to 199 |
| SEQ ID NO: 2235 | R0263:B09_2 | frame −1 | from 1 to 76 |
| SEQ ID NO: 2236 | R0263:B09_3 | frame −1 | from 78 to 199 |
| SEQ ID NO: 2237 | R0263:B09_4 | frame −2 | from 140 to 195 |
| SEQ ID NO: 2238 | R0263:C08_1 | frame 1 | from 1 to 50 |
| SEQ ID NO: 2239 | R0263:C08_2 | frame 1 | from 52 to 101 |
| SEQ ID NO: 2240 | R0263:C08_3 | frame 1 | from 161 to 215 |
| SEQ ID NO: 2241 | R0263:C08_4 | frame 2 | from 55 to 129 |
| SEQ ID NO: 2242 | R0263:C08_5 | frame 3 | from 45 to 147 |
| SEQ ID NO: 2243 | R0263:C08_6 | frame −1 | from 113 to 188 |
| SEQ ID NO: 2244 | R0263:C08_7 | frame −2 | from 1 to 194 |
| SEQ ID NO: 2245 | R0263:D11_1 | frame 1 | from 12 to 98 |
| SEQ ID NO: 2246 | R0263:D11_2 | frame 3 | from 22 to 76 |
| SEQ ID NO: 2247 | R0263:D11_3 | frame −2 | from 1 to 119 |
| SEQ ID NO: 2248 | R0263:H10_1 | frame 1 | from 1 to 55 |
| SEQ ID NO: 2249 | R0263:H10_2 | frame 1 | from 99 to 152 |
| SEQ ID NO: 2250 | R0263:H10_3 | frame 3 | from 1 to 147 |
| SEQ ID NO: 2251 | R0263:H10_4 | frame −1 | from 6 to 140 |
| SEQ ID NO: 2252 | R0263:H10_5 | frame −3 | from 1 to 151 |
| SEQ ID NO: 2253 | R0264:A03_1 | frame 2 | from 18 to 77 |
| SEQ ID NO: 2254 | R0264:A03_2 | frame 3 | from 59 to 128 |
| SEQ ID NO: 2255 | R0264:A03_3 | frame −2 | from 53 to 129 |
| SEQ ID NO: 2256 | R0264:B11_1 | frame 2 | from 6 to 120 |
| SEQ ID NO: 2257 | R0264:B11_2 | frame 3 | from 103 to 157 |
| SEQ ID NO: 2258 | R0264:B11_3 | frame −1 | from 30 to 80 |
| SEQ ID NO: 2259 | R0264:F11_1 | frame 1 | from 13 to 81 |
| SEQ ID NO: 2260 R0264:F11_2 | frame −1 | from 1 to 102 | |
| SEQ ID NO: 2261 | R0264:F11_3 | frame −2 | from 25 to 101 |
| SEQ ID NO: 2262 R0264:F11_4 | frame −3 | from 42 to 101 | |
| SEQ ID NO: 2263 | R0264:F05_1 | frame 2 | from 18 to 77 |
| SEQ ID NO: 2264 | R0264:F05_2 | frame 3 | from 59 to 113 |
| SEQ ID NO: 2265 | R0264:F05_3 | frame −1 | from 38 to 114 |
| SEQ ID NO: 2266 | R0264:F09_1 | frame 1 | from 7 to 121 |
| SEQ ID NO: 2267 | R0264:F09_2 | frame 2 | from 104 to 158 |
| SEQ ID NO: 2268 | R0264:F09_3 | frame −3 | from 25 to 75 |
| SEQ ID NO: 2269 | R0266:B02_1 | frame 1 | from 68 to 168 |
| SEQ ID NO: 2270 | R0266:B02_2 | frame 2 | from 44 to 167 |
| SEQ ID NO: 2271 | R0266:B02_3 | frame −1 | from 1 to 100 |
| SEQ ID NO: 2272 | R0266:B03_1 | frame 2 | from 47 to 100 |
| SEQ ID NO: 2273 | R0266:B03_2 | frame 3 | from 13 to 84 |
| SEQ ID NO: 2274 | R0266:B03_3 | frame −1 | from 47 to 101 |
| SEQ ID NO: 2275 | R0266:B03_4 | frame −2 | from 27 to 100 |
| SEQ ID NO: 2276 | R0266:B04_1 | frame 1 | from 53 to 121 |
| SEQ ID NO: 2277 | R0266:B04_2 | frame 3 | from 1 to 120 |
| SEQ ID NO: 2278 | R0266:B04_3 | frame −2 | from 1 to 100 |
| SEQ ID NO: 2279 | R0266:B04_4 | frame −3 | from 7 to 106 |
| SEQ ID NO: 2280 | R0266:B06_1 | frame 1 | from 28 to 102 |
| SEQ ID NO: 2281 | R0266:B06_2 | frame 1 | from 104 to 154 |
| SEQ ID NO: 2282 | R0266:B06_3 | frame 2 | from 1 to 57 |
| SEQ ID NO: 2283 | R0266:B06_4 | frame 3 | from 1 to 68 |
| SEQ ID NO: 2284 | R0266:B06_5 | frame −1 | from 7 to 72 |
| SEQ ID NO: 2285 | R0266:B06_6 | frame −1 | from 111 to 169 |
| SEQ ID NO: 2286 | R0266:B06_7 | frame −2 | from 1 to 50 |
| SEQ ID NO: 2287 | R0266:B06_8 | frame −3 | from 50 to 136 |
| SEQ ID NO: 2288 | R0266:D05_1 | frame 1 | from 71 to 158 |
| SEQ ID NO: 2289 | R0266:D05_2 | frame −1 | from 96 to 148 |
| SEQ ID NO: 2290 | R0266:D05_3 | frame −2 | from 56 to 106 |
| SEQ ID NO: 2291 | R0266:D05_4 | frame −3 | from 63 to 143 |
| SEQ ID NO: 2292 | R0266:E01_1 | frame 3 | from 1 to 125 |
| SEQ ID NO: 2293 | R0266:E01_2 | frame −1 | from 75 to 133 |
| SEQ ID NO: 2294 | R0266:E01_3 | frame −2 | from 34 to 133 |
| SEQ ID NO: 2295 | R0266:E03_1 | frame 3 | from 81 to 130 |
| SEQ ID NO: 2296 | R0266:E03_2 | frame −1 | from 1 to 131 |
| SEQ ID NO: 2297 | R0266:E03_3 | frame −3 | from 1 to 53 |
| SEQ ID NO: 2298 | R0266:F03_1 | frame 1 | from 64 to 141 |
| SEQ ID NO: 2299 | R0266:F03_2 | frame 2 | from 8 to 141 |
| SEQ ID NO: 2300 | R0266:F03_3 | frame 3 | from 39 to 104 |
| SEQ ID NO: 2301 | R0266:F03_4 | frame −2 | from 1 to 141 |
| SEQ ID NO: 2302 | R0266:F09_1 | frame 1 | from 1 to 50 |
| SEQ ID NO: 2303 | R0266:F09_2 | frame 1 | from 52 to 101 |
| SEQ ID NO: 2304 | R0266:F09_3 | frame 2 | from 55 to 129 |
| SEQ ID NO: 2305 | R0266:F09_4 | frame 2 | from 139 to 198 |
| SEQ ID NO: 2306 | R0266:F09_5 | frame 3 | from 45 to 147 |
| SEQ ID NO: 2307 | R0266:F09_6 | frame −1 | from 1 to 177 |
| SEQ ID NO: 2308 | R0266:F09_7 | frame −2 | from 29 to 97 |
| SEQ ID NO: 2309 | R0266:F09_8 | frame −3 | from 95 to 170 |
| SEQ ID NO: 2310 | R0245:A02_1 | frame 2 | from 12 to 61 |
| SEQ ID NO: 2311 | R0245:A02_2 | frame −3 | from 42 to 92 |
| SEQ ID NO: 2312 | ‘46403.1_gaiger.ABI’_1 | frame 1 | from 1 to 63 |
| SEQ ID NO: 2313 | ‘46403.1_gaiger.ABI’_2 | frame 2 | from 25 to 94 |
| SEQ ID NO: 2314 | ‘46403.1_gaiger.ABI’_3 | frame −3 | from 19 to 94 |
| SEQ ID NO: 2315 | ‘46458.1_gaiger.ABI’_1 | frame −3 | from 1 to 67 |
| SEQ ID NO: 2316 | ‘46977.1_gaiger.ABI’_1 | frame −2 | from 1 to 62 |
| SEQ ID NO: 2317 | ‘46977.1_gaiger.ABI’_2 | frame −3 | from 1 to 94 |
| SEQ ID NO: 2318 | ‘51658.1_gaiger.ABI’_1 | frame 2 | from 5 to 80 |
| SEQ ID NO: 2319 | ‘51658.1_gaiger.ABI’_2 | frame 3 | from 10 to 77 |
| SEQ ID NO: 2320 | ‘51788.1_gaiger.ABI’_1 | frame 1 | from 1 to 59 |
| SEQ ID NO: 2321 | ‘51788.1_gaiger.ABI’_2 | frame −2 | from 1 to 68 |
| SEQ ID NO: 2322 | ‘51850.1_gaiger.ABI’_1 | frame 2 | from 1 to 58 |
| SEQ ID NO: 2323 | ‘51850.1_gaiger.ABI’_2 | frame 3 | from 47 to 106 |
| SEQ ID NO: 2324 | ‘51850.1_gaiger.ABI’_3 | frame −3 | from 1 to 67 |
| SEQ ID NO: 2325 | ‘51892.1_gaiger.ABI’_1 | frame 1 | from 1 to 158 |
| SEQ ID NO: 2326 | ‘51892.1_gaiger.ABI’_2 | frame 2 | from 2 to 69 |
| SEQ ID NO: 2327 | ‘51892.1_gaiger.ABI’_3 | frame −1 | from 76 to 139 |
| SEQ ID NO: 2328 | ‘51892.1_gaiger.ABI’_4 | frame −2 | from 35 to 137 |
| SEQ ID NO: 2329 | ‘51900.1_gaiger.ABI’_1 | frame 2 | from 1 to 123 |
| SEQ ID NO: 2330 | ‘51900.1_gaiger.ABI’_2 | frame 3 | from 3 to 70 |
| SEQ ID NO: 2331 | ‘51900.1_gaiger.ABI’_3 | frame −2 | from 78 to 141 |
| SEQ ID NO: 2332 | ‘51900.1_gaiger.ABI’_4 | frame −3 | from 36 to 139 |
| SEQ ID NO: 2333 | ‘51960.1_gaiger.ABI’_1 | frame 3 | from 61 to 133 |
| SEQ ID NO: 2334 | 1405:A09_1 | frame 1 | from 66 to 131 |
| SEQ ID NO: 2335 | 1405:A09_2 | frame −1 | from 19 to 77 |
| SEQ ID NO: 2336 | 1405:A09_3 | frame −3 | from 1 to 68 |
| SEQ ID NO: 2337 | 1405:A09_4 | frame −3 | from 117 to 174 |
| SEQ ID NO: 2338 | 1405:D12_1 | frame 1 | from 4 to 71 |
| SEQ ID NO: 2339 | 1405:D12_2 | frame 3 | from 1 to 143 |
| SEQ ID NO: 2340 | 1405:D12_3 | frame −1 | from 52 to 115 |
| SEQ ID NO: 2341 | 1405:D12_4 | frame −2 | from 11 to 113 |
| SEQ ID NO: 2342 | 1405:D09_1 | frame 1 | from 9 to 170 |
| SEQ ID NO: 2343 | 1405:D09_2 | frame 2 | from 1 to 55 |
| SEQ ID NO: 2344 | 1405:D09_3 | frame 2 | from 104 to 169 |
| SEQ ID NO: 2345 | 1405:D09_4 | frame −1 | from 1 to 98 |
| SEQ ID NO: 2346 | 1405:D09_5 | frame −2 | from 5 to 104 |
| SEQ ID NO: 2347 | 1405:E11_1 | frame 1 | from 87 to 159 |
| SEQ ID NO: 2348 | 1405:E11_2 | frame 3 | from 92 to 143 |
| SEQ ID NO: 2349 | 1405:E11_3 | frame −2 | from 48 to 111 |
| SEQ ID NO: 2350 | 1405:E11_4 | frame −3 | from 1 to 55 |
| SEQ ID NO: 2351 | ‘52246.1_gaiger.ABI’_1 | frame 1 | from 12 to 98 |
| SEQ ID NO: 2352 | ‘52246.1_gaiger.ABI’_2 | frame 3 | from 22 to 76 |
| SEQ ID NO: 2353 | ‘52246.1_gaiger.ABI’_3 | frame 3 | from 78 to 127 |
| SEQ ID NO: 2354 | ‘52246.1_gaiger.ABI’_4 | frame −2 | from 5 to 127 |
| SEQ ID NO: 2355 | ‘52333.1_gaiger.ABI’_1 | frame 1 | from 1 to 69 |
| SEQ ID NO: 2356 | ‘52333.1_gaiger.ABI’_2 | frame 2 | from 1 to 66 |
| SEQ ID NO: 2357 | 1408:A09_1 | frame 2 | from 1 to 156 |
| SEQ ID NO: 2358 | 1408:A09_2 | frame 3 | from 1 to 67 |
| SEQ ID NO: 2359 | 1408:A09_3 | frame −2 | from 94 to 157 |
| SEQ ID NO: 2360 | 1408:A09_4 | frame −3 | from 53 to 155 |
| SEQ ID NO: 2361 | 1408:B02_1 | frame 2 | from 8 to 187 |
| SEQ ID NO: 2362 | 1408:B02_2 | frame −1 | from 9 to 80 |
| SEQ ID NO: 2363 | 1408:B02_3 | frame −1 | from 82 to 175 |
| SEQ ID NO: 2364 | 1408:B02_4 | frame −3 | from 29 to 78 |
| SEQ ID NO: 2365 | 1408:B02_5 | frame −3 | from 118 to 187 |
| SEQ ID NO: 2366 | 1408:C12_1 | frame 2 | from 122 to 175 |
| SEQ ID NO: 2367 | 1408:C12_2 | frame 3 | from 1 to 187 |
| SEQ ID NO: 2368 | 1408:C12_3 | frame −2 | from 1 to 71 |
| SEQ ID NO: 2369 | 1408:C12_4 | frame −3 | from 1 to 84 |
| SEQ ID NO: 2370 | 1408:C12_5 | frame −3 | from 86 to 137 |
| SEQ ID NO: 2371 | 1408:D06_1 | frame 1 | from 127 to 180 |
| SEQ ID NO: 2372 | 1408:D06_2 | frame 2 | from 1 to 161 |
| SEQ ID NO: 2373 | 1408:D06_3 | frame 3 | from 35 to 166 |
| SEQ ID NO: 2374 | 1408:D06_4 | frame −1 | from 61 to 183 |
| SEQ ID NO: 2375 | 1408:D06_5 | frame −3 | from 7 to 63 |
| SEQ ID NO: 2376 | ‘41663.1_gaiger.ABI’_1 | frame −2 | from 64 to 116 |
| SEQ ID NO: 2377 | ‘41663.1_gaiger.ABI’_2 | frame −3 | from 1 to 67 |
| SEQ ID NO: 2378 | ‘41729.1_gaiger.ABI’_1 | frame 1 | from 64 to 114 |
| SEQ ID NO: 2379 | ‘41888.1_gaiger.ABI’_1 | frame 3 | from 22 to 81 |
| SEQ ID NO: 2380 | ‘41925.1_gaiger.ABI’_1 | frame 1 | from 9 to 59 |
| SEQ ID NO: 2381 | ‘41925.1_gaiger.ABI’_2 | frame 2 | from 1 to 59 |
| SEQ ID NO: 2382 | ‘41925.1_gaiger.ABI’_3 | frame −2 | from 1 to 59 |
| SEQ ID NO: 2383 | ‘41925.1_gaiger.ABI’_4 | frame −3 | from 1 to 58 |
| SEQ ID NO: 2384 | ‘41639.1_gaiger.ABI’_1 | frame 1 | from 1 to 135 |
| SEQ ID NO: 2385 | ‘41639.1_gaiger.ABI’_2 | frame 2 | from 86 to 135 |
| SEQ ID NO: 2386 | ‘41639.1_gaiger.ABI’_3 | frame 3 | from 1 to 134 |
| SEQ ID NO: 2387 | ‘41639.1_gaiger.ABI’_4 | frame −1 | from 1 to 84 |
| SEQ ID NO: 2388 | ‘41639.1_gaiger.ABI’_5 | frame −1 | from 86 to 135 |
| SEQ ID NO: 2389 | ‘41639.1_gaiger.ABI’_6 | frame −3 | from 39 to 124 |
| SEQ ID NO: 2390 | ‘41853.1_gaiger.ABI’_1 | frame 1 | from 13 to 90 |
| SEQ ID NO: 2391 | ‘41853.1_gaiger.ABI’_2 | frame 2 | from 28 to 78 |
| SEQ ID NO: 2392 | ‘41853.1_gaiger.ABI’_3 | frame 3 | from 1 to 50 |
| SEQ ID NO: 2393 | ‘41853.1_gaiger.ABI’_4 | frame 3 | from 66 to 147 |
| SEQ ID NO: 2394 | ‘41853.1_gaiger.ABI’_5 | frame −3 | from 35 to 112 |
| SEQ ID NO: 2395 | ‘41924.1_gaiger.ABI’_1 | frame 2 | from 1 to 64 |
| SEQ ID NO: 2396 | ‘41924.1_gaiger.ABI’_2 | frame −2 | from 27 to 83 |
| SEQ ID NO: 2397 | ‘41638.1_gaiger.ABI’_1 | frame 1 | from 8 to 81 |
| SEQ ID NO: 2398 | ‘41638.1_gaiger.ABI’_2 | frame 3 | from 6 to 62 |
| SEQ ID NO: 2399 | ‘41638.1_gaiger.ABI’_3 | frame −2 | from 1 to 58 |
| SEQ ID NO: 2400 | ‘41629.1_gaiger.ABI’_1 | frame 1 | from 1 to 59 |
| SEQ ID NO: 2401 | ‘41629.1_gaiger.ABI’_2 | frame 2 | from 38 to 87 |
| SEQ ID NO: 2402 | ‘41629.1_gaiger.ABI’_3 | frame −3 | from 42 to 91 |
| SEQ ID NO: 2403 | ‘41678.1_gaiger.ABI’_1 | frame −2 | from 1 to 60 |
| SEQ ID NO: 2404 | ‘41717.1_gaiger.ABI’_1 | frame 1 | from 55 to 129 |
| SEQ ID NO: 2405 | ‘41717.1_gaiger.ABI’_2 | frame 2 | from 1 to 63 |
| SEQ ID NO: 2406 | ‘41717.1_gaiger.ABI’_3 | frame −3 | from 1 to 68 |
| SEQ ID NO: 2407 | ‘41987.1_gaiger.ABI’_1 | frame 1 | from 48 to 116 |
| SEQ ID NO: 2408 | ‘41987.1_gaiger.ABI’_2 | frame 2 | from 1 to 50 |
| SEQ ID NO: 2409 | ‘41987.1_gaiger.ABI’_3 | frame 2 | from 96 to 154 |
| SEQ ID NO: 2410 | ‘41987.1_gaiger.ABI’_4 | frame 3 | from 53 to 120 |
| SEQ ID NO: 2411 | ‘41987.1_gaiger.ABI’_5 | frame 3 | from 122 to 175 |
| SEQ ID NO: 2412 | ‘41987.1_gaiger.ABI’_6 | frame −1 | from 37 to 136 |
| SEQ ID NO: 2413 | ‘41987.1_gaiger.ABI’_7 | frame −2 | from 1 to 72 |
| SEQ ID NO: 2414 | R0233:F02_1 | frame 2 | from 119 to 190 |
| SEQ ID NO: 2415 | R0233:F02_2 | frame 3 | from 1 to 76 |
| SEQ ID NO: 2416 | R0233:F02_3 | frame −1 | from 31 to 82 |
| SEQ ID NO: 2417 | R0233:F02_4 | frame −1 | from 112 to 190 |
| SEQ ID NO: 2418 | R0232:A08_1 | frame −2 | from 4 to 64 |
| SEQ ID NO: 2419 | R0233:B04_1 | frame 2 | from 76 to 136 |
| SEQ ID NO: 2420 | R0233:B04_2 | frame −3 | from 1 to 103 |
| SEQ ID NO: 2421 | ‘42041.1_gaiger.ABI’_1 | frame −3 | from 1 to 63 |
| SEQ ID NO: 2422 | ‘42407.1_gaiger.ABI’_1 | frame 1 | from 32 to 83 |
| SEQ ID NO: 2423 | ‘42407.1_gaiger.ABI’_2 | frame 3 | from 1 to 90 |
| SEQ ID NO: 2424 | ‘42407.1_gaiger.ABI’_3 | frame −1 | from 32 to 87 |
| SEQ ID NO: 2425 | ‘42407.1_gaiger.ABI’_4 | frame −2 | from 10 to 100 |
| SEQ ID NO: 2426 | ‘42483.1;gaiger.ABI’_1 | frame 3 | from 4 to 81 |
| SEQ ID NO: 2427 | ‘42483.1;gaiger.ABI’_2 | frame −2 | from 12 to 75 |
| SEQ ID NO: 2428 | ‘42483.1;gaiger.ABI’_3 | frame −3 | from 1 to 51 |
| SEQ ID NO: 2429 | ‘42350.1_gaiger.ABI’_1 | frame −1 | from 12 to 90 |
| SEQ ID NO: 2430 | ‘42530.1;gaiger.ABI’_1 | frame 1 | from 7 to 73 |
| SEQ ID NO: 2431 | ‘42530.1;gaiger.ABI’_2 | frame −3 | from 3 to 72 |
| SEQ ID NO: 2432 | ‘42523.1;gaiger.ABI’_1 | frame 2 | from 19 to 74 |
| SEQ ID NO: 2433 | ‘42523.1;gaiger.ABI’_2 | frame 3 | from 2 to 51 |
| SEQ ID NO: 2434 | ‘42523.1;gaiger.ABI’_3 | frame −2 | from 1 to 58 |
| SEQ ID NO: 2435 | R0235:D07_1 | frame 3 | from 33 to 110 |
| SEQ ID NO: 2436 | R0235:D07_2 | frame −2 | from 64 to 113 |
| SEQ ID NO: 2437 | R0235:D07_3 | frame −3 | from 34 to 150 |
| SEQ ID NO: 2438 | R0235:D12_1 | frame −2 | from 18 to 71 |
| SEQ ID NO: 2439 | R0235:D12_2 | frame −3 | from 14 to 71 |
| SEQ ID NO: 2440 | R0236:H02_1 | frame 1 | from 1 to 70 |
| SEQ ID NO: 2441 | R0236:H02_2 | frame 2 | from 1 to 111 |
| SEQ ID NO: 2442 | R0236:H02_3 | frame 2 | from 113 to 165 |
| SEQ ID NO: 2443 | R0236:H02_4 | frame 3 | from 1 to 138 |
| SEQ ID NO: 2444 | R0236:H02_5 | frame −2 | from 10 to 110 |
| SEQ ID NO: 2445 | R0236:H02_6 | frame −3 | from 105 to 165 |
| SEQ ID NO: 2446 | R0251:B12_1 | frame 3 | from 1 to 196 |
| SEQ ID NO: 2447 | R0251:B12_2 | frame −2 | from 15 to 128 |
| SEQ ID NO: 2448 | R0251:B12_3 | frame −2 | from 130 to 196 |
| SEQ ID NO: 2449 | R0253:D09_1 | frame 2 | from 1 to 65 |
| SEQ ID NO: 2450 R0253:D09_2 | frame 2 | from 67 to 116 | |
| SEQ ID NO: 2451 | R0253:D09_3 | frame 3 | from 31 to 115 |
| SEQ ID NO: 2452 | R0253:D09_4 | frame −1 | from 1 to 116 |
| SEQ ID NO: 2453 | R0253:D09_5 | frame −3 | from 13 to 66 |
| SEQ ID NO: 2454 | R0254:F10_1 | frame 3 | from 54 to 103 |
| SEQ ID NO: 2455 | R0254:D02_1 | frame 1 | from 1 to 53 |
| SEQ ID NO: 2456 | R0254:D02_2 | frame 1 | from 55 to 135 |
| SEQ ID NO: 2457 | R0254:D02_3 | frame 2 | from 109 to 158 |
| SEQ ID NO: 2458 | R0254:D02_4 | frame −2 | from 1 to 193 |
| SEQ ID NO: 2459 | R0254:D02_5 | frame −3 | from 33 to 90 |
| SEQ ID NO: 2460 | R0238:B06_1 | frame 3 | from 31 to 139 |
| SEQ ID NO: 2461 | R0238:B06_2 | frame −1 | from 1 to 51 |
| SEQ ID NO: 2462 | R0238:B06_3 | frame −2 | from 69 to 119 |
| SEQ ID NO: 2463 | R0238:B06_4 | frame −3 | from 4 to 70 |
| SEQ ID NO: 2464 | R0255:D01_1 | frame 1 | from 9 to 90 |
| SEQ ID NO: 2465 | R0255:D01_2 | frame 1 | from 104 to 168 |
| SEQ ID NO: 2466 | R0255:D01_3 | frame 2 | from 88 to 168 |
| SEQ ID NO: 2467 | R0255:D01_4 | frame −1 | from 1 to 79 |
| SEQ ID NO: 2468 | R0255:D01_5 | frame −1 | from 81 to 130 |
| SEQ ID NO: 2469 | R0255:D01_6 | frame −2 | from 1 to 59 |
| SEQ ID NO: 2470 | R0255:D01_7 | frame −2 | from 62 to 168 |
| SEQ ID NO: 2471 | R0255:D01_8 | frame −3 | from 35 to 91 |
| SEQ ID NO: 2472 | R0255:D01_9 | frame −3 | from 93 to 156 |
| SEQ ID NO: 2473 | R0255:C02_1 | frame 1 | from 1 to 60 |
| SEQ ID NO: 2474 | R0255:C02_2 | frame 3 | from 23 to 96 |
| SEQ ID NO: 2475 | R0255:C02_3 | frame −1 | from 35 to 108 |
| SEQ ID NO: 2476 | R0261:H04_1 | frame 1 | from 100 to 159 |
| SEQ ID NO: 2477 R0261:H04_2 | frame 3 | from 1 to 126 | |
| SEQ ID NO: 2478 R0261:H04_3 | frame −1 | from 1 to 97 | |
| SEQ ID NO: 2479 | R0261:H04_4 | frame −2 | from 1 to 75 |
| SEQ ID NO: 2480 | R0261:H04_5 | frame −2 | from 77 to 128 |
| SEQ ID NO: 2481 | R0261:H04_6 | frame −3 | from 6 to 158 |
| SEQ ID NO: 2482 | R0259:C04_1 | frame 1 | from 16 to 78 |
| SEQ ID NO: 2483 | R0259:C04_2 | frame −2 | from 53 to 139 |
| SEQ ID NO: 2484 | R0259:C06_1 | frame −1 | from 36 to 100 |
| SEQ ID NO: 2485 | R0259:C06_2 | frame −2 | from 124 to 187 |
| SEQ ID NO: 2486 | R0261:H08_1 | frame 1 | from 29 to 102 |
| SEQ ID NO: 2487 | R0261:H08_2 | frame 2 | from 1 to 101 |
| SEQ ID NO: 2488 | R0261:H08_3 | frame 3 | from 1 to 101 |
| SEQ ID NO: 2489 | R0261:H08_4 | frame −2 | from 1 to 74 |
| SEQ ID NO: 2490 | R0261:H08_5 | frame −3 | from 38 to 101 |
| SEQ ID NO: 2491 | R0261:D03_1 | frame 1 | from 44 to 179 |
| SEQ ID NO: 2492 | R0261:D03_2 | frame 2 | from 12 to 90 |
| SEQ ID NO: 2493 | R0261:D03_3 | frame 2 | from 92 to 164 |
| SEQ ID NO: 2494 | R0261:D03_4 | frame 3 | from 40 to 96 |
| SEQ ID NO: 2495 | R0261:D03_5 | frame 3 | from 98 to 186 |
| SEQ ID NO: 2496 | R0261:D03_6 | frame −1 | from 37 to 160 |
| SEQ ID NO: 2497 | R0261:D03_7 | frame −2 | from 22 to 144 |
| SEQ ID NO: 2498 | R0262:C04_1 | frame 1 | from 18 to 75 |
| SEQ ID NO: 2499 | R0262:C04_2 | frame 2 | from 7 to 77 |
| SEQ ID NO: 2500 | R0262:C04_3 | frame −2 | from 67 to 139 |
| SEQ ID NO: 2501 | R0262:C04_4 | frame −3 | from 1 to 88 |
| SEQ ID NO: 2502 | R0264:B08_1 | frame 1 | from 1 to 59 |
| SEQ ID NO: 2503 | R0266:D03_1 | frame 1 | from 1 to 171 |
| SEQ ID NO: 2504 | R0266:D03_2 | frame 2 | from 94 to 193 |
| SEQ ID NO: 2505 | R0266:D03_3 | frame 3 | from 131 to 185 |
| SEQ ID NO: 2506 | R0266:D03_4 | frame −1 | from 89 to 160 |
| SEQ ID NO: 2507 | R0266:D03_5 | frame −3 | from 2 to 59 |
| SEQ ID NO: 2508 | R0266:D03_6 | frame −3 | from 141 to 193 |
| SEQ ID NO: 2509 | R0265:F12_1 | frame 1 | from 75 to 126 |
| SEQ ID NO: 2510 | R0265:F12_2 | frame 2 | from 46 to 160 |
| SEQ ID NO: 2511 | R0265:F12_3 | frame −1 | from 36 to 87 |
| SEQ ID NO: 2512 | R0265:F12_4 | frame −3 | from 78 to 133 |
| SEQ ID NO: 2513 | R0264:C03_1 | frame −2 | from 21 to 77 |
| SEQ ID NO: 2514 | R0264:C04_1 | frame −3 | from 48 to 122 |
| SEQ ID NO: 2515 | R0244:C02_1 | frame 1 | from 1 to 64 |
| SEQ ID NO: 2516 | R0244:C02_2 | frame −1 | from 8 to 107 |
| SEQ ID NO: 2517 | R0244:C02_3 | frame −2 | from 19 to 70 |
| SEQ ID NO: 2518 | R0245:A02_1 | frame 2 | from 12 to 61 |
| SEQ ID NO: 2519 | R0245:A02_2 | frame −3 | from 42 to 92 |
| SEQ ID NO: 2520 | ‘51734.1_gaiger.ABI’_1 | frame 1 | from 12 to 98 |
| SEQ ID NO: 2521 | ‘51734.1_gaiger.ABI’_2 | frame 3 | from 22 to 76 |
| SEQ ID NO: 2522 | ‘51734.1_gaiger.ABI’_3 | frame −2 | from 18 to 137 |
| SEQ ID NO: 2523 | ‘51870.1_gaiger.ABI’_1 | frame 3 | from 33 to 107 |
| SEQ ID NO: 2524 | ‘51870.1_gaiger.ABI’_2 | frame −2 | from 27 to 85 |
| SEQ ID NO: 2525 | ‘51870.1_gaiger.ABI’_3 | frame −3 | from 65 to 115 |
| SEQ ID NO: 2526 | ‘51975.1_gaiger.ABI’_1 | frame 1 | from 17 to 88 |
| SEQ ID NO: 2527 | ‘51975.1_gaiger.ABI’_2 | frame 1 | from 90 to 141 |
| SEQ ID NO: 2528 | ‘51975.1_gaiger.ABI’_3 | frame −1 | from 73 to 147 |
| SEQ ID NO: 2529 | ‘51975.1_gaiger.ABI’_4 | frame −3 | from 1 to 93 |
| SEQ ID NO: 2530 | ‘52260.1_gaiger.ABI’_1 | frame 1 | from 23 to 75 |
| SEQ ID NO: 2531 | ‘52260.1_gaiger.ABI’_2 | frame −1 | from 48 to 105 |
| SEQ ID NO: 2532 | ‘52260.1_gaiger.ABI’_3 | frame −3 | from 13 to 79 |

[0537] Table 9 identifies an additional set of particular hematological malignanacy-related cDNA sequences that were obtained using the subtractive library and microarray methods as described above. These sequences, designated SEQ ID NO:2533-SEQ ID NO:9597 in the present specification, are shown in the Table along with the original clone name, and the serial number and filing date of the priority provisional application in which the clone was first described.

TABLE 9
ADDITIONAL POLYNUCLEOTIDES IDENTIFIED BY
SUBTRACTIVE HYBRDIZATION ANALYSES

| Sequence Identifier | Priority | Priority |
|---|---|---|
| Used in the Present | application Ser. | application Filing |
| application | No. | Date |
| SEQ ID NO:2533 | 60/186,126 | 03/01/2000 |
| SEQ ID NO:2534 | 60/186,126 | 03/01/2000 |
| SEQ ID NO:2535 | 60/186,126 | 03/01/2000 |
| SEQ ID NO:2536 | 60/186,126 | 03/01/2000 |
| SEQ ID NO:2537 | 60/186,126 | 03/01/2000 |
| SEQ ID NO:2538 | 60/186,126 | 03/01/2000 |
| SEQ ID NO:2539 | 60/186,126 | 03/01/2000 |
| SEQ ID NO:2540 | 60/186,126 | 03/01/2000 |
| SEQ ID NO:2541 | 60/186,126 | 03/01/2000 |
| SEQ ID NO:2542 | 60/186,126 | 03/01/2000 |
| SEQ ID NO:2543 | 60/186,126 | 03/01/2000 |
| SEQ ID NO:2544 | 60/186,126 | 03/01/2000 |
| SEQ ID NO:2545 | 60/186,126 | 03/01/2000 |
| SEQ ID NO:2546 | 60/186,126 | 03/01/2000 |
| SEQ ID NO:2547 | 60/186,126 | 03/01/2000 |
| SEQ ID NO:2548 | 60/186,126 | 03/01/2000 |
| SEQ ID NO:2549 | 60/186,126 | 03/01/2000 |
| SEQ ID NO:2550 | 60/186,126 | 03/01/2000 |
| SEQ ID NO:2551 | 60/186,126 | 03/01/2000 |
| SEQ ID NO:2552 | 60/186,126 | 03/01/2000 |
| SEQ ID NO:2553 | 60/186,126 | 03/01/2000 |
| SEQ ID NO:2554 | 60/186,126 | 03/01/2000 |
| SEQ ID NO:2555 | 60/186,126 | 03/01/2000 |
| SEQ ID NO:2556 | 60/186,126 | 03/01/2000 |
| SEQ ID NO:2557 | 60/186,126 | 03/01/2000 |
| SEQ ID NO:2558 | 60/186,126 | 03/01/2000 |
| SEQ ID NO:2559 | 60/186,126 | 03/01/2000 |
| SEQ ID NO:2560 | 60/186,126 | 03/01/2000 |
| SEQ ID NO:2561 | 60/186,126 | 03/01/2000 |
| SEQ ID NO:2562 | 60/186,126 | 03/01/2000 |
| SEQ ID NO:2563 | 60/186,126 | 03/01/2000 |
| SEQ ID NO:2564 | 60/186,126 | 03/01/2000 |
| SEQ ID NO:2565 | 60/186,126 | 03/01/2000 |
| SEQ ID NO:2566 | 60/186,126 | 03/01/2000 |
| SEQ ID NO:2567 | 60/186,126 | 03/01/2000 |
| SEQ ID NO:2568 | 60/186,126 | 03/01/2000 |
| SEQ ID NO:2569 | 60/186,126 | 03/01/2000 |
| SEQ ID NO:2570 | 60/186,126 | 03/01/2000 |
| SEQ ID NO:2571 | 60/186,126 | 03/01/2000 |
| SEQ ID NO:2572 | 60/186,126 | 03/01/2000 |
| SEQ ID NO:2573 | 60/186,126 | 03/01/2000 |
| SEQ ID NO:2574 | 60/186,126 | 03/01/2000 |
| SEQ ID NO:2575 | 60/186,126 | 03/01/2000 |
| SEQ ID NO:2576 | 60/186,126 | 03/01/2000 |
| SEQ ID NO:2577 | 60/186,126 | 03/01/2000 |
| SEQ ID NO:2578 | 60/186,126 | 03/01/2000 |
| SEQ ID NO:2579 | 60/186,126 | 03/01/2000 |
| SEQ ID NO:2580 | 60/186,126 | 03/01/2000 |
| SEQ ID NO:2581 | 60/186,126 | 03/01/2000 |
| SEQ ID NO:2582 | 60/186,126 | 03/01/2000 |
| SEQ ID NO:2583 | 60/186,126 | 03/01/2000 |
| SEQ ID NO:2584 | 60/186,126 | 03/01/2000 |
| SEQ ID NO:2585 | 60/186,126 | 03/01/2000 |
| SEQ ID NO:2586 | 60/186,126 | 03/01/2000 |
| SEQ ID NO:2587 | 60/186,126 | 03/01/2000 |
| SEQ ID NO:2588 | 60/186,126 | 03/01/2000 |
| SEQ ID NO:2589 | 60/186,126 | 03/01/2000 |
| SEQ ID NO:2590 | 60/186,126 | 03/01/2000 |
| SEQ ID NO:2591 | 60/186,126 | 03/01/2000 |
| SEQ ID NO:2592 | 60/186,126 | 03/01/2000 |
| SEQ ID NO:2593 | 60/186,126 | 03/01/2000 |
| SEQ ID NO:2594 | 60/186,126 | 03/01/2000 |
| SEQ ID NO:2595 | 60/186,126 | 03/01/2000 |
| SEQ ID NO:2596 | 60/186,126 | 03/01/2000 |
| SEQ ID NO:2597 | 60/186,126 | 03/01/2000 |
| SEQ ID NO:2598 | 60/186,126 | 03/01/2000 |
| SEQ ID NO:2599 | 60/186,126 | 03/01/2000 |
| SEQ ID NO:2600 | 60/186,126 | 03/01/2000 |
| SEQ ID NO:2601 | 60/186,126 | 03/01/2000 |
| SEQ ID NO:2602 | 60/186,126 | 03/01/2000 |
| SEQ ID NO:2603 | 60/186,126 | 03/01/2000 |
| SEQ ID NO:2604 | 60/186,126 | 03/01/2000 |
| SEQ ID NO:2605 | 60/186,126 | 03/01/2000 |
| SEQ ID NO:2606 | 60/186,126 | 03/01/2000 |
| SEQ ID NO:2607 | 60/186,126 | 03/01/2000 |
| SEQ ID NO:2608 | 60/186,126 | 03/01/2000 |
| SEQ ID NO:2609 | 60/186,126 | 03/01/2000 |
| SEQ ID NO:2610 | 60/186,126 | 03/01/2000 |
| SEQ ID NO:2611 | 60/186,126 | 03/01/2000 |
| SEQ ID NO:2612 | 60/186,126 | 03/01/2000 |
| SEQ ID NO:2613 | 60/186,126 | 03/01/2000 |
| SEQ ID NO:2614 | 60/186,126 | 03/01/2000 |
| SEQ ID NO:2615 | 60/186,126 | 03/01/2000 |
| SEQ ID NO:2616 | 60/186,126 | 03/01/2000 |
| SEQ ID NO:2617 | 60/186,126 | 03/01/2000 |
| SEQ ID NO:2618 | 60/186,126 | 03/01/2000 |
| SEQ ID NO:2619 | 60/186,126 | 03/01/2000 |
| SEQ ID NO:2620 | 60/186,126 | 03/01/2000 |
| SEQ ID NO:2621 | 60/186,126 | 03/01/2000 |
| SEQ ID NO:2622 | 60/186,126 | 03/01/2000 |
| SEQ ID NO:2623 | 60/186,126 | 03/01/2000 |
| SEQ ID NO:2624 | 60/186,126 | 03/01/2000 |
| SEQ ID NO:2625 | 60/186,126 | 03/01/2000 |
| SEQ ID NO:2626 | 60/186,126 | 03/01/2000 |
| SEQ ID NO:2627 | 60/186,126 | 03/01/2000 |
| SEQ ID NO:2628 | 60/186,126 | 03/01/2000 |
| SEQ ID NO:2629 | 60/186,126 | 03/01/2000 |
| SEQ ID NO:2630 | 60/186,126 | 03/01/2000 |
| SEQ ID NO:2631 | 60/186,126 | 03/01/2000 |
| SEQ ID NO:2632 | 60/186,126 | 03/01/2000 |
| SEQ ID NO:2633 | 60/186,126 | 03/01/2000 |
| SEQ ID NO:2634 | 60/186,126 | 03/01/2000 |
| SEQ ID NO:2635 | 60/186,126 | 03/01/2000 |
| SEQ ID NO:2636 | 60/186,126 | 03/01/2000 |
| SEQ ID NO:2637 | 60/186,126 | 03/01/2000 |
| SEQ ID NO:2638 | 60/186,126 | 03/01/2000 |
| SEQ ID NO:2639 | 60/186,126 | 03/01/2000 |
| SEQ ID NO:2640 | 60/186,126 | 03/01/2000 |
| SEQ ID NO:2641 | 60/186,126 | 03/01/2000 |
| SEQ ID NO:2642 | 60/186,126 | 03/01/2000 |
| SEQ ID NO:2643 | 60/186,126 | 03/01/2000 |
| SEQ ID NO:2644 | 60/186,126 | 03/01/2000 |
| SEQ ID NO:2645 | 60/186,126 | 03/01/2000 |
| SEQ ID NO:2646 | 60/186,126 | 03/01/2000 |
| SEQ ID NO:2647 | 60/186,126 | 03/01/2000 |
| SEQ ID NO:2648 | 60/186,126 | 03/01/2000 |
| SEQ ID NO:2649 | 60/186,126 | 03/01/2000 |
| SEQ ID NO:2650 | 60/186,126 | 03/01/2000 |
| SEQ ID NO:2651 | 60/186,126 | 03/01/2000 |
| SEQ ID NO:2652 | 60/186,126 | 03/01/2000 |
| SEQ ID NO:2653 | 60/186,126 | 03/01/2000 |
| SEQ ID NO:2654 | 60/186,126 | 03/01/2000 |
| SEQ ID NO:2655 | 60/186,126 | 03/01/2000 |
| SEQ ID NO:2656 | 60/186,126 | 03/01/2000 |
| SEQ ID NO:2657 | 60/186,126 | 03/01/2000 |
| SEQ ID NO:2658 | 60/186,126 | 03/01/2000 |
| SEQ ID NO:2659 | 60/186,126 | 03/01/2000 |
| SEQ ID NO:2660 | 60/186,126 | 03/01/2000 |
| SEQ ID NO:2661 | 60/186,126 | 03/01/2000 |
| SEQ ID NO:2662 | 60/186,126 | 03/01/2000 |
| SEQ ID NO:2663 | 60/186,126 | 03/01/2000 |
| SEQ ID NO:2664 | 60/186,126 | 03/01/2000 |
| SEQ ID NO:2665 | 60/186,126 | 03/01/2000 |
| SEQ ID NO:2666 | 60/186,126 | 03/01/2000 |
| SEQ ID NO:2667 | 60/186,126 | 03/01/2000 |
| SEQ ID NO:2668 | 60/186,126 | 03/01/2000 |
| SEQ ID NO:2669 | 60/186,126 | 03/01/2000 |
| SEQ ID NO:2670 | 60/186,126 | 03/01/2000 |
| SEQ ID NO:2671 | 60/186,126 | 03/01/2000 |
| SEQ ID NO:2672 | 60/186,126 | 03/01/2000 |
| SEQ ID NO:2673 | 60/186,126 | 03/01/2000 |
| SEQ ID NO:2674 | 60/186,126 | 03/01/2000 |
| SEQ ID NO:2675 | 60/186,126 | 03/01/2000 |
| SEQ ID NO:2676 | 60/186,126 | 03/01/2000 |
| SEQ ID NO:2677 | 60/186,126 | 03/01/2000 |
| SEQ ID NO:2678 | 60/186,126 | 03/01/2000 |
| SEQ ID NO:2679 | 60/186,126 | 03/01/2000 |
| SEQ ID NO:2680 | 60/186,126 | 03/01/2000 |
| SEQ ID NO:2681 | 60/186,126 | 03/01/2000 |
| SEQ ID NO:2682 | 60/186,126 | 03/01/2000 |
| SEQ ID NO:2683 | 60/186,126 | 03/01/2000 |
| SEQ ID NO:2684 | 60/186,126 | 03/01/2000 |
| SEQ ID NO:2685 | 60/186,126 | 03/01/2000 |
| SEQ ID NO:2686 | 60/186,126 | 03/01/2000 |
| SEQ ID NO:2687 | 60/186,126 | 03/01/2000 |
| SEQ ID NO:2688 | 60/186,126 | 03/01/2000 |
| SEQ ID NO:2689 | 60/186,126 | 03/01/2000 |
| SEQ ID NO:2690 | 60/186,126 | 03/01/2000 |
| SEQ ID NO:2691 | 60/186,126 | 03/01/2000 |
| SEQ ID NO:2692 | 60/186,126 | 03/01/2000 |
| SEQ ID NO:2693 | 60/186,126 | 03/01/2000 |
| SEQ ID NO:2694 | 60/186,126 | 03/01/2000 |
| SEQ ID NO:2695 | 60/186,126 | 03/01/2000 |
| SEQ ID NO:2696 | 60/186,126 | 03/01/2000 |
| SEQ ID NO:2697 | 60/186,126 | 03/01/2000 |
| SEQ ID NO:2698 | 60/186,126 | 03/01/2000 |
| SEQ ID NO:2699 | 60/186,126 | 03/01/2000 |
| SEQ ID NO:2700 | 60/186,126 | 03/01/2000 |
| SEQ ID NO:2701 | 60/186,126 | 03/01/2000 |
| SEQ ID NO:2702 | 60/186,126 | 03/01/2000 |
| SEQ ID NO:2703 | 60/186,126 | 03/01/2000 |
| SEQ ID NO:2704 | 60/186,126 | 03/01/2000 |
| SEQ ID NO:2705 | 60/186,126 | 03/01/2000 |
| SEQ ID NO:2706 | 60/186,126 | 03/01/2000 |
| SEQ ID NO:2707 | 60/186,126 | 03/01/2000 |
| SEQ ID NO:2708 | 60/186,126 | 03/01/2000 |
| SEQ ID NO:2709 | 60/186,126 | 03/01/2000 |
| SEQ ID NO:2710 | 60/186,126 | 03/01/2000 |
| SEQ ID NO:2711 | 60/186,126 | 03/01/2000 |
| SEQ ID NO:2712 | 60/186,126 | 03/01/2000 |
| SEQ ID NO:2713 | 60/186,126 | 03/01/2000 |
| SEQ ID NO:2714 | 60/186,126 | 03/01/2000 |
| SEQ ID NO:2715 | 60/186,126 | 03/01/2000 |
| SEQ ID NO:2716 | 60/186,126 | 03/01/2000 |
| SEQ ID NO:2717 | 60/186,126 | 03/01/2000 |
| SEQ ID NO:2718 | 60/186,126 | 03/01/2000 |
| SEQ ID NO:2719 | 60/186,126 | 03/01/2000 |
| SEQ ID NO:2720 | 60/186,126 | 03/01/2000 |
| SEQ ID NO:2721 | 60/186,126 | 03/01/2000 |
| SEQ ID NO:2722 | 60/186,126 | 03/01/2000 |
| SEQ ID NO:2723 | 60/186,126 | 03/01/2000 |
| SEQ ID NO:2724 | 60/186,126 | 03/01/2000 |
| SEQ ID NO:2725 | 60/186,126 | 03/01/2000 |
| SEQ ID NO:2726 | 60/186,126 | 03/01/2000 |
| SEQ ID NO:2727 | 60/186,126 | 03/01/2000 |
| SEQ ID NO:2728 | 60/186,126 | 03/01/2000 |
| SEQ ID NO:2729 | 60/186,126 | 03/01/2000 |
| SEQ ID NO:2730 | 60/186,126 | 03/01/2000 |
| SEQ ID NO:2731 | 60/186,126 | 03/01/2000 |
| SEQ ID NO:2732 | 60/186,126 | 03/01/2000 |
| SEQ ID NO:2733 | 60/186,126 | 03/01/2000 |
| SEQ ID NO:2734 | 60/186,126 | 03/01/2000 |
| SEQ ID NO:2735 | 60/186,126 | 03/01/2000 |
| SEQ ID NO:2736 | 60/186,126 | 03/01/2000 |
| SEQ ID NO:2737 | 60/186,126 | 03/01/2000 |
| SEQ ID NO:2738 | 60/186,126 | 03/01/2000 |
| SEQ ID NO:2739 | 60/186,126 | 03/01/2000 |
| SEQ ID NO:2740 | 60/186,126 | 03/01/2000 |
| SEQ ID NO:2741 | 60/186,126 | 03/01/2000 |
| SEQ ID NO:2742 | 60/186,126 | 03/01/2000 |
| SEQ ID NO:2743 | 60/186,126 | 03/01/2000 |
| SEQ ID NO:2744 | 60/186,126 | 03/01/2000 |
| SEQ ID NO:2745 | 60/186,126 | 03/01/2000 |
| SEQ ID NO:2746 | 60/186,126 | 03/01/2000 |
| SEQ ID NO:2747 | 60/186,126 | 03/01/2000 |
| SEQ ID NO:2748 | 60/186,126 | 03/01/2000 |
| SEQ ID NO:2749 | 60/186,126 | 03/01/2000 |
| SEQ ID NO:2750 | 60/186,126 | 03/01/2000 |
| SEQ ID NO:2751 | 60/186,126 | 03/01/2000 |
| SEQ ID NO:2752 | 60/186,126 | 03/01/2000 |
| SEQ ID NO:2753 | 60/186,126 | 03/01/2000 |
| SEQ ID NO:2754 | 60/186,126 | 03/01/2000 |
| SEQ ID NO:2755 | 60/186,126 | 03/01/2000 |
| SEQ ID NO:2756 | 60/186,126 | 03/01/2000 |
| SEQ ID NO:2757 | 60/186,126 | 03/01/2000 |
| SEQ ID NO:2758 | 60/186,126 | 03/01/2000 |
| SEQ ID NO:2759 | 60/186,126 | 03/01/2000 |
| SEQ ID NO:2760 | 60/186,126 | 03/01/2000 |
| SEQ ID NO:2761 | 60/186,126 | 03/01/2000 |
| SEQ ID NO:2762 | 60/186,126 | 03/01/2000 |
| SEQ ID NO:2763 | 60/186,126 | 03/01/2000 |
| SEQ ID NO:2764 | 60/186,126 | 03/01/2000 |
| SEQ ID NO:2765 | 60/186,126 | 03/01/2000 |
| SEQ ID NO:2766 | 60/186,126 | 03/01/2000 |
| SEQ ID NO:2767 | 60/186,126 | 03/01/2000 |
| SEQ ID NO:2768 | 60/186,126 | 03/01/2000 |
| SEQ ID NO:2769 | 60/186,126 | 03/01/2000 |
| SEQ ID NO:2770 | 60/186,126 | 03/01/2000 |
| SEQ ID NO:2771 | 60/186,126 | 03/01/2000 |
| SEQ ID NO:2772 | 60/186,126 | 03/01/2000 |
| SEQ ID NO:2773 | 60/186,126 | 03/01/2000 |
| SEQ ID NO:2774 | 60/186,126 | 03/01/2000 |
| SEQ ID NO:2775 | 60/186,126 | 03/01/2000 |
| SEQ ID NO:2776 | 60/186,126 | 03/01/2000 |
| SEQ ID NO:2777 | 60/186,126 | 03/01/2000 |
| SEQ ID NO:2778 | 60/186,126 | 03/01/2000 |
| SEQ ID NO:2779 | 60/186,126 | 03/01/2000 |
| SEQ ID NO:2780 | 60/186,126 | 03/01/2000 |
| SEQ ID NO:2781 | 60/186,126 | 03/01/2000 |
| SEQ ID NO:2782 | 60/186,126 | 03/01/2000 |
| SEQ ID NO:2783 | 60/186,126 | 03/01/2000 |
| SEQ ID NO:2784 | 60/186,126 | 03/01/2000 |
| SEQ ID NO:2785 | 60/186,126 | 03/01/2000 |
| SEQ ID NO:2786 | 60/186,126 | 03/01/2000 |
| SEQ ID NO:2787 | 60/186,126 | 03/01/2000 |
| SEQ ID NO:2788 | 60/186,126 | 03/01/2000 |
| SEQ ID NO:2789 | 60/186,126 | 03/01/2000 |
| SEQ ID NO:2790 | 60/186,126 | 03/01/2000 |
| SEQ ID NO:2791 | 60/186,126 | 03/01/2000 |
| SEQ ID NO:2792 | 60/186,126 | 03/01/2000 |
| SEQ ID NO:2793 | 60/186,126 | 03/01/2000 |
| SEQ ID NO:2794 | 60/186,126 | 03/01/2000 |
| SEQ ID NO:2795 | 60/186,126 | 03/01/2000 |
| SEQ ID NO:2796 | 60/186,126 | 03/01/2000 |
| SEQ ID NO:2797 | 60/186,126 | 03/01/2000 |
| SEQ ID NO:2798 | 60/186,126 | 03/01/2000 |
| SEQ ID NO:2799 | 60/186,126 | 03/01/2000 |
| SEQ ID NO:2800 | 60/186,126 | 03/01/2000 |
| SEQ ID NO:2801 | 60/186,126 | 03/01/2000 |
| SEQ ID NO:2802 | 60/186,126 | 03/01/2000 |
| SEQ ID NO:2803 | 60/186,126 | 03/01/2000 |
| SEQ ID NO:2804 | 60/186,126 | 03/01/2000 |
| SEQ ID NO:2805 | 60/186,126 | 03/01/2000 |
| SEQ ID NO:2806 | 60/186,126 | 03/01/2000 |
| SEQ ID NO:2807 | 60/186,126 | 03/01/2000 |
| SEQ ID NO:2808 | 60/186,126 | 03/01/2000 |
| SEQ ID NO:2809 | 60/186,126 | 03/01/2000 |
| SEQ ID NO:2810 | 60/186,126 | 03/01/2000 |
| SEQ ID NO:2811 | 60/186,126 | 03/01/2000 |
| SEQ ID NO:2812 | 60/186,126 | 03/01/2000 |
| SEQ ID NO:2813 | 60/186,126 | 03/01/2000 |
| SEQ ID NO:2814 | 60/186,126 | 03/01/2000 |
| SEQ ID NO:2815 | 60/186,126 | 03/01/2000 |
| SEQ ID NO:2816 | 60/186,126 | 03/01/2000 |
| SEQ ID NO:2817 | 60/186,126 | 03/01/2000 |
| SEQ ID NO:2818 | 60/186,126 | 03/01/2000 |
| SEQ ID NO:2819 | 60/186,126 | 03/01/2000 |
| SEQ ID NO:2820 | 60/186,126 | 03/01/2000 |
| SEQ ID NO:2821 | 60/186,126 | 03/01/2000 |
| SEQ ID NO:2822 | 60/186,126 | 03/01/2000 |
| SEQ ID NO:2823 | 60/186,126 | 03/01/2000 |
| SEQ ID NO:2824 | 60/186,126 | 03/01/2000 |
| SEQ ID NO:2825 | 60/186,126 | 03/01/2000 |
| SEQ ID NO:2826 | 60/186,126 | 03/01/2000 |
| SEQ ID NO:2827 | 60/186,126 | 03/01/2000 |
| SEQ ID NO:2828 | 60/186,126 | 03/01/2000 |
| SEQ ID NO:2829 | 60/186,126 | 03/01/2000 |
| SEQ ID NO:2830 | 60/186,126 | 03/01/2000 |
| SEQ ID NO:2831 | 60/186,126 | 03/01/2000 |
| SEQ ID NO:2832 | 60/186,126 | 03/01/2000 |
| SEQ ID NO:2833 | 60/186,126 | 03/01/2000 |
| SEQ ID NO:2834 | 60/186,126 | 03/01/2000 |
| SEQ ID NO:2835 | 60/186,126 | 03/01/2000 |
| SEQ ID NO:2836 | 60/186,126 | 03/01/2000 |
| SEQ ID NO:2837 | 60/186,126 | 03/01/2000 |
| SEQ ID NO:2838 | 60/186,126 | 03/01/2000 |
| SEQ ID NO:2839 | 60/186,126 | 03/01/2000 |
| SEQ ID NO:2840 | 60/186,126 | 03/01/2000 |
| SEQ ID NO:2841 | 60/186,126 | 03/01/2000 |
| SEQ ID NO:2842 | 60/186,126 | 03/01/2000 |
| SEQ ID NO:2843 | 60/186,126 | 03/01/2000 |
| SEQ ID NO:2844 | 60/186,126 | 03/01/2000 |
| SEQ ID NO:2845 | 60/186,126 | 03/01/2000 |
| SEQ ID NO:2846 | 60/186,126 | 03/01/2000 |
| SEQ ID NO:2847 | 60/186,126 | 03/01/2000 |
| SEQ ID NO:2848 | 60/186,126 | 03/01/2000 |
| SEQ ID NO:2849 | 60/186,126 | 03/01/2000 |
| SEQ ID NO:2850 | 60/186,126 | 03/01/2000 |
| SEQ ID NO:2851 | 60/186,126 | 03/01/2000 |
| SEQ ID NO:2852 | 60/186,126 | 03/01/2000 |
| SEQ ID NO:2853 | 60/186,126 | 03/01/2000 |
| SEQ ID NO:2854 | 60/186,126 | 03/01/2000 |
| SEQ ID NO:2855 | 60/186,126 | 03/01/2000 |
| SEQ ID NO:2856 | 60/186,126 | 03/01/2000 |
| SEQ ID NO:2857 | 60/186,126 | 03/01/2000 |
| SEQ ID NO:2858 | 60/186,126 | 03/01/2000 |
| SEQ ID NO:2859 | 60/186,126 | 03/01/2000 |
| SEQ ID NO:2860 | 60/186,126 | 03/01/2000 |
| SEQ ID NO:2861 | 60/186,126 | 03/01/2000 |
| SEQ ID NO:2862 | 60/186,126 | 03/01/2000 |
| SEQ ID NO:2863 | 60/186,126 | 03/01/2000 |
| SEQ ID NO:2864 | 60/186,126 | 03/01/2000 |
| SEQ ID NO:2865 | 60/186,126 | 03/01/2000 |
| SEQ ID NO:2866 | 60/186,126 | 03/01/2000 |
| SEQ ID NO:2867 | 60/186,126 | 03/01/2000 |
| SEQ ID NO:2868 | 60/186,126 | 03/01/2000 |
| SEQ ID NO:2869 | 60/186,126 | 03/01/2000 |
| SEQ ID NO:2870 | 60/186,126 | 03/01/2000 |
| SEQ ID NO:2871 | 60/186,126 | 03/01/2000 |
| SEQ ID NO:2872 | 60/186,126 | 03/01/2000 |
| SEQ ID NO:2873 | 60/186,126 | 03/01/2000 |
| SEQ ID NO:2874 | 60/186,126 | 03/01/2000 |
| SEQ ID NO:2875 | 60/186,126 | 03/01/2000 |
| SEQ ID NO:2876 | 60/186,126 | 03/01/2000 |
| SEQ ID NO:2877 | 60/186,126 | 03/01/2000 |
| SEQ ID NO:2878 | 60/186,126 | 03/01/2000 |
| SEQ ID NO:2879 | 60/186,126 | 03/01/2000 |
| SEQ ID NO:2880 | 60/186,126 | 03/01/2000 |
| SEQ ID NO:2881 | 60/186,126 | 03/01/2000 |
| SEQ ID NO:2882 | 60/186,126 | 03/01/2000 |
| SEQ ID NO:2883 | 60/186,126 | 03/01/2000 |
| SEQ ID NO:2884 | 60/186,126 | 03/01/2000 |
| SEQ ID NO:2885 | 60/186,126 | 03/01/2000 |
| SEQ ID NO:2886 | 60/186,126 | 03/01/2000 |
| SEQ ID NO:2887 | 60/186,126 | 03/01/2000 |
| SEQ ID NO:2888 | 60/186,126 | 03/01/2000 |
| SEQ ID NO:2889 | 60/186,126 | 03/01/2000 |
| SEQ ID NO:2890 | 60/186,126 | 03/01/2000 |
| SEQ ID NO:2891 | 60/186,126 | 03/01/2000 |
| SEQ ID NO:2892 | 60/186,126 | 03/01/2000 |
| SEQ ID NO:2893 | 60/186,126 | 03/01/2000 |
| SEQ ID NO:2894 | 60/186,126 | 03/01/2000 |
| SEQ ID NO:2895 | 60/186,126 | 03/01/2000 |
| SEQ ID NO:2896 | 60/186,126 | 03/01/2000 |
| SEQ ID NO:2897 | 60/186,126 | 03/01/2000 |
| SEQ ID NO:2898 | 60/186,126 | 03/01/2000 |
| SEQ ID NO:2899 | 60/186,126 | 03/01/2000 |
| SEQ ID NO:2900 | 60/186,126 | 03/01/2000 |
| SEQ ID NO:2901 | 60/186,126 | 03/01/2000 |
| SEQ ID NO:2902 | 60/186,126 | 03/01/2000 |
| SEQ ID NO:2903 | 60/186,126 | 03/01/2000 |
| SEQ ID NO:2904 | 60/186,126 | 03/01/2000 |
| SEQ ID NO:2905 | 60/186,126 | 03/01/2000 |
| SEQ ID NO:2906 | 60/186,126 | 03/01/2000 |
| SEQ ID NO:2907 | 60/186,126 | 03/01/2000 |
| SEQ ID NO:2908 | 60/186,126 | 03/01/2000 |
| SEQ ID NO:2909 | 60/186,126 | 03/01/2000 |
| SEQ ID NO:2910 | 60/186,126 | 03/01/2000 |
| SEQ ID NO:2911 | 60/186,126 | 03/01/2000 |
| SEQ ID NO:2912 | 60/186,126 | 03/01/2000 |
| SEQ ID NO:2913 | 60/186,126 | 03/01/2000 |
| SEQ ID NO:2914 | 60/190,479 | 03/17/2000 |
| SEQ ID NO:2915 | 60/190,479 | 03/17/2000 |
| SEQ ID NO:2916 | 60/190,479 | 03/17/2000 |
| SEQ ID NO:2917 | 60/190,479 | 03/17/2000 |
| SEQ ID NO:2918 | 60/190,479 | 03/17/2000 |
| SEQ ID NO:2919 | 60/190,479 | 03/17/2000 |
| SEQ ID NO:2920 | 60/190,479 | 03/17/2000 |
| SEQ ID NO:2921 | 60/190,479 | 03/17/2000 |
| SEQ ID NO:2922 | 60/190,479 | 03/17/2000 |
| SEQ ID NO:2923 | 60/190,479 | 03/17/2000 |
| SEQ ID NO:2924 | 60/190,479 | 03/17/2000 |
| SEQ ID NO:2925 | 60/190,479 | 03/17/2000 |
| SEQ ID NO:2926 | 60/190,479 | 03/17/2000 |
| SEQ ID NO:2927 | 60/190,479 | 03/17/2000 |
| SEQ ID NO:2928 | 60/190,479 | 03/17/2000 |
| SEQ ID NO:2929 | 60/190,479 | 03/17/2000 |
| SEQ ID NO:2930 | 60/190,479 | 03/17/2000 |
| SEQ ID NO:2931 | 60/190,479 | 03/17/2000 |
| SEQ ID NO:2932 | 60/190,479 | 03/17/2000 |
| SEQ ID NO:2933 | 60/190,479 | 03/17/2000 |
| SEQ ID NO:2934 | 60/190,479 | 03/17/2000 |
| SEQ ID NO:2935 | 60/190,479 | 03/17/2000 |
| SEQ ID NO:2936 | 60/190,479 | 03/17/2000 |
| SEQ ID NO:2937 | 60/190,479 | 03/17/2000 |
| SEQ ID NO:2938 | 60/190,479 | 03/17/2000 |
| SEQ ID NO:2939 | 60/190,479 | 03/17/2000 |
| SEQ ID NO:2940 | 60/190,479 | 03/17/2000 |
| SEQ ID NO:2941 | 60/190,479 | 03/17/2000 |
| SEQ ID NO:2942 | 60/190,479 | 03/17/2000 |
| SEQ ID NO:2943 | 60/190,479 | 03/17/2000 |
| SEQ ID NO:2944 | 60/190,479 | 03/17/2000 |
| SEQ ID NO:2945 | 60/190,479 | 03/17/2000 |
| SEQ ID NO:2946 | 60/190,479 | 03/17/2000 |
| SEQ ID NO:2947 | 60/190,479 | 03/17/2000 |
| SEQ ID NO:2948 | 60/190,479 | 03/17/2000 |
| SEQ ID NO:2949 | 60/190,479 | 03/17/2000 |
| SEQ ID NO:2950 | 60/190,479 | 03/17/2000 |
| SEQ ID NO:2951 | 60/190,479 | 03/17/2000 |
| SEQ ID NO:2952 | 60/190,479 | 03/17/2000 |
| SEQ ID NO:2953 | 60/190,479 | 03/17/2000 |
| SEQ ID NO:2954 | 60/190,479 | 03/17/2000 |
| SEQ ID NO:2955 | 60/190,479 | 03/17/2000 |
| SEQ ID NO:2956 | 60/190,479 | 03/17/2000 |
| SEQ ID NO:2957 | 60/190,479 | 03/17/2000 |
| SEQ ID NO:2958 | 60/190,479 | 03/17/2000 |
| SEQ ID NO:2959 | 60/190,479 | 03/17/2000 |
| SEQ ID NO:2960 | 60/190,479 | 03/17/2000 |
| SEQ ID NO:2961 | 60/190,479 | 03/17/2000 |
| SEQ ID NO:2962 | 60/190,479 | 03/17/2000 |
| SEQ ID NO:2963 | 60/190,479 | 03/17/2000 |
| SEQ ID NO:2964 | 60/190,479 | 03/17/2000 |
| SEQ ID NO:2965 | 60/190,479 | 03/17/2000 |
| SEQ ID NO:2966 | 60/190,479 | 03/17/2000 |
| SEQ ID NO:2967 | 60/190,479 | 03/17/2000 |
| SEQ ID NO:2968 | 60/190,479 | 03/17/2000 |
| SEQ ID NO:2969 | 60/190,479 | 03/17/2000 |
| SEQ ID NO:2970 | 60/190,479 | 03/17/2000 |
| SEQ ID NO:2971 | 60/190,479 | 03/17/2000 |
| SEQ ID NO:2972 | 60/190,479 | 03/17/2000 |
| SEQ ID NO:2973 | 60/190,479 | 03/17/2000 |
| SEQ ID NO:2974 | 60/190,479 | 03/17/2000 |
| SEQ ID NO:2975 | 60/190,479 | 03/17/2000 |
| SEQ ID NO:2976 | 60/190,479 | 03/17/2000 |
| SEQ ID NO:2977 | 60/190,479 | 03/17/2000 |
| SEQ ID NO:2978 | 60/190,479 | 03/17/2000 |
| SEQ ID NO:2979 | 60/190,479 | 03/17/2000 |
| SEQ ID NO:2980 | 60/190,479 | 03/17/2000 |
| SEQ ID NO:2981 | 60/190,479 | 03/17/2000 |
| SEQ ID NO:2982 | 60/190,479 | 03/17/2000 |
| SEQ ID NO:2983 | 60/190,479 | 03/17/2000 |
| SEQ ID NO:2984 | 60/190,479 | 03/17/2000 |
| SEQ ID NO:2985 | 60/190,479 | 03/17/2000 |
| SEQ ID NO:2986 | 60/190,479 | 03/17/2000 |
| SEQ ID NO:2987 | 60/190,479 | 03/17/2000 |
| SEQ ID NO:2988 | 60/190,479 | 03/17/2000 |
| SEQ ID NO:2989 | 60/190,479 | 03/17/2000 |
| SEQ ID NO:2990 | 60/190,479 | 03/17/2000 |
| SEQ ID NO:2991 | 60/190,479 | 03/17/2000 |
| SEQ ID NO:2992 | 60/190,479 | 03/17/2000 |
| SEQ ID NO:2993 | 60/190,479 | 03/17/2000 |
| SEQ ID NO:2994 | 60/190,479 | 03/17/2000 |
| SEQ ID NO:2995 | 60/190,479 | 03/17/2000 |
| SEQ ID NO:2996 | 60/190,479 | 03/17/2000 |
| SEQ ID NO:2997 | 60/190,479 | 03/17/2000 |
| SEQ ID NO:2998 | 60/190,479 | 03/17/2000 |
| SEQ ID NO:2999 | 60/190,479 | 03/17/2000 |
| SEQ ID NO:3000 | 60/190,479 | 03/17/2000 |
| SEQ ID NO:3001 | 60/190,479 | 03/17/2000 |
| SEQ ID NO:3002 | 60/190,479 | 03/17/2000 |
| SEQ ID NO:3003 | 60/190,479 | 03/17/2000 |
| SEQ ID NO:3004 | 60/190,479 | 03/17/2000 |
| SEQ ID NO:3005 | 60/190,479 | 03/17/2000 |
| SEQ ID NO:3006 | 60/190,479 | 03/17/2000 |
| SEQ ID NO:3007 | 60/190,479 | 03/17/2000 |
| SEQ ID NO:3008 | 60/190,479 | 03/17/2000 |
| SEQ ID NO:3009 | 60/190,479 | 03/17/2000 |
| SEQ ID NO:3010 | 60/190,479 | 03/17/2000 |
| SEQ ID NO:3011 | 60/190,479 | 03/17/2000 |
| SEQ ID NO:3012 | 60/190,479 | 03/17/2000 |
| SEQ ID NO:3013 | 60/190,479 | 03/17/2000 |
| SEQ ID NO:3014 | 60/190,479 | 03/17/2000 |
| SEQ ID NO:3015 | 60/190,479 | 03/17/2000 |
| SEQ ID NO:3016 | 60/190,479 | 03/17/2000 |
| SEQ ID NO:3017 | 60/190,479 | 03/17/2000 |
| SEQ ID NO:3018 | 60/190,479 | 03/17/2000 |
| SEQ ID NO:3019 | 60/190,479 | 03/17/2000 |
| SEQ ID NO:3020 | 60/190,479 | 03/17/2000 |
| SEQ ID NO:3021 | 60/190,479 | 03/17/2000 |
| SEQ ID NO:3022 | 60/190,479 | 03/17/2000 |
| SEQ ID NO:3023 | 60/190,479 | 03/17/2000 |
| SEQ ID NO:3024 | 60/190,479 | 03/17/2000 |
| SEQ ID NO:3025 | 60/190,479 | 03/17/2000 |
| SEQ ID NO:3026 | 60/190,479 | 03/17/2000 |
| SEQ ID NO:3027 | 60/190,479 | 03/17/2000 |
| SEQ ID NO:3028 | 60/190,479 | 03/17/2000 |
| SEQ ID NO:3029 | 60/190,479 | 03/17/2000 |
| SEQ ID NO:3030 | 60/190,479 | 03/17/2000 |
| SEQ ID NO:3031 | 60/190,479 | 03/17/2000 |
| SEQ ID NO:3032 | 60/190,479 | 03/17/2000 |
| SEQ ID NO:3033 | 60/190,479 | 03/17/2000 |
| SEQ ID NO:3034 | 60/190,479 | 03/17/2000 |
| SEQ ID NO:3035 | 60/190,479 | 03/17/2000 |
| SEQ ID NO:3036 | 60/190,479 | 03/17/2000 |
| SEQ ID NO:3037 | 60/190,479 | 03/17/2000 |
| SEQ ID NO:3038 | 60/190,479 | 03/17/2000 |
| SEQ ID NO:3039 | 60/190,479 | 03/17/2000 |
| SEQ ID NO:3040 | 60/190,479 | 03/17/2000 |
| SEQ ID NO:3041 | 60/190,479 | 03/17/2000 |
| SEQ ID NO:3042 | 60/190,479 | 03/17/2000 |
| SEQ ID NO:3043 | 60/190,479 | 03/17/2000 |
| SEQ ID NO:3044 | 60/190,479 | 03/17/2000 |
| SEQ ID NO:3045 | 60/190,479 | 03/17/2000 |
| SEQ ID NO:3046 | 60/190,479 | 03/17/2000 |
| SEQ ID NO:3047 | 60/190,479 | 03/17/2000 |
| SEQ ID NO:3048 | 60/190,479 | 03/17/2000 |
| SEQ ID NO:3049 | 60/190,479 | 03/17/2000 |
| SEQ ID NO:3050 | 60/190,479 | 03/17/2000 |
| SEQ ID NO:3051 | 60/190,479 | 03/17/2000 |
| SEQ ID NO:3052 | 60/190,479 | 03/17/2000 |
| SEQ ID NO:3053 | 60/190,479 | 03/17/2000 |
| SEQ ID NO:3054 | 60/190,479 | 03/17/2000 |
| SEQ ID NO:3055 | 60/190,479 | 03/17/2000 |
| SEQ ID NO:3056 | 60/190,479 | 03/17/2000 |
| SEQ ID NO:3057 | 60/190,479 | 03/17/2000 |
| SEQ ID NO:3058 | 60/190,479 | 03/17/2000 |
| SEQ ID NO:3059 | 60/190,479 | 03/17/2000 |
| SEQ ID NO:3060 | 60/190,479 | 03/17/2000 |
| SEQ ID NO:3061 | 60/190,479 | 03/17/2000 |
| SEQ ID NO:3062 | 60/190,479 | 03/17/2000 |
| SEQ ID NO:3063 | 60/190,479 | 03/17/2000 |
| SEQ ID NO:3064 | 60/190,479 | 03/17/2000 |
| SEQ ID NO:3065 | 60/190,479 | 03/17/2000 |
| SEQ ID NO:3066 | 60/190,479 | 03/17/2000 |
| SEQ ID NO:3067 | 60/190,479 | 03/17/2000 |
| SEQ ID NO:3068 | 60/190,479 | 03/17/2000 |
| SEQ ID NO:3069 | 60/190,479 | 03/17/2000 |
| SEQ ID NO:3070 | 60/190,479 | 03/17/2000 |
| SEQ ID NO:3071 | 60/190,479 | 03/17/2000 |
| SEQ ID NO:3072 | 60/190,479 | 03/17/2000 |
| SEQ ID NO:3073 | 60/190,479 | 03/17/2000 |
| SEQ ID NO:3074 | 60/190,479 | 03/17/2000 |
| SEQ ID NO:3075 | 60/190,479 | 03/17/2000 |
| SEQ ID NO:3076 | 60/190,479 | 03/17/2000 |
| SEQ ID NO:3077 | 60/190,479 | 03/17/2000 |
| SEQ ID NO:3078 | 60/190,479 | 03/17/2000 |
| SEQ ID NO:3079 | 60/190,479 | 03/17/2000 |
| SEQ ID NO:3080 | 60/190,479 | 03/17/2000 |
| SEQ ID NO:3081 | 60/190,479 | 03/17/2000 |
| SEQ ID NO:3082 | 60/190,479 | 03/17/2000 |
| SEQ ID NO:3083 | 60/190,479 | 03/17/2000 |
| SEQ ID NO:3084 | 60/190,479 | 03/17/2000 |
| SEQ ID NO:3085 | 60/190,479 | 03/17/2000 |
| SEQ ID NO:3086 | 60/190,479 | 03/17/2000 |
| SEQ ID NO:3087 | 60/190,479 | 03/17/2000 |
| SEQ ID NO:3088 | 60/190,479 | 03/17/2000 |
| SEQ ID NO:3089 | 60/190,479 | 03/17/2000 |
| SEQ ID NO:3090 | 60/190,479 | 03/17/2000 |
| SEQ ID NO:3091 | 60/190,479 | 03/17/2000 |
| SEQ ID NO:3092 | 60/190,479 | 03/17/2000 |
| SEQ ID NO:3093 | 60/190,479 | 03/17/2000 |
| SEQ ID NO:3094 | 60/190,479 | 03/17/2000 |
| SEQ ID NO:3095 | 60/190,479 | 03/17/2000 |
| SEQ ID NO:3096 | 60/190,479 | 03/17/2000 |
| SEQ ID NO:3097 | 60/190,479 | 03/17/2000 |
| SEQ ID NO:3098 | 60/190,479 | 03/17/2000 |
| SEQ ID NO:3099 | 60/190,479 | 03/17/2000 |
| SEQ ID NO:3100 | 60/190,479 | 03/17/2000 |
| SEQ ID NO:3101 | 60/190,479 | 03/17/2000 |
| SEQ ID NO:3102 | 60/190,479 | 03/17/2000 |
| SEQ ID NO:3103 | 60/190,479 | 03/17/2000 |
| SEQ ID NO:3104 | 60/190,479 | 03/17/2000 |
| SEQ ID NO:3105 | 60/190,479 | 03/17/2000 |
| SEQ ID NO:3106 | 60/190,479 | 03/17/2000 |
| SEQ ID NO:3107 | 60/190,479 | 03/17/2000 |
| SEQ ID NO:3108 | 60/190,479 | 03/17/2000 |
| SEQ ID NO:3109 | 60/190,479 | 03/17/2000 |
| SEQ ID NO:3110 | 60/190,479 | 03/17/2000 |
| SEQ ID NO:3111 | 60/190,479 | 03/17/2000 |
| SEQ ID NO:3112 | 60/190,479 | 03/17/2000 |
| SEQ ID NO:3113 | 60/190,479 | 03/17/2000 |
| SEQ ID NO:3114 | 60/190,479 | 03/17/2000 |
| SEQ ID NO:3115 | 60/190,479 | 03/17/2000 |
| SEQ ID NO:3116 | 60/190,479 | 03/17/2000 |
| SEQ ID NO:3117 | 60/190,479 | 03/17/2000 |
| SEQ ID NO:3118 | 60/190,479 | 03/17/2000 |
| SEQ ID NO:3119 | 60/190,479 | 03/17/2000 |
| SEQ ID NO:3120 | 60/190,479 | 03/17/2000 |
| SEQ ID NO:3121 | 60/190,479 | 03/17/2000 |
| SEQ ID NO:3122 | 60/190,479 | 03/17/2000 |
| SEQ ID NO:3123 | 60/190,479 | 03/17/2000 |
| SEQ ID NO:3124 | 60/190,479 | 03/17/2000 |
| SEQ ID NO:3125 | 60/190,479 | 03/17/2000 |
| SEQ ID NO:3126 | 60/190,479 | 03/17/2000 |
| SEQ ID NO:3127 | 60/190,479 | 03/17/2000 |
| SEQ ID NO:3128 | 60/190,479 | 03/17/2000 |
| SEQ ID NO:3129 | 60/190,479 | 03/17/2000 |
| SEQ ID NO:3130 | 60/190,479 | 03/17/2000 |
| SEQ ID NO:3131 | 60/190,479 | 03/17/2000 |
| SEQ ID NO:3132 | 60/190,479 | 03/17/2000 |
| SEQ ID NO:3133 | 60/190,479 | 03/17/2000 |
| SEQ ID NO:3134 | 60/190,479 | 03/17/2000 |
| SEQ ID NO:3135 | 60/190,479 | 03/17/2000 |
| SEQ ID NO:3136 | 60/190,479 | 03/17/2000 |
| SEQ ID NO:3137 | 60/190,479 | 03/17/2000 |
| SEQ ID NO:3138 | 60/190,479 | 03/17/2000 |
| SEQ ID NO:3139 | 60/190,479 | 03/17/2000 |
| SEQ ID NO:3140 | 60/190,479 | 03/17/2000 |
| SEQ ID NO:3141 | 60/190,479 | 03/17/2000 |
| SEQ ID NO:3142 | 60/190,479 | 03/17/2000 |
| SEQ ID NO:3143 | 60/190,479 | 03/17/2000 |
| SEQ ID NO:3144 | 60/190,479 | 03/17/2000 |
| SEQ ID NO:3145 | 60/190,479 | 03/17/2000 |
| SEQ ID NO:3146 | 60/190,479 | 03/17/2000 |
| SEQ ID NO:3147 | 60/190,479 | 03/17/2000 |
| SEQ ID NO:3148 | 60/190,479 | 03/17/2000 |
| SEQ ID NO:3149 | 60/190,479 | 03/17/2000 |
| SEQ ID NO:3150 | 60/190,479 | 03/17/2000 |
| SEQ ID NO:3151 | 60/190,479 | 03/17/2000 |
| SEQ ID NO:3152 | 60/190,479 | 03/17/2000 |
| SEQ ID NO:3153 | 60/190,479 | 03/17/2000 |
| SEQ ID NO:3154 | 60/190,479 | 03/17/2000 |
| SEQ ID NO:3155 | 60/190,479 | 03/17/2000 |
| SEQ ID NO:3156 | 60/190,479 | 03/17/2000 |
| SEQ ID NO:3157 | 60/190,479 | 03/17/2000 |
| SEQ ID NO:3158 | 60/190,479 | 03/17/2000 |
| SEQ ID NO:3159 | 60/190,479 | 03/17/2000 |
| SEQ ID NO:3160 | 60/190,479 | 03/17/2000 |
| SEQ ID NO:3161 | 60/190,479 | 03/17/2000 |
| SEQ ID NO:3162 | 60/190,479 | 03/17/2000 |
| SEQ ID NO:3163 | 60/190,479 | 03/17/2000 |
| SEQ ID NO:3164 | 60/190,479 | 03/17/2000 |
| SEQ ID NO:3165 | 60/190,479 | 03/17/2000 |
| SEQ ID NO:3166 | 60/190,479 | 03/17/2000 |
| SEQ ID NO:3167 | 60/190,479 | 03/17/2000 |
| SEQ ID NO:3168 | 60/190,479 | 03/17/2000 |
| SEQ ID NO:3169 | 60/190,479 | 03/17/2000 |
| SEQ ID NO:3170 | 60/190,479 | 03/17/2000 |
| SEQ ID NO:3171 | 60/190,479 | 03/17/2000 |
| SEQ ID NO:3172 | 60/190,479 | 03/17/2000 |
| SEQ ID NO:3173 | 60/190,479 | 03/17/2000 |
| SEQ ID NO:3174 | 60/190,479 | 03/17/2000 |
| SEQ ID NO:3175 | 60/190,479 | 03/17/2000 |
| SEQ ID NO:3176 | 60/190,479 | 03/17/2000 |
| SEQ ID NO:3177 | 60/190,479 | 03/17/2000 |
| SEQ ID NO:3178 | 60/190,479 | 03/17/2000 |
| SEQ ID NO:3179 | 60/190,479 | 03/17/2000 |
| SEQ ID NO:3180 | 60/190,479 | 03/17/2000 |
| SEQ ID NO:3181 | 60/190,479 | 03/17/2000 |
| SEQ ID NO:3182 | 60/190,479 | 03/17/2000 |
| SEQ ID NO:3183 | 60/190,479 | 03/17/2000 |
| SEQ ID NO:3184 | 60/190,479 | 03/17/2000 |
| SEQ ID NO:3185 | 60/190,479 | 03/17/2000 |
| SEQ ID NO:3186 | 60/190,479 | 03/17/2000 |
| SEQ ID NO:3187 | 60/190,479 | 03/17/2000 |
| SEQ ID NO:3188 | 60/190,479 | 03/17/2000 |
| SEQ ID NO:3189 | 60/190,479 | 03/17/2000 |
| SEQ ID NO:3190 | 60/190,479 | 03/17/2000 |
| SEQ ID NO:3191 | 60/190,479 | 03/17/2000 |
| SEQ ID NO:3192 | 60/190,479 | 03/17/2000 |
| SEQ ID NO:3193 | 60/190,479 | 03/17/2000 |
| SEQ ID NO:3194 | 60/190,479 | 03/17/2000 |
| SEQ ID NO:3195 | 60/190,479 | 03/17/2000 |
| SEQ ID NO:3196 | 60/190,479 | 03/17/2000 |
| SEQ ID NO:3197 | 60/190,479 | 03/17/2000 |
| SEQ ID NO:3198 | 60/190,479 | 03/17/2000 |
| SEQ ID NO:3199 | 60/190,479 | 03/17/2000 |
| SEQ ID NO:3200 | 60/190,479 | 03/17/2000 |
| SEQ ID NO:3201 | 60/190,479 | 03/17/2000 |
| SEQ ID NO:3202 | 60/190,479 | 03/17/2000 |
| SEQ ID NO:3203 | 60/190,479 | 03/17/2000 |
| SEQ ID NO:3204 | 60/190,479 | 03/17/2000 |
| SEQ ID NO:3205 | 60/190,479 | 03/17/2000 |
| SEQ ID NO:3206 | 60/190,479 | 03/17/2000 |
| SEQ ID NO:3207 | 60/190,479 | 03/17/2000 |
| SEQ ID NO:3208 | 60/190,479 | 03/17/2000 |
| SEQ ID NO:3209 | 60/190,479 | 03/17/2000 |
| SEQ ID NO:3210 | 60/190,479 | 03/17/2000 |
| SEQ ID NO:3211 | 60/190,479 | 03/17/2000 |
| SEQ ID NO:3212 | 60/190,479 | 03/17/2000 |
| SEQ ID NO:3213 | 60/190,479 | 03/17/2000 |
| SEQ ID NO:3214 | 60/190,479 | 03/17/2000 |
| SEQ ID NO:3215 | 60/190,479 | 03/17/2000 |
| SEQ ID NO:3216 | 60/190,479 | 03/17/2000 |
| SEQ ID NO:3217 | 60/190,479 | 03/17/2000 |
| SEQ ID NO:3218 | 60/190,479 | 03/17/2000 |
| SEQ ID NO:3219 | 60/190,479 | 03/17/2000 |
| SEQ ID NO:3220 | 60/190,479 | 03/17/2000 |
| SEQ ID NO:3221 | 60/190,479 | 03/17/2000 |
| SEQ ID NO:3222 | 60/190,479 | 03/17/2000 |
| SEQ ID NO:3223 | 60/190,479 | 03/17/2000 |
| SEQ ID NO:3224 | 60/190,479 | 03/17/2000 |
| SEQ ID NO:3225 | 60/190,479 | 03/17/2000 |
| SEQ ID NO:3226 | 60/190,479 | 03/17/2000 |
| SEQ ID NO:3227 | 60/190,479 | 03/17/2000 |
| SEQ ID NO:3228 | 60/190,479 | 03/17/2000 |
| SEQ ID NO:3229 | 60/190,479 | 03/17/2000 |
| SEQ ID NO:3230 | 60/190,479 | 03/17/2000 |
| SEQ ID NO:3231 | 60/190,479 | 03/17/2000 |
| SEQ ID NO:3232 | 60/190,479 | 03/17/2000 |
| SEQ ID NO:3233 | 60/190,479 | 03/17/2000 |
| SEQ ID NO:3234 | 60/190,479 | 03/17/2000 |
| SEQ ID NO:3235 | 60/190,479 | 03/17/2000 |
| SEQ ID NO:3236 | 60/190,479 | 03/17/2000 |
| SEQ ID NO:3237 | 60/190,479 | 03/17/2000 |
| SEQ ID NO:3238 | 60/190,479 | 03/17/2000 |
| SEQ ID NO:3239 | 60/190,479 | 03/17/2000 |
| SEQ ID NO:3240 | 60/190,479 | 03/17/2000 |
| SEQ ID NO:3241 | 60/190,479 | 03/17/2000 |
| SEQ ID NO:3242 | 60/190,479 | 03/17/2000 |
| SEQ ID NO:3243 | 60/190,479 | 03/17/2000 |
| SEQ ID NO:3244 | 60/190,479 | 03/17/2000 |
| SEQ ID NO:3245 | 60/190,479 | 03/17/2000 |
| SEQ ID NO:3246 | 60/190,479 | 03/17/2000 |
| SEQ ID NO:3247 | 60/190,479 | 03/17/2000 |
| SEQ ID NO:3248 | 60/190,479 | 03/17/2000 |
| SEQ ID NO:3249 | 60/190,479 | 03/17/2000 |
| SEQ ID NO:3250 | 60/190,479 | 03/17/2000 |
| SEQ ID NO:3251 | 60/190,479 | 03/17/2000 |
| SEQ ID NO:3252 | 60/190,479 | 03/17/2000 |
| SEQ ID NO:3253 | 60/190,479 | 03/17/2000 |
| SEQ ID NO:3254 | 60/190,479 | 03/17/2000 |
| SEQ ID NO:3255 | 60/190,479 | 03/17/2000 |
| SEQ ID NO:3256 | 60/190,479 | 03/17/2000 |
| SEQ ID NO:3257 | 60/190,479 | 03/17/2000 |
| SEQ ID NO:3258 | 60/190,479 | 03/17/2000 |
| SEQ ID NO:3259 | 60/190,479 | 03/17/2000 |
| SEQ ID NO:3260 | 60/190,479 | 03/17/2000 |
| SEQ ID NO:3261 | 60/190,479 | 03/17/2000 |
| SEQ ID NO:3262 | 60/190,479 | 03/17/2000 |
| SEQ ID NO:3263 | 60/190,479 | 03/17/2000 |
| SEQ ID NO:3264 | 60/190,479 | 03/17/2000 |
| SEQ ID NO:3265 | 60/190,479 | 03/17/2000 |
| SEQ ID NO:3266 | 60/190,479 | 03/17/2000 |
| SEQ ID NO:3267 | 60/190,479 | 03/17/2000 |
| SEQ ID NO:3268 | 60/190,479 | 03/17/2000 |
| SEQ ID NO:3269 | 60/190,479 | 03/17/2000 |
| SEQ ID NO:3270 | 60/190,479 | 03/17/2000 |
| SEQ ID NO:3271 | 60/190,479 | 03/17/2000 |
| SEQ ID NO:3272 | 60/190,479 | 03/17/2000 |
| SEQ ID NO:3273 | 60/190,479 | 03/17/2000 |
| SEQ ID NO:3274 | 60/190,479 | 03/17/2000 |
| SEQ ID NO:3275 | 60/190,479 | 03/17/2000 |
| SEQ ID NO:3276 | 60/190,479 | 03/17/2000 |
| SEQ ID NO:3277 | 60/190,479 | 03/17/2000 |
| SEQ ID NO:3278 | 60/190,479 | 03/17/2000 |
| SEQ ID NO:3279 | 60/190,479 | 03/17/2000 |
| SEQ ID NO:3280 | 60/190,479 | 03/17/2000 |
| SEQ ID NO:3281 | 60/190,479 | 03/17/2000 |
| SEQ ID NO:3282 | 60/190,479 | 03/17/2000 |
| SEQ ID NO:3283 | 60/190,479 | 03/17/2000 |
| SEQ ID NO:3284 | 60/190,479 | 03/17/2000 |
| SEQ ID NO:3285 | 60/190,479 | 03/17/2000 |
| SEQ ID NO:3286 | 60/190,479 | 03/17/2000 |
| SEQ ID NO:3287 | 60/190,479 | 03/17/2000 |
| SEQ ID NO:3288 | 60/190,479 | 03/17/2000 |
| SEQ ID NO:3289 | 60/190,479 | 03/17/2000 |
| SEQ ID NO:3290 | 60/190,479 | 03/17/2000 |
| SEQ ID NO:3291 | 60/190,479 | 03/17/2000 |
| SEQ ID NO:3292 | 60/190,479 | 03/17/2000 |
| SEQ ID NO:3293 | 60/190,479 | 03/17/2000 |
| SEQ ID NO:3294 | 60/190,479 | 03/17/2000 |
| SEQ ID NO:3295 | 60/190,479 | 03/17/2000 |
| SEQ ID NO:3296 | 60/190,479 | 03/17/2000 |
| SEQ ID NO:3297 | 60/190,479 | 03/17/2000 |
| SEQ ID NO:3298 | 60/190,479 | 03/17/2000 |
| SEQ ID NO:3299 | 60/190,479 | 03/17/2000 |
| SEQ ID NO:3300 | 60/190,479 | 03/17/2000 |
| SEQ ID NO:3301 | 60/190,479 | 03/17/2000 |
| SEQ ID NO:3302 | 60/190,479 | 03/17/2000 |
| SEQ ID NO:3303 | 60/190,479 | 03/17/2000 |
| SEQ ID NO:3304 | 60/190,479 | 03/17/2000 |
| SEQ ID NO:3305 | 60/190,479 | 03/17/2000 |
| SEQ ID NO:3306 | 60/190,479 | 03/17/2000 |
| SEQ ID NO:3307 | 60/190,479 | 03/17/2000 |
| SEQ ID NO:3308 | 60/190,479 | 03/17/2000 |
| SEQ ID NO:3309 | 60/190,479 | 03/17/2000 |
| SEQ ID NO:3310 | 60/190,479 | 03/17/2000 |
| SEQ ID NO:3311 | 60/190,479 | 03/17/2000 |
| SEQ ID NO:3312 | 60/190,479 | 03/17/2000 |
| SEQ ID NO:3313 | 60/190,479 | 03/17/2000 |
| SEQ ID NO:3314 | 60/190,479 | 03/17/2000 |
| SEQ ID NO:3315 | 60/190,479 | 03/17/2000 |
| SEQ ID NO:3316 | 60/190,479 | 03/17/2000 |
| SEQ ID NO:3317 | 60/190,479 | 03/17/2000 |
| SEQ ID NO:3318 | 60/190,479 | 03/17/2000 |
| SEQ ID NO:3319 | 60/190,479 | 03/17/2000 |
| SEQ ID NO:3320 | 60/190,479 | 03/17/2000 |
| SEQ ID NO:3321 | 60/190,479 | 03/17/2000 |
| SEQ ID NO:3322 | 60/190,479 | 03/17/2000 |
| SEQ ID NO:3323 | 60/190,479 | 03/17/2000 |
| SEQ ID NO:3324 | 60/190,479 | 03/17/2000 |
| SEQ ID NO:3325 | 60/190,479 | 03/17/2000 |
| SEQ ID NO:3326 | 60/190,479 | 03/17/2000 |
| SEQ ID NO:3327 | 60/190,479 | 03/17/2000 |
| SEQ ID NO:3328 | 60/190,479 | 03/17/2000 |
| SEQ ID NO:3329 | 60/190,479 | 03/17/2000 |
| SEQ ID NO:3330 | 60/190,479 | 03/17/2000 |
| SEQ ID NO:3331 | 60/190,479 | 03/17/2000 |
| SEQ ID NO:3332 | 60/190,479 | 03/17/2000 |
| SEQ ID NO:3333 | 60/190,479 | 03/17/2000 |
| SEQ ID NO:3334 | 60/190,479 | 03/17/2000 |
| SEQ ID NO:3335 | 60/190,479 | 03/17/2000 |
| SEQ ID NO:3336 | 60/190,479 | 03/17/2000 |
| SEQ ID NO:3337 | 60/190,479 | 03/17/2000 |
| SEQ ID NO:3338 | 60/190,479 | 03/17/2000 |
| SEQ ID NO:3339 | 60/190,479 | 03/17/2000 |
| SEQ ID NO:3340 | 60/190,479 | 03/17/2000 |
| SEQ ID NO:3341 | 60/190,479 | 03/17/2000 |
| SEQ ID NO:3342 | 60/190,479 | 03/17/2000 |
| SEQ ID NO:3343 | 60/190,479 | 03/17/2000 |
| SEQ ID NO:3344 | 60/190,479 | 03/17/2000 |
| SEQ ID NO:3345 | 60/190,479 | 03/17/2000 |
| SEQ ID NO:3346 | 60/190,479 | 03/17/2000 |
| SEQ ID NO:3347 | 60/190,479 | 03/17/2000 |
| SEQ ID NO:3348 | 60/190,479 | 03/17/2000 |
| SEQ ID NO:3349 | 60/190,479 | 03/17/2000 |
| SEQ ID NO:3350 | 60/190,479 | 03/17/2000 |
| SEQ ID NO:3351 | 60/190,479 | 03/17/2000 |
| SEQ ID NO:3352 | 60/190,479 | 03/17/2000 |
| SEQ ID NO:3353 | 60/190,479 | 03/17/2000 |
| SEQ ID NO:3354 | 60/190,479 | 03/17/2000 |
| SEQ ID NO:3355 | 60/190,479 | 03/17/2000 |
| SEQ ID NO:3356 | 60/190,479 | 03/17/2000 |
| SEQ ID NO:3357 | 60/190,479 | 03/17/2000 |
| SEQ ID NO:3358 | 60/190,479 | 03/17/2000 |
| SEQ ID NO:3359 | 60/190,479 | 03/17/2000 |
| SEQ ID NO:3360 | 60/190,479 | 03/17/2000 |
| SEQ ID NO:3361 | 60/190,479 | 03/17/2000 |
| SEQ ID NO:3362 | 60/190,479 | 03/17/2000 |
| SEQ ID NO:3363 | 60/190,479 | 03/17/2000 |
| SEQ ID NO:3364 | 60/190,479 | 03/17/2000 |
| SEQ ID NO:3365 | 60/190,479 | 03/17/2000 |
| SEQ ID NO:3366 | 60/190,479 | 03/17/2000 |
| SEQ ID NO:3367 | 60/190,479 | 03/17/2000 |
| SEQ ID NO:3368 | 60/190,479 | 03/17/2000 |
| SEQ ID NO:3369 | 60/190,479 | 03/17/2000 |
| SEQ ID NO:3370 | 60/190,479 | 03/17/2000 |
| SEQ ID NO:3371 | 60/190,479 | 03/17/2000 |
| SEQ ID NO:3372 | 60/190,479 | 03/17/2000 |
| SEQ ID NO:3373 | 60/190,479 | 03/17/2000 |
| SEQ ID NO:3374 | 60/190,479 | 03/17/2000 |
| SEQ ID NO:3375 | 60/190,479 | 03/17/2000 |
| SEQ ID NO:3376 | 60/190,479 | 03/17/2000 |
| SEQ ID NO:3377 | 60/190,479 | 03/17/2000 |
| SEQ ID NO:3378 | 60/190,479 | 03/17/2000 |
| SEQ ID NO:3379 | 60/190,479 | 03/17/2000 |
| SEQ ID NO:3380 | 60/190,479 | 03/17/2000 |
| SEQ ID NO:3381 | 60/190,479 | 03/17/2000 |
| SEQ ID NO:3382 | 60/190,479 | 03/17/2000 |
| SEQ ID NO:3383 | 60/190,479 | 03/17/2000 |
| SEQ ID NO:3384 | 60/190,479 | 03/17/2000 |
| SEQ ID NO:3385 | 60/190,479 | 03/17/2000 |
| SEQ ID NO:3386 | 60/190,479 | 03/17/2000 |
| SEQ ID NO:3387 | 60/190,479 | 03/17/2000 |
| SEQ ID NO:3388 | 60/190,479 | 03/17/2000 |
| SEQ ID NO:3389 | 60/190,479 | 03/17/2000 |
| SEQ ID NO:3390 | 60/190,479 | 03/17/2000 |
| SEQ ID NO:3391 | 60/190,479 | 03/17/2000 |
| SEQ ID NO:3392 | 60/190,479 | 03/17/2000 |
| SEQ ID NO:3393 | 60/190,479 | 03/17/2000 |
| SEQ ID NO:3394 | 60/190,479 | 03/17/2000 |
| SEQ ID NO:3395 | 60/190,479 | 03/17/2000 |
| SEQ ID NO:3396 | 60/190,479 | 03/17/2000 |
| SEQ ID NO:3397 | 60/190,479 | 03/17/2000 |
| SEQ ID NO:3398 | 60/190,479 | 03/17/2000 |
| SEQ ID NO:3399 | 60/190,479 | 03/17/2000 |
| SEQ ID NO:3400 | 60/190,479 | 03/17/2000 |
| SEQ ID NO:3401 | 60/190,479 | 03/17/2000 |
| SEQ ID NO:3402 | 60/190,479 | 03/17/2000 |
| SEQ ID NO:3403 | 60/190,479 | 03/17/2000 |
| SEQ ID NO:3404 | 60/190,479 | 03/17/2000 |
| SEQ ID NO:3405 | 60/190,479 | 03/17/2000 |
| SEQ ID NO:3406 | 60/190,479 | 03/17/2000 |
| SEQ ID NO:3407 | 60/190,479 | 03/17/2000 |
| SEQ ID NO:3408 | 60/190,479 | 03/17/2000 |
| SEQ ID NO:3409 | 60/190,479 | 03/17/2000 |
| SEQ ID NO:3410 | 60/190,479 | 03/17/2000 |
| SEQ ID NO:3411 | 60/190,479 | 03/17/2000 |
| SEQ ID NO:3412 | 60/190,479 | 03/17/2000 |
| SEQ ID NO:3413 | 60/190,479 | 03/17/2000 |
| SEQ ID NO:3414 | 60/190,479 | 03/17/2000 |
| SEQ ID NO:3415 | 60/190,479 | 03/17/2000 |
| SEQ ID NO:3416 | 60/190,479 | 03/17/2000 |
| SEQ ID NO:3417 | 60/190,479 | 03/17/2000 |
| SEQ ID NO:3418 | 60/190,479 | 03/17/2000 |
| SEQ ID NO:3419 | 60/190,479 | 03/17/2000 |
| SEQ ID NO:3420 | 60/190,479 | 03/17/2000 |
| SEQ ID NO:3421 | 60/190,479 | 03/17/2000 |
| SEQ ID NO:3422 | 60/190,479 | 03/17/2000 |
| SEQ ID NO:3423 | 60/190,479 | 03/17/2000 |
| SEQ ID NO:3424 | 60/190,479 | 03/17/2000 |
| SEQ ID NO:3425 | 60/190,479 | 03/17/2000 |
| SEQ ID NO:3426 | 60/190,479 | 03/17/2000 |
| SEQ ID NO:3427 | 60/190,479 | 03/17/2000 |
| SEQ ID NO:3428 | 60/190,479 | 03/17/2000 |
| SEQ ID NO:3429 | 60/190,479 | 03/17/2000 |
| SEQ ID NO:3430 | 60/190,479 | 03/17/2000 |
| SEQ ID NO:3431 | 60/190,479 | 03/17/2000 |
| SEQ ID NO:3432 | 60/190,479 | 03/17/2000 |
| SEQ ID NO:3433 | 60/190,479 | 03/17/2000 |
| SEQ ID NO:3434 | 60/190,479 | 03/17/2000 |
| SEQ ID NO:3435 | 60/190,479 | 03/17/2000 |
| SEQ ID NO:3436 | 60/190,479 | 03/17/2000 |
| SEQ ID NO:3437 | 60/190,479 | 03/17/2000 |
| SEQ ID NO:3438 | 60/190,479 | 03/17/2000 |
| SEQ ID NO:3439 | 60/190,479 | 03/17/2000 |
| SEQ ID NO:3440 | 60/190,479 | 03/17/2000 |
| SEQ ID NO:3441 | 60/190,479 | 03/17/2000 |
| SEQ ID NO:3442 | 60/190,479 | 03/17/2000 |
| SEQ ID NO:3443 | 60/190,479 | 03/17/2000 |
| SEQ ID NO:3444 | 60/190,479 | 03/17/2000 |
| SEQ ID NO:3445 | 60/190,479 | 03/17/2000 |
| SEQ ID NO:3446 | 60/190,479 | 03/17/2000 |
| SEQ ID NO:3447 | 60/190,479 | 03/17/2000 |
| SEQ ID NO:3448 | 60/190,479 | 03/17/2000 |
| SEQ ID NO:3449 | 60/190,479 | 03/17/2000 |
| SEQ ID NO:3450 | 60/190,479 | 03/17/2000 |
| SEQ ID NO:3451 | 60/190,479 | 03/17/2000 |
| SEQ ID NO:3452 | 60/190,479 | 03/17/2000 |
| SEQ ID NO:3453 | 60/190,479 | 03/17/2000 |
| SEQ ID NO:3454 | 60/190,479 | 03/17/2000 |
| SEQ ID NO:3455 | 60/190,479 | 03/17/2000 |
| SEQ ID NO:3456 | 60/190,479 | 03/17/2000 |
| SEQ ID NO:3457 | 60/190,479 | 03/17/2000 |
| SEQ ID NO:3458 | 60/190,479 | 03/17/2000 |
| SEQ ID NO:3459 | 60/190,479 | 03/17/2000 |
| SEQ ID NO:3460 | 60/190,479 | 03/17/2000 |
| SEQ ID NO:3461 | 60/190,479 | 03/17/2000 |
| SEQ ID NO:3462 | 60/190,479 | 03/17/2000 |
| SEQ ID NO:3463 | 60/190,479 | 03/17/2000 |
| SEQ ID NO:3464 | 60/190,479 | 03/17/2000 |
| SEQ ID NO:3465 | 60/190,479 | 03/17/2000 |
| SEQ ID NO:3466 | 60/190,479 | 03/17/2000 |
| SEQ ID NO:3467 | 60/190,479 | 03/17/2000 |
| SEQ ID NO:3468 | 60/190,479 | 03/17/2000 |
| SEQ ID NO:3469 | 60/190,479 | 03/17/2000 |
| SEQ ID NO:3470 | 60/190,479 | 03/17/2000 |
| SEQ ID NO:3471 | 60/190,479 | 03/17/2000 |
| SEQ ID NO:3472 | 60/190,479 | 03/17/2000 |
| SEQ ID NO:3473 | 60/190,479 | 03/17/2000 |
| SEQ ID NO:3474 | 60/190,479 | 03/17/2000 |
| SEQ ID NO:3475 | 60/190,479 | 03/17/2000 |
| SEQ ID NO:3476 | 60/190,479 | 03/17/2000 |
| SEQ ID NO:3477 | 60/190,479 | 03/17/2000 |
| SEQ ID NO:3478 | 60/190,479 | 03/17/2000 |
| SEQ ID NO:3479 | 60/190,479 | 03/17/2000 |
| SEQ ID NO:3480 | 60/190,479 | 03/17/2000 |
| SEQ ID NO:3481 | 60/190,479 | 03/17/2000 |
| SEQ ID NO:3482 | 60/190,479 | 03/17/2000 |
| SEQ ID NO:3483 | 60/190,479 | 03/17/2000 |
| SEQ ID NO:3484 | 60/190,479 | 03/17/2000 |
| SEQ ID NO:3485 | 60/190,479 | 03/17/2000 |
| SEQ ID NO:3486 | 60/190,479 | 03/17/2000 |
| SEQ ID NO:3487 | 60/190,479 | 03/17/2000 |
| SEQ ID NO:3488 | 60/190,479 | 03/17/2000 |
| SEQ ID NO:3489 | 60/190,479 | 03/17/2000 |
| SEQ ID NO:3490 | 60/190,479 | 03/17/2000 |
| SEQ ID NO:3491 | 60/190,479 | 03/17/2000 |
| SEQ ID NO:3492 | 60/190,479 | 03/17/2000 |
| SEQ ID NO:3493 | 60/190,479 | 03/17/2000 |
| SEQ ID NO:3494 | 60/190,479 | 03/17/2000 |
| SEQ ID NO:3495 | 60/190,479 | 03/17/2000 |
| SEQ ID NO:3496 | 60/190,479 | 03/17/2000 |
| SEQ ID NO:3497 | 60/190,479 | 03/17/2000 |
| SEQ ID NO:3498 | 60/190,479 | 03/17/2000 |
| SEQ ID NO:3499 | 60/190,479 | 03/17/2000 |
| SEQ ID NO:3500 | 60/190,479 | 03/17/2000 |
| SEQ ID NO:3501 | 60/190,479 | 03/17/2000 |
| SEQ ID NO:3502 | 60/190,479 | 03/17/2000 |
| SEQ ID NO:3503 | 60/190,479 | 03/17/2000 |
| SEQ ID NO:3504 | 60/190,479 | 03/17/2000 |
| SEQ ID NO:3505 | 60/190,479 | 03/17/2000 |
| SEQ ID NO:3506 | 60/190,479 | 03/17/2000 |
| SEQ ID NO:3507 | 60/190,479 | 03/17/2000 |
| SEQ ID NO:3508 | 60/190,479 | 03/17/2000 |
| SEQ ID NO:3509 | 60/190,479 | 03/17/2000 |
| SEQ ID NO:3510 | 60/190,479 | 03/17/2000 |
| SEQ ID NO:3511 | 60/190,479 | 03/17/2000 |
| SEQ ID NO:3512 | 60/190,479 | 03/17/2000 |
| SEQ ID NO:3513 | 60/190,479 | 03/17/2000 |
| SEQ ID NO:3514 | 60/190,479 | 03/17/2000 |
| SEQ ID NO:3515 | 60/190,479 | 03/17/2000 |
| SEQ ID NO:3516 | 60/190,479 | 03/17/2000 |
| SEQ ID NO:3517 | 60/190,479 | 03/17/2000 |
| SEQ ID NO:3518 | 60/190,479 | 03/17/2000 |
| SEQ ID NO:3519 | 60/190,479 | 03/17/2000 |
| SEQ ID NO:3520 | 60/190,479 | 03/17/2000 |
| SEQ ID NO:3521 | 60/190,479 | 03/17/2000 |
| SEQ ID NO:3522 | 60/190,479 | 03/17/2000 |
| SEQ ID NO:3523 | 60/190,479 | 03/17/2000 |
| SEQ ID NO:3524 | 60/190,479 | 03/17/2000 |
| SEQ ID NO:3525 | 60/190,479 | 03/17/2000 |
| SEQ ID NO:3526 | 60/190,479 | 03/17/2000 |
| SEQ ID NO:3527 | 60/190,479 | 03/17/2000 |
| SEQ ID NO:3528 | 60/190,479 | 03/17/2000 |
| SEQ ID NO:3529 | 60/190,479 | 03/17/2000 |
| SEQ ID NO:3530 | 60/190,479 | 03/17/2000 |
| SEQ ID NO:3531 | 60/190,479 | 03/17/2000 |
| SEQ ID NO:3532 | 60/190,479 | 03/17/2000 |
| SEQ ID NO:3533 | 60/190,479 | 03/17/2000 |
| SEQ ID NO:3534 | 60/190,479 | 03/17/2000 |
| SEQ ID NO:3535 | 60/190,479 | 03/17/2000 |
| SEQ ID NO:3536 | 60/190,479 | 03/17/2000 |
| SEQ ID NO:3537 | 60/190,479 | 03/17/2000 |
| SEQ ID NO:3538 | 60/190,479 | 03/17/2000 |
| SEQ ID NO:3539 | 60/190,479 | 03/17/2000 |
| SEQ ID NO:3540 | 60/190,479 | 03/17/2000 |
| SEQ ID NO:3541 | 60/190,479 | 03/17/2000 |
| SEQ ID NO:3542 | 60/190,479 | 03/17/2000 |
| SEQ ID NO:3543 | 60/190,479 | 03/17/2000 |
| SEQ ID NO:3544 | 60/190,479 | 03/17/2000 |
| SEQ ID NO:3545 | 60/190,479 | 03/17/2000 |
| SEQ ID NO:3546 | 60/190,479 | 03/17/2000 |
| SEQ ID NO:3547 | 60/190,479 | 03/17/2000 |
| SEQ ID NO:3548 | 60/190,479 | 03/17/2000 |
| SEQ ID NO:3549 | 60/190,479 | 03/17/2000 |
| SEQ ID NO:3550 | 60/190,479 | 03/17/2000 |
| SEQ ID NO:3551 | 60/190,479 | 03/17/2000 |
| SEQ ID NO:3552 | 60/190,479 | 03/17/2000 |
| SEQ ID NO:3553 | 60/190,479 | 03/17/2000 |
| SEQ ID NO:3554 | 60/190,479 | 03/17/2000 |
| SEQ ID NO:3555 | 60/190,479 | 03/17/2000 |
| SEQ ID NO:3556 | 60/190,479 | 03/17/2000 |
| SEQ ID NO:3557 | 60/190,479 | 03/17/2000 |
| SEQ ID NO:3558 | 60/190,479 | 03/17/2000 |
| SEQ ID NO:3559 | 60/190,479 | 03/17/2000 |
| SEQ ID NO:3560 | 60/190,479 | 03/17/2000 |
| SEQ ID NO:3561 | 60/190,479 | 03/17/2000 |
| SEQ ID NO:3562 | 60/190,479 | 03/17/2000 |
| SEQ ID NO:3563 | 60/190,479 | 03/17/2000 |
| SEQ ID NO:3564 | 60/190,479 | 03/17/2000 |
| SEQ ID NO:3565 | 60/190,479 | 03/17/2000 |
| SEQ ID NO:3566 | 60/190,479 | 03/17/2000 |
| SEQ ID NO:3567 | 60/190,479 | 03/17/2000 |
| SEQ ID NO:3568 | 60/190,479 | 03/17/2000 |
| SEQ ID NO:3569 | 60/190,479 | 03/17/2000 |
| SEQ ID NO:3570 | 60/190,479 | 03/17/2000 |
| SEQ ID NO:3571 | 60/190,479 | 03/17/2000 |
| SEQ ID NO:3572 | 60/190,479 | 03/17/2000 |
| SEQ ID NO:3573 | 60/190,479 | 03/17/2000 |
| SEQ ID NO:3574 | 60/190,479 | 03/17/2000 |
| SEQ ID NO:3575 | 60/190,479 | 03/17/2000 |
| SEQ ID NO:3576 | 60/190,479 | 03/17/2000 |
| SEQ ID NO:3577 | 60/190,479 | 03/17/2000 |
| SEQ ID NO:3578 | 60/190,479 | 03/17/2000 |
| SEQ ID NO:3579 | 60/190,479 | 03/17/2000 |
| SEQ ID NO:3580 | 60/190,479 | 03/17/2000 |
| SEQ ID NO:3581 | 60/190,479 | 03/17/2000 |
| SEQ ID NO:3582 | 60/190,479 | 03/17/2000 |
| SEQ ID NO:3583 | 60/190,479 | 03/17/2000 |
| SEQ ID NO:3584 | 60/190,479 | 03/17/2000 |
| SEQ ID NO:3585 | 60/190,479 | 03/17/2000 |
| SEQ ID NO:3586 | 60/190,479 | 03/17/2000 |
| SEQ ID NO:3587 | 60/190,479 | 03/17/2000 |
| SEQ ID NO:3588 | 60/190,479 | 03/17/2000 |
| SEQ ID NO:3589 | 60/190,479 | 03/17/2000 |
| SEQ ID NO:3590 | 60/190,479 | 03/17/2000 |
| SEQ ID NO:3591 | 60/190,479 | 03/17/2000 |
| SEQ ID NO:3592 | 60/190,479 | 03/17/2000 |
| SEQ ID NO:3593 | 60/190,479 | 03/17/2000 |
| SEQ ID NO:3594 | 60/190,479 | 03/17/2000 |
| SEQ ID NO:3595 | 60/190,479 | 03/17/2000 |
| SEQ ID NO:3596 | 60/190,479 | 03/17/2000 |
| SEQ ID NO:3597 | 60/190,479 | 03/17/2000 |
| SEQ ID NO:3598 | 60/190,479 | 03/17/2000 |
| SEQ ID NO:3599 | 60/190,479 | 03/17/2000 |
| SEQ ID NO:3600 | 60/190,479 | 03/17/2000 |
| SEQ ID NO:3601 | 60/190,479 | 03/17/2000 |
| SEQ ID NO:3602 | 60/190,479 | 03/17/2000 |
| SEQ ID NO:3603 | 60/190,479 | 03/17/2000 |
| SEQ ID NO:3604 | 60/190,479 | 03/17/2000 |
| SEQ ID NO:3605 | 60/190,479 | 03/17/2000 |
| SEQ ID NO:3606 | 60/190,479 | 03/17/2000 |
| SEQ ID NO:3607 | 60/190,479 | 03/17/2000 |
| SEQ ID NO:3608 | 60/190,479 | 03/17/2000 |
| SEQ ID NO:3609 | 60/190,479 | 03/17/2000 |
| SEQ ID NO:3610 | 60/190,479 | 03/17/2000 |
| SEQ ID NO:3611 | 60/190,479 | 03/17/2000 |
| SEQ ID NO:3612 | 60/190,479 | 03/17/2000 |
| SEQ ID NO:3613 | 60/190,479 | 03/17/2000 |
| SEQ ID NO:3614 | 60/190,479 | 03/17/2000 |
| SEQ ID NO:3615 | 60/190,479 | 03/17/2000 |
| SEQ ID NO:3616 | 60/190,479 | 03/17/2000 |
| SEQ ID NO:3617 | 60/190,479 | 03/17/2000 |
| SEQ ID NO:3618 | 60/190,479 | 03/17/2000 |
| SEQ ID NO:3619 | 60/190,479 | 03/17/2000 |
| SEQ ID NO:3620 | 60/190,479 | 03/17/2000 |
| SEQ ID NO:3621 | 60/190,479 | 03/17/2000 |
| SEQ ID NO:3622 | 60/190,479 | 03/17/2000 |
| SEQ ID NO:3623 | 60/190,479 | 03/17/2000 |
| SEQ ID NO:3624 | 60/190,479 | 03/17/2000 |
| SEQ ID NO:3625 | 60/190,479 | 03/17/2000 |
| SEQ ID NO:3626 | 60/190,479 | 03/17/2000 |
| SEQ ID NO:3627 | 60/190,479 | 03/17/2000 |
| SEQ ID NO:3628 | 60/190,479 | 03/17/2000 |
| SEQ ID NO:3629 | 60/190,479 | 03/17/2000 |
| SEQ ID NO:3630 | 60/190,479 | 03/17/2000 |
| SEQ ID NO:3631 | 60/190,479 | 03/17/2000 |
| SEQ ID NO:3632 | 60/190,479 | 03/17/2000 |
| SEQ ID NO:3633 | 60/190,479 | 03/17/2000 |
| SEQ ID NO:3634 | 60/190,479 | 03/17/2000 |
| SEQ ID NO:3635 | 60/190,479 | 03/17/2000 |
| SEQ ID NO:3636 | 60/190,479 | 03/17/2000 |
| SEQ ID NO:3637 | 60/190,479 | 03/17/2000 |
| SEQ ID NO:3638 | 60/190,479 | 03/17/2000 |
| SEQ ID NO:3639 | 60/190,479 | 03/17/2000 |
| SEQ ID NO:3640 | 60/190,479 | 03/17/2000 |
| SEQ ID NO:3641 | 60/190,479 | 03/17/2000 |
| SEQ ID NO:3642 | 60/190,479 | 03/17/2000 |
| SEQ ID NO:3643 | 60/190,479 | 03/17/2000 |
| SEQ ID NO:3644 | 60/190,479 | 03/17/2000 |
| SEQ ID NO:3645 | 60/190,479 | 03/17/2000 |
| SEQ ID NO:3646 | 60/190,479 | 03/17/2000 |
| SEQ ID NO:3647 | 60/190,479 | 03/17/2000 |
| SEQ ID NO:3648 | 60/190,479 | 03/17/2000 |
| SEQ ID NO:3649 | 60/190,479 | 03/17/2000 |
| SEQ ID NO:3650 | 60/190,479 | 03/17/2000 |
| SEQ ID NO:3651 | 60/190,479 | 03/17/2000 |
| SEQ ID NO:3652 | 60/190,479 | 03/17/2000 |
| SEQ ID NO:3653 | 60/190,479 | 03/17/2000 |
| SEQ ID NO:3654 | 60/190,479 | 03/17/2000 |
| SEQ ID NO:3655 | 60/190,479 | 03/17/2000 |
| SEQ ID NO:3656 | 60/190,479 | 03/17/2000 |
| SEQ ID NO:3657 | 60/190,479 | 03/17/2000 |
| SEQ ID NO:3658 | 60/190,479 | 03/17/2000 |
| SEQ ID NO:3659 | 60/190,479 | 03/17/2000 |
| SEQ ID NO:3660 | 60/190,479 | 03/17/2000 |
| SEQ ID NO:3661 | 60/190,479 | 03/17/2000 |
| SEQ ID NO:3662 | 60/190,479 | 03/17/2000 |
| SEQ ID NO:3663 | 60/190,479 | 03/17/2000 |
| SEQ ID NO:3664 | 60/190,479 | 03/17/2000 |
| SEQ ID NO:3665 | 60/190,479 | 03/17/2000 |
| SEQ ID NO:3666 | 60/190,479 | 03/17/2000 |
| SEQ ID NO:3667 | 60/190,479 | 03/17/2000 |
| SEQ ID NO:3668 | 60/190,479 | 03/17/2000 |
| SEQ ID NO:3669 | 60/190,479 | 03/17/2000 |
| SEQ ID NO:3670 | 60/190,479 | 03/17/2000 |
| SEQ ID NO:3671 | 60/190,479 | 03/17/2000 |
| SEQ ID NO:3672 | 60/190,479 | 03/17/2000 |
| SEQ ID NO:3673 | 60/190,479 | 03/17/2000 |
| SEQ ID NO:3674 | 60/190,479 | 03/17/2000 |
| SEQ ID NO:3675 | 60/190,479 | 03/17/2000 |
| SEQ ID NO:3676 | 60/190,479 | 03/17/2000 |
| SEQ ID NO:3677 | 60/190,479 | 03/17/2000 |
| SEQ ID NO:3678 | 60/190,479 | 03/17/2000 |
| SEQ ID NO:3679 | 60/190,479 | 03/17/2000 |
| SEQ ID NO:3680 | 60/190,479 | 03/17/2000 |
| SEQ ID NO:3681 | 60/190,479 | 03/17/2000 |
| SEQ ID NO:3682 | 60/190,479 | 03/17/2000 |
| SEQ ID NO:3683 | 60/190,479 | 03/17/2000 |
| SEQ ID NO:3684 | 60/190,479 | 03/17/2000 |
| SEQ ID NO:3685 | 60/190,479 | 03/17/2000 |
| SEQ ID NO:3686 | 60/190,479 | 03/17/2000 |
| SEQ ID NO:3687 | 60/190,479 | 03/17/2000 |
| SEQ ID NO:3688 | 60/190,479 | 03/17/2000 |
| SEQ ID NO:3689 | 60/190,479 | 03/17/2000 |
| SEQ ID NO:3690 | 60/190,479 | 03/17/2000 |
| SEQ ID NO:3691 | 60/190,479 | 03/17/2000 |
| SEQ ID NO:3692 | 60/190,479 | 03/17/2000 |
| SEQ ID NO:3693 | 60/190,479 | 03/17/2000 |
| SEQ ID NO:3694 | 60/190,479 | 03/17/2000 |
| SEQ ID NO:3695 | 60/190,479 | 03/17/2000 |
| SEQ ID NO:3696 | 60/190,479 | 03/17/2000 |
| SEQ ID NO:3697 | 60/190,479 | 03/17/2000 |
| SEQ ID NO:3698 | 60/190,479 | 03/17/2000 |
| SEQ ID NO:3699 | 60/190,479 | 03/17/2000 |
| SEQ ID NO:3700 | 60/190,479 | 03/17/2000 |
| SEQ ID NO:3701 | 60/190,479 | 03/17/2000 |
| SEQ ID NO:3702 | 60/190,479 | 03/17/2000 |
| SEQ ID NO:3703 | 60/190,479 | 03/17/2000 |
| SEQ ID NO:3704 | 60/190,479 | 03/17/2000 |
| SEQ ID NO:3705 | 60/190,479 | 03/17/2000 |
| SEQ ID NO:3706 | 60/190,479 | 03/17/2000 |
| SEQ ID NO:3707 | 60/190,479 | 03/17/2000 |
| SEQ ID NO:3708 | 60/190,479 | 03/17/2000 |
| SEQ ID NO:3709 | 60/190,479 | 03/17/2000 |
| SEQ ID NO:3710 | 60/190,479 | 03/17/2000 |
| SEQ ID NO:3711 | 60/190,479 | 03/17/2000 |
| SEQ ID NO:3712 | 60/190,479 | 03/17/2000 |
| SEQ ID NO:3713 | 60/190,479 | 03/17/2000 |
| SEQ ID NO:3714 | 60/190,479 | 03/17/2000 |
| SEQ ID NO:3715 | 60/190,479 | 03/17/2000 |
| SEQ ID NO:3716 | 60/190,479 | 03/17/2000 |
| SEQ ID NO:3717 | 60/190,479 | 03/17/2000 |
| SEQ ID NO:3718 | 60/190,479 | 03/17/2000 |
| SEQ ID NO:3719 | 60/190,479 | 03/17/2000 |
| SEQ ID NO:3720 | 60/190,479 | 03/17/2000 |
| SEQ ID NO:3721 | 60/190,479 | 03/17/2000 |
| SEQ ID NO:3722 | 60/190,479 | 03/17/2000 |
| SEQ ID NO:3723 | 60/190,479 | 03/17/2000 |
| SEQ ID NO:3724 | 60/190,479 | 03/17/2000 |
| SEQ ID NO:3725 | 60/190,479 | 03/17/2000 |
| SEQ ID NO:3726 | 60/190,479 | 03/17/2000 |
| SEQ ID NO:3727 | 60/190,479 | 03/17/2000 |
| SEQ ID NO:3728 | 60/190,479 | 03/17/2000 |
| SEQ ID NO:3729 | 60/190,479 | 03/17/2000 |
| SEQ ID NO:3730 | 60/190,479 | 03/17/2000 |
| SEQ ID NO:3731 | 60/190,479 | 03/17/2000 |
| SEQ ID NO:3732 | 60/190,479 | 03/17/2000 |
| SEQ ID NO:3733 | 60/190,479 | 03/17/2000 |
| SEQ ID NO:3734 | 60/190,479 | 03/17/2000 |
| SEQ ID NO:3735 | 60/190,479 | 03/17/2000 |
| SEQ ID NO:3736 | 60/190,479 | 03/17/2000 |
| SEQ ID NO:3737 | 60/190,479 | 03/17/2000 |
| SEQ ID NO:3738 | 60/190,479 | 03/17/2000 |
| SEQ ID NO:3739 | 60/190,479 | 03/17/2000 |
| SEQ ID NO:3740 | 60/190,479 | 03/17/2000 |
| SEQ ID NO:3741 | 60/190,479 | 03/17/2000 |
| SEQ ID NO:3742 | 60/190,479 | 03/17/2000 |
| SEQ ID NO:3743 | 60/190,479 | 03/17/2000 |
| SEQ ID NO:3744 | 60/190,479 | 03/17/2000 |
| SEQ ID NO:3745 | 60/190,479 | 03/17/2000 |
| SEQ ID NO:3746 | 60/190,479 | 03/17/2000 |
| SEQ ID NO:3747 | 60/190,479 | 03/17/2000 |
| SEQ ID NO:3748 | 60/190,479 | 03/17/2000 |
| SEQ ID NO:3749 | 60/190,479 | 03/17/2000 |
| SEQ ID NO:3750 | 60/190,479 | 03/17/2000 |
| SEQ ID NO:3751 | 60/190,479 | 03/17/2000 |
| SEQ ID NO:3752 | 60/190,479 | 03/17/2000 |
| SEQ ID NO:3753 | 60/190,479 | 03/17/2000 |
| SEQ ID NO:3754 | 60/190,479 | 03/17/2000 |
| SEQ ID NO:3755 | 60/190,479 | 03/17/2000 |
| SEQ ID NO:3756 | 60/190,479 | 03/17/2000 |
| SEQ ID NO:3757 | 60/190,479 | 03/17/2000 |
| SEQ ID NO:3758 | 60/190,479 | 03/17/2000 |
| SEQ ID NO:3759 | 60/190,479 | 03/17/2000 |
| SEQ ID NO:3760 | 60/190,479 | 03/17/2000 |
| SEQ ID NO:3761 | 60/190,479 | 03/17/2000 |
| SEQ ID NO:3762 | 60/190,479 | 03/17/2000 |
| SEQ ID NO:3763 | 60/190,479 | 03/17/2000 |
| SEQ ID NO:3764 | 60/190,479 | 03/17/2000 |
| SEQ ID NO:3765 | 60/190,479 | 03/17/2000 |
| SEQ ID NO:3766 | 60/190,479 | 03/17/2000 |
| SEQ ID NO:3767 | 60/190,479 | 03/17/2000 |
| SEQ ID NO:3768 | 60/190,479 | 03/17/2000 |
| SEQ ID NO:3769 | 60/190,479 | 03/17/2000 |
| SEQ ID NO:3770 | 60/190,479 | 03/17/2000 |
| SEQ ID NO:3771 | 60/190,479 | 03/17/2000 |
| SEQ ID NO:3772 | 60/190,479 | 03/17/2000 |
| SEQ ID NO:3773 | 60/190,479 | 03/17/2000 |
| SEQ ID NO:3774 | 60/190,479 | 03/17/2000 |
| SEQ ID NO:3775 | 60/190,479 | 03/17/2000 |
| SEQ ID NO:3776 | 60/190,479 | 03/17/2000 |
| SEQ ID NO:3777 | 60/190,479 | 03/17/2000 |
| SEQ ID NO:3778 | 60/190,479 | 03/17/2000 |
| SEQ ID NO:3779 | 60/190,479 | 03/17/2000 |
| SEQ ID NO:3780 | 60/190,479 | 03/17/2000 |
| SEQ ID NO:3781 | 60/190,479 | 03/17/2000 |
| SEQ ID NO:3782 | 60/190,479 | 03/17/2000 |
| SEQ ID NO:3783 | 60/190,479 | 03/17/2000 |
| SEQ ID NO:3784 | 60/190,479 | 03/17/2000 |
| SEQ ID NO:3785 | 60/190,479 | 03/17/2000 |
| SEQ ID NO:3786 | 60/190,479 | 03/17/2000 |
| SEQ ID NO:3787 | 60/190,479 | 03/17/2000 |
| SEQ ID NO:3788 | 60/190,479 | 03/17/2000 |
| SEQ ID NO:3789 | 60/190,479 | 03/17/2000 |
| SEQ ID NO:3790 | 60/190,479 | 03/17/2000 |
| SEQ ID NO:3791 | 60/190,479 | 03/17/2000 |
| SEQ ID NO:3792 | 60/190,479 | 03/17/2000 |
| SEQ ID NO:3793 | 60/190,479 | 03/17/2000 |
| SEQ ID NO:3794 | 60/190,479 | 03/17/2000 |
| SEQ ID NO:3795 | 60/190,479 | 03/17/2000 |
| SEQ ID NO:3796 | 60/190,479 | 03/17/2000 |
| SEQ ID NO:3797 | 60/190,479 | 03/17/2000 |
| SEQ ID NO:3798 | 60/190,479 | 03/17/2000 |
| SEQ ID NO:3799 | 60/190,479 | 03/17/2000 |
| SEQ ID NO:3800 | 60/190,479 | 03/17/2000 |
| SEQ ID NO:3801 | 60/190,479 | 03/17/2000 |
| SEQ ID NO:3802 | 60/190,479 | 03/17/2000 |
| SEQ ID NO:3803 | 60/190,479 | 03/17/2000 |
| SEQ ID NO:3804 | 60/190,479 | 03/17/2000 |
| SEQ ID NO:3805 | 60/190,479 | 03/17/2000 |
| SEQ ID NO:3806 | 60/190,479 | 03/17/2000 |
| SEQ ID NO:3807 | 60/190,479 | 03/17/2000 |
| SEQ ID NO:3808 | 60/190,479 | 03/17/2000 |
| SEQ ID NO:3809 | 60/190,479 | 03/17/2000 |
| SEQ ID NO:3810 | 60/190,479 | 03/17/2000 |
| SEQ ID NO:3811 | 60/190,479 | 03/17/2000 |
| SEQ ID NO:3812 | 60/190,479 | 03/17/2000 |
| SEQ ID NO:3813 | 60/190,479 | 03/17/2000 |
| SEQ ID NO:3814 | 60/190,479 | 03/17/2000 |
| SEQ ID NO:3815 | 60/190,479 | 03/17/2000 |
| SEQ ID NO:3816 | 60/190,479 | 03/17/2000 |
| SEQ ID NO:3817 | 60/190,479 | 03/17/2000 |
| SEQ ID NO:3818 | 60/190,479 | 03/17/2000 |
| SEQ ID NO:3819 | 60/190,479 | 03/17/2000 |
| SEQ ID NO:3820 | 60/190,479 | 03/17/2000 |
| SEQ ID NO:3821 | 60/190,479 | 03/17/2000 |
| SEQ ID NO:3822 | 60/190,479 | 03/17/2000 |
| SEQ ID NO:3823 | 60/190,479 | 03/17/2000 |
| SEQ ID NO:3824 | 60/190,479 | 03/17/2000 |
| SEQ ID NO:3825 | 60/190,479 | 03/17/2000 |
| SEQ ID NO:3826 | 60/190,479 | 03/17/2000 |
| SEQ ID NO:3827 | 60/190,479 | 03/17/2000 |
| SEQ ID NO:3828 | 60/190,479 | 03/17/2000 |
| SEQ ID NO:3829 | 60/190,479 | 03/17/2000 |
| SEQ ID NO:3830 | 60/190,479 | 03/17/2000 |
| SEQ ID NO:3831 | 60/190,479 | 03/17/2000 |
| SEQ ID NO:3832 | 60/190,479 | 03/17/2000 |
| SEQ ID NO:3833 | 60/190,479 | 03/17/2000 |
| SEQ ID NO:3834 | 60/190,479 | 03/17/2000 |
| SEQ ID NO:3835 | 60/190,479 | 03/17/2000 |
| SEQ ID NO:3836 | 60/190,479 | 03/17/2000 |
| SEQ ID NO:3837 | 60/190,479 | 03/17/2000 |
| SEQ ID NO:3838 | 60/190,479 | 03/17/2000 |
| SEQ ID NO:3839 | 60/190,479 | 03/17/2000 |
| SEQ ID NO:3840 | 60/190,479 | 03/17/2000 |
| SEQ ID NO:3841 | 60/190,479 | 03/17/2000 |
| SEQ ID NO:3842 | 60/190,479 | 03/17/2000 |
| SEQ ID NO:3843 | 60/190,479 | 03/17/2000 |
| SEQ ID NO:3844 | 60/190,479 | 03/17/2000 |
| SEQ ID NO:3845 | 60/190,479 | 03/17/2000 |
| SEQ ID NO:3846 | 60/190,479 | 03/17/2000 |
| SEQ ID NO:3847 | 60/190,479 | 03/17/2000 |
| SEQ ID NO:3848 | 60/190,479 | 03/17/2000 |
| SEQ ID NO:3849 | 60/190,479 | 03/17/2000 |
| SEQ ID NO:3850 | 60/190,479 | 03/17/2000 |
| SEQ ID NO:3851 | 60/190,479 | 03/17/2000 |
| SEQ ID NO:3852 | 60/190,479 | 03/17/2000 |
| SEQ ID NO:3853 | 60/190,479 | 03/17/2000 |
| SEQ ID NO:3854 | 60/190,479 | 03/17/2000 |
| SEQ ID NO:3855 | 60/190,479 | 03/17/2000 |
| SEQ ID NO:3856 | 60/190,479 | 03/17/2000 |
| SEQ ID NO:3857 | 60/190,479 | 03/17/2000 |
| SEQ ID NO:3858 | 60/190,479 | 03/17/2000 |
| SEQ ID NO:3859 | 60/190,479 | 03/17/2000 |
| SEQ ID NO:3860 | 60/190,479 | 03/17/2000 |
| SEQ ID NO:3861 | 60/190,479 | 03/17/2000 |
| SEQ ID NO:3862 | 60/190,479 | 03/17/2000 |
| SEQ ID NO:3863 | 60/190,479 | 03/17/2000 |
| SEQ ID NO:3864 | 60/190,479 | 03/17/2000 |
| SEQ ID NO:3865 | 60/190,479 | 03/17/2000 |
| SEQ ID NO:3866 | 60/190,479 | 03/17/2000 |
| SEQ ID NO:3867 | 60/190,479 | 03/17/2000 |
| SEQ ID NO:3868 | 60/190,479 | 03/17/2000 |
| SEQ ID NO:3869 | 60/190,479 | 03/17/2000 |
| SEQ ID NO:3870 | 60/190,479 | 03/17/2000 |
| SEQ ID NO:3871 | 60/190,479 | 03/17/2000 |
| SEQ ID NO:3872 | 60/190,479 | 03/17/2000 |
| SEQ ID NO:3873 | 60/190,479 | 03/17/2000 |
| SEQ ID NO:3874 | 60/190,479 | 03/17/2000 |
| SEQ ID NO:3875 | 60/190,479 | 03/17/2000 |
| SEQ ID NO:3876 | 60/190,479 | 03/17/2000 |
| SEQ ID NO:3877 | 60/190,479 | 03/17/2000 |
| SEQ ID NO:3878 | 60/190,479 | 03/17/2000 |
| SEQ ID NO:3879 | 60/190,479 | 03/17/2000 |
| SEQ ID NO:3880 | 60/190,479 | 03/17/2000 |
| SEQ ID NO:3881 | 60/190,479 | 03/17/2000 |
| SEQ ID NO:3882 | 60/190,479 | 03/17/2000 |
| SEQ ID NO:3883 | 60/190,479 | 03/17/2000 |
| SEQ ID NO:3884 | 60/190,479 | 03/17/2000 |
| SEQ ID NO:3885 | 60/190,479 | 03/17/2000 |
| SEQ ID NO:3886 | 60/190,479 | 03/17/2000 |
| SEQ ID NO:3887 | 60/190,479 | 03/17/2000 |
| SEQ ID NO:3888 | 60/223,416 | 08/04/2000 |
| SEQ ID NO:3889 | 60/223,416 | 08/04/2000 |
| SEQ ID NO:3890 | 60/223,416 | 08/04/2000 |
| SEQ ID NO:3891 | 60/223,416 | 08/04/2000 |
| SEQ ID NO:3892 | 60/223,416 | 08/04/2000 |
| SEQ ID NO:3893 | 60/223,416 | 08/04/2000 |
| SEQ ID NO:3894 | 60/223,416 | 08/04/2000 |
| SEQ ID NO:3895 | 60/223,416 | 08/04/2000 |
| SEQ ID NO:3896 | 60/223,416 | 08/04/2000 |
| SEQ ID NO:3897 | 60/223,416 | 08/04/2000 |
| SEQ ID NO:3898 | 60/223,416 | 08/04/2000 |
| SEQ ID NO:3899 | 60/223,416 | 08/04/2000 |
| SEQ ID NO:3900 | 60/223,416 | 08/04/2000 |
| SEQ ID NO:3901 | 60/223,416 | 08/04/2000 |
| SEQ ID NO:3902 | 60/223,416 | 08/04/2000 |
| SEQ ID NO:3903 | 60/223,416 | 08/04/2000 |
| SEQ ID NO:3904 | 60/223,416 | 08/04/2000 |
| SEQ ID NO:3905 | 60/223,416 | 08/04/2000 |
| SEQ ID NO:3906 | 60/223,416 | 08/04/2000 |
| SEQ ID NO:3907 | 60/223,416 | 08/04/2000 |
| SEQ ID NO:3908 | 60/223,416 | 08/04/2000 |
| SEQ ID NO:3909 | 60/223,416 | 08/04/2000 |
| SEQ ID NO:3910 | 60/223,416 | 08/04/2000 |
| SEQ ID NO:3911 | 60/223,416 | 08/04/2000 |
| SEQ ID NO:3912 | 60/223,416 | 08/04/2000 |
| SEQ ID NO:3913 | 60/223,416 | 08/04/2000 |
| SEQ ID NO:3914 | 60/223,416 | 08/04/2000 |
| SEQ ID NO:3915 | 60/223,416 | 08/04/2000 |
| SEQ ID NO:3916 | 60/223,416 | 08/04/2000 |
| SEQ ID NO:3917 | 60/223,416 | 08/04/2000 |
| SEQ ID NO:3918 | 60/223,416 | 08/04/2000 |
| SEQ ID NO:3919 | 60/223,416 | 08/04/2000 |
| SEQ ID NO:3920 | 60/223,416 | 08/04/2000 |
| SEQ ID NO:3921 | 60/223,416 | 08/04/2000 |
| SEQ ID NO:3922 | 60/223,416 | 08/04/2000 |
| SEQ ID NO:3923 | 60/223,416 | 08/04/2000 |
| SEQ ID NO:3924 | 60/223,416 | 08/04/2000 |
| SEQ ID NO:3925 | 60/223,416 | 08/04/2000 |
| SEQ ID NO:3926 | 60/223,416 | 08/04/2000 |
| SEQ ID NO:3927 | 60/223,416 | 08/04/2000 |
| SEQ ID NO:3928 | 60/223,416 | 08/04/2000 |
| SEQ ID NO:3929 | 60/223,416 | 08/04/2000 |
| SEQ ID NO:3930 | 60/223,416 | 08/04/2000 |
| SEQ ID NO:3931 | 60/223,416 | 08/04/2000 |
| SEQ ID NO:3932 | 60/223,416 | 08/04/2000 |
| SEQ ID NO:3933 | 60/223,416 | 08/04/2000 |
| SEQ ID NO:3934 | 60/223,416 | 08/04/2000 |
| SEQ ID NO:3935 | 60/223,416 | 08/04/2000 |
| SEQ ID NO:3936 | 60/223,416 | 08/04/2000 |
| SEQ ID NO:3937 | 60/223,416 | 08/04/2000 |
| SEQ ID NO:3938 | 60/223,416 | 08/04/2000 |
| SEQ ID NO:3939 | 60/223,416 | 08/04/2000 |
| SEQ ID NO:3940 | 60/223,416 | 08/04/2000 |
| SEQ ID NO:3941 | 60/223,416 | 08/04/2000 |
| SEQ ID NO:3942 | 60/223,416 | 08/04/2000 |
| SEQ ID NO:3943 | 60/223,416 | 08/04/2000 |
| SEQ ID NO:3944 | 60/223,416 | 08/04/2000 |
| SEQ ID NO:3945 | 60/223,416 | 08/04/2000 |
| SEQ ID NO:3946 | 60/223,416 | 08/04/2000 |
| SEQ ID NO:3947 | 60/223,416 | 08/04/2000 |
| SEQ ID NO:3948 | 60/223,416 | 08/04/2000 |
| SEQ ID NO:3949 | 60/223,416 | 08/04/2000 |
| SEQ ID NO:3950 | 60/223,416 | 08/04/2000 |
| SEQ ID NO:3951 | 60/223,416 | 08/04/2000 |
| SEQ ID NO:3952 | 60/223,416 | 08/04/2000 |
| SEQ ID NO:3953 | 60/223,416 | 08/04/2000 |
| SEQ ID NO:3954 | 60/223,416 | 08/04/2000 |
| SEQ ID NO:3955 | 60/223,416 | 08/04/2000 |
| SEQ ID NO:3956 | 60/223,416 | 08/04/2000 |
| SEQ ID NO:3957 | 60/223,416 | 08/04/2000 |
| SEQ ID NO:3958 | 60/223,416 | 08/04/2000 |
| SEQ ID NO:3959 | 60/223,416 | 08/04/2000 |
| SEQ ID NO:3960 | 60/223,416 | 08/04/2000 |
| SEQ ID NO:3961 | 60/223,416 | 08/04/2000 |
| SEQ ID NO:3962 | 60/223,416 | 08/04/2000 |
| SEQ ID NO:3963 | 60/223,416 | 08/04/2000 |
| SEQ ID NO:3964 | 60/223,416 | 08/04/2000 |
| SEQ ID NO:3965 | 60/223,416 | 08/04/2000 |
| SEQ ID NO:3966 | 60/223,416 | 08/04/2000 |
| SEQ ID NO:3967 | 60/223,416 | 08/04/2000 |
| SEQ ID NO:3968 | 60/223,416 | 08/04/2000 |
| SEQ ID NO:3969 | 60/223,416 | 08/04/2000 |
| SEQ ID NO:3970 | 60/223,416 | 08/04/2000 |
| SEQ ID NO:3971 | 60/223,416 | 08/04/2000 |
| SEQ ID NO:3972 | 60/223,416 | 08/04/2000 |
| SEQ ID NO:3973 | 60/223,416 | 08/04/2000 |
| SEQ ID NO:3974 | 60/223,416 | 08/04/2000 |
| SEQ ID NO:3975 | 60/223,416 | 08/04/2000 |
| SEQ ID NO:3976 | 60/223,416 | 08/04/2000 |
| SEQ ID NO:3977 | 60/223,416 | 08/04/2000 |
| SEQ ID NO:3978 | 60/223,416 | 08/04/2000 |
| SEQ ID NO:3979 | 60/223,416 | 08/04/2000 |
| SEQ ID NO:3980 | 60/223,416 | 08/04/2000 |
| SEQ ID NO:3981 | 60/223,416 | 08/04/2000 |
| SEQ ID NO:3982 | 60/223,416 | 08/04/2000 |
| SEQ ID NO:3983 | 60/223,416 | 08/04/2000 |
| SEQ ID NO:3984 | 60/223,416 | 08/04/2000 |
| SEQ ID NO:3985 | 60/223,416 | 08/04/2000 |
| SEQ ID NO:3986 | 60/223,416 | 08/04/2000 |
| SEQ ID NO:3987 | 60/223,416 | 08/04/2000 |
| SEQ ID NO:3988 | 60/223,416 | 08/04/2000 |
| SEQ ID NO:3989 | 60/223,416 | 08/04/2000 |
| SEQ ID NO:3990 | 60/223,416 | 08/04/2000 |
| SEQ ID NO:3991 | 60/223,416 | 08/04/2000 |
| SEQ ID NO:3992 | 60/223,416 | 08/04/2000 |
| SEQ ID NO:3993 | 60/223,416 | 08/04/2000 |
| SEQ ID NO:3994 | 60/223,416 | 08/04/2000 |
| SEQ ID NO:3995 | 60/223,416 | 08/04/2000 |
| SEQ ID NO:3996 | 60/223,416 | 08/04/2000 |
| SEQ ID NO:3997 | 60/223,416 | 08/04/2000 |
| SEQ ID NO:3998 | 60/223,416 | 08/04/2000 |
| SEQ ID NO:3999 | 60/223,416 | 08/04/2000 |
| SEQ ID NO:4000 | 60/223,416 | 08/04/2000 |
| SEQ ID NO:4001 | 60/223,416 | 08/04/2000 |
| SEQ ID NO:4002 | 60/223,416 | 08/04/2000 |
| SEQ ID NO:4003 | 60/223,416 | 08/04/2000 |
| SEQ ID NO:4004 | 60/223,416 | 08/04/2000 |
| SEQ ID NO:4005 | 60/223,416 | 08/04/2000 |
| SEQ ID NO:4006 | 60/223,416 | 08/04/2000 |
| SEQ ID NO:4007 | 60/223,416 | 08/04/2000 |
| SEQ ID NO:4008 | 60/223,416 | 08/04/2000 |
| SEQ ID NO:4009 | 60/223,416 | 08/04/2000 |
| SEQ ID NO:4010 | 60/223,416 | 08/04/2000 |
| SEQ ID NO:4011 | 60/223,416 | 08/04/2000 |
| SEQ ID NO:4012 | 60/223,416 | 08/04/2000 |
| SEQ ID NO:4013 | 60/223,416 | 08/04/2000 |
| SEQ ID NO:4014 | 60/223,416 | 08/04/2000 |
| SEQ ID NO:4015 | 60/223,416 | 08/04/2000 |
| SEQ ID NO:4016 | 60/223,416 | 08/04/2000 |
| SEQ ID NO:4017 | 60/223,416 | 08/04/2000 |
| SEQ ID NO:4018 | 60/223,416 | 08/04/2000 |
| SEQ ID NO:4019 | 60/223,416 | 08/04/2000 |
| SEQ ID NO:4020 | 60/223,416 | 08/04/2000 |
| SEQ ID NO:4021 | 60/223,416 | 08/04/2000 |
| SEQ ID NO:4022 | 60/223,416 | 08/04/2000 |
| SEQ ID NO:4023 | 60/223,416 | 08/04/2000 |
| SEQ ID NO:4024 | 60/223,416 | 08/04/2000 |
| SEQ ID NO:4025 | 60/223,416 | 08/04/2000 |
| SEQ ID NO:4026 | 60/223,416 | 08/04/2000 |
| SEQ ID NO:4027 | 60/223,416 | 08/04/2000 |
| SEQ ID NO:4028 | 60/223,416 | 08/04/2000 |
| SEQ ID NO:4029 | 60/223,416 | 08/04/2000 |
| SEQ ID NO:4030 | 60/223,416 | 08/04/2000 |
| SEQ ID NO:4031 | 60/223,416 | 08/04/2000 |
| SEQ ID NO:4032 | 60/223,416 | 08/04/2000 |
| SEQ ID NO:4033 | 60/223,416 | 08/04/2000 |
| SEQ ID NO:4034 | 60/223,416 | 08/04/2000 |
| SEQ ID NO:4035 | 60/223,416 | 08/04/2000 |
| SEQ ID NO:4036 | 60/223,416 | 08/04/2000 |
| SEQ ID NO:4037 | 60/223,416 | 08/04/2000 |
| SEQ ID NO:4038 | 60/223,416 | 08/04/2000 |
| SEQ ID NO:4039 | 60/223,416 | 08/04/2000 |
| SEQ ID NO:4040 | 60/223,416 | 08/04/2000 |
| SEQ ID NO:4041 | 60/223,416 | 08/04/2000 |
| SEQ ID NO:4042 | 60/223,416 | 08/04/2000 |
| SEQ ID NO:4043 | 60/223,416 | 08/04/2000 |
| SEQ ID NO:4044 | 60/223,416 | 08/04/2000 |
| SEQ ID NO:4045 | 60/223,416 | 08/04/2000 |
| SEQ ID NO:4046 | 60/223,416 | 08/04/2000 |
| SEQ ID NO:4047 | 60/223,416 | 08/04/2000 |
| SEQ ID NO:4048 | 60/223,416 | 08/04/2000 |
| SEQ ID NO:4049 | 60/223,416 | 08/04/2000 |
| SEQ ID NO:4050 | 60/223,416 | 08/04/2000 |
| SEQ ID NO:4051 | 60/223,416 | 08/04/2000 |
| SEQ ID NO:4052 | 60/223,416 | 08/04/2000 |
| SEQ ID NO:4053 | 60/223,416 | 08/04/2000 |
| SEQ ID NO:4054 | 60/223,416 | 08/04/2000 |
| SEQ ID NO:4055 | 60/223,416 | 08/04/2000 |
| SEQ ID NO:4056 | 60/223,416 | 08/04/2000 |
| SEQ ID NO:4057 | 60/223,416 | 08/04/2000 |
| SEQ ID NO:4058 | 60/223,416 | 08/04/2000 |
| SEQ ID NO:4059 | 60/223,416 | 08/04/2000 |
| SEQ ID NO:4060 | 60/223,416 | 08/04/2000 |
| SEQ ID NO:4061 | 60/223,416 | 08/04/2000 |
| SEQ ID NO:4062 | 60/223,416 | 08/04/2000 |
| SEQ ID NO:4063 | 60/223,416 | 08/04/2000 |
| SEQ ID NO:4064 | 60/223,416 | 08/04/2000 |
| SEQ ID NO:4065 | 60/223,416 | 08/04/2000 |
| SEQ ID NO:4066 | 60/223,416 | 08/04/2000 |
| SEQ ID NO:4067 | 60/223,416 | 08/04/2000 |
| SEQ ID NO:4068 | 60/223,416 | 08/04/2000 |
| SEQ ID NO:4069 | 60/223,416 | 08/04/2000 |
| SEQ ID NO:4070 | 60/223,416 | 08/04/2000 |
| SEQ ID NO:4071 | 60/223,416 | 08/04/2000 |
| SEQ ID NO:4072 | 60/223,416 | 08/04/2000 |
| SEQ ID NO:4073 | 60/223,416 | 08/04/2000 |
| SEQ ID NO:4074 | 60/223,416 | 08/04/2000 |
| SEQ ID NO:4075 | 60/223,416 | 08/04/2000 |
| SEQ ID NO:4076 | 60/223,416 | 08/04/2000 |
| SEQ ID NO:4077 | 60/223,416 | 08/04/2000 |
| SEQ ID NO:4078 | 60/223,416 | 08/04/2000 |
| SEQ ID NO:4079 | 60/223,416 | 08/04/2000 |
| SEQ ID NO:4080 | 60/223,416 | 08/04/2000 |
| SEQ ID NO:4081 | 60/223,416 | 08/04/2000 |
| SEQ ID NO:4082 | 60/223,416 | 08/04/2000 |
| SEQ ID NO:4083 | 60/223,416 | 08/04/2000 |
| SEQ ID NO:4084 | 60/223,416 | 08/04/2000 |
| SEQ ID NO:4085 | 60/223,416 | 08/04/2000 |
| SEQ ID NO:4086 | 60/223,416 | 08/04/2000 |
| SEQ ID NO:4087 | 60/223,416 | 08/04/2000 |
| SEQ ID NO:4088 | 60/223,416 | 08/04/2000 |
| SEQ ID NO:4089 | 60/223,416 | 08/04/2000 |
| SEQ ID NO:4090 | 60/223,416 | 08/04/2000 |
| SEQ ID NO:4091 | 60/223,416 | 08/04/2000 |
| SEQ ID NO:4092 | 60/223,416 | 08/04/2000 |
| SEQ ID NO:4093 | 60/223,416 | 08/04/2000 |
| SEQ ID NO:4094 | 60/223,416 | 08/04/2000 |
| SEQ ID NO:4095 | 60/223,416 | 08/04/2000 |
| SEQ ID NO:4096 | 60/223,416 | 08/04/2000 |
| SEQ ID NO:4097 | 60/223,416 | 08/04/2000 |
| SEQ ID NO:4098 | 60/223,416 | 08/04/2000 |
| SEQ ID NO:4099 | 60/223,416 | 08/04/2000 |
| SEQ ID NO:4100 | 60/223,416 | 08/04/2000 |
| SEQ ID NO:4101 | 60/223,416 | 08/04/2000 |
| SEQ ID NO:4102 | 60/223,416 | 08/04/2000 |
| SEQ ID NO:4103 | 60/223,416 | 08/04/2000 |
| SEQ ID NO:4104 | 60/223,416 | 08/04/2000 |
| SEQ ID NO:4105 | 60/223,416 | 08/04/2000 |
| SEQ ID NO:4106 | 60/223,416 | 08/04/2000 |
| SEQ ID NO:4107 | 60/223,416 | 08/04/2000 |
| SEQ ID NO:4108 | 60/223,416 | 08/04/2000 |
| SEQ ID NO:4109 | 60/223,416 | 08/04/2000 |
| SEQ ID NO:4110 | 60/223,416 | 08/04/2000 |
| SEQ ID NO:4111 | 60/223,416 | 08/04/2000 |
| SEQ ID NO:4112 | 60/223,416 | 08/04/2000 |
| SEQ ID NO:4113 | 60/223,416 | 08/04/2000 |
| SEQ ID NO:4114 | 60/223,416 | 08/04/2000 |
| SEQ ID NO:4115 | 60/223,416 | 08/04/2000 |
| SEQ ID NO:4116 | 60/223,416 | 08/04/2000 |
| SEQ ID NO:4117 | 60/223,416 | 08/04/2000 |
| SEQ ID NO:4118 | 60/223,416 | 08/04/2000 |
| SEQ ID NO:4119 | 60/223,416 | 08/04/2000 |
| SEQ ID NO:4120 | 60/223,416 | 08/04/2000 |
| SEQ ID NO:4121 | 60/223,416 | 08/04/2000 |
| SEQ ID NO:4122 | 60/223,416 | 08/04/2000 |
| SEQ ID NO:4123 | 60/223,416 | 08/04/2000 |
| SEQ ID NO:4124 | 60/223,416 | 08/04/2000 |
| SEQ ID NO:4125 | 60/223,416 | 08/04/2000 |
| SEQ ID NO:4126 | 60/223,416 | 08/04/2000 |
| SEQ ID NO:4127 | 60/223,416 | 08/04/2000 |
| SEQ ID NO:4128 | 60/223,416 | 08/04/2000 |
| SEQ ID NO:4129 | 60/223,416 | 08/04/2000 |
| SEQ ID NO:4130 | 60/223,416 | 08/04/2000 |
| SEQ ID NO:4131 | 60/223,416 | 08/04/2000 |
| SEQ ID NO:4132 | 60/223,416 | 08/04/2000 |
| SEQ ID NO:4133 | 60/223,416 | 08/04/2000 |
| SEQ ID NO:4134 | 60/223,416 | 08/04/2000 |
| SEQ ID NO:4135 | 60/223,416 | 08/04/2000 |
| SEQ ID NO:4136 | 60/223,416 | 08/04/2000 |
| SEQ ID NO:4137 | 60/223,416 | 08/04/2000 |
| SEQ ID NO:4138 | 60/223,416 | 08/04/2000 |
| SEQ ID NO:4139 | 60/223,416 | 08/04/2000 |
| SEQ ID NO:4140 | 60/223,416 | 08/04/2000 |
| SEQ ID NO:4141 | 60/223,416 | 08/04/2000 |
| SEQ ID NO:4142 | 60/223,416 | 08/04/2000 |
| SEQ ID NO:4143 | 60/223,416 | 08/04/2000 |
| SEQ ID NO:4144 | 60/223,416 | 08/04/2000 |
| SEQ ID NO:4145 | 60/223,416 | 08/04/2000 |
| SEQ ID NO:4146 | 60/223,416 | 08/04/2000 |
| SEQ ID NO:4147 | 60/223,416 | 08/04/2000 |
| SEQ ID NO:4148 | 60/223,416 | 08/04/2000 |
| SEQ ID NO:4149 | 60/223,416 | 08/04/2000 |
| SEQ ID NO:4150 | 60/223,416 | 08/04/2000 |
| SEQ ID NO:4151 | 60/223,416 | 08/04/2000 |
| SEQ ID NO:4152 | 60/223,416 | 08/04/2000 |
| SEQ ID NO:4153 | 60/223,416 | 08/04/2000 |
| SEQ ID NO:4154 | 60/223,416 | 08/04/2000 |
| SEQ ID NO:4155 | 60/223,416 | 08/04/2000 |
| SEQ ID NO:4156 | 60/223,416 | 08/04/2000 |
| SEQ ID NO:4157 | 60/223,416 | 08/04/2000 |
| SEQ ID NO:4158 | 60/223,416 | 08/04/2000 |
| SEQ ID NO:4159 | 60/223,416 | 08/04/2000 |
| SEQ ID NO:4160 | 60/223,416 | 08/04/2000 |
| SEQ ID NO:4161 | 60/223,416 | 08/04/2000 |
| SEQ ID NO:4162 | 60/223,416 | 08/04/2000 |
| SEQ ID NO:4163 | 60/223,416 | 08/04/2000 |
| SEQ ID NO:4164 | 60/223,416 | 08/04/2000 |
| SEQ ID NO:4165 | 60/223,416 | 08/04/2000 |
| SEQ ID NO:4166 | 60/223,416 | 08/04/2000 |
| SEQ ID NO:4167 | 60/223,416 | 08/04/2000 |
| SEQ ID NO:4168 | 60/223,416 | 08/04/2000 |
| SEQ ID NO:4169 | 60/223,416 | 08/04/2000 |
| SEQ ID NO:4170 | 60/223,416 | 08/04/2000 |
| SEQ ID NO:4171 | 60/223,416 | 08/04/2000 |
| SEQ ID NO:4172 | 60/223,416 | 08/04/2000 |
| SEQ ID NO:4173 | 60/223,416 | 08/04/2000 |
| SEQ ID NO:4174 | 60/223,416 | 08/04/2000 |
| SEQ ID NO:4175 | 60/223,416 | 08/04/2000 |
| SEQ ID NO:4176 | 60/223,416 | 08/04/2000 |
| SEQ ID NO:4177 | 60/223,416 | 08/04/2000 |
| SEQ ID NO:4178 | 60/223,416 | 08/04/2000 |
| SEQ ID NO:4179 | 60/223,416 | 08/04/2000 |
| SEQ ID NO:4180 | 60/223,416 | 08/04/2000 |
| SEQ ID NO:4181 | 60/223,416 | 08/04/2000 |
| SEQ ID NO:4182 | 60/223,416 | 08/04/2000 |
| SEQ ID NO:4183 | 60/223,416 | 08/04/2000 |
| SEQ ID NO:4184 | 60/223,416 | 08/04/2000 |
| SEQ ID NO:4185 | 60/223,416 | 08/04/2000 |
| SEQ ID NO:4186 | 60/223,416 | 08/04/2000 |
| SEQ ID NO:4187 | 60/223,416 | 08/04/2000 |
| SEQ ID NO:4188 | 60/223,416 | 08/04/2000 |
| SEQ ID NO:4189 | 60/223,416 | 08/04/2000 |
| SEQ ID NO:4190 | 60/223,416 | 08/04/2000 |
| SEQ ID NO:4191 | 60/223,416 | 08/04/2000 |
| SEQ ID NO:4192 | 60/223,416 | 08/04/2000 |
| SEQ ID NO:4193 | 60/223,416 | 08/04/2000 |
| SEQ ID NO:4194 | 60/223,416 | 08/04/2000 |
| SEQ ID NO:4195 | 60/223,416 | 08/04/2000 |
| SEQ ID NO:4196 | 60/223,416 | 08/04/2000 |
| SEQ ID NO:4197 | 60/223,416 | 08/04/2000 |
| SEQ ID NO:4198 | 60/223,416 | 08/04/2000 |
| SEQ ID NO:4199 | 60/223,416 | 08/04/2000 |
| SEQ ID NO:4200 | 60/223,416 | 08/04/2000 |
| SEQ ID NO:4201 | 60/223,416 | 08/04/2000 |
| SEQ ID NO:4202 | 60/223,416 | 08/04/2000 |
| SEQ ID NO:4203 | 60/223,416 | 08/04/2000 |
| SEQ ID NO:4204 | 60/223,416 | 08/04/2000 |
| SEQ ID NO:4205 | 60/223,416 | 08/04/2000 |
| SEQ ID NO:4206 | 60/223,416 | 08/04/2000 |
| SEQ ID NO:4207 | 60/223,416 | 08/04/2000 |
| SEQ ID NO:4208 | 60/223,416 | 08/04/2000 |
| SEQ ID NO:4209 | 60/223,416 | 08/04/2000 |
| SEQ ID NO:4210 | 60/223,416 | 08/04/2000 |
| SEQ ID NO:4211 | 60/223,416 | 08/04/2000 |
| SEQ ID NO:4212 | 60/223,416 | 08/04/2000 |
| SEQ ID NO:4213 | 60/223,416 | 08/04/2000 |
| SEQ ID NO:4214 | 60/223,416 | 08/04/2000 |
| SEQ ID NO:4215 | 60/223,416 | 08/04/2000 |
| SEQ ID NO:4216 | 60/223,416 | 08/04/2000 |
| SEQ ID NO:4217 | 60/223,416 | 08/04/2000 |
| SEQ ID NO:4218 | 60/223,416 | 08/04/2000 |
| SEQ ID NO:4219 | 60/223,416 | 08/04/2000 |
| SEQ ID NO:4220 | 60/223,416 | 08/04/2000 |
| SEQ ID NO:4221 | 60/223,416 | 08/04/2000 |
| SEQ ID NO:4222 | 60/223,416 | 08/04/2000 |
| SEQ ID NO:4223 | 60/223,416 | 08/04/2000 |
| SEQ ID NO:4224 | 60/223,416 | 08/04/2000 |
| SEQ ID NO:4225 | 60/223,416 | 08/04/2000 |
| SEQ ID NO:4226 | 60/223,416 | 08/04/2000 |
| SEQ ID NO:4227 | 60/223,416 | 08/04/2000 |
| SEQ ID NO:4228 | 60/223,416 | 08/04/2000 |
| SEQ ID NO:4229 | 60/223,416 | 08/04/2000 |
| SEQ ID NO:4230 | 60/223,416 | 08/04/2000 |
| SEQ ID NO:4231 | 60/223,416 | 08/04/2000 |
| SEQ ID NO:4232 | 60/223,416 | 08/04/2000 |
| SEQ ID NO:4233 | 60/223,416 | 08/04/2000 |
| SEQ ID NO:4234 | 60/223,416 | 08/04/2000 |
| SEQ ID NO:4235 | 60/223,416 | 08/04/2000 |
| SEQ ID NO:4236 | 60/223,416 | 08/04/2000 |
| SEQ ID NO:4237 | 60/223,416 | 08/04/2000 |
| SEQ ID NO:4238 | 60/223,416 | 08/04/2000 |
| SEQ ID NO:4239 | 60/223,416 | 08/04/2000 |
| SEQ ID NO:4240 | 60/223,416 | 08/04/2000 |
| SEQ ID NO:4241 | 60/223,416 | 08/04/2000 |
| SEQ ID NO:4242 | 60/223,416 | 08/04/2000 |
| SEQ ID NO:4243 | 60/223,416 | 08/04/2000 |
| SEQ ID NO:4244 | 60/223,416 | 08/04/2000 |
| SEQ ID NO:4245 | 60/223,416 | 08/04/2000 |
| SEQ ID NO:4246 | 60/223,416 | 08/04/2000 |
| SEQ ID NO:4247 | 60/223,416 | 08/04/2000 |
| SEQ ID NO:4248 | 60/223,416 | 08/04/2000 |
| SEQ ID NO:4249 | 60/223,416 | 08/04/2000 |
| SEQ ID NO:4250 | 60/223,416 | 08/04/2000 |
| SEQ ID NO:4251 | 60/223,416 | 08/04/2000 |
| SEQ ID NO:4252 | 60/223,416 | 08/04/2000 |
| SEQ ID NO:4253 | 60/223,416 | 08/04/2000 |
| SEQ ID NO:4254 | 60/223,416 | 08/04/2000 |
| SEQ ID NO:4255 | 60/223,416 | 08/04/2000 |
| SEQ ID NO:4256 | 60/223,416 | 08/04/2000 |
| SEQ ID NO:4257 | 60/223,416 | 08/04/2000 |
| SEQ ID NO:4258 | 60/223,416 | 08/04/2000 |
| SEQ ID NO:4259 | 60/223,416 | 08/04/2000 |
| SEQ ID NO:4260 | 60/223,416 | 08/04/2000 |
| SEQ ID NO:4261 | 60/223,416 | 08/04/2000 |
| SEQ ID NO:4262 | 60/223,416 | 08/04/2000 |
| SEQ ID NO:4263 | 60/223,416 | 08/04/2000 |
| SEQ ID NO:4264 | 60/223,416 | 08/04/2000 |
| SEQ ID NO:4265 | 60/223,416 | 08/04/2000 |
| SEQ ID NO:4266 | 60/223,416 | 08/04/2000 |
| SEQ ID NO:4267 | 60/223,416 | 08/04/2000 |
| SEQ ID NO:4268 | 60/223,416 | 08/04/2000 |
| SEQ ID NO:4269 | 60/223,416 | 08/04/2000 |
| SEQ ID NO:4270 | 60/223,416 | 08/04/2000 |
| SEQ ID NO:4271 | 60/223,416 | 08/04/2000 |
| SEQ ID NO:4272 | 60/223,416 | 08/04/2000 |
| SEQ ID NO:4273 | 60/223,416 | 08/04/2000 |
| SEQ ID NO:4274 | 60/223,416 | 08/04/2000 |
| SEQ ID NO:4275 | 60/223,416 | 08/04/2000 |
| SEQ ID NO:4276 | 60/223,416 | 08/04/2000 |
| SEQ ID NO:4277 | 60/223,416 | 08/04/2000 |
| SEQ ID NO:4278 | 60/223,416 | 08/04/2000 |
| SEQ ID NO:4279 | 60/223,416 | 08/04/2000 |
| SEQ ID NO:4280 | 60/223,416 | 08/04/2000 |
| SEQ ID NO:4281 | 60/223,416 | 08/04/2000 |
| SEQ ID NO:4282 | 60/223,416 | 08/04/2000 |
| SEQ ID NO:4283 | 60/223,416 | 08/04/2000 |
| SEQ ID NO:4284 | 60/223,416 | 08/04/2000 |
| SEQ ID NO:4285 | 60/223,416 | 08/04/2000 |
| SEQ ID NO:4286 | 60/223,416 | 08/04/2000 |
| SEQ ID NO:4287 | 60/223,416 | 08/04/2000 |
| SEQ ID NO:4288 | 60/223,416 | 08/04/2000 |
| SEQ ID NO:4289 | 60/223,416 | 08/04/2000 |
| SEQ ID NO:4290 | 60/223,416 | 08/04/2000 |
| SEQ ID NO:4291 | 60/223,416 | 08/04/2000 |
| SEQ ID NO:4292 | 60/223,416 | 08/04/2000 |
| SEQ ID NO:4293 | 60/223,416 | 08/04/2000 |
| SEQ ID NO:4294 | 60/223,416 | 08/04/2000 |
| SEQ ID NO:4295 | 60/223,416 | 08/04/2000 |
| SEQ ID NO:4296 | 60/223,416 | 08/04/2000 |
| SEQ ID NO:4297 | 60/223,416 | 08/04/2000 |
| SEQ ID NO:4298 | 60/223,416 | 08/04/2000 |
| SEQ ID NO:4299 | 60/223,416 | 08/04/2000 |
| SEQ ID NO:4300 | 60/223,416 | 08/04/2000 |
| SEQ ID NO:4301 | 60/223,416 | 08/04/2000 |
| SEQ ID NO:4302 | 60/223,416 | 08/04/2000 |
| SEQ ID NO:4303 | 60/223,416 | 08/04/2000 |
| SEQ ID NO:4304 | 60/223,416 | 08/04/2000 |
| SEQ ID NO:4305 | 60/223,416 | 08/04/2000 |
| SEQ ID NO:4306 | 60/223,416 | 08/04/2000 |
| SEQ ID NO:4307 | 60/223,416 | 08/04/2000 |
| SEQ ID NO:4308 | 60/223,416 | 08/04/2000 |
| SEQ ID NO:4309 | 60/223,416 | 08/04/2000 |
| SEQ ID NO:4310 | 60/223,416 | 08/04/2000 |
| SEQ ID NO:4311 | 60/223,416 | 08/04/2000 |
| SEQ ID NO:4312 | 60/223,416 | 08/04/2000 |
| SEQ ID NO:4313 | 60/223,416 | 08/04/2000 |
| SEQ ID NO:4314 | 60/223,416 | 08/04/2000 |
| SEQ ID NO:4315 | 60/223,416 | 08/04/2000 |
| SEQ ID NO:4316 | 60/223,416 | 08/04/2000 |
| SEQ ID NO:4317 | 60/223,416 | 08/04/2000 |
| SEQ ID NO:4318 | 60/223,416 | 08/04/2000 |
| SEQ ID NO:4319 | 60/223,416 | 08/04/2000 |
| SEQ ID NO:4320 | 60/223,416 | 08/04/2000 |
| SEQ ID NO:4321 | 60/223,416 | 08/04/2000 |
| SEQ ID NO:4322 | 60/223,416 | 08/04/2000 |
| SEQ ID NO:4323 | 60/223,416 | 08/04/2000 |
| SEQ ID NO:4324 | 60/223,416 | 08/04/2000 |
| SEQ ID NO:4325 | 60/223,416 | 08/04/2000 |
| SEQ ID NO:4326 | 60/223,416 | 08/04/2000 |
| SEQ ID NO:4327 | 60/223,416 | 08/04/2000 |
| SEQ ID NO:4328 | 60/223,416 | 08/04/2000 |
| SEQ ID NO:4329 | 60/223,416 | 08/04/2000 |
| SEQ ID NO:4330 | 60/223,416 | 08/04/2000 |
| SEQ ID NO:4331 | 60/223,416 | 08/04/2000 |
| SEQ ID NO:4332 | 60/223,416 | 08/04/2000 |
| SEQ ID NO:4333 | 60/223,416 | 08/04/2000 |
| SEQ ID NO:4334 | 60/223,416 | 08/04/2000 |
| SEQ ID NO:4335 | 60/223,416 | 08/04/2000 |
| SEQ ID NO:4336 | 60/223,416 | 08/04/2000 |
| SEQ ID NO:4337 | 60/223,416 | 08/04/2000 |
| SEQ ID NO:4338 | 60/223,416 | 08/04/2000 |
| SEQ ID NO:4339 | 60/223,416 | 08/04/2000 |
| SEQ ID NO:4340 | 60/223,416 | 08/04/2000 |
| SEQ ID NO:4341 | 60/223,416 | 08/04/2000 |
| SEQ ID NO:4342 | 60/223,416 | 08/04/2000 |
| SEQ ID NO:4343 | 60/223,416 | 08/04/2000 |
| SEQ ID NO:4344 | 60/223,416 | 08/04/2000 |
| SEQ ID NO:4345 | 60/223,416 | 08/04/2000 |
| SEQ ID NO:4346 | 60/223,416 | 08/04/2000 |
| SEQ ID NO:4347 | 60/223,416 | 08/04/2000 |
| SEQ ID NO:4348 | 60/223,416 | 08/04/2000 |
| SEQ ID NO:4349 | 60/223,416 | 08/04/2000 |
| SEQ ID NO:4350 | 60/223,416 | 08/04/2000 |
| SEQ ID NO:4351 | 60/223,416 | 08/04/2000 |
| SEQ ID NO:4352 | 60/223,416 | 08/04/2000 |
| SEQ ID NO:4353 | 60/223,416 | 08/04/2000 |
| SEQ ID NO:4354 | 60/223,416 | 08/04/2000 |
| SEQ ID NO:4355 | 60/223,416 | 08/04/2000 |
| SEQ ID NO:4356 | 60/223,416 | 08/04/2000 |
| SEQ ID NO:4357 | 60/223,416 | 08/04/2000 |
| SEQ ID NO:4358 | 60/223,416 | 08/04/2000 |
| SEQ ID NO:4359 | 60/223,416 | 08/04/2000 |
| SEQ ID NO:4360 | 60/223,416 | 08/04/2000 |
| SEQ ID NO:4361 | 60/223,416 | 08/04/2000 |
| SEQ ID NO:4362 | 60/223,416 | 08/04/2000 |
| SEQ ID NO:4363 | 60/223,416 | 08/04/2000 |
| SEQ ID NO:4364 | 60/223,416 | 08/04/2000 |
| SEQ ID NO:4365 | 60/223,416 | 08/04/2000 |
| SEQ ID NO:4366 | 60/223,416 | 08/04/2000 |
| SEQ ID NO:4367 | 60/223,416 | 08/04/2000 |
| SEQ ID NO:4368 | 60/223,416 | 08/04/2000 |
| SEQ ID NO:4369 | 60/223,416 | 08/04/2000 |
| SEQ ID NO:4370 | 60/223,416 | 08/04/2000 |
| SEQ ID NO:4371 | 60/223,416 | 08/04/2000 |
| SEQ ID NO:4372 | 60/223,416 | 08/04/2000 |
| SEQ ID NO:4373 | 60/223,416 | 08/04/2000 |
| SEQ ID NO:4374 | 60/223,416 | 08/04/2000 |
| SEQ ID NO:4375 | 60/223,416 | 08/04/2000 |
| SEQ ID NO:4376 | 60/223,416 | 08/04/2000 |
| SEQ ID NO:4377 | 60/223,416 | 08/04/2000 |
| SEQ ID NO:4378 | 60/223,416 | 08/04/2000 |
| SEQ ID NO:4379 | 60/223,416 | 08/04/2000 |
| SEQ ID NO:4380 | 60/223,416 | 08/04/2000 |
| SEQ ID NO:4381 | 60/223,416 | 08/04/2000 |
| SEQ ID NO:4382 | 60/223,416 | 08/04/2000 |
| SEQ ID NO:4383 | 60/223,416 | 08/04/2000 |
| SEQ ID NO:4384 | 60/223,416 | 08/04/2000 |
| SEQ ID NO:4385 | 60/223,416 | 08/04/2000 |
| SEQ ID NO:4386 | 60/223,416 | 08/04/2000 |
| SEQ ID NO:4387 | 60/223,416 | 08/04/2000 |
| SEQ ID NO:4388 | 60/223,416 | 08/04/2000 |
| SEQ ID NO:4389 | 60/223,416 | 08/04/2000 |
| SEQ ID NO:4390 | 60/223,416 | 08/04/2000 |
| SEQ ID NO:4391 | 60/223,416 | 08/04/2000 |
| SEQ ID NO:4392 | 60/223,416 | 08/04/2000 |
| SEQ ID NO:4393 | 60/223,416 | 08/04/2000 |
| SEQ ID NO:4394 | 60/223,416 | 08/04/2000 |
| SEQ ID NO:4395 | 60/223,416 | 08/04/2000 |
| SEQ ID NO:4396 | 60/223,416 | 08/04/2000 |
| SEQ ID NO:4397 | 60/223,416 | 08/04/2000 |
| SEQ ID NO:4398 | 60/223,416 | 08/04/2000 |
| SEQ ID NO:4399 | 60/223,416 | 08/04/2000 |
| SEQ ID NO:4400 | 60/223,416 | 08/04/2000 |
| SEQ ID NO:4401 | 60/223,416 | 08/04/2000 |
| SEQ ID NO:4402 | 60/223,416 | 08/04/2000 |
| SEQ ID NO:4403 | 60/223,416 | 08/04/2000 |
| SEQ ID NO:4404 | 60/223,416 | 08/04/2000 |
| SEQ ID NO:4405 | 60/223,416 | 08/04/2000 |
| SEQ ID NO:4406 | 60/223,416 | 08/04/2000 |
| SEQ ID NO:4407 | 60/223,416 | 08/04/2000 |
| SEQ ID NO:4408 | 60/223,416 | 08/04/2000 |
| SEQ ID NO:4409 | 60/223,416 | 08/04/2000 |
| SEQ ID NO:4410 | 60/223,416 | 08/04/2000 |
| SEQ ID NO:4411 | 60/223,416 | 08/04/2000 |
| SEQ ID NO:4412 | 60/223,416 | 08/04/2000 |
| SEQ ID NO:4413 | 60/223,416 | 08/04/2000 |
| SEQ ID NO:4414 | 60/223,416 | 08/04/2000 |
| SEQ ID NO:4415 | 60/223,416 | 08/04/2000 |
| SEQ ID NO:4416 | 60/223,416 | 08/04/2000 |
| SEQ ID NO:4417 | 60/223,416 | 08/04/2000 |
| SEQ ID NO:4418 | 60/223,416 | 08/04/2000 |
| SEQ ID NO:4419 | 60/223,416 | 08/04/2000 |
| SEQ ID NO:4420 | 60/223,416 | 08/04/2000 |
| SEQ ID NO:4421 | 60/223,416 | 08/04/2000 |
| SEQ ID NO:4422 | 60/223,416 | 08/04/2000 |
| SEQ ID NO:4423 | 60/223,416 | 08/04/2000 |
| SEQ ID NO:4424 | 60/223,416 | 08/04/2000 |
| SEQ ID NO:4425 | 60/223,416 | 08/04/2000 |
| SEQ ID NO:4426 | 60/223,416 | 08/04/2000 |
| SEQ ID NO:4427 | 60/223,416 | 08/04/2000 |
| SEQ ID NO:4428 | 60/223,416 | 08/04/2000 |
| SEQ ID NO:4429 | 60/223,416 | 08/04/2000 |
| SEQ ID NO:4430 | 60/223,416 | 08/04/2000 |
| SEQ ID NO:4431 | 60/223,416 | 08/04/2000 |
| SEQ ID NO:4432 | 60/223,416 | 08/04/2000 |
| SEQ ID NO:4433 | 60/223,416 | 08/04/2000 |
| SEQ ID NO:4434 | 60/223,416 | 08/04/2000 |
| SEQ ID NO:4435 | 60/223,416 | 08/04/2000 |
| SEQ ID NO:4436 | 60/223,416 | 08/04/2000 |
| SEQ ID NO:4437 | 60/223,416 | 08/04/2000 |
| SEQ ID NO:4438 | 60/223,416 | 08/04/2000 |
| SEQ ID NO:4439 | 60/223,416 | 08/04/2000 |
| SEQ ID NO:4440 | 60/223,416 | 08/04/2000 |
| SEQ ID NO:4441 | 60/223,416 | 08/04/2000 |
| SEQ ID NO:4442 | 60/223,416 | 08/04/2000 |
| SEQ ID NO:4443 | 60/223,416 | 08/04/2000 |
| SEQ ID NO:4444 | 60/223,416 | 08/04/2000 |
| SEQ ID NO:4445 | 60/223,416 | 08/04/2000 |
| SEQ ID NO:4446 | 60/223,416 | 08/04/2000 |
| SEQ ID NO:4447 | 60/223,416 | 08/04/2000 |
| SEQ ID NO:4448 | 60/223,416 | 08/04/2000 |
| SEQ ID NO:4449 | 60/223,416 | 08/04/2000 |
| SEQ ID NO:4450 | 60/223,416 | 08/04/2000 |
| SEQ ID NO:4451 | 60/223,416 | 08/04/2000 |
| SEQ ID NO:4452 | 60/223,416 | 08/04/2000 |
| SEQ ID NO:4453 | 60/223,416 | 08/04/2000 |
| SEQ ID NO:4454 | 60/223,416 | 08/04/2000 |
| SEQ ID NO:4455 | 60/223,416 | 08/04/2000 |
| SEQ ID NO:4456 | 60/223,416 | 08/04/2000 |
| SEQ ID NO:4457 | 60/223,416 | 08/04/2000 |
| SEQ ID NO:4458 | 60/223,416 | 08/04/2000 |
| SEQ ID NO:4459 | 60/223,416 | 08/04/2000 |
| SEQ ID NO:4460 | 60/223,416 | 08/04/2000 |
| SEQ ID NO:4461 | 60/223,416 | 08/04/2000 |
| SEQ ID NO:4462 | 60/223,416 | 08/04/2000 |
| SEQ ID NO:4463 | 60/223,416 | 08/04/2000 |
| SEQ ID NO:4464 | 60/223,416 | 08/04/2000 |
| SEQ ID NO:4465 | 60/223,416 | 08/04/2000 |
| SEQ ID NO:4466 | 60/223,416 | 08/04/2000 |
| SEQ ID NO:4467 | 60/223,416 | 08/04/2000 |
| SEQ ID NO:4468 | 60/223,416 | 08/04/2000 |
| SEQ ID NO:4469 | 60/223,416 | 08/04/2000 |
| SEQ ID NO:4470 | 60/223,416 | 08/04/2000 |
| SEQ ID NO:4471 | 60/223,416 | 08/04/2000 |
| SEQ ID NO:4472 | 60/223,416 | 08/04/2000 |
| SEQ ID NO:4473 | 60/223,416 | 08/04/2000 |
| SEQ ID NO:4474 | 60/223,416 | 08/04/2000 |
| SEQ ID NO:4475 | 60/223,416 | 08/04/2000 |
| SEQ ID NO:4476 | 60/223,416 | 08/04/2000 |
| SEQ ID NO:4477 | 60/223,416 | 08/04/2000 |
| SEQ ID NO:4478 | 60/223,416 | 08/04/2000 |
| SEQ ID NO:4479 | 60/223,416 | 08/04/2000 |
| SEQ ID NO:4480 | 60/223,416 | 08/04/2000 |
| SEQ ID NO:4481 | 60/223,416 | 08/04/2000 |
| SEQ ID NO:4482 | 60/223,416 | 08/04/2000 |
| SEQ ID NO:4483 | 60/223,416 | 08/04/2000 |
| SEQ ID NO:4484 | 60/223,416 | 08/04/2000 |
| SEQ ID NO:4485 | 60/223,416 | 08/04/2000 |
| SEQ ID NO:4486 | 60/223,416 | 08/04/2000 |
| SEQ ID NO:4487 | 60/223,416 | 08/04/2000 |
| SEQ ID NO:4488 | 60/223,416 | 08/04/2000 |
| SEQ ID NO:4489 | 60/223,416 | 08/04/2000 |
| SEQ ID NO:4490 | 60/223,416 | 08/04/2000 |
| SEQ ID NO:4491 | 60/223,416 | 08/04/2000 |
| SEQ ID NO:4492 | 60/223,416 | 08/04/2000 |
| SEQ ID NO:4493 | 60/223,416 | 08/04/2000 |
| SEQ ID NO:4494 | 60/223,416 | 08/04/2000 |
| SEQ ID NO:4495 | 60/223,416 | 08/04/2000 |
| SEQ ID NO:4496 | 60/223,416 | 08/04/2000 |
| SEQ ID NO:4497 | 60/223,416 | 08/04/2000 |
| SEQ ID NO:4498 | 60/223,416 | 08/04/2000 |
| SEQ ID NO:4499 | 60/223,416 | 08/04/2000 |
| SEQ ID NO:4500 | 60/223,416 | 08/04/2000 |
| SEQ ID NO:4501 | 60/223,416 | 08/04/2000 |
| SEQ ID NO:4502 | 60/223,416 | 08/04/2000 |
| SEQ ID NO:4503 | 60/223,416 | 08/04/2000 |
| SEQ ID NO:4504 | 60/223,416 | 08/04/2000 |
| SEQ ID NO:4505 | 60/223,416 | 08/04/2000 |
| SEQ ID NO:4506 | 60/223,416 | 08/04/2000 |
| SEQ ID NO:4507 | 60/223,416 | 08/04/2000 |
| SEQ ID NO:4508 | 60/223,416 | 08/04/2000 |
| SEQ ID NO:4509 | 60/223,416 | 08/04/2000 |
| SEQ ID NO:4510 | 60/223,416 | 08/04/2000 |
| SEQ ID NO:4511 | 60/223,416 | 08/04/2000 |
| SEQ ID NO:4512 | 60/223,416 | 08/04/2000 |
| SEQ ID NO:4513 | 60/223,416 | 08/04/2000 |
| SEQ ID NO:4514 | 60/223,416 | 08/04/2000 |
| SEQ ID NO:4515 | 60/223,416 | 08/04/2000 |
| SEQ ID NO:4516 | 60/223,416 | 08/04/2000 |
| SEQ ID NO:4517 | 60/223,416 | 08/04/2000 |
| SEQ ID NO:4518 | 60/223,416 | 08/04/2000 |
| SEQ ID NO:4519 | 60/223,416 | 08/04/2000 |
| SEQ ID NO:4520 | 60/223,416 | 08/04/2000 |
| SEQ ID NO:4521 | 60/223,416 | 08/04/2000 |
| SEQ ID NO:4522 | 60/223,416 | 08/04/2000 |
| SEQ ID NO:4523 | 60/223,416 | 08/04/2000 |
| SEQ ID NO:4524 | 60/223,416 | 08/04/2000 |
| SEQ ID NO:4525 | 60/223,416 | 08/04/2000 |
| SEQ ID NO:4526 | 60/223,416 | 08/04/2000 |
| SEQ ID NO:4527 | 60/223,416 | 08/04/2000 |
| SEQ ID NO:4528 | 60/223,416 | 08/04/2000 |
| SEQ ID NO:4529 | 60/223,416 | 08/04/2000 |
| SEQ ID NO:4530 | 60/223,416 | 08/04/2000 |
| SEQ ID NO:4531 | 60/223,416 | 08/04/2000 |
| SEQ ID NO:4532 | 60/223,416 | 08/04/2000 |
| SEQ ID NO:4533 | 60/223,416 | 08/04/2000 |
| SEQ ID NO:4534 | 60/223,416 | 08/04/2000 |
| SEQ ID NO:4535 | 60/223,416 | 08/04/2000 |
| SEQ ID NO:4536 | 60/223,416 | 08/04/2000 |
| SEQ ID NO:4537 | 60/223,416 | 08/04/2000 |
| SEQ ID NO:4538 | 60/223,416 | 08/04/2000 |
| SEQ ID NO:4539 | 60/223,416 | 08/04/2000 |
| SEQ ID NO:4540 | 60/223,416 | 08/04/2000 |
| SEQ ID NO:4541 | 60/223,416 | 08/04/2000 |
| SEQ ID NO:4542 | 60/223,416 | 08/04/2000 |
| SEQ ID NO:4543 | 60/223,416 | 08/04/2000 |
| SEQ ID NO:4544 | 60/223,416 | 08/04/2000 |
| SEQ ID NO:4545 | 60/223,416 | 08/04/2000 |
| SEQ ID NO:4546 | 60/223,416 | 08/04/2000 |
| SEQ ID NO:4547 | 60/223,416 | 08/04/2000 |
| SEQ ID NO:4548 | 60/223,416 | 08/04/2000 |
| SEQ ID NO:4549 | 60/223,416 | 08/04/2000 |
| SEQ ID NO:4550 | 60/223,416 | 08/04/2000 |
| SEQ ID NO:4551 | 60/223,416 | 08/04/2000 |
| SEQ ID NO:4552 | 60/223,416 | 08/04/2000 |
| SEQ ID NO:4553 | 60/223,416 | 08/04/2000 |
| SEQ ID NO:4554 | 60/223,416 | 08/04/2000 |
| SEQ ID NO:4555 | 60/223,416 | 08/04/2000 |
| SEQ ID NO:4556 | 60/223,416 | 08/04/2000 |
| SEQ ID NO:4557 | 60/223,416 | 08/04/2000 |
| SEQ ID NO:4558 | 60/223,416 | 08/04/2000 |
| SEQ ID NO:4559 | 60/223,416 | 08/04/2000 |
| SEQ ID NO:4560 | 60/223,416 | 08/04/2000 |
| SEQ ID NO:4561 | 60/223,416 | 08/04/2000 |
| SEQ ID NO:4562 | 60/223,416 | 08/04/2000 |
| SEQ ID NO:4563 | 60/223,416 | 08/04/2000 |
| SEQ ID NO:4564 | 60/223,416 | 08/04/2000 |
| SEQ ID NO:4565 | 60/223,416 | 08/04/2000 |
| SEQ ID NO:4566 | 60/223,416 | 08/04/2000 |
| SEQ ID NO:4567 | 60/223,416 | 08/04/2000 |
| SEQ ID NO:4568 | 60/223,416 | 08/04/2000 |
| SEQ ID NO:4569 | 60/223,416 | 08/04/2000 |
| SEQ ID NO:4570 | 60/223,416 | 08/04/2000 |
| SEQ ID NO:4571 | 60/223,416 | 08/04/2000 |
| SEQ ID NO:4572 | 60/223,416 | 08/04/2000 |
| SEQ ID NO:4573 | 60/223,416 | 08/04/2000 |
| SEQ ID NO:4574 | 60/223,416 | 08/04/2000 |
| SEQ ID NO:4575 | 60/223,416 | 08/04/2000 |
| SEQ ID NO:4576 | 60/223,416 | 08/04/2000 |
| SEQ ID NO:4577 | 60/223,416 | 08/04/2000 |
| SEQ ID NO:4578 | 60/223,416 | 08/04/2000 |
| SEQ ID NO:4579 | 60/223,416 | 08/04/2000 |
| SEQ ID NO:4580 | 60/223,416 | 08/04/2000 |
| SEQ ID NO:4581 | 60/223,416 | 08/04/2000 |
| SEQ ID NO:4582 | 60/223,416 | 08/04/2000 |
| SEQ ID NO:4583 | 60/223,416 | 08/04/2000 |
| SEQ ID NO:4584 | 60/223,416 | 08/04/2000 |
| SEQ ID NO:4585 | 60/223,416 | 08/04/2000 |
| SEQ ID NO:4586 | 60/223,416 | 08/04/2000 |
| SEQ ID NO:4587 | 60/223,416 | 08/04/2000 |
| SEQ ID NO:4588 | 60/223,416 | 08/04/2000 |
| SEQ ID NO:4589 | 60/223,416 | 08/04/2000 |
| SEQ ID NO:4590 | 60/223,416 | 08/04/2000 |
| SEQ ID NO:4591 | 60/223,416 | 08/04/2000 |
| SEQ ID NO:4592 | 60/223,416 | 08/04/2000 |
| SEQ ID NO:4593 | 60/223,416 | 08/04/2000 |
| SEQ ID NO:4594 | 60/223,416 | 08/04/2000 |
| SEQ ID NO:4595 | 60/223,416 | 08/04/2000 |
| SEQ ID NO:4596 | 60/223,416 | 08/04/2000 |
| SEQ ID NO:4597 | 60/223,416 | 08/04/2000 |
| SEQ ID NO:4598 | 60/223,416 | 08/04/2000 |
| SEQ ID NO:4599 | 60/223,416 | 08/04/2000 |
| SEQ ID NO:4600 | 60/223,416 | 08/04/2000 |
| SEQ ID NO:4601 | 60/223,416 | 08/04/2000 |
| SEQ ID NO:4602 | 60/223,416 | 08/04/2000 |
| SEQ ID NO:4603 | 60/223,416 | 08/04/2000 |
| SEQ ID NO:4604 | 60/223,416 | 08/04/2000 |
| SEQ ID NO:4605 | 60/223,416 | 08/04/2000 |
| SEQ ID NO:4606 | 60/223,416 | 08/04/2000 |
| SEQ ID NO:4607 | 60/223,416 | 08/04/2000 |
| SEQ ID NO:4608 | 60/223,416 | 08/04/2000 |
| SEQ ID NO:4609 | 60/223,416 | 08/04/2000 |
| SEQ ID NO:4610 | 60/223,416 | 08/04/2000 |
| SEQ ID NO:4611 | 60/223,416 | 08/04/2000 |
| SEQ ID NO:4612 | 60/223,416 | 08/04/2000 |
| SEQ ID NO:4613 | 60/223,416 | 08/04/2000 |
| SEQ ID NO:4614 | 60/223,416 | 08/04/2000 |
| SEQ ID NO:4615 | 60/223,416 | 08/04/2000 |
| SEQ ID NO:4616 | 60/223,416 | 08/04/2000 |
| SEQ ID NO:4617 | 60/223,416 | 08/04/2000 |
| SEQ ID NO:4618 | 60/223,416 | 08/04/2000 |
| SEQ ID NO:4619 | 60/223,416 | 08/04/2000 |
| SEQ ID NO:4620 | 60/223,416 | 08/04/2000 |
| SEQ ID NO:4621 | 60/223,416 | 08/04/2000 |
| SEQ ID NO:4622 | 60/223,416 | 08/04/2000 |
| SEQ ID NO:4623 | 60/223,416 | 08/04/2000 |
| SEQ ID NO:4624 | 60/223,416 | 08/04/2000 |
| SEQ ID NO:4625 | 60/223,416 | 08/04/2000 |
| SEQ ID NO:4626 | 60/223,416 | 08/04/2000 |
| SEQ ID NO:4627 | 60/223,416 | 08/04/2000 |
| SEQ ID NO:4628 | 60/223,416 | 08/04/2000 |
| SEQ ID NO:4629 | 60/223,416 | 08/04/2000 |
| SEQ ID NO:4630 | 60/223,416 | 08/04/2000 |
| SEQ ID NO:4631 | 60/223,416 | 08/04/2000 |
| SEQ ID NO:4632 | 60/223,416 | 08/04/2000 |
| SEQ ID NO:4633 | 60/223,416 | 08/04/2000 |
| SEQ ID NO:4634 | 60/223,416 | 08/04/2000 |
| SEQ ID NO:4635 | 60/223,416 | 08/04/2000 |
| SEQ ID NO:4636 | 60/223,416 | 08/04/2000 |
| SEQ ID NO:4637 | 60/223,416 | 08/04/2000 |
| SEQ ID NO:4638 | 60/223,416 | 08/04/2000 |
| SEQ ID NO:4639 | 60/223,416 | 08/04/2000 |
| SEQ ID NO:4640 | 60/223,416 | 08/04/2000 |
| SEQ ID NO:4641 | 60/223,416 | 08/04/2000 |
| SEQ ID NO:4642 | 60/223,416 | 08/04/2000 |
| SEQ ID NO:4643 | 60/223,416 | 08/04/2000 |
| SEQ ID NO:4644 | 60/223,416 | 08/04/2000 |
| SEQ ID NO:4645 | 60/223,416 | 08/04/2000 |
| SEQ ID NO:4646 | 60/223,416 | 08/04/2000 |
| SEQ ID NO:4647 | 60/223,416 | 08/04/2000 |
| SEQ ID NO:4648 | 60/223,416 | 08/04/2000 |
| SEQ ID NO:4649 | 60/223,416 | 08/04/2000 |
| SEQ ID NO:4650 | 60/223,416 | 08/04/2000 |
| SEQ ID NO:4651 | 60/223,416 | 08/04/2000 |
| SEQ ID NO:4652 | 60/223,416 | 08/04/2000 |
| SEQ ID NO:4653 | 60/223,416 | 08/04/2000 |
| SEQ ID NO:4654 | 60/223,416 | 08/04/2000 |
| SEQ ID NO:4655 | 60/223,416 | 08/04/2000 |
| SEQ ID NO:4656 | 60/223,416 | 08/04/2000 |
| SEQ ID NO:4657 | 60/223,416 | 08/04/2000 |
| SEQ ID NO:4658 | 60/223,416 | 08/04/2000 |
| SEQ ID NO:4659 | 60/223,416 | 08/04/2000 |
| SEQ ID NO:4660 | 60/223,416 | 08/04/2000 |
| SEQ ID NO:4661 | 60/223,416 | 08/04/2000 |
| SEQ ID NO:4662 | 60/223,416 | 08/04/2000 |
| SEQ ID NO:4663 | 60/223,416 | 08/04/2000 |
| SEQ ID NO:4664 | 60/223,416 | 08/04/2000 |
| SEQ ID NO:4665 | 60/223,416 | 08/04/2000 |
| SEQ ID NO:4666 | 60/223,416 | 08/04/2000 |
| SEQ ID NO:4667 | 60/223,416 | 08/04/2000 |
| SEQ ID NO:4668 | 60/223,416 | 08/04/2000 |
| SEQ ID NO:4669 | 60/223,416 | 08/04/2000 |
| SEQ ID NO:4670 | 60/223,416 | 08/04/2000 |
| SEQ ID NO:4671 | 60/223,416 | 08/04/2000 |
| SEQ ID NO:4672 | 60/223,416 | 08/04/2000 |
| SEQ ID NO:4673 | 60/223,416 | 08/04/2000 |
| SEQ ID NO:4674 | 60/223,416 | 08/04/2000 |
| SEQ ID NO:4675 | 60/223,416 | 08/04/2000 |
| SEQ ID NO:4676 | 60/223,416 | 08/04/2000 |
| SEQ ID NO:4677 | 60/223,416 | 08/04/2000 |
| SEQ ID NO:4678 | 60/223,416 | 08/04/2000 |
| SEQ ID NO:4679 | 60/223,416 | 08/04/2000 |
| SEQ ID NO:4680 | 60/223,416 | 08/04/2000 |
| SEQ ID NO:4681 | 60/223,416 | 08/04/2000 |
| SEQ ID NO:4682 | 60/223,416 | 08/04/2000 |
| SEQ ID NO:4683 | 60/223,416 | 08/04/2000 |
| SEQ ID NO:4684 | 60/223,416 | 08/04/2000 |
| SEQ ID NO:4685 | 60/223,416 | 08/04/2000 |
| SEQ ID NO:4686 | 60/223,416 | 08/04/2000 |
| SEQ ID NO:4687 | 60/223,416 | 08/04/2000 |
| SEQ ID NO:4688 | 60/223,416 | 08/04/2000 |
| SEQ ID NO:4689 | 60/223,416 | 08/04/2000 |
| SEQ ID NO:4690 | 60/223,416 | 08/04/2000 |
| SEQ ID NO:4691 | 60/223,416 | 08/04/2000 |
| SEQ ID NO:4692 | 60/223,416 | 08/04/2000 |
| SEQ ID NO:4693 | 60/223,416 | 08/04/2000 |
| SEQ ID NO:4694 | 60/223,416 | 08/04/2000 |
| SEQ ID NO:4695 | 60/223,416 | 08/04/2000 |
| SEQ ID NO:4696 | 60/223,416 | 08/04/2000 |
| SEQ ID NO:4697 | 60/223,416 | 08/04/2000 |
| SEQ ID NO:4698 | 60/223,416 | 08/04/2000 |
| SEQ ID NO:4699 | 60/223,416 | 08/04/2000 |
| SEQ ID NO:4700 | 60/223,416 | 08/04/2000 |
| SEQ ID NO:4701 | 60/223,416 | 08/04/2000 |
| SEQ ID NO:4702 | 60/223,416 | 08/04/2000 |
| SEQ ID NO:4703 | 60/223,416 | 08/04/2000 |
| SEQ ID NO:4704 | 60/223,416 | 08/04/2000 |
| SEQ ID NO:4705 | 60/223,416 | 08/04/2000 |
| SEQ ID NO:4706 | 60/223,416 | 08/04/2000 |
| SEQ ID NO:4707 | 60/223,416 | 08/04/2000 |
| SEQ ID NO:4708 | 60/223,416 | 08/04/2000 |
| SEQ ID NO:4709 | 60/223,416 | 08/04/2000 |
| SEQ ID NO:4710 | 60/223,416 | 08/04/2000 |
| SEQ ID NO:4711 | 60/223,416 | 08/04/2000 |
| SEQ ID NO:4712 | 60/223,416 | 08/04/2000 |
| SEQ ID NO:4713 | 60/223,416 | 08/04/2000 |
| SEQ ID NO:4714 | 60/223,416 | 08/04/2000 |
| SEQ ID NO:4715 | 60/223,416 | 08/04/2000 |
| SEQ ID NO:4716 | 60/223,416 | 08/04/2000 |
| SEQ ID NO:4717 | 60/223,416 | 08/04/2000 |
| SEQ ID NO:4718 | 60/223,416 | 08/04/2000 |
| SEQ ID NO:4719 | 60/223,416 | 08/04/2000 |
| SEQ ID NO:4720 | 60/223,416 | 08/04/2000 |
| SEQ ID NO:4721 | 60/223,416 | 08/04/2000 |
| SEQ ID NO:4722 | 60/223,416 | 08/04/2000 |
| SEQ ID NO:4723 | 60/223,416 | 08/04/2000 |
| SEQ ID NO:4724 | 60/223,416 | 08/04/2000 |
| SEQ ID NO:4725 | 60/223,416 | 08/04/2000 |
| SEQ ID NO:4726 | 60/223,416 | 08/04/2000 |
| SEQ ID NO:4727 | 60/223,416 | 08/04/2000 |
| SEQ ID NO:4728 | 60/223,416 | 08/04/2000 |
| SEQ ID NO:4729 | 60/223,416 | 08/04/2000 |
| SEQ ID NO:4730 | 60/223,416 | 08/04/2000 |
| SEQ ID NO:4731 | 60/223,416 | 08/04/2000 |
| SEQ ID NO:4732 | 60/223,416 | 08/04/2000 |
| SEQ ID NO:4733 | 60/223,416 | 08/04/2000 |
| SEQ ID NO:4734 | 60/223,416 | 08/04/2000 |
| SEQ ID NO:4735 | 60/223,416 | 08/04/2000 |
| SEQ ID NO:4736 | 60/223,416 | 08/04/2000 |
| SEQ ID NO:4737 | 60/223,416 | 08/04/2000 |
| SEQ ID NO:4738 | 60/223,416 | 08/04/2000 |
| SEQ ID NO:4739 | 60/223,416 | 08/04/2000 |
| SEQ ID NO:4740 | 60/223,416 | 08/04/2000 |
| SEQ ID NO:4741 | 60/223,416 | 08/04/2000 |
| SEQ ID NO:4742 | 60/223,416 | 08/04/2000 |
| SEQ ID NO:4743 | 60/223,416 | 08/04/2000 |
| SEQ ID NO:4744 | 60/223,416 | 08/04/2000 |
| SEQ ID NO:4745 | 60/223,416 | 08/04/2000 |
| SEQ ID NO:4746 | 60/223,416 | 08/04/2000 |
| SEQ ID NO:4747 | 60/223,416 | 08/04/2000 |
| SEQ ID NO:4748 | 60/223,416 | 08/04/2000 |
| SEQ ID NO:4749 | 60/223,416 | 08/04/2000 |
| SEQ ID NO:4750 | 60/223,416 | 08/04/2000 |
| SEQ ID NO:4751 | 60/223,416 | 08/04/2000 |
| SEQ ID NO:4752 | 60/223,416 | 08/04/2000 |
| SEQ ID NO:4753 | 60/223,416 | 08/04/2000 |
| SEQ ID NO:4754 | 60/223,416 | 08/04/2000 |
| SEQ ID NO:4755 | 60/223,416 | 08/04/2000 |
| SEQ ID NO:4756 | 60/223,416 | 08/04/2000 |
| SEQ ID NO:4757 | 60/223,416 | 08/04/2000 |
| SEQ ID NO:4758 | 60/223,416 | 08/04/2000 |
| SEQ ID NO:4759 | 60/223,416 | 08/04/2000 |
| SEQ ID NO:4760 | 60/223,416 | 08/04/2000 |
| SEQ ID NO:4761 | 60/223,416 | 08/04/2000 |
| SEQ ID NO:4762 | 60/223,416 | 08/04/2000 |
| SEQ ID NO:4763 | 60/223,416 | 08/04/2000 |
| SEQ ID NO:4764 | 60/223,416 | 08/04/2000 |
| SEQ ID NO:4765 | 60/223,416 | 08/04/2000 |
| SEQ ID NO:4766 | 60/223,416 | 08/04/2000 |
| SEQ ID NO:4767 | 60/223,416 | 08/04/2000 |
| SEQ ID NO:4768 | 60/223,416 | 08/04/2000 |
| SEQ ID NO:4769 | 60/223,416 | 08/04/2000 |
| SEQ ID NO:4770 | 60/223,416 | 08/04/2000 |
| SEQ ID NO:4771 | 60/223,416 | 08/04/2000 |
| SEQ ID NO:4772 | 60/223,416 | 08/04/2000 |
| SEQ ID NO:4773 | 60/223,416 | 08/04/2000 |
| SEQ ID NO:4774 | 60/223,416 | 08/04/2000 |
| SEQ ID NO:4775 | 60/223,416 | 08/04/2000 |
| SEQ ID NO:4776 | 60/223,416 | 08/04/2000 |
| SEQ ID NO:4777 | 60/223,416 | 08/04/2000 |
| SEQ ID NO:4778 | 60/223,416 | 08/04/2000 |
| SEQ ID NO:4779 | 60/223,416 | 08/04/2000 |
| SEQ ID NO:4780 | 60/223,416 | 08/04/2000 |
| SEQ ID NO:4781 | 60/223,416 | 08/04/2000 |
| SEQ ID NO:4782 | 60/223,416 | 08/04/2000 |
| SEQ ID NO:4783 | 60/223,416 | 08/04/2000 |
| SEQ ID NO:4784 | 60/223,416 | 08/04/2000 |
| SEQ ID NO:4785 | 60/223,416 | 08/04/2000 |
| SEQ ID NO:4786 | 60/223,416 | 08/04/2000 |
| SEQ ID NO:4787 | 60/223,416 | 08/04/2000 |
| SEQ ID NO:4788 | 60/223,416 | 08/04/2000 |
| SEQ ID NO:4789 | 60/223,416 | 08/04/2000 |
| SEQ ID NO:4790 | 60/223,416 | 08/04/2000 |
| SEQ ID NO:4791 | 60/223,416 | 08/04/2000 |
| SEQ ID NO:4792 | 60/223,416 | 08/04/2000 |
| SEQ ID NO:4793 | 60/223,416 | 08/04/2000 |
| SEQ ID NO:4794 | 60/223,416 | 08/04/2000 |
| SEQ ID NO:4795 | 60/223,416 | 08/04/2000 |
| SEQ ID NO:4796 | 60/223,416 | 08/04/2000 |
| SEQ ID NO:4797 | 60/223,416 | 08/04/2000 |
| SEQ ID NO:4798 | 60/223,416 | 08/04/2000 |
| SEQ ID NO:4799 | 60/223,416 | 08/04/2000 |
| SEQ ID NO:4800 | 60/223,416 | 08/04/2000 |
| SEQ ID NO:4801 | 60/223,416 | 08/04/2000 |
| SEQ ID NO:4802 | 60/223,416 | 08/04/2000 |
| SEQ ID NO:4803 | 60/223,416 | 08/04/2000 |
| SEQ ID NO:4804 | 60/223,416 | 08/04/2000 |
| SEQ ID NO:4805 | 60/223,416 | 08/04/2000 |
| SEQ ID NO:4806 | 60/223,416 | 08/04/2000 |
| SEQ ID NO:4807 | 60/223,416 | 08/04/2000 |
| SEQ ID NO:4808 | 60/223,416 | 08/04/2000 |
| SEQ ID NO:4809 | 60/223,416 | 08/04/2000 |
| SEQ ID NO:4810 | 60/223,416 | 08/04/2000 |
| SEQ ID NO:4811 | 60/223,416 | 08/04/2000 |
| SEQ ID NO:4812 | 60/223,416 | 08/04/2000 |
| SEQ ID NO:4813 | 60/223,416 | 08/04/2000 |
| SEQ ID NO:4814 | 60/223,416 | 08/04/2000 |
| SEQ ID NO:4815 | 60/223,416 | 08/04/2000 |
| SEQ ID NO:4816 | 60/223,416 | 08/04/2000 |
| SEQ ID NO:4817 | 60/223,416 | 08/04/2000 |
| SEQ ID NO:4818 | 60/223,416 | 08/04/2000 |
| SEQ ID NO:4819 | 60/223,416 | 08/04/2000 |
| SEQ ID NO:4820 | 60/223,416 | 08/04/2000 |
| SEQ ID NO:4821 | 60/223,416 | 08/04/2000 |
| SEQ ID NO:4822 | 60/223,416 | 08/04/2000 |
| SEQ ID NO:4823 | 60/223,416 | 08/04/2000 |
| SEQ ID NO:4824 | 60/223,416 | 08/04/2000 |
| SEQ ID NO:4825 | 60/223,416 | 08/04/2000 |
| SEQ ID NO:4826 | 60/223,416 | 08/04/2000 |
| SEQ ID NO:4827 | 60/223,416 | 08/04/2000 |
| SEQ ID NO:4828 | 60/223,416 | 08/04/2000 |
| SEQ ID NO:4829 | 60/223,416 | 08/04/2000 |
| SEQ ID NO:4830 | 60/223,416 | 08/04/2000 |
| SEQ ID NO:4831 | 60/223,416 | 08/04/2000 |
| SEQ ID NO:4832 | 60/223,416 | 08/04/2000 |
| SEQ ID NO:4833 | 60/223,416 | 08/04/2000 |
| SEQ ID NO:4834 | 60/223,416 | 08/04/2000 |
| SEQ ID NO:4835 | 60/223,416 | 08/04/2000 |
| SEQ ID NO:4836 | 60/223,416 | 08/04/2000 |
| SEQ ID NO:4837 | 60/223,416 | 08/04/2000 |
| SEQ ID NO:4838 | 60/223,416 | 08/04/2000 |
| SEQ ID NO:4839 | 60/223,416 | 08/04/2000 |
| SEQ ID NO:4840 | 60/223,416 | 08/04/2000 |
| SEQ ID NO:4841 | 60/223,416 | 08/04/2000 |
| SEQ ID NO:4842 | 60/223,416 | 08/04/2000 |
| SEQ ID NO:4843 | 60/223,416 | 08/04/2000 |
| SEQ ID NO:4844 | 60/223,416 | 08/04/2000 |
| SEQ ID NO:4845 | 60/223,416 | 08/04/2000 |
| SEQ ID NO:4846 | 60/223,416 | 08/04/2000 |
| SEQ ID NO:4847 | 60/223,416 | 08/04/2000 |
| SEQ ID NO:4848 | 60/223,416 | 08/04/2000 |
| SEQ ID NO:4849 | 60/223,416 | 08/04/2000 |
| SEQ ID NO:4850 | 60/223,416 | 08/04/2000 |
| SEQ ID NO:4851 | 60/223,416 | 08/04/2000 |
| SEQ ID NO:4852 | 60/223,416 | 08/04/2000 |
| SEQ ID NO:4853 | 60/223,416 | 08/04/2000 |
| SEQ ID NO:4854 | 60/223,416 | 08/04/2000 |
| SEQ ID NO:4855 | 60/223,416 | 08/04/2000 |
| SEQ ID NO:4856 | 60/223,416 | 08/04/2000 |
| SEQ ID NO:4857 | 60/223,416 | 08/04/2000 |
| SEQ ID NO:4858 | 60/223,416 | 08/04/2000 |
| SEQ ID NO:4859 | 60/223,416 | 08/04/2000 |
| SEQ ID NO:4860 | 60/223,416 | 08/04/2000 |
| SEQ ID NO:4861 | 60/223,416 | 08/04/2000 |
| SEQ ID NO:4862 | 60/223,416 | 08/04/2000 |
| SEQ ID NO:4863 | 60/223,416 | 08/04/2000 |
| SEQ ID NO:4864 | 60/223,416 | 08/04/2000 |
| SEQ ID NO:4865 | 60/223,416 | 08/04/2000 |
| SEQ ID NO:4866 | 60/223,416 | 08/04/2000 |
| SEQ ID NO:4867 | 60/223,416 | 08/04/2000 |
| SEQ ID NO:4868 | 60/223,416 | 08/04/2000 |
| SEQ ID NO:4869 | 60/223,416 | 08/04/2000 |
| SEQ ID NO:4870 | 60/223,416 | 08/04/2000 |
| SEQ ID NO:4871 | 60/223,416 | 08/04/2000 |
| SEQ ID NO:4872 | 60/223,416 | 08/04/2000 |
| SEQ ID NO:4873 | 60/223,416 | 08/04/2000 |
| SEQ ID NO:4874 | 60/223,416 | 08/04/2000 |
| SEQ ID NO:4875 | 60/223,416 | 08/04/2000 |
| SEQ ID NO:4876 | 60/223,416 | 08/04/2000 |
| SEQ ID NO:4877 | 60/223,416 | 08/04/2000 |
| SEQ ID NO:4878 | 60/223,416 | 08/04/2000 |
| SEQ ID NO:4879 | 60/223,416 | 08/04/2000 |
| SEQ ID NO:4880 | 60/223,416 | 08/04/2000 |
| SEQ ID NO:4881 | 60/223,416 | 08/04/2000 |
| SEQ ID NO:4882 | 60/223,416 | 08/04/2000 |
| SEQ ID NO:4883 | 60/223,416 | 08/04/2000 |
| SEQ ID NO:4884 | 60/223,416 | 08/04/2000 |
| SEQ ID NO:4885 | 60/223,416 | 08/04/2000 |
| SEQ ID NO:4886 | 60/223,416 | 08/04/2000 |
| SEQ ID NO:4887 | 60/223,416 | 08/04/2000 |
| SEQ ID NO:4888 | 60/223,416 | 08/04/2000 |
| SEQ ID NO:4889 | 60/223,416 | 08/04/2000 |
| SEQ ID NO:4890 | 60/223,416 | 08/04/2000 |
| SEQ ID NO:4891 | 60/223,416 | 08/04/2000 |
| SEQ ID NO:4892 | 60/223,416 | 08/04/2000 |
| SEQ ID NO:4893 | 60/223,416 | 08/04/2000 |
| SEQ ID NO:4894 | 60/223,416 | 08/04/2000 |
| SEQ ID NO:4895 | 60/223,416 | 08/04/2000 |
| SEQ ID NO:4896 | 60/223,416 | 08/04/2000 |
| SEQ ID NO:4897 | 60/223,416 | 08/04/2000 |
| SEQ ID NO:4898 | 60/223,416 | 08/04/2000 |
| SEQ ID NO:4899 | 60/223,416 | 08/04/2000 |
| SEQ ID NO:4900 | 60/223,416 | 08/04/2000 |
| SEQ ID NO:4901 | 60/223,416 | 08/04/2000 |
| SEQ ID NO:4902 | 60/223,416 | 08/04/2000 |
| SEQ ID NO:4903 | 60/223,416 | 08/04/2000 |
| SEQ ID NO:4904 | 60/223,416 | 08/04/2000 |
| SEQ ID NO:4905 | 60/223,416 | 08/04/2000 |
| SEQ ID NO:4906 | 60/223,416 | 08/04/2000 |
| SEQ ID NO:4907 | 60/223,416 | 08/04/2000 |
| SEQ ID NO:4908 | 60/223,416 | 08/04/2000 |
| SEQ ID NO:4909 | 60/223,416 | 08/04/2000 |
| SEQ ID NO:4910 | 60/223,416 | 08/04/2000 |
| SEQ ID NO:4911 | 60/223,416 | 08/04/2000 |
| SEQ ID NO:4912 | 60/223,416 | 08/04/2000 |
| SEQ ID NO:4913 | 60/223,416 | 08/04/2000 |
| SEQ ID NO:4914 | 60/223,416 | 08/04/2000 |
| SEQ ID NO:4915 | 60/223,416 | 08/04/2000 |
| SEQ ID NO:4916 | 60/223,416 | 08/04/2000 |
| SEQ ID NO:4917 | 60/223,416 | 08/04/2000 |
| SEQ ID NO:4918 | 60/223,416 | 08/04/2000 |
| SEQ ID NO:4919 | 60/223,416 | 08/04/2000 |
| SEQ ID NO:4920 | 60/223,416 | 08/04/2000 |
| SEQ ID NO:4921 | 60/223,416 | 08/04/2000 |
| SEQ ID NO:4922 | 60/223,416 | 08/04/2000 |
| SEQ ID NO:4923 | 60/223,416 | 08/04/2000 |
| SEQ ID NO:4924 | 60/223,416 | 08/04/2000 |
| SEQ ID NO:4925 | 60/223,416 | 08/04/2000 |
| SEQ ID NO:4926 | 60/223,416 | 08/04/2000 |
| SEQ ID NO:4927 | 60/223,416 | 08/04/2000 |
| SEQ ID NO:4928 | 60/223,416 | 08/04/2000 |
| SEQ ID NO:4929 | 60/223,416 | 08/04/2000 |
| SEQ ID NO:4930 | 60/223,416 | 08/04/2000 |
| SEQ ID NO:4931 | 60/223,416 | 08/04/2000 |
| SEQ ID NO:4932 | 60/223,416 | 08/04/2000 |
| SEQ ID NO:4933 | 60/223,416 | 08/04/2000 |
| SEQ ID NO:4934 | 60/223,416 | 08/04/2000 |
| SEQ ID NO:4935 | 60/223,416 | 08/04/2000 |
| SEQ ID NO:4936 | 60/223,416 | 08/04/2000 |
| SEQ ID NO:4937 | 60/223,416 | 08/04/2000 |
| SEQ ID NO:4938 | 60/223,416 | 08/04/2000 |
| SEQ ID NO:4939 | 60/223,416 | 08/04/2000 |
| SEQ ID NO:4940 | 60/223,416 | 08/04/2000 |
| SEQ ID NO:4941 | 60/223,416 | 08/04/2000 |
| SEQ ID NO:4942 | 60/223,416 | 08/04/2000 |
| SEQ ID NO:4943 | 60/223,416 | 08/04/2000 |
| SEQ ID NO:4944 | 60/223,416 | 08/04/2000 |
| SEQ ID NO:4945 | 60/223,416 | 08/04/2000 |
| SEQ ID NO:4946 | 60/223,416 | 08/04/2000 |
| SEQ ID NO:4947 | 60/223,416 | 08/04/2000 |
| SEQ ID NO:4948 | 60/223,416 | 08/04/2000 |
| SEQ ID NO:4949 | 60/223,416 | 08/04/2000 |
| SEQ ID NO:4950 | 60/223,416 | 08/04/2000 |
| SEQ ID NO:4951 | 60/223,416 | 08/04/2000 |
| SEQ ID NO:4952 | 60/223,416 | 08/04/2000 |
| SEQ ID NO:4953 | 60/223,416 | 08/04/2000 |
| SEQ ID NO:4954 | 60/223,416 | 08/04/2000 |
| SEQ ID NO:4955 | 60/223,416 | 08/04/2000 |
| SEQ ID NO:4956 | 60/223,416 | 08/04/2000 |
| SEQ ID NO:4957 | 60/223,416 | 08/04/2000 |
| SEQ ID NO:4958 | 60/223,416 | 08/04/2000 |
| SEQ ID NO:4959 | 60/223,416 | 08/04/2000 |
| SEQ ID NO:4960 | 60/223,416 | 08/04/2000 |
| SEQ ID NO:4961 | 60/223,416 | 08/04/2000 |
| SEQ ID NO:4962 | 60/223,416 | 08/04/2000 |
| SEQ ID NO:4963 | 60/223,416 | 08/04/2000 |
| SEQ ID NO:4964 | 60/223,416 | 08/04/2000 |
| SEQ ID NO:4965 | 60/223,416 | 08/04/2000 |
| SEQ ID NO:4966 | 60/223,416 | 08/04/2000 |
| SEQ ID NO:4967 | 60/223,416 | 08/04/2000 |
| SEQ ID NO:4968 | 60/223,416 | 08/04/2000 |
| SEQ ID NO:4969 | 60/223,416 | 08/04/2000 |
| SEQ ID NO:4970 | 60/223,416 | 08/04/2000 |
| SEQ ID NO:4971 | 60/223,416 | 08/04/2000 |
| SEQ ID NO:4972 | 60/223,416 | 08/04/2000 |
| SEQ ID NO:4973 | 60/223,416 | 08/04/2000 |
| SEQ ID NO:4974 | 60/223,416 | 08/04/2000 |
| SEQ ID NO:4975 | 60/223,416 | 08/04/2000 |
| SEQ ID NO:4976 | 60/223,416 | 08/04/2000 |
| SEQ ID NO:4977 | 60/223,416 | 08/04/2000 |
| SEQ ID NO:4978 | 60/223,416 | 08/04/2000 |
| SEQ ID NO:4979 | 60/223,416 | 08/04/2000 |
| SEQ ID NO:4980 | 60/223,416 | 08/04/2000 |
| SEQ ID NO:4981 | 60/223,416 | 08/04/2000 |
| SEQ ID NO:4982 | 60/223,416 | 08/04/2000 |
| SEQ ID NO:4983 | 60/223,416 | 08/04/2000 |
| SEQ ID NO:4984 | 60/223,416 | 08/04/2000 |
| SEQ ID NO:4985 | 60/223,416 | 08/04/2000 |
| SEQ ID NO:4986 | 60/223,416 | 08/04/2000 |
| SEQ ID NO:4987 | 60/223,416 | 08/04/2000 |
| SEQ ID NO:4988 | 60/223,416 | 08/04/2000 |
| SEQ ID NO:4989 | 60/223,416 | 08/04/2000 |
| SEQ ID NO:4990 | 60/223,416 | 08/04/2000 |
| SEQ ID NO:4991 | 60/223,416 | 08/04/2000 |
| SEQ ID NO:4992 | 60/223,416 | 08/04/2000 |
| SEQ ID NO:4993 | 60/223,416 | 08/04/2000 |
| SEQ ID NO:4994 | 60/223,416 | 08/04/2000 |
| SEQ ID NO:4995 | 60/223,416 | 08/04/2000 |
| SEQ ID NO:4996 | 60/223,416 | 08/04/2000 |
| SEQ ID NO:4997 | 60/223,416 | 08/04/2000 |
| SEQ ID NO:4998 | 60/223,416 | 08/04/2000 |
| SEQ ID NO:4999 | 60/223,416 | 08/04/2000 |
| SEQ ID NO:5000 | 60/223,416 | 08/04/2000 |
| SEQ ID NO:5001 | 60/223,416 | 08/04/2000 |
| SEQ ID NO:5002 | 60/223,416 | 08/04/2000 |
| SEQ ID NO:5003 | 60/223,416 | 08/04/2000 |
| SEQ ID NO:5004 | 60/223,416 | 08/04/2000 |
| SEQ ID NO:5005 | 60/223,416 | 08/04/2000 |
| SEQ ID NO:5006 | 60/223,416 | 08/04/2000 |
| SEQ ID NO:5007 | 60/223,416 | 08/04/2000 |
| SEQ ID NO:5008 | 60/223,416 | 08/04/2000 |
| SEQ ID NO:5009 | 60/223,416 | 08/04/2000 |
| SEQ ID NO:5010 | 60/223,416 | 08/04/2000 |
| SEQ ID NO:5011 | 60/223,416 | 08/04/2000 |
| SEQ ID NO:5012 | 60/223,416 | 08/04/2000 |
| SEQ ID NO:5013 | 60/223,416 | 08/04/2000 |
| SEQ ID NO:5014 | 60/223,416 | 08/04/2000 |
| SEQ ID NO:5015 | 60/223,416 | 08/04/2000 |
| SEQ ID NO:5016 | 60/223,416 | 08/04/2000 |
| SEQ ID NO:5017 | 60/223,416 | 08/04/2000 |
| SEQ ID NO:5018 | 60/223,416 | 08/04/2000 |
| SEQ ID NO:5019 | 60/223,416 | 08/04/2000 |
| SEQ ID NO:5020 | 60/223,416 | 08/04/2000 |
| SEQ ID NO:5021 | 60/223,416 | 08/04/2000 |
| SEQ ID NO:5022 | 60/223,416 | 08/04/2000 |
| SEQ ID NO:5023 | 60/223,416 | 08/04/2000 |
| SEQ ID NO:5024 | 60/223,416 | 08/04/2000 |
| SEQ ID NO:5025 | 60/223,416 | 08/04/2000 |
| SEQ ID NO:5026 | 60/223,416 | 08/04/2000 |
| SEQ ID NO:5027 | 60/223,416 | 08/04/2000 |
| SEQ ID NO:5028 | 60/223,416 | 08/04/2000 |
| SEQ ID NO:5029 | 60/223,416 | 08/04/2000 |
| SEQ ID NO:5030 | 60/223,416 | 08/04/2000 |
| SEQ ID NO:5031 | 60/223,416 | 08/04/2000 |
| SEQ ID NO:5032 | 60/223,416 | 08/04/2000 |
| SEQ ID NO:5033 | 60/223,416 | 08/04/2000 |
| SEQ ID NO:5034 | 60/223,416 | 08/04/2000 |
| SEQ ID NO:5035 | 60/223,416 | 08/04/2000 |
| SEQ ID NO:5036 | 60/223,416 | 08/04/2000 |
| SEQ ID NO:5037 | 60/223,416 | 08/04/2000 |
| SEQ ID NO:5038 | 60/223,416 | 08/04/2000 |
| SEQ ID NO:5039 | 60/223,416 | 08/04/2000 |
| SEQ ID NO:5040 | 60/223,416 | 08/04/2000 |
| SEQ ID NO:5041 | 60/223,416 | 08/04/2000 |
| SEQ ID NO:5042 | 60/223,416 | 08/04/2000 |
| SEQ ID NO:5043 | 60/223,416 | 08/04/2000 |
| SEQ ID NO:5044 | 60/223,416 | 08/04/2000 |
| SEQ ID NO:5045 | 60/223,416 | 08/04/2000 |
| SEQ ID NO:5046 | 60/223,416 | 08/04/2000 |
| SEQ ID NO:5047 | 60/223,416 | 08/04/2000 |
| SEQ ID NO:5048 | 60/223,416 | 08/04/2000 |
| SEQ ID NO:5049 | 60/223,416 | 08/04/2000 |
| SEQ ID NO:5050 | 60/223,416 | 08/04/2000 |
| SEQ ID NO:5051 | 60/223,416 | 08/04/2000 |
| SEQ ID NO:5052 | 60/223,416 | 08/04/2000 |
| SEQ ID NO:5053 | 60/223,416 | 08/04/2000 |
| SEQ ID NO:5054 | 60/223,416 | 08/04/2000 |
| SEQ ID NO:5055 | 60/223,416 | 08/04/2000 |
| SEQ ID NO:5056 | 60/223,416 | 08/04/2000 |
| SEQ ID NO:5057 | 60/223,416 | 08/04/2000 |
| SEQ ID NO:5058 | 60/223,416 | 08/04/2000 |
| SEQ ID NO:5059 | 60/223,416 | 08/04/2000 |
| SEQ ID NO:5060 | 60/223,416 | 08/04/2000 |
| SEQ ID NO:5061 | 60/223,416 | 08/04/2000 |
| SEQ ID NO:5062 | 60/223,416 | 08/04/2000 |
| SEQ ID NO:5063 | 60/223,416 | 08/04/2000 |
| SEQ ID NO:5064 | 60/223,416 | 08/04/2000 |
| SEQ ID NO:5065 | 60/223,416 | 08/04/2000 |
| SEQ ID NO:5066 | 60/223,416 | 08/04/2000 |
| SEQ ID NO:5067 | 60/223,416 | 08/04/2000 |
| SEQ ID NO:5068 | 60/223,416 | 08/04/2000 |
| SEQ ID NO:5069 | 60/223,416 | 08/04/2000 |
| SEQ ID NO:5070 | 60/223,416 | 08/04/2000 |
| SEQ ID NO:5071 | 60/223,416 | 08/04/2000 |
| SEQ ID NO:5072 | 60/223,416 | 08/04/2000 |
| SEQ ID NO:5080 | 60/223,416 | 08/04/2000 |
| SEQ ID NO:5081 | 60/223,416 | 08/04/2000 |
| SEQ ID NO:5082 | 60/223,416 | 08/04/2000 |
| SEQ ID NO:5083 | 60/223,416 | 08/04/2000 |
| SEQ ID NO:5084 | 60/223,416 | 08/04/2000 |
| SEQ ID NO:5085 | 60/223,416 | 08/04/2000 |
| SEQ ID NO:5086 | 60/223,416 | 08/04/2000 |
| SEQ ID NO:5087 | 60/223,416 | 08/04/2000 |
| SEQ ID NO:5088 | 60/223,416 | 08/04/2000 |
| SEQ ID NO:5089 | 60/223,416 | 08/04/2000 |
| SEQ ID NO:5090 | 60/223,416 | 08/04/2000 |
| SEQ ID NO:5091 | 60/223,416 | 08/04/2000 |
| SEQ ID NO:5092 | 60/223,416 | 08/04/2000 |
| SEQ ID NO:5093 | 60/223,416 | 08/04/2000 |
| SEQ ID NO:5094 | 60/223,416 | 08/04/2000 |
| SEQ ID NO:5095 | 60/223,416 | 08/04/2000 |
| SEQ ID NO:5096 | 60/223,416 | 08/04/2000 |
| SEQ ID NO:5097 | 60/223,416 | 08/04/2000 |
| SEQ ID NO:5098 | 60/223,416 | 08/04/2000 |
| SEQ ID NO:5099 | 60/223,416 | 08/04/2000 |
| SEQ ID NO:5100 | 60/223,416 | 08/04/2000 |
| SEQ ID NO:5101 | 60/223,416 | 08/04/2000 |
| SEQ ID NO:5102 | 60/223,416 | 08/04/2000 |
| SEQ ID NO:5103 | 60/223,416 | 08/04/2000 |
| SEQ ID NO:5104 | 60/223,416 | 08/04/2000 |
| SEQ ID NO:5105 | 60/223,416 | 08/04/2000 |
| SEQ ID NO:5106 | 60/223,416 | 08/04/2000 |
| SEQ ID NO:5107 | 60/223,416 | 08/04/2000 |
| SEQ ID NO:5108 | 60/223,416 | 08/04/2000 |
| SEQ ID NO:5109 | 60/223,416 | 08/04/2000 |
| SEQ ID NO:5110 | 60/223,416 | 08/04/2000 |
| SEQ ID NO:5111 | 60/223,416 | 08/04/2000 |
| SEQ ID NO:5112 | 60/223,416 | 08/04/2000 |
| SEQ ID NO:5113 | 60/223,416 | 08/04/2000 |
| SEQ ID NO:5114 | 60/223,416 | 08/04/2000 |
| SEQ ID NO:5115 | 60/223,416 | 08/04/2000 |
| SEQ ID NO:5116 | 60/223,416 | 08/04/2000 |
| SEQ ID NO:5117 | 60/223,416 | 08/04/2000 |
| SEQ ID NO:5118 | 60/223,416 | 08/04/2000 |
| SEQ ID NO:5119 | 60/223,416 | 08/04/2000 |
| SEQ ID NO:5120 | 60/223,416 | 08/04/2000 |
| SEQ ID NO:5121 | 60/223,416 | 08/04/2000 |
| SEQ ID NO:5122 | 60/223,416 | 08/04/2000 |
| SEQ ID NO:5123 | 60/223,416 | 08/04/2000 |
| SEQ ID NO:5124 | 60/223,416 | 08/04/2000 |
| SEQ ID NO:5125 | 60/223,416 | 08/04/2000 |
| SEQ ID NO:5126 | 60/223,416 | 08/04/2000 |
| SEQ ID NO:5127 | 60/223,416 | 08/04/2000 |
| SEQ ID NO:5128 | 60/223,416 | 08/04/2000 |
| SEQ ID NO:5129 | 60/223,416 | 08/04/2000 |
| SEQ ID NO:5130 | 60/223,416 | 08/04/2000 |
| SEQ ID NO:5131 | 60/223,416 | 08/04/2000 |
| SEQ ID NO:5132 | 60/223,416 | 08/04/2000 |
| SEQ ID NO:5133 | 60/223,416 | 08/04/2000 |
| SEQ ID NO:5134 | 60/223,416 | 08/04/2000 |
| SEQ ID NO:5135 | 60/223,416 | 08/04/2000 |
| SEQ ID NO:5136 | 60/223,416 | 08/04/2000 |
| SEQ ID NO:5137 | 60/223,416 | 08/04/2000 |
| SEQ ID NO:5138 | 60/223,416 | 08/04/2000 |
| SEQ ID NO:5139 | 60/223,416 | 08/04/2000 |
| SEQ ID NO:5140 | 60/223,416 | 08/04/2000 |
| SEQ ID NO:5141 | 60/223,416 | 08/04/2000 |
| SEQ ID NO:5142 | 60/223,416 | 08/04/2000 |
| SEQ ID NO:5143 | 60/223,416 | 08/04/2000 |
| SEQ ID NO:5144 | 60/223,416 | 08/04/2000 |
| SEQ ID NO:5145 | 60/223,416 | 08/04/2000 |
| SEQ ID NO:5146 | 60/223,416 | 08/04/2000 |
| SEQ ID NO:5147 | 60/223,416 | 08/04/2000 |
| SEQ ID NO:5148 | 60/223,416 | 08/04/2000 |
| SEQ ID NO:5149 | 60/223,416 | 08/04/2000 |
| SEQ ID NO:5150 | 60/223,416 | 08/04/2000 |
| SEQ ID NO:5151 | 60/223,416 | 08/04/2000 |
| SEQ ID NO:5152 | 60/223,416 | 08/04/2000 |
| SEQ ID NO:5153 | 60/223,416 | 08/04/2000 |
| SEQ ID NO:5154 | 60/223,416 | 08/04/2000 |
| SEQ ID NO:5155 | 60/223,416 | 08/04/2000 |
| SEQ ID NO:5156 | 60/223,416 | 08/04/2000 |
| SEQ ID NO:5157 | 60/223,416 | 08/04/2000 |
| SEQ ID NO:5158 | 60/223,416 | 08/04/2000 |
| SEQ ID NO:5159 | 60/223,416 | 08/04/2000 |
| SEQ ID NO:5160 | 60/223,416 | 08/04/2000 |
| SEQ ID NO:5161 | 60/223,416 | 08/04/2000 |
| SEQ ID NO:5162 | 60/223,416 | 08/04/2000 |
| SEQ ID NO:5163 | 60/223,416 | 08/04/2000 |
| SEQ ID NO:5164 | 60/223,416 | 08/04/2000 |
| SEQ ID NO:5165 | 60/223,416 | 08/04/2000 |
| SEQ ID NO:5166 | 60/223,416 | 08/04/2000 |
| SEQ ID NO:5167 | 60/223,416 | 08/04/2000 |
| SEQ ID NO:5168 | 60/223,416 | 08/04/2000 |
| SEQ ID NO:5169 | 60/223,416 | 08/04/2000 |
| SEQ ID NO:5170 | 60/223,416 | 08/04/2000 |
| SEQ ID NO:5171 | 60/223,416 | 08/04/2000 |
| SEQ ID NO:5172 | 60/223,416 | 08/04/2000 |
| SEQ ID NO:5173 | 60/223,416 | 08/04/2000 |
| SEQ ID NO:5174 | 60/223,416 | 08/04/2000 |
| SEQ ID NO:5175 | 60/223,416 | 08/04/2000 |
| SEQ ID NO:5176 | 60/223,416 | 08/04/2000 |
| SEQ ID NO:5177 | 60/223,416 | 08/04/2000 |
| SEQ ID NO:5178 | 60/223,416 | 08/04/2000 |
| SEQ ID NO:5179 | 60/223,416 | 08/04/2000 |
| SEQ ID NO:5180 | 60/223,416 | 08/04/2000 |
| SEQ ID NO:5181 | 60/223,416 | 08/04/2000 |
| SEQ ID NO:5182 | 60/223,416 | 08/04/2000 |
| SEQ ID NO:5183 | 60/223,416 | 08/04/2000 |
| SEQ ID NO:5184 | 60/223,416 | 08/04/2000 |
| SEQ ID NO:5185 | 60/223,416 | 08/04/2000 |
| SEQ ID NO:5186 | 60/223,416 | 08/04/2000 |
| SEQ ID NO:5187 | 60/223,416 | 08/04/2000 |
| SEQ ID NO:5188 | 60/223,416 | 08/04/2000 |
| SEQ ID NO:5189 | 60/223,416 | 08/04/2000 |
| SEQ ID NO:5190 | 60/223,416 | 08/04/2000 |
| SEQ ID NO:5191 | 60/223,416 | 08/04/2000 |
| SEQ ID NO:5192 | 60/223,416 | 08/04/2000 |
| SEQ ID NO:5193 | 60/223,416 | 08/04/2000 |
| SEQ ID NO:5194 | 60/223,416 | 08/04/2000 |
| SEQ ID NO:5195 | 60/223,416 | 08/04/2000 |
| SEQ ID NO:5196 | 60/223,416 | 08/04/2000 |
| SEQ ID NO:5197 | 60/223,416 | 08/04/2000 |
| SEQ ID NO:5198 | 60/223,416 | 08/04/2000 |
| SEQ ID NO:5199 | 60/223,416 | 08/04/2000 |
| SEQ ID NO:5200 | 60/223,416 | 08/04/2000 |
| SEQ ID NO:5201 | 60/223,416 | 08/04/2000 |
| SEQ ID NO:5202 | 60/223,416 | 08/04/2000 |
| SEQ ID NO:5203 | 60/223,416 | 08/04/2000 |
| SEQ ID NO:5204 | 60/223,416 | 08/04/2000 |
| SEQ ID NO:5205 | 60/223,416 | 08/04/2000 |
| SEQ ID NO:5206 | 60/223,416 | 08/04/2000 |
| SEQ ID NO:5207 | 60/223,416 | 08/04/2000 |
| SEQ ID NO:5208 | 60/223,416 | 08/04/2000 |
| SEQ ID NO:5209 | 60/223,416 | 08/04/2000 |
| SEQ ID NO:5210 | 60/223,416 | 08/04/2000 |
| SEQ ID NO:5211 | 60/223,416 | 08/04/2000 |
| SEQ ID NO:5212 | 60/223,416 | 08/04/2000 |
| SEQ ID NO:5213 | 60/223,416 | 08/04/2000 |
| SEQ ID NO:5214 | 60/223,416 | 08/04/2000 |
| SEQ ID NO:5215 | 60/223,416 | 08/04/2000 |
| SEQ ID NO:5216 | 60/223,416 | 08/04/2000 |
| SEQ ID NO:5217 | 60/223,416 | 08/04/2000 |
| SEQ ID NO:5218 | 60/223,416 | 08/04/2000 |
| SEQ ID NO:5219 | 60/223,416 | 08/04/2000 |
| SEQ ID NO:5220 | 60/223,416 | 08/04/2000 |
| SEQ ID NO:5221 | 60/223,416 | 08/04/2000 |
| SEQ ID NO:5222 | 60/223,416 | 08/04/2000 |
| SEQ ID NO:5223 | 60/223,416 | 08/04/2000 |
| SEQ ID NO:5224 | 60/223,416 | 08/04/2000 |
| SEQ ID NO:5225 | 60/223,416 | 08/04/2000 |
| SEQ ID NO:5226 | 60/223,416 | 08/04/2000 |
| SEQ ID NO:5227 | 60/223,416 | 08/04/2000 |
| SEQ ID NO:5228 | 60/223,416 | 08/04/2000 |
| SEQ ID NO:5229 | 60/223,416 | 08/04/2000 |
| SEQ ID NO:5230 | 60/223,416 | 08/04/2000 |
| SEQ ID NO:5231 | 60/223,416 | 08/04/2000 |
| SEQ ID NO:5232 | 60/223,416 | 08/04/2000 |
| SEQ ID NO:5233 | 60/223,416 | 08/04/2000 |
| SEQ ID NO:5234 | 60/223,416 | 08/04/2000 |
| SEQ ID NO:5235 | 60/223,416 | 08/04/2000 |
| SEQ ID NO:5236 | 60/223,416 | 08/04/2000 |
| SEQ ID NO:5237 | 60/223,416 | 08/04/2000 |
| SEQ ID NO:5238 | 60/223,416 | 08/04/2000 |
| SEQ ID NO:5239 | 60/223,416 | 08/04/2000 |
| SEQ ID NO:5240 | 60/223,416 | 08/04/2000 |
| SEQ ID NO:5241 | 60/223,416 | 08/04/2000 |
| SEQ ID NO:5242 | 60/223,416 | 08/04/2000 |
| SEQ ID NO:5243 | 60/223,416 | 08/04/2000 |
| SEQ ID NO:5244 | 60/223,416 | 08/04/2000 |
| SEQ ID NO:5245 | 60/223,416 | 08/04/2000 |
| SEQ ID NO:5246 | 60/223,416 | 08/04/2000 |
| SEQ ID NO:5247 | 60/223,416 | 08/04/2000 |
| SEQ ID NO:5248 | 60/223,416 | 08/04/2000 |
| SEQ ID NO:5249 | 60/223,416 | 08/04/2000 |
| SEQ ID NO:5250 | 60/223,416 | 08/04/2000 |
| SEQ ID NO:5251 | 60/223,416 | 08/04/2000 |
| SEQ ID NO:5252 | 60/223,416 | 08/04/2000 |
| SEQ ID NO:5253 | 60/223,416 | 08/04/2000 |
| SEQ ID NO:5254 | 60/223,416 | 08/04/2000 |
| SEQ ID NO:5255 | 60/223,416 | 08/04/2000 |
| SEQ ID NO:5256 | 60/223,416 | 08/04/2000 |
| SEQ ID NO:5257 | 60/223,416 | 08/04/2000 |
| SEQ ID NO:5258 | 60/223,416 | 08/04/2000 |
| SEQ ID NO:5259 | 60/223,416 | 08/04/2000 |
| SEQ ID NO:5260 | 60/223,416 | 08/04/2000 |
| SEQ ID NO:5261 | 60/223,416 | 08/04/2000 |
| SEQ ID NO:5262 | 60/223,416 | 08/04/2000 |
| SEQ ID NO:5263 | 60/223,416 | 08/04/2000 |
| SEQ ID NO:5264 | 60/223,416 | 08/04/2000 |
| SEQ ID NO:5265 | 60/223,416 | 08/04/2000 |
| SEQ ID NO:5266 | 60/223,416 | 08/04/2000 |
| SEQ ID NO:5267 | 60/223,416 | 08/04/2000 |
| SEQ ID NO:5268 | 60/223,416 | 08/04/2000 |
| SEQ ID NO:5269 | 60/223,416 | 08/04/2000 |
| SEQ ID NO:5270 | 60/223,416 | 08/04/2000 |
| SEQ ID NO:5271 | 60/223,416 | 08/04/2000 |
| SEQ ID NO:5272 | 60/223,416 | 08/04/2000 |
| SEQ ID NO:5273 | 60/223,416 | 08/04/2000 |
| SEQ ID NO:5274 | 60/223,416 | 08/04/2000 |
| SEQ ID NO:5275 | 60/223,416 | 08/04/2000 |
| SEQ ID NO:5276 | 60/223,416 | 08/04/2000 |
| SEQ ID NO:5277 | 60/223,416 | 08/04/2000 |
| SEQ ID NO:5278 | 60/223,416 | 08/04/2000 |
| SEQ ID NO:5279 | 60/223,416 | 08/04/2000 |
| SEQ ID NO:5280 | 60/223,416 | 08/04/2000 |
| SEQ ID NO:5281 | 60/223,416 | 08/04/2000 |
| SEQ ID NO:5282 | 60/223,416 | 08/04/2000 |
| SEQ ID NO:5283 | 60/223,416 | 08/04/2000 |
| SEQ ID NO:5284 | 60/223,416 | 08/04/2000 |
| SEQ ID NO:5285 | 60/223,416 | 08/04/2000 |
| SEQ ID NO:5286 | 60/223,416 | 08/04/2000 |
| SEQ ID NO:5287 | 60/223,416 | 08/04/2000 |
| SEQ ID NO:5288 | 60/223,416 | 08/04/2000 |
| SEQ ID NO:5289 | 60/223,416 | 08/04/2000 |
| SEQ ID NO:5290 | 60/223,416 | 08/04/2000 |
| SEQ ID NO:5291 | 60/223,416 | 08/04/2000 |
| SEQ ID NO:5292 | 60/223,416 | 08/04/2000 |
| SEQ ID NO:5293 | 60/223,416 | 08/04/2000 |
| SEQ ID NO:5294 | 60/223,416 | 08/04/2000 |
| SEQ ID NO:5295 | 60/223,416 | 08/04/2000 |
| SEQ ID NO:5296 | 60/223,416 | 08/04/2000 |
| SEQ ID NO:5297 | 60/223,416 | 08/04/2000 |
| SEQ ID NO:5298 | 60/223,416 | 08/04/2000 |
| SEQ ID NO:5299 | 60/223,416 | 08/04/2000 |
| SEQ ID NO:5300 | 60/223,416 | 08/04/2000 |
| SEQ ID NO:5301 | 60/223,416 | 08/04/2000 |
| SEQ ID NO:5302 | 60/223,416 | 08/04/2000 |
| SEQ ID NO:5303 | 60/223,416 | 08/04/2000 |
| SEQ ID NO:5304 | 60/223,416 | 08/04/2000 |
| SEQ ID NO:5305 | 60/223,416 | 08/04/2000 |
| SEQ ID NO:5306 | 60/223,416 | 08/04/2000 |
| SEQ ID NO:5307 | 60/223,416 | 08/04/2000 |
| SEQ ID NO:5308 | 60/223,416 | 08/04/2000 |
| SEQ ID NO:5309 | 60/223,416 | 08/04/2000 |
| SEQ ID NO:5310 | 60/223,416 | 08/04/2000 |
| SEQ ID NO:5311 | 60/223,416 | 08/04/2000 |
| SEQ ID NO:5312 | 60/223,416 | 08/04/2000 |
| SEQ ID NO:5313 | 60/223,416 | 08/04/2000 |
| SEQ ID NO:5314 | 60/223,416 | 08/04/2000 |
| SEQ ID NO:5315 | 60/223,416 | 08/04/2000 |
| SEQ ID NO:5316 | 60/223,416 | 08/04/2000 |
| SEQ ID NO:5317 | 60/223,416 | 08/04/2000 |
| SEQ ID NO:5318 | 60/223,416 | 08/04/2000 |
| SEQ ID NO:5319 | 60/223,416 | 08/04/2000 |
| SEQ ID NO:5320 | 60/223,416 | 08/04/2000 |
| SEQ ID NO:5321 | 60/223,416 | 08/04/2000 |
| SEQ ID NO:5322 | 60/223,416 | 08/04/2000 |
| SEQ ID NO:5323 | 60/223,416 | 08/04/2000 |
| SEQ ID NO:5324 | 60/223,416 | 08/04/2000 |
| SEQ ID NO:5325 | 60/223,416 | 08/04/2000 |
| SEQ ID NO:5326 | 60/223,416 | 08/04/2000 |
| SEQ ID NO:5327 | 60/223,416 | 08/04/2000 |
| SEQ ID NO:5328 | 60/223,416 | 08/04/2000 |
| SEQ ID NO:5329 | 60/223,416 | 08/04/2000 |
| SEQ ID NO:5330 | 60/223,416 | 08/04/2000 |
| SEQ ID NO:5331 | 60/223,416 | 08/04/2000 |
| SEQ ID NO:5332 | 60/223,416 | 08/04/2000 |
| SEQ ID NO:5333 | 60/223,416 | 08/04/2000 |
| SEQ ID NO:5334 | 60/223,416 | 08/04/2000 |
| SEQ ID NO:5335 | 60/223,416 | 08/04/2000 |
| SEQ ID NO:5336 | 60/223,416 | 08/04/2000 |
| SEQ ID NO:5337 | 60/223,416 | 08/04/2000 |
| SEQ ID NO:5338 | 60/223,416 | 08/04/2000 |
| SEQ ID NO:5339 | 60/223,416 | 08/04/2000 |
| SEQ ID NO:5340 | 60/223,416 | 08/04/2000 |
| SEQ ID NO:5341 | 60/223,416 | 08/04/2000 |
| SEQ ID NO:5342 | 60/223,416 | 08/04/2000 |
| SEQ ID NO:5343 | 60/223,416 | 08/04/2000 |
| SEQ ID NO:5344 | 60/223,416 | 08/04/2000 |
| SEQ ID NO:5345 | 60/223,416 | 08/04/2000 |
| SEQ ID NO:5346 | 60/223,416 | 08/04/2000 |
| SEQ ID NO:5347 | 60/223,416 | 08/04/2000 |
| SEQ ID NO:5348 | 60/223,416 | 08/04/2000 |
| SEQ ID NO:5349 | 60/223,416 | 08/04/2000 |
| SEQ ID NO:5350 | 60/223,416 | 08/04/2000 |
| SEQ ID NO:5351 | 60/223,416 | 08/04/2000 |
| SEQ ID NO:5352 | 60/223,416 | 08/04/2000 |
| SEQ ID NO:5353 | 60/223,416 | 08/04/2000 |
| SEQ ID NO:5354 | 60/223,416 | 08/04/2000 |
| SEQ ID NO:5355 | 60/223,416 | 08/04/2000 |
| SEQ ID NO:5356 | 60/223,416 | 08/04/2000 |
| SEQ ID NO:5357 | 60/223,416 | 08/04/2000 |
| SEQ ID NO:5358 | 60/223,416 | 08/04/2000 |
| SEQ ID NO:5359 | 60/223,416 | 08/04/2000 |
| SEQ ID NO:5360 | 60/223,416 | 08/04/2000 |
| SEQ ID NO:5361 | 60/223,416 | 08/04/2000 |
| SEQ ID NO:5362 | 60/223,416 | 08/04/2000 |
| SEQ ID NO:5363 | 60/223,416 | 08/04/2000 |
| SEQ ID NO:5364 | 60/223,416 | 08/04/2000 |
| SEQ ID NO:5365 | 60/223,416 | 08/04/2000 |
| SEQ ID NO:5366 | 60/223,416 | 08/04/2000 |
| SEQ ID NO:5367 | 60/223,416 | 08/04/2000 |
| SEQ ID NO:5368 | 60/223,416 | 08/04/2000 |
| SEQ ID NO:5369 | 60/223,416 | 08/04/2000 |
| SEQ ID NO:5370 | 60/223,416 | 08/04/2000 |
| SEQ ID NO:5371 | 60/223,416 | 08/04/2000 |
| SEQ ID NO:5372 | 60/223,416 | 08/04/2000 |
| SEQ ID NO:5373 | 60/223,416 | 08/04/2000 |
| SEQ ID NO:5374 | 60/223,416 | 08/04/2000 |
| SEQ ID NO:5375 | 60/223,416 | 08/04/2000 |
| SEQ ID NO:5376 | 60/223,416 | 08/04/2000 |
| SEQ ID NO:5377 | 60/223,416 | 08/04/2000 |
| SEQ ID NO:5378 | 60/223,416 | 08/04/2000 |
| SEQ ID NO:5379 | 60/223,416 | 08/04/2000 |
| SEQ ID NO:5380 | 60/223,416 | 08/04/2000 |
| SEQ ID NO:5381 | 60/223,416 | 08/04/2000 |
| SEQ ID NO:5382 | 60/223,416 | 08/04/2000 |
| SEQ ID NO:5383 | 60/223,416 | 08/04/2000 |
| SEQ ID NO:5384 | 60/223,416 | 08/04/2000 |
| SEQ ID NO:5385 | 60/223,416 | 08/04/2000 |
| SEQ ID NO:5386 | 60/223,416 | 08/04/2000 |
| SEQ ID NO:5387 | 60/223,416 | 08/04/2000 |
| SEQ ID NO:5388 | 60/223,416 | 08/04/2000 |
| SEQ ID NO:5389 | 60/223,416 | 08/04/2000 |
| SEQ ID NO:5390 | 60/223,416 | 08/04/2000 |
| SEQ ID NO:5391 | 60/223,416 | 08/04/2000 |
| SEQ ID NO:5392 | 60/223,416 | 08/04/2000 |
| SEQ ID NO:5393 | 60/223,416 | 08/04/2000 |
| SEQ ID NO:5394 | 60/223,416 | 08/04/2000 |
| SEQ ID NO:5395 | 60/223,416 | 08/04/2000 |
| SEQ ID NO:5396 | 60/223,416 | 08/04/2000 |
| SEQ ID NO:5397 | 60/223,416 | 08/04/2000 |
| SEQ ID NO:5398 | 60/223,416 | 08/04/2000 |
| SEQ ID NO:5399 | 60/223,416 | 08/04/2000 |
| SEQ ID NO:5400 | 60/223,416 | 08/04/2000 |
| SEQ ID NO:5401 | 60/223,416 | 08/04/2000 |
| SEQ ID NO:5402 | 60/223,416 | 08/04/2000 |
| SEQ ID NO:5403 | 60/223,416 | 08/04/2000 |
| SEQ ID NO:5404 | 60/223,416 | 08/04/2000 |
| SEQ ID NO:5405 | 60/223,416 | 08/04/2000 |
| SEQ ID NO:5406 | 60/223,416 | 08/04/2000 |
| SEQ ID NO:5407 | 60/223,416 | 08/04/2000 |
| SEQ ID NO:5408 | 60/223,416 | 08/04/2000 |
| SEQ ID NO:5409 | 60/223,416 | 08/04/2000 |
| SEQ ID NO:5410 | 60/223,416 | 08/04/2000 |
| SEQ ID NO:5411 | 60/223,416 | 08/04/2000 |
| SEQ ID NO:5412 | 60/223,416 | 08/04/2000 |
| SEQ ID NO:5413 | 60/223,416 | 08/04/2000 |
| SEQ ID NO:5414 | 60/223,416 | 08/04/2000 |
| SEQ ID NO:5415 | 60/223,416 | 08/04/2000 |
| SEQ ID NO:5416 | 60/223,416 | 08/04/2000 |
| SEQ ID NO:5417 | 60/223,416 | 08/04/2000 |
| SEQ ID NO:5418 | 60/223,416 | 08/04/2000 |
| SEQ ID NO:5419 | 60/223,416 | 08/04/2000 |
| SEQ ID NO:5420 | 60/223,416 | 08/04/2000 |
| SEQ ID NO:5421 | 60/223,416 | 08/04/2000 |
| SEQ ID NO:5422 | 60/223,416 | 08/04/2000 |
| SEQ ID NO:5423 | 60/223,416 | 08/04/2000 |
| SEQ ID NO:5424 | 60/223,416 | 08/04/2000 |
| SEQ ID NO:5425 | 60/223,416 | 08/04/2000 |
| SEQ ID NO:5426 | 60/223,416 | 08/04/2000 |
| SEQ ID NO:5427 | 60/223,416 | 08/04/2000 |
| SEQ ID NO:5428 | 60/223,416 | 08/04/2000 |
| SEQ ID NO:5429 | 60/223,416 | 08/04/2000 |
| SEQ ID NO:5430 | 60/223,416 | 08/04/2000 |
| SEQ ID NO:5431 | 60/223,416 | 08/04/2000 |
| SEQ ID NO:5432 | 60/223,416 | 08/04/2000 |
| SEQ ID NO:5433 | 60/223,416 | 08/04/2000 |
| SEQ ID NO:5434 | 60/223,416 | 08/04/2000 |
| SEQ ID NO:5435 | 60/223,416 | 08/04/2000 |
| SEQ ID NO:5436 | 60/223,416 | 08/04/2000 |
| SEQ ID NO:5437 | 60/223,416 | 08/04/2000 |
| SEQ ID NO:5438 | 60/223,416 | 08/04/2000 |
| SEQ ID NO:5439 | 60/223,416 | 08/04/2000 |
| SEQ ID NO:5440 | 60/223,416 | 08/04/2000 |
| SEQ ID NO:5441 | 60/223,416 | 08/04/2000 |
| SEQ ID NO:5442 | 60/223,416 | 08/04/2000 |
| SEQ ID NO:5443 | 60/223,416 | 08/04/2000 |
| SEQ ID NO:5444 | 60/223,416 | 08/04/2000 |
| SEQ ID NO:5445 | 60/223,416 | 08/04/2000 |
| SEQ ID NO:5446 | 60/223,416 | 08/04/2000 |
| SEQ ID NO:5447 | 60/223,416 | 08/04/2000 |
| SEQ ID NO:5448 | 60/223,416 | 08/04/2000 |
| SEQ ID NO:5449 | 60/223,416 | 08/04/2000 |
| SEQ ID NO:5450 | 60/223,416 | 08/04/2000 |
| SEQ ID NO:5451 | 60/223,416 | 08/04/2000 |
| SEQ ID NO:5452 | 60/223,416 | 08/04/2000 |
| SEQ ID NO:5453 | 60/223,416 | 08/04/2000 |
| SEQ ID NO:5454 | 60/223,416 | 08/04/2000 |
| SEQ ID NO:5455 | 60/223,416 | 08/04/2000 |
| SEQ ID NO:5456 | 60/223,416 | 08/04/2000 |
| SEQ ID NO:5457 | 60/223,416 | 08/04/2000 |
| SEQ ID NO:5458 | 60/223,416 | 08/04/2000 |
| SEQ ID NO:5459 | 60/223,416 | 08/04/2000 |
| SEQ ID NO:5460 | 60/223,416 | 08/04/2000 |
| SEQ ID NO:5461 | 60/223,416 | 08/04/2000 |
| SEQ ID NO:5462 | 60/223,416 | 08/04/2000 |
| SEQ ID NO:5463 | 60/223,416 | 08/04/2000 |
| SEQ ID NO:5464 | 60/223,416 | 08/04/2000 |
| SEQ ID NO:5465 | 60/223,416 | 08/04/2000 |
| SEQ ID NO:5466 | 60/223,416 | 08/04/2000 |
| SEQ ID NO:5467 | 60/223,416 | 08/04/2000 |
| SEQ ID NO:5468 | 60/223,416 | 08/04/2000 |
| SEQ ID NO:5469 | 60/223,416 | 08/04/2000 |
| SEQ ID NO:5470 | 60/223,416 | 08/04/2000 |
| SEQ ID NO:5471 | 60/223,416 | 08/04/2000 |
| SEQ ID NO:5472 | 60/223,416 | 08/04/2000 |
| SEQ ID NO:5473 | 60/223,416 | 08/04/2000 |
| SEQ ID NO:5474 | 60/223,416 | 08/04/2000 |
| SEQ ID NO:5475 | 60/223,416 | 08/04/2000 |
| SEQ ID NO:5476 | 60/223,416 | 08/04/2000 |
| SEQ ID NO:5477 | 60/223,416 | 08/04/2000 |
| SEQ ID NO:5478 | 60/223,416 | 08/04/2000 |
| SEQ ID NO:5479 | 60/223,416 | 08/04/2000 |
| SEQ ID NO:5480 | 60/223,416 | 08/04/2000 |
| SEQ ID NO:5481 | 60/223,416 | 08/04/2000 |
| SEQ ID NO:5482 | 60/223,416 | 08/04/2000 |
| SEQ ID NO:5483 | 60/223,416 | 08/04/2000 |
| SEQ ID NO:5484 | 60/223,416 | 08/04/2000 |
| SEQ ID NO:5485 | 60/223,416 | 08/04/2000 |
| SEQ ID NO:5486 | 60/223,416 | 08/04/2000 |
| SEQ ID NO:5487 | 60/223,416 | 08/04/2000 |
| SEQ ID NO:5488 | 60/223,416 | 08/04/2000 |
| SEQ ID NO:5489 | 60/223,416 | 08/04/2000 |
| SEQ ID NO:5490 | 60/223,416 | 08/04/2000 |
| SEQ ID NO:5491 | 60/223,416 | 08/04/2000 |
| SEQ ID NO:5492 | 60/223,416 | 08/04/2000 |
| SEQ ID NO:5493 | 60/223,416 | 08/04/2000 |
| SEQ ID NO:5494 | 60/223,416 | 08/04/2000 |
| SEQ ID NO:5495 | 60/223,416 | 08/04/2000 |
| SEQ ID NO:5496 | 60/223,416 | 08/04/2000 |
| SEQ ID NO:5497 | 60/223,416 | 08/04/2000 |
| SEQ ID NO:5498 | 60/223,416 | 08/04/2000 |
| SEQ ID NO:5499 | 60/223,416 | 08/04/2000 |
| SEQ ID NO:5500 | 60/223,416 | 08/04/2000 |
| SEQ ID NO:5501 | 60/223,416 | 08/04/2000 |
| SEQ ID NO:5502 | 60/223,416 | 08/04/2000 |
| SEQ ID NO:5503 | 60/223,416 | 08/04/2000 |
| SEQ ID NO:5504 | 60/223,416 | 08/04/2000 |
| SEQ ID NO:5505 | 60/223,416 | 08/04/2000 |
| SEQ ID NO:5506 | 60/223,416 | 08/04/2000 |
| SEQ ID NO:5507 | 60/223,416 | 08/04/2000 |
| SEQ ID NO:5508 | 60/223,416 | 08/04/2000 |
| SEQ ID NO:5509 | 60/223,416 | 08/04/2000 |
| SEQ ID NO:5510 | 60/223,416 | 08/04/2000 |
| SEQ ID NO:5511 | 60/223,416 | 08/04/2000 |
| SEQ ID NO:5512 | 60/223,416 | 08/04/2000 |
| SEQ ID NO:5513 | 60/223,416 | 08/04/2000 |
| SEQ ID NO:5514 | 60/223,416 | 08/04/2000 |
| SEQ ID NO:5515 | 60/223,416 | 08/04/2000 |
| SEQ ID NO:5516 | 60/223,416 | 08/04/2000 |
| SEQ ID NO:5517 | 60/223,416 | 08/04/2000 |
| SEQ ID NO:5518 | 60/223,416 | 08/04/2000 |
| SEQ ID NO:5519 | 60/223,416 | 08/04/2000 |
| SEQ ID NO:5520 | 60/223,416 | 08/04/2000 |
| SEQ ID NO:5521 | 60/223,416 | 08/04/2000 |
| SEQ ID NO:5522 | 60/223,416 | 08/04/2000 |
| SEQ ID NO:5523 | 60/223,416 | 08/04/2000 |
| SEQ ID NO:5524 | 60/223,416 | 08/04/2000 |
| SEQ ID NO:5525 | 60/223,416 | 08/04/2000 |
| SEQ ID NO:5526 | 60/223,416 | 08/04/2000 |
| SEQ ID NO:5527 | 60/223,416 | 08/04/2000 |
| SEQ ID NO:5528 | 60/223,416 | 08/04/2000 |
| SEQ ID NO:5529 | 60/223,416 | 08/04/2000 |
| SEQ ID NO:5530 | 60/223,416 | 08/04/2000 |
| SEQ ID NO:5531 | 60/223,416 | 08/04/2000 |
| SEQ ID NO:5532 | 60/223,416 | 08/04/2000 |
| SEQ ID NO:5533 | 60/223,416 | 08/04/2000 |
| SEQ ID NO:5534 | 60/223,416 | 08/04/2000 |
| SEQ ID NO:5535 | 60/223,416 | 08/04/2000 |
| SEQ ID NO:5536 | 60/223,416 | 08/04/2000 |
| SEQ ID NO:5537 | 60/223,416 | 08/04/2000 |
| SEQ ID NO:5538 | 60/223,416 | 08/04/2000 |
| SEQ ID NO:5539 | 60/223,416 | 08/04/2000 |
| SEQ ID NO:5540 | 60/223,416 | 08/04/2000 |
| SEQ ID NO:5541 | 60/223,416 | 08/04/2000 |
| SEQ ID NO:5542 | 60/223,416 | 08/04/2000 |
| SEQ ID NO:5543 | 60/223,416 | 08/04/2000 |
| SEQ ID NO:5544 | 60/223,416 | 08/04/2000 |
| SEQ ID NO:5545 | 60/223,416 | 08/04/2000 |
| SEQ ID NO:5546 | 60/223,416 | 08/04/2000 |
| SEQ ID NO:5547 | 60/223,416 | 08/04/2000 |
| SEQ ID NO:5548 | 60/223,416 | 08/04/2000 |
| SEQ ID NO:5549 | 60/223,416 | 08/04/2000 |
| SEQ ID NO:5550 | 60/223,416 | 08/04/2000 |
| SEQ ID NO:5551 | 60/223,416 | 08/04/2000 |
| SEQ ID NO:5552 | 60/223,416 | 08/04/2000 |
| SEQ ID NO:5553 | 60/223,416 | 08/04/2000 |
| SEQ ID NO:5554 | 60/223,416 | 08/04/2000 |
| SEQ ID NO:5555 | 60/223,416 | 08/04/2000 |
| SEQ ID NO:5556 | 60/223,416 | 08/04/2000 |
| SEQ ID NO:5557 | 60/223,416 | 08/04/2000 |
| SEQ ID NO:5558 | 60/223,416 | 08/04/2000 |
| SEQ ID NO:5559 | 60/223,416 | 08/04/2000 |
| SEQ ID NO:5560 | 60/223,416 | 08/04/2000 |
| SEQ ID NO:5561 | 60/223,416 | 08/04/2000 |
| SEQ ID NO:5562 | 60/223,416 | 08/04/2000 |
| SEQ ID NO:5563 | 60/223,416 | 08/04/2000 |
| SEQ ID NO:5564 | 60/223,416 | 08/04/2000 |
| SEQ ID NO:5565 | 60/223,416 | 08/04/2000 |
| SEQ ID NO:5566 | 60/223,416 | 08/04/2000 |
| SEQ ID NO:5567 | 60/223,416 | 08/04/2000 |
| SEQ ID NO:5568 | 60/223,416 | 08/04/2000 |
| SEQ ID NO:5569 | 60/223,416 | 08/04/2000 |
| SEQ ID NO:5570 | 60/223,416 | 08/04/2000 |
| SEQ ID NO:5571 | 60/223,416 | 08/04/2000 |
| SEQ ID NO:5572 | 60/223,416 | 08/04/2000 |
| SEQ ID NO:5573 | 60/223,416 | 08/04/2000 |
| SEQ ID NO:5574 | 60/223,416 | 08/04/2000 |
| SEQ ID NO:5575 | 60/223,416 | 08/04/2000 |
| SEQ ID NO:5576 | 60/223,416 | 08/04/2000 |
| SEQ ID NO:5577 | 60/223,416 | 08/04/2000 |
| SEQ ID NO:5578 | 60/223,416 | 08/04/2000 |
| SEQ ID NO:5579 | 60/223,416 | 08/04/2000 |
| SEQ ID NO:5580 | 60/223,416 | 08/04/2000 |
| SEQ ID NO:5581 | 60/223,416 | 08/04/2000 |
| SEQ ID NO:5582 | 60/223,416 | 08/04/2000 |
| SEQ ID NO:5583 | 60/223,416 | 08/04/2000 |
| SEQ ID NO:5584 | 60/223,416 | 08/04/2000 |
| SEQ ID NO:5585 | 60/223,416 | 08/04/2000 |
| SEQ ID NO:5586 | 60/223,416 | 08/04/2000 |
| SEQ ID NO:5587 | 60/223,416 | 08/04/2000 |
| SEQ ID NO:5588 | 60/223,416 | 08/04/2000 |
| SEQ ID NO:5589 | 60/223,416 | 08/04/2000 |
| SEQ ID NO:5590 | 60/223,416 | 08/04/2000 |
| SEQ ID NO:5591 | 60/223,416 | 08/04/2000 |
| SEQ ID NO:5592 | 60/223,416 | 08/04/2000 |
| SEQ ID NO:5593 | 60/223,416 | 08/04/2000 |
| SEQ ID NO:5594 | 60/223,416 | 08/04/2000 |
| SEQ ID NO:5595 | 60/223,416 | 08/04/2000 |
| SEQ ID NO:5596 | 60/223,416 | 08/04/2000 |
| SEQ ID NO:5597 | 60/223,416 | 08/04/2000 |
| SEQ ID NO:5598 | 60/223,416 | 08/04/2000 |
| SEQ ID NO:5599 | 60/223,416 | 08/04/2000 |
| SEQ ID NO:5600 | 60/223,416 | 08/04/2000 |
| SEQ ID NO:5601 | 60/223,416 | 08/04/2000 |
| SEQ ID NO:5602 | 60/223,416 | 08/04/2000 |
| SEQ ID NO:5603 | 60/223,416 | 08/04/2000 |
| SEQ ID NO:5604 | 60/223,416 | 08/04/2000 |
| SEQ ID NO:5605 | 60/223,416 | 08/04/2000 |
| SEQ ID NO:5606 | 60/223,416 | 08/04/2000 |
| SEQ ID NO:5607 | 60/223,416 | 08/04/2000 |
| SEQ ID NO:5608 | 60/223,416 | 08/04/2000 |
| SEQ ID NO:5609 | 60/223,416 | 08/04/2000 |
| SEQ ID NO:5610 | 60/223,416 | 08/04/2000 |
| SEQ ID NO:5611 | 60/223,416 | 08/04/2000 |
| SEQ ID NO:5612 | 60/223,416 | 08/04/2000 |
| SEQ ID NO:5613 | 60/223,416 | 08/04/2000 |
| SEQ ID NO:5614 | 60/223,416 | 08/04/2000 |
| SEQ ID NO:5615 | 60/223,416 | 08/04/2000 |
| SEQ ID NO:5616 | 60/223,416 | 08/04/2000 |
| SEQ ID NO:5617 | 60/223,416 | 08/04/2000 |
| SEQ ID NO:5618 | 60/223,416 | 08/04/2000 |
| SEQ ID NO:5619 | 60/223,416 | 08/04/2000 |
| SEQ ID NO:5620 | 60/223,416 | 08/04/2000 |
| SEQ ID NO:5621 | 60/223,416 | 08/04/2000 |
| SEQ ID NO:5622 | 60/223,416 | 08/04/2000 |
| SEQ ID NO:5623 | 60/223,416 | 08/04/2000 |
| SEQ ID NO:5624 | 60/223,416 | 08/04/2000 |
| SEQ ID NO:5625 | 60/223,416 | 08/04/2000 |
| SEQ ID NO:5626 | 60/223,416 | 08/04/2000 |
| SEQ ID NO:5627 | 60/223,416 | 08/04/2000 |
| SEQ ID NO:5628 | 60/223,416 | 08/04/2000 |
| SEQ ID NO:5629 | 60/223,416 | 08/04/2000 |
| SEQ ID NO:5630 | 60/223,416 | 08/04/2000 |
| SEQ ID NO:5631 | 60/223,416 | 08/04/2000 |
| SEQ ID NO:5632 | 60/223,416 | 08/04/2000 |
| SEQ ID NO:5633 | 60/223,416 | 08/04/2000 |
| SEQ ID NO:5634 | 60/223,416 | 08/04/2000 |
| SEQ ID NO:5635 | 60/223,416 | 08/04/2000 |
| SEQ ID NO:5636 | 60/223,416 | 08/04/2000 |
| SEQ ID NO:5637 | 60/223,416 | 08/04/2000 |
| SEQ ID NO:5638 | 60/223,416 | 08/04/2000 |
| SEQ ID NO:5639 | 60/223,416 | 08/04/2000 |
| SEQ ID NO:5640 | 60/223,416 | 08/04/2000 |
| SEQ ID NO:5641 | 60/223,416 | 08/04/2000 |
| SEQ ID NO:5642 | 60/223,416 | 08/04/2000 |
| SEQ ID NO:5643 | 60/223,416 | 08/04/2000 |
| SEQ ID NO:5644 | 60/223,416 | 08/04/2000 |
| SEQ ID NO:5645 | 60/223,416 | 08/04/2000 |
| SEQ ID NO:5646 | 60/223,416 | 08/04/2000 |
| SEQ ID NO:5647 | 60/223,416 | 08/04/2000 |
| SEQ ID NO:5648 | 60/223,416 | 08/04/2000 |
| SEQ ID NO:5649 | 60/223,416 | 08/04/2000 |
| SEQ ID NO:5650 | 60/223,416 | 08/04/2000 |
| SEQ ID NO:5651 | 60/223,416 | 08/04/2000 |
| SEQ ID NO:5652 | 60/223,416 | 08/04/2000 |
| SEQ ID NO:5653 | 60/223,416 | 08/04/2000 |
| SEQ ID NO:5654 | 60/223,416 | 08/04/2000 |
| SEQ ID NO:5655 | 60/223,416 | 08/04/2000 |
| SEQ ID NO:5656 | 60/223,416 | 08/04/2000 |
| SEQ ID NO:5657 | 60/223,416 | 08/04/2000 |
| SEQ ID NO:5658 | 60/223,416 | 08/04/2000 |
| SEQ ID NO:5659 | 60/223,416 | 08/04/2000 |
| SEQ ID NO:5660 | 60/223,416 | 08/04/2000 |
| SEQ ID NO:5661 | 60/223,416 | 08/04/2000 |
| SEQ ID NO:5662 | 60/223,416 | 08/04/2000 |
| SEQ ID NO:5663 | 60/223,416 | 08/04/2000 |
| SEQ ID NO:5664 | 60/223,416 | 08/04/2000 |
| SEQ ID NO:5665 | 60/223,416 | 08/04/2000 |
| SEQ ID NO:5666 | 60/223,416 | 08/04/2000 |
| SEQ ID NO:5667 | 60/223,416 | 08/04/2000 |
| SEQ ID NO:5668 | 60/223,416 | 08/04/2000 |
| SEQ ID NO:5669 | 60/223,416 | 08/04/2000 |
| SEQ ID NO:5670 | 60/223,416 | 08/04/2000 |
| SEQ ID NO:5671 | 60/223,416 | 08/04/2000 |
| SEQ ID NO:5672 | 60/223,416 | 08/04/2000 |
| SEQ ID NO:5673 | 60/223,416 | 08/04/2000 |
| SEQ ID NO:5674 | 60/223,416 | 08/04/2000 |
| SEQ ID NO:5675 | 60/223,416 | 08/04/2000 |
| SEQ ID NO:5676 | 60/223,416 | 08/04/2000 |
| SEQ ID NO:5677 | 60/223,416 | 08/04/2000 |
| SEQ ID NO:5678 | 60/223,416 | 08/04/2000 |
| SEQ ID NO:5679 | 60/223,416 | 08/04/2000 |
| SEQ ID NO:5680 | 60/223,416 | 08/04/2000 |
| SEQ ID NO:5681 | 60/223,416 | 08/04/2000 |
| SEQ ID NO:5682 | 60/223,416 | 08/04/2000 |
| SEQ ID NO:5683 | 60/223,416 | 08/04/2000 |
| SEQ ID NO:5684 | 60/223,416 | 08/04/2000 |
| SEQ ID NO:5685 | 60/223,416 | 08/04/2000 |
| SEQ ID NO:5686 | 60/223,416 | 08/04/2000 |
| SEQ ID NO:5687 | 60/223,416 | 08/04/2000 |
| SEQ ID NO:5688 | 60/223,416 | 08/04/2000 |
| SEQ ID NO:5689 | 60/223,416 | 08/04/2000 |
| SEQ ID NO:5690 | 60/223,416 | 08/04/2000 |
| SEQ ID NO:5691 | 60/223,416 | 08/04/2000 |
| SEQ ID NO:5692 | 60/223,416 | 08/04/2000 |
| SEQ ID NO:5693 | 60/223,416 | 08/04/2000 |
| SEQ ID NO:5694 | 60/223,416 | 08/04/2000 |
| SEQ ID NO:5695 | 60/223,416 | 08/04/2000 |
| SEQ ID NO:5696 | 60/223,416 | 08/04/2000 |
| SEQ ID NO:5697 | 60/223,416 | 08/04/2000 |
| SEQ ID NO:5698 | 60/223,416 | 08/04/2000 |
| SEQ ID NO:5699 | 60/223,416 | 08/04/2000 |
| SEQ ID NO:5700 | 60/223,416 | 08/04/2000 |
| SEQ ID NO:5701 | 60/223,416 | 08/04/2000 |
| SEQ ID NO:5702 | 60/223,416 | 08/04/2000 |
| SEQ ID NO:5703 | 60/223,416 | 08/04/2000 |
| SEQ ID NO:5704 | 60/223,416 | 08/04/2000 |
| SEQ ID NO:5705 | 60/223,416 | 08/04/2000 |
| SEQ ID NO:5706 | 60/223,416 | 08/04/2000 |
| SEQ ID NO:5707 | 60/223,416 | 08/04/2000 |
| SEQ ID NO:5708 | 60/223,416 | 08/04/2000 |
| SEQ ID NO:5709 | 60/223,416 | 08/04/2000 |
| SEQ ID NO:5710 | 60/223,416 | 08/04/2000 |
| SEQ ID NO:5711 | 60/223,416 | 08/04/2000 |
| SEQ ID NO:5712 | 60/223,416 | 08/04/2000 |
| SEQ ID NO:5713 | 60/223,416 | 08/04/2000 |
| SEQ ID NO:5714 | 60/223,416 | 08/04/2000 |
| SEQ ID NO:5715 | 60/223,416 | 08/04/2000 |
| SEQ ID NO:5716 | 60/223,416 | 08/04/2000 |
| SEQ ID NO:5717 | 60/223,416 | 08/04/2000 |
| SEQ ID NO:5718 | 60/223,416 | 08/04/2000 |
| SEQ ID NO:5719 | 60/223,416 | 08/04/2000 |
| SEQ ID NO:5720 | 60/223,416 | 08/04/2000 |
| SEQ ID NO:5721 | 60/223,416 | 08/04/2000 |
| SEQ ID NO:5722 | 60/223,416 | 08/04/2000 |
| SEQ ID NO:5723 | 60/223,416 | 08/04/2000 |
| SEQ ID NO:5724 | 60/223,416 | 08/04/2000 |
| SEQ ID NO:5725 | 60/223,416 | 08/04/2000 |
| SEQ ID NO:5726 | 60/223,416 | 08/04/2000 |
| SEQ ID NO:5727 | 60/223,416 | 08/04/2000 |
| SEQ ID NO:5728 | 60/223,416 | 08/04/2000 |
| SEQ ID NO:5729 | 60/223,416 | 08/04/2000 |
| SEQ ID NO:5730 | 60/223,416 | 08/04/2000 |
| SEQ ID NO:5731 | 60/223,416 | 08/04/2000 |
| SEQ ID NO:5732 | 60/223,416 | 08/04/2000 |
| SEQ ID NO:5733 | 60/223,416 | 08/04/2000 |
| SEQ ID NO:5734 | 60/223,416 | 08/04/2000 |
| SEQ ID NO:5735 | 60/223,416 | 08/04/2000 |
| SEQ ID NO:5736 | 60/223,416 | 08/04/2000 |
| SEQ ID NO:5737 | 60/223,416 | 08/04/2000 |
| SEQ ID NO:5738 | 60/223,416 | 08/04/2000 |
| SEQ ID NO:5739 | 60/223,416 | 08/04/2000 |
| SEQ ID NO:5740 | 60/223,416 | 08/04/2000 |
| SEQ ID NO:5741 | 60/223,416 | 08/04/2000 |
| SEQ ID NO:5742 | 60/223,416 | 08/04/2000 |
| SEQ ID NO:5743 | 60/223,416 | 08/04/2000 |
| SEQ ID NO:5744 | 60/223,416 | 08/04/2000 |
| SEQ ID NO:5745 | 60/223,416 | 08/04/2000 |
| SEQ ID NO:5746 | 60/223,416 | 08/04/2000 |
| SEQ ID NO:5747 | 60/223,416 | 08/04/2000 |
| SEQ ID NO:5748 | 60/223,416 | 08/04/2000 |
| SEQ ID NO:5749 | 60/223,416 | 08/04/2000 |
| SEQ ID NO:5750 | 60/223,416 | 08/04/2000 |
| SEQ ID NO:5751 | 60/223,416 | 08/04/2000 |
| SEQ ID NO:5752 | 60/223,416 | 08/04/2000 |
| SEQ ID NO:5753 | 60/223,416 | 08/04/2000 |
| SEQ ID NO:5754 | 60/223,416 | 08/04/2000 |
| SEQ ID NO:5755 | 60/223,416 | 08/04/2000 |
| SEQ ID NO:5756 | 60/223,416 | 08/04/2000 |
| SEQ ID NO:5757 | 60/223,416 | 08/04/2000 |
| SEQ ID NO:5758 | 60/223,416 | 08/04/2000 |
| SEQ ID NO:5759 | 60/223,416 | 08/04/2000 |
| SEQ ID NO:5760 | 60/223,416 | 08/04/2000 |
| SEQ ID NO:5761 | 60/223,416 | 08/04/2000 |
| SEQ ID NO:5762 | 60/223,416 | 08/04/2000 |
| SEQ ID NO:5763 | 60/223,416 | 08/04/2000 |
| SEQ ID NO:5764 | 60/223,416 | 08/04/2000 |
| SEQ ID NO:5765 | 60/223,416 | 08/04/2000 |
| SEQ ID NO:5766 | 60/223,416 | 08/04/2000 |
| SEQ ID NO:5767 | 60/223,416 | 08/04/2000 |
| SEQ ID NO:5768 | 60/223,416 | 08/04/2000 |
| SEQ ID NO:5769 | 60/223,416 | 08/04/2000 |
| SEQ ID NO:5770 | 60/223,416 | 08/04/2000 |
| SEQ ID NO:5771 | 60/223,416 | 08/04/2000 |
| SEQ ID NO:5772 | 60/223,416 | 08/04/2000 |
| SEQ ID NO:5773 | 60/223,416 | 08/04/2000 |
| SEQ ID NO:5774 | 60/223,416 | 08/04/2000 |
| SEQ ID NO:5775 | 60/223,416 | 08/04/2000 |
| SEQ ID NO:5776 | 60/223,416 | 08/04/2000 |
| SEQ ID NO:5777 | 60/223,416 | 08/04/2000 |
| SEQ ID NO:5778 | 60/223,416 | 08/04/2000 |
| SEQ ID NO:5779 | 60/223,416 | 08/04/2000 |
| SEQ ID NO:5780 | 60/223,416 | 08/04/2000 |
| SEQ ID NO:5781 | 60/223,416 | 08/04/2000 |
| SEQ ID NO:5782 | 60/223,416 | 08/04/2000 |
| SEQ ID NO:5783 | 60/223,416 | 08/04/2000 |
| SEQ ID NO:5784 | 60/223,416 | 08/04/2000 |
| SEQ ID NO:5785 | 60/223,416 | 08/04/2000 |
| SEQ ID NO:5786 | 60/223,416 | 08/04/2000 |
| SEQ ID NO:5787 | 60/223,416 | 08/04/2000 |
| SEQ ID NO:5788 | 60/223,416 | 08/04/2000 |
| SEQ ID NO:5789 | 60/223,416 | 08/04/2000 |
| SEQ ID NO:5790 | 60/200,303 | 04/28/2000 |
| SEQ ID NO:5791 | 60/200,303 | 04/28/2000 |
| SEQ ID NO:5792 | 60/200,303 | 04/28/2000 |
| SEQ ID NO:5793 | 60/200,303 | 04/28/2000 |
| SEQ ID NO:5794 | 60/200,303 | 04/28/2000 |
| SEQ ID NO:5795 | 60/200,303 | 04/28/2000 |
| SEQ ID NO:5796 | 60/200,303 | 04/28/2000 |
| SEQ ID NO:5797 | 60/200,303 | 04/28/2000 |
| SEQ ID NO:5798 | 60/200,303 | 04/28/2000 |
| SEQ ID NO:5799 | 60/200,303 | 04/28/2000 |
| SEQ ID NO:5800 | 60/200,303 | 04/28/2000 |
| SEQ ID NO:5801 | 60/200,303 | 04/28/2000 |
| SEQ ID NO:5802 | 60/200,303 | 04/28/2000 |
| SEQ ID NO:5803 | 60/200,303 | 04/28/2000 |
| SEQ ID NO:5804 | 60/200,303 | 04/28/2000 |
| SEQ ID NO:5805 | 60/200,303 | 04/28/2000 |
| SEQ ID NO:5806 | 60/200,303 | 04/28/2000 |
| SEQ ID NO:5807 | 60/200,303 | 04/28/2000 |
| SEQ ID NO:5808 | 60/200,303 | 04/28/2000 |
| SEQ ID NO:5809 | 60/200,303 | 04/28/2000 |
| SEQ ID NO:5810 | 60/200,303 | 04/28/2000 |
| SEQ ID NO:5811 | 60/200,303 | 04/28/2000 |
| SEQ ID NO:5812 | 60/200,303 | 04/28/2000 |
| SEQ ID NO:5813 | 60/200,303 | 04/28/2000 |
| SEQ ID NO:5814 | 60/200,303 | 04/28/2000 |
| SEQ ID NO:5815 | 60/200,303 | 04/28/2000 |
| SEQ ID NO:5816 | 60/200,303 | 04/28/2000 |
| SEQ ID NO:5817 | 60/200,303 | 04/28/2000 |
| SEQ ID NO:5818 | 60/200,303 | 04/28/2000 |
| SEQ ID NO:5819 | 60/200,303 | 04/28/2000 |
| SEQ ID NO:5820 | 60/200,303 | 04/28/2000 |
| SEQ ID NO:5821 | 60/200,303 | 04/28/2000 |
| SEQ ID NO:5822 | 60/200,303 | 04/28/2000 |
| SEQ ID NO:5823 | 60/200,303 | 04/28/2000 |
| SEQ ID NO:5824 | 60/200,303 | 04/28/2000 |
| SEQ ID NO:5825 | 60/200,303 | 04/28/2000 |
| SEQ ID NO:5826 | 60/200,303 | 04/28/2000 |
| SEQ ID NO:5827 | 60/200,303 | 04/28/2000 |
| SEQ ID NO:5828 | 60/200,303 | 04/28/2000 |
| SEQ ID NO:5829 | 60/200,303 | 04/28/2000 |
| SEQ ID NO:5830 | 60/200,303 | 04/28/2000 |
| SEQ ID NO:5831 | 60/200,303 | 04/28/2000 |
| SEQ ID NO:5832 | 60/200,303 | 04/28/2000 |
| SEQ ID NO:5833 | 60/200,303 | 04/28/2000 |
| SEQ ID NO:5834 | 60/200,303 | 04/28/2000 |
| SEQ ID NO:5835 | 60/200,303 | 04/28/2000 |
| SEQ ID NO:5836 | 60/200,303 | 04/28/2000 |
| SEQ ID NO:5837 | 60/200,303 | 04/28/2000 |
| SEQ ID NO:5838 | 60/200,303 | 04/28/2000 |
| SEQ ID NO:5839 | 60/200,303 | 04/28/2000 |
| SEQ ID NO:5840 | 60/200,303 | 04/28/2000 |
| SEQ ID NO:5841 | 60/200,303 | 04/28/2000 |
| SEQ ID NO:5842 | 60/200,303 | 04/28/2000 |
| SEQ ID NO:5843 | 60/200,303 | 04/28/2000 |
| SEQ ID NO:5844 | 60/200,303 | 04/28/2000 |
| SEQ ID NO:5845 | 60/200,303 | 04/28/2000 |
| SEQ ID NO:5846 | 60/200,303 | 04/28/2000 |
| SEQ ID NO:5847 | 60/200,303 | 04/28/2000 |
| SEQ ID NO:5848 | 60/200,303 | 04/28/2000 |
| SEQ ID NO:5849 | 60/200,303 | 04/28/2000 |
| SEQ ID NO:5850 | 60/200,303 | 04/28/2000 |
| SEQ ID NO:5851 | 60/200,303 | 04/28/2000 |
| SEQ ID NO:5852 | 60/200,303 | 04/28/2000 |
| SEQ ID NO:5853 | 60/200,303 | 04/28/2000 |
| SEQ ID NO:5854 | 60/200,303 | 04/28/2000 |
| SEQ ID NO:5855 | 60/200,303 | 04/28/2000 |
| SEQ ID NO:5856 | 60/200,303 | 04/28/2000 |
| SEQ ID NO:5857 | 60/200,303 | 04/28/2000 |
| SEQ ID NO:5858 | 60/200,303 | 04/28/2000 |
| SEQ ID NO:5859 | 60/200,303 | 04/28/2000 |
| SEQ ID NO:5860 | 60/200,303 | 04/28/2000 |
| SEQ ID NO:5861 | 60/200,303 | 04/28/2000 |
| SEQ ID NO:5862 | 60/200,303 | 04/28/2000 |
| SEQ ID NO:5863 | 60/200,303 | 04/28/2000 |
| SEQ ID NO:5864 | 60/200,303 | 04/28/2000 |
| SEQ ID NO:5865 | 60/200,303 | 04/28/2000 |
| SEQ ID NO:5866 | 60/200,303 | 04/28/2000 |
| SEQ ID NO:5867 | 60/200,303 | 04/28/2000 |
| SEQ ID NO:5868 | 60/200,303 | 04/28/2000 |
| SEQ ID NO:5869 | 60/200,303 | 04/28/2000 |
| SEQ ID NO:5870 | 60/200,303 | 04/28/2000 |
| SEQ ID NO:5871 | 60/200,303 | 04/28/2000 |
| SEQ ID NO:5872 | 60/200,303 | 04/28/2000 |
| SEQ ID NO:5873 | 60/200,303 | 04/28/2000 |
| SEQ ID NO:5874 | 60/200,303 | 04/28/2000 |
| SEQ ID NO:5875 | 60/200,303 | 04/28/2000 |
| SEQ ID NO:5876 | 60/200,779 | 05/22/2000 |
| SEQ ID NO:5877 | 60/200,779 | 05/22/2000 |
| SEQ ID NO:5878 | 60/200,779 | 05/22/2000 |
| SEQ ID NO:5879 | 60/200,779 | 05/22/2000 |
| SEQ ID NO:5880 | 60/200,779 | 05/22/2000 |
| SEQ ID NO:5881 | 60/200,779 | 05/22/2000 |
| SEQ ID NO:5882 | 60/200,779 | 05/22/2000 |
| SEQ ID NO:5883 | 60/200,779 | 05/22/2000 |
| SEQ ID NO:5884 | 60/200,779 | 05/22/2000 |
| SEQ ID NO:5885 | 60/200,779 | 05/22/2000 |
| SEQ ID NO:5886 | 60/200,779 | 05/22/2000 |
| SEQ ID NO:5887 | 60/200,779 | 05/22/2000 |
| SEQ ID NO:5888 | 60/200,779 | 05/22/2000 |
| SEQ ID NO:5889 | 60/200,779 | 05/22/2000 |
| SEQ ID NO:5890 | 60/200,779 | 05/22/2000 |
| SEQ ID NO:5891 | 60/200,779 | 05/22/2000 |
| SEQ ID NO:5892 | 60/200,779 | 05/22/2000 |
| SEQ ID NO:5893 | 60/200,779 | 05/22/2000 |
| SEQ ID NO:5894 | 60/200,779 | 05/22/2000 |
| SEQ ID NO:5895 | 60/200,779 | 05/22/2000 |
| SEQ ID NO:5896 | 60/200,779 | 05/22/2000 |
| SEQ ID NO:5897 | 60/200,779 | 05/22/2000 |
| SEQ ID NO:5898 | 60/200,779 | 05/22/2000 |
| SEQ ID NO:5899 | 60/200,779 | 05/22/2000 |
| SEQ ID NO:5900 | 60/200,779 | 05/22/2000 |
| SEQ ID NO:5901 | 60/200,779 | 05/22/2000 |
| SEQ ID NO:5902 | 60/200,779 | 05/22/2000 |
| SEQ ID NO:5903 | 60/200,779 | 05/22/2000 |
| SEQ ID NO:5904 | 60/200,779 | 05/22/2000 |
| SEQ ID NO:5905 | 60/200,779 | 05/22/2000 |
| SEQ ID NO:5906 | 60/200,779 | 05/22/2000 |
| SEQ ID NO:5907 | 60/200,779 | 05/22/2000 |
| SEQ ID NO:5908 | 60/200,779 | 05/22/2000 |
| SEQ ID NO:5909 | 60/200,779 | 05/22/2000 |
| SEQ ID NO:5910 | 60/200,779 | 05/22/2000 |
| SEQ ID NO:5911 | 60/200,779 | 05/22/2000 |
| SEQ ID NO:5912 | 60/200,779 | 05/22/2000 |
| SEQ ID NO:5913 | 60/200,779 | 05/22/2000 |
| SEQ ID NO:5914 | 60/200,779 | 05/22/2000 |
| SEQ ID NO:5915 | 60/200,779 | 05/22/2000 |
| SEQ ID NO:5916 | 60/200,779 | 05/22/2000 |
| SEQ ID NO:5917 | 60/200,779 | 05/22/2000 |
| SEQ ID NO:5918 | 60/200,779 | 05/22/2000 |
| SEQ ID NO:5919 | 60/200,779 | 05/22/2000 |
| SEQ ID NO:5920 | 60/200,779 | 05/22/2000 |
| SEQ ID NO:5921 | 60/200,779 | 05/22/2000 |
| SEQ ID NO:5922 | 60/200,779 | 05/22/2000 |
| SEQ ID NO:5923 | 60/200,779 | 05/22/2000 |
| SEQ ID NO:5924 | 60/200,779 | 05/22/2000 |
| SEQ ID NO:5925 | 60/200,779 | 05/22/2000 |
| SEQ ID NO:5926 | 60/200,779 | 05/22/2000 |
| SEQ ID NO:5927 | 60/200,779 | 05/22/2000 |
| SEQ ID NO:5928 | 60/200,779 | 05/22/2000 |
| SEQ ID NO:5929 | 60/200,779 | 05/22/2000 |
| SEQ ID NO:5930 | 60/200,779 | 05/22/2000 |
| SEQ ID NO:5931 | 60/200,779 | 05/22/2000 |
| SEQ ID NO:5932 | 60/200,779 | 05/22/2000 |
| SEQ ID NO:5933 | 60/200,779 | 05/22/2000 |
| SEQ ID NO:5934 | 60/200,779 | 05/22/2000 |
| SEQ ID NO:5935 | 60/200,779 | 05/22/2000 |
| SEQ ID NO:5936 | 60/200,779 | 05/22/2000 |
| SEQ ID NO:5937 | 60/200,779 | 05/22/2000 |
| SEQ ID NO:5938 | 60/200,779 | 05/22/2000 |
| SEQ ID NO:5939 | 60/200,779 | 05/22/2000 |
| SEQ ID NO:5940 | 60/200,779 | 05/22/2000 |
| SEQ ID NO:5941 | 60/200,779 | 05/22/2000 |
| SEQ ID NO:5942 | 60/200,779 | 05/22/2000 |
| SEQ ID NO:5943 | 60/200,779 | 05/22/2000 |
| SEQ ID NO:5944 | 60/200,779 | 05/22/2000 |
| SEQ ID NO:5945 | 60/200,779 | 05/22/2000 |
| SEQ ID NO:5946 | 60/200,779 | 05/22/2000 |
| SEQ ID NO:5947 | 60/200,779 | 05/22/2000 |
| SEQ ID NO:5948 | 60/200,779 | 05/22/2000 |
| SEQ ID NO:5949 | 60/200,779 | 05/22/2000 |
| SEQ ID NO:5950 | 60/200,779 | 05/22/2000 |
| SEQ ID NO:5951 | 60/200,779 | 05/22/2000 |
| SEQ ID NO:5952 | 60/200,779 | 05/22/2000 |
| SEQ ID NO:5953 | 60/200,779 | 05/22/2000 |
| SEQ ID NO:5954 | 60/200,779 | 05/22/2000 |
| SEQ ID NO:5955 | 60/200,779 | 05/22/2000 |
| SEQ ID NO:5956 | 60/200,779 | 05/22/2000 |
| SEQ ID NO:5957 | 60/200,779 | 05/22/2000 |
| SEQ ID NO:5958 | 60/200,779 | 05/22/2000 |
| SEQ ID NO:5959 | 60/200,779 | 05/22/2000 |
| SEQ ID NO:5960 | 60/200,779 | 05/22/2000 |
| SEQ ID NO:5961 | 60/200,779 | 05/22/2000 |
| SEQ ID NO:5962 | 60/200,779 | 05/22/2000 |
| SEQ ID NO:5963 | 60/200,779 | 05/22/2000 |
| SEQ ID NO:5964 | 60/200,779 | 05/22/2000 |
| SEQ ID NO:5965 | 60/200,779 | 05/22/2000 |
| SEQ ID NO:5966 | 60/200,779 | 05/22/2000 |
| SEQ ID NO:5967 | 60/200,779 | 05/22/2000 |
| SEQ ID NO:5968 | 60/200,779 | 05/22/2000 |
| SEQ ID NO:5969 | 60/200,779 | 05/22/2000 |
| SEQ ID NO:5970 | 60/200,779 | 05/22/2000 |
| SEQ ID NO:5971 | 60/200,779 | 05/22/2000 |
| SEQ ID NO:5972 | 60/200,779 | 05/22/2000 |
| SEQ ID NO:5973 | 60/200,779 | 05/22/2000 |
| SEQ ID NO:5974 | 60/200,779 | 05/22/2000 |
| SEQ ID NO:5975 | 60/200,779 | 05/22/2000 |
| SEQ ID NO:5976 | 60/200,779 | 05/22/2000 |
| SEQ ID NO:5977 | 60/200,779 | 05/22/2000 |
| SEQ ID NO:5978 | 60/200,779 | 05/22/2000 |
| SEQ ID NO:5979 | 60/200,779 | 05/22/2000 |
| SEQ ID NO:5980 | 60/200,779 | 05/22/2000 |
| SEQ ID NO:5981 | 60/200,779 | 05/22/2000 |
| SEQ ID NO:5982 | 60/200,779 | 05/22/2000 |
| SEQ ID NO:5983 | 60/200,779 | 05/22/2000 |
| SEQ ID NO:5984 | 60/200,779 | 05/22/2000 |
| SEQ ID NO:5985 | 60/200,779 | 05/22/2000 |
| SEQ ID NO:5986 | 60/200,779 | 05/22/2000 |
| SEQ ID NO:5987 | 60/200,779 | 05/22/2000 |
| SEQ ID NO:5988 | 60/200,779 | 05/22/2000 |
| SEQ ID NO:5989 | 60/200,779 | 05/22/2000 |
| SEQ ID NO:5990 | 60/200,779 | 05/22/2000 |
| SEQ ID NO:5991 | 60/200,779 | 05/22/2000 |
| SEQ ID NO:5992 | 60/200,779 | 05/22/2000 |
| SEQ ID NO:5993 | 60/200,779 | 05/22/2000 |
| SEQ ID NO:5994 | 60/200,779 | 05/22/2000 |
| SEQ ID NO:5995 | 60/200,779 | 05/22/2000 |
| SEQ ID NO:5996 | 60/200,779 | 05/22/2000 |
| SEQ ID NO:5997 | 60/200,779 | 05/22/2000 |
| SEQ ID NO:5998 | 60/200,779 | 05/22/2000 |
| SEQ ID NO:5999 | 60/200,779 | 05/22/2000 |
| SEQ ID NO:6000 | 60/200,779 | 05/22/2000 |
| SEQ ID NO:6001 | 60/200,779 | 05/22/2000 |
| SEQ ID NO:6002 | 60/200,779 | 05/22/2000 |
| SEQ ID NO:6003 | 60/200,779 | 05/22/2000 |
| SEQ ID NO:6004 | 60/200,779 | 05/22/2000 |
| SEQ ID NO:6005 | 60/200,779 | 05/22/2000 |
| SEQ ID NO:6006 | 60/200,779 | 05/22/2000 |
| SEQ ID NO:6007 | 60/200,779 | 05/22/2000 |
| SEQ ID NO:6008 | 60/200,779 | 05/22/2000 |
| SEQ ID NO:6009 | 60/200,779 | 05/22/2000 |
| SEQ ID NO:6010 | 60/200,779 | 05/22/2000 |
| SEQ ID NO:6011 | 60/200,779 | 05/22/2000 |
| SEQ ID NO:6012 | 60/200,779 | 05/22/2000 |
| SEQ ID NO:6013 | 60/200,779 | 05/22/2000 |
| SEQ ID NO:6014 | 60/200,779 | 05/22/2000 |
| SEQ ID NO:6015 | 60/200,779 | 05/22/2000 |
| SEQ ID NO:6016 | 60/200,779 | 05/22/2000 |
| SEQ ID NO:6017 | 60/200,779 | 05/22/2000 |
| SEQ ID NO:6018 | 60/200,779 | 05/22/2000 |
| SEQ ID NO:6019 | 60/200,779 | 05/22/2000 |
| SEQ ID NO:6020 | 60/200,779 | 05/22/2000 |
| SEQ ID NO:6021 | 60/200,779 | 05/22/2000 |
| SEQ ID NO:6022 | 60/200,779 | 05/22/2000 |
| SEQ ID NO:6023 | 60/200,779 | 05/22/2000 |
| SEQ ID NO:6024 | 60/200,779 | 05/22/2000 |
| SEQ ID NO:6025 | 60/200,779 | 05/22/2000 |
| SEQ ID NO:6026 | 60/200,779 | 05/22/2000 |
| SEQ ID NO:6027 | 60/200,779 | 05/22/2000 |
| SEQ ID NO:6028 | 60/200,779 | 05/22/2000 |
| SEQ ID NO:6029 | 60/200,779 | 05/22/2000 |
| SEQ ID NO:6030 | 60/200,779 | 05/22/2000 |
| SEQ ID NO:6031 | 60/200,779 | 05/22/2000 |
| SEQ ID NO:6032 | 60/200,779 | 05/22/2000 |
| SEQ ID NO:6033 | 60/200,779 | 05/22/2000 |
| SEQ ID NO:6034 | 60/200,779 | 05/22/2000 |
| SEQ ID NO:6035 | 60/200,779 | 05/22/2000 |
| SEQ ID NO:6036 | 60/200,779 | 05/22/2000 |
| SEQ ID NO:6037 | 60/200,779 | 05/22/2000 |
| SEQ ID NO:6038 | 60/200,779 | 05/22/2000 |
| SEQ ID NO:6039 | 60/200,779 | 05/22/2000 |
| SEQ ID NO:6040 | 60/200,779 | 05/22/2000 |
| SEQ ID NO:6041 | 60/200,779 | 05/22/2000 |
| SEQ ID NO:6042 | 60/200,779 | 05/22/2000 |
| SEQ ID NO:6043 | 60/200,779 | 05/22/2000 |
| SEQ ID NO:6044 | 60/200,779 | 05/22/2000 |
| SEQ ID NO:6045 | 60/200,779 | 05/22/2000 |
| SEQ ID NO:6046 | 60/200,779 | 05/22/2000 |
| SEQ ID NO:6047 | 60/200,779 | 05/22/2000 |
| SEQ ID NO:6048 | 60/200,779 | 05/22/2000 |
| SEQ ID NO:6049 | 60/200,779 | 05/22/2000 |
| SEQ ID NO:6050 | 60/200,779 | 05/22/2000 |
| SEQ ID NO:6051 | 60/200,779 | 05/22/2000 |
| SEQ ID NO:6052 | 60/200,779 | 05/22/2000 |
| SEQ ID NO:6053 | 60/200,779 | 05/22/2000 |
| SEQ ID NO:6054 | 60/200,779 | 05/22/2000 |
| SEQ ID NO:6055 | 60/200,779 | 05/22/2000 |
| SEQ ID NO:6056 | 60/200,779 | 05/22/2000 |
| SEQ ID NO:6057 | 60/200,779 | 05/22/2000 |
| SEQ ID NO:6058 | 60/200,779 | 05/22/2000 |
| SEQ ID NO:6059 | 60/200,779 | 05/22/2000 |
| SEQ ID NO:6060 | 60/200,779 | 05/22/2000 |
| SEQ ID NO:6061 | 60/200,779 | 05/22/2000 |
| SEQ ID NO:6062 | 60/200,779 | 05/22/2000 |
| SEQ ID NO:6063 | 60/200,779 | 05/22/2000 |
| SEQ ID NO:6064 | 60/200,779 | 05/22/2000 |
| SEQ ID NO:6065 | 60/200,779 | 05/22/2000 |
| SEQ ID NO:6066 | 60/200,779 | 05/22/2000 |
| SEQ ID NO:6067 | 60/200,779 | 05/22/2000 |
| SEQ ID NO:6068 | 60/200,779 | 05/22/2000 |
| SEQ ID NO:6069 | 60/200,779 | 05/22/2000 |
| SEQ ID NO:6070 | 60/200,779 | 05/22/2000 |
| SEQ ID NO:6071 | 60/200,779 | 05/22/2000 |
| SEQ ID NO:6072 | 60/200,779 | 05/22/2000 |
| SEQ ID NO:6073 | 60/200,779 | 05/22/2000 |
| SEQ ID NO:6074 | 60/200,779 | 05/22/2000 |
| SEQ ID NO:6075 | 60/200,779 | 05/22/2000 |
| SEQ ID NO:6076 | 60/200,779 | 05/22/2000 |
| SEQ ID NO:6077 | 60/200,779 | 05/22/2000 |
| SEQ ID NO:6078 | 60/200,779 | 05/22/2000 |
| SEQ ID NO:6079 | 60/200,779 | 05/22/2000 |
| SEQ ID NO:6080 | 60/200,779 | 05/22/2000 |
| SEQ ID NO:6081 | 60/200,779 | 05/22/2000 |
| SEQ ID NO:6082 | 60/200,779 | 05/22/2000 |
| SEQ ID NO:6083 | 60/200,779 | 05/22/2000 |
| SEQ ID NO:6084 | 60/200,779 | 05/22/2000 |
| SEQ ID NO:6085 | 60/200,779 | 05/22/2000 |
| SEQ ID NO:6086 | 60/200,779 | 05/22/2000 |
| SEQ ID NO:6087 | 60/200,779 | 05/22/2000 |
| SEQ ID NO:6088 | 60/200,779 | 05/22/2000 |
| SEQ ID NO:6089 | 60/200,779 | 05/22/2000 |
| SEQ ID NO:6090 | 60/200,779 | 05/22/2000 |
| SEQ ID NO:6091 | 60/200,779 | 05/22/2000 |
| SEQ ID NO:6092 | 60/200,779 | 05/22/2000 |
| SEQ ID NO:6093 | 60/200,779 | 05/22/2000 |
| SEQ ID NO:6094 | 60/200,779 | 05/22/2000 |
| SEQ ID NO:6095 | 60/200,779 | 05/22/2000 |
| SEQ ID NO:6096 | 60/200,779 | 05/22/2000 |
| SEQ ID NO:6097 | 60/200,779 | 05/22/2000 |
| SEQ ID NO:6098 | 60/200,779 | 05/22/2000 |
| SEQ ID NO:6099 | 60/200,779 | 05/22/2000 |
| SEQ ID NO:6100 | 60/200,779 | 05/22/2000 |
| SEQ ID NO:6101 | 60/200,779 | 05/22/2000 |
| SEQ ID NO:6102 | 60/200,779 | 05/22/2000 |
| SEQ ID NO:6103 | 60/200,779 | 05/22/2000 |
| SEQ ID NO:6104 | 60/200,779 | 05/22/2000 |
| SEQ ID NO:6105 | 60/200,779 | 05/22/2000 |
| SEQ ID NO:6106 | 60/200,779 | 05/22/2000 |
| SEQ ID NO:6107 | 60/200,779 | 05/22/2000 |
| SEQ ID NO:6108 | 60/200,779 | 05/22/2000 |
| SEQ ID NO:6109 | 60/200,779 | 05/22/2000 |
| SEQ ID NO:6110 | 60/200,779 | 05/22/2000 |
| SEQ ID NO:6111 | 60/200,779 | 05/22/2000 |
| SEQ ID NO:6112 | 60/200,779 | 05/22/2000 |
| SEQ ID NO:6113 | 60/200,779 | 05/22/2000 |
| SEQ ID NO:6114 | 60/200,779 | 05/22/2000 |
| SEQ ID NO:6115 | 60/200,779 | 05/22/2000 |
| SEQ ID NO:6116 | 60/200,779 | 05/22/2000 |
| SEQ ID NO:6117 | 60/200,779 | 05/22/2000 |
| SEQ ID NO:6118 | 60/200,779 | 05/22/2000 |
| SEQ ID NO:6119 | 60/200,779 | 05/22/2000 |
| SEQ ID NO:6120 | 60/200,779 | 05/22/2000 |
| SEQ ID NO:6121 | 60/200,779 | 05/22/2000 |
| SEQ ID NO:6122 | 60/200,779 | 05/22/2000 |
| SEQ ID NO:6123 | 60/200,779 | 05/22/2000 |
| SEQ ID NO:6124 | 60/200,779 | 05/22/2000 |
| SEQ ID NO:6125 | 60/200,779 | 05/22/2000 |
| SEQ ID NO:6126 | 60/200,779 | 05/22/2000 |
| SEQ ID NO:6127 | 60/200,779 | 05/22/2000 |
| SEQ ID NO:6128 | 60/200,779 | 05/22/2000 |
| SEQ ID NO:6129 | 60/200,779 | 05/22/2000 |
| SEQ ID NO:6130 | 60/200,779 | 05/22/2000 |
| SEQ ID NO:6131 | 60/200,779 | 05/22/2000 |
| SEQ ID NO:6132 | 60/200,779 | 05/22/2000 |
| SEQ ID NO:6133 | 60/200,779 | 05/22/2000 |
| SEQ ID NO:6134 | 60/200,779 | 05/22/2000 |
| SEQ ID NO:6135 | 60/200,779 | 05/22/2000 |
| SEQ ID NO:6136 | 60/200,779 | 05/22/2000 |
| SEQ ID NO:6137 | 60/200,779 | 05/22/2000 |
| SEQ ID NO:6138 | 60/200,779 | 05/22/2000 |
| SEQ ID NO:6139 | 60/200,779 | 05/22/2000 |
| SEQ ID NO:6140 | 60/200,779 | 05/22/2000 |
| SEQ ID NO:6141 | 60/200,779 | 05/22/2000 |
| SEQ ID NO:6142 | 60/200,779 | 05/22/2000 |
| SEQ ID NO:6143 | 60/200,779 | 05/22/2000 |
| SEQ ID NO:6144 | 60/200,779 | 05/22/2000 |
| SEQ ID NO:6145 | 60/200,779 | 05/22/2000 |
| SEQ ID NO:6146 | 60/200,779 | 05/22/2000 |
| SEQ ID NO:6147 | 60/200,779 | 05/22/2000 |
| SEQ ID NO:6148 | 60/200,779 | 05/22/2000 |
| SEQ ID NO:6149 | 60/200,779 | 05/22/2000 |
| SEQ ID NO:6150 | 60/200,779 | 05/22/2000 |
| SEQ ID NO:6151 | 60/200,779 | 05/22/2000 |
| SEQ ID NO:6152 | 60/200,779 | 05/22/2000 |
| SEQ ID NO:6153 | 60/200,779 | 05/22/2000 |
| SEQ ID NO:6154 | 60/200,779 | 05/22/2000 |
| SEQ ID NO:6155 | 60/200,779 | 05/22/2000 |
| SEQ ID NO:6156 | 60/200,779 | 05/22/2000 |
| SEQ ID NO:6157 | 60/200,779 | 05/22/2000 |
| SEQ ID NO:6158 | 60/200,779 | 05/22/2000 |
| SEQ ID NO:6159 | 60/200,779 | 05/22/2000 |
| SEQ ID NO:6160 | 60/200,779 | 05/22/2000 |
| SEQ ID NO:6161 | 60/200,779 | 05/22/2000 |
| SEQ ID NO:6162 | 60/200,779 | 05/22/2000 |
| SEQ ID NO:6163 | 60/200,779 | 05/22/2000 |
| SEQ ID NO:6164 | 60/200,779 | 05/22/2000 |
| SEQ ID NO:6165 | 60/200,779 | 05/22/2000 |
| SEQ ID NO:6166 | 60/200,779 | 05/22/2000 |
| SEQ ID NO:6167 | 60/200,779 | 05/22/2000 |
| SEQ ID NO:6168 | 60/200,779 | 05/22/2000 |
| SEQ ID NO:6169 | 60/200,779 | 05/22/2000 |
| SEQ ID NO:6170 | 60/200,779 | 05/22/2000 |
| SEQ ID NO:6171 | 60/200,779 | 05/22/2000 |
| SEQ ID NO:6172 | 60/200,779 | 05/22/2000 |
| SEQ ID NO:6173 | 60/200,779 | 05/22/2000 |
| SEQ ID NO:6174 | 60/200,779 | 05/22/2000 |
| SEQ ID NO:6175 | 60/200,779 | 05/22/2000 |
| SEQ ID NO:6176 | 60/200,779 | 05/22/2000 |
| SEQ ID NO:6177 | 60/200,779 | 05/22/2000 |
| SEQ ID NO:6178 | 60/200,779 | 05/22/2000 |
| SEQ ID NO:6179 | 60/200,779 | 05/22/2000 |
| SEQ ID NO:6180 | 60/200,779 | 05/22/2000 |
| SEQ ID NO:6181 | 60/200,779 | 05/22/2000 |
| SEQ ID NO:6182 | 60/200,779 | 05/22/2000 |
| SEQ ID NO:6183 | 60/200,779 | 05/22/2000 |
| SEQ ID NO:6184 | 60/200,779 | 05/22/2000 |
| SEQ ID NO:6185 | 60/200,779 | 05/22/2000 |
| SEQ ID NO:6186 | 60/200,779 | 05/22/2000 |
| SEQ ID NO:6187 | 60/200,779 | 05/22/2000 |
| SEQ ID NO:6188 | 60/200,779 | 05/22/2000 |
| SEQ ID NO:6189 | 60/200,779 | 05/22/2000 |
| SEQ ID NO:6190 | 60/200,779 | 05/22/2000 |
| SEQ ID NO:6191 | 60/200,779 | 05/22/2000 |
| SEQ ID NO:6192 | 60/200,779 | 05/22/2000 |
| SEQ ID NO:6193 | 60/200,779 | 05/22/2000 |
| SEQ ID NO:6194 | 60/200,779 | 05/22/2000 |
| SEQ ID NO:6195 | 60/200,779 | 05/22/2000 |
| SEQ ID NO:6196 | 60/200,779 | 05/22/2000 |
| SEQ ID NO:6197 | 60/200,779 | 05/22/2000 |
| SEQ ID NO:6198 | 60/200,779 | 05/22/2000 |
| SEQ ID NO:6199 | 60/200,779 | 05/22/2000 |
| SEQ ID NO:6200 | 60/200,779 | 05/22/2000 |
| SEQ ID NO:6201 | 60/200,779 | 05/22/2000 |
| SEQ ID NO:6202 | 60/200,999 | 05/01/2000 |
| SEQ ID NO:6203 | 60/200,999 | 05/01/2000 |
| SEQ ID NO:6204 | 60/200,999 | 05/01/2000 |
| SEQ ID NO:6205 | 60/200,999 | 05/01/2000 |
| SEQ ID NO:6206 | 60/200,999 | 05/01/2000 |
| SEQ ID NO:6207 | 60/200,999 | 05/01/2000 |
| SEQ ID NO:6208 | 60/200,999 | 05/01/2000 |
| SEQ ID NO:6209 | 60/200,999 | 05/01/2000 |
| SEQ ID NO:6210 | 60/200,999 | 05/01/2000 |
| SEQ ID NO:6211 | 60/200,999 | 05/01/2000 |
| SEQ ID NO:6212 | 60/200,999 | 05/01/2000 |
| SEQ ID NO:6213 | 60/200,999 | 05/01/2000 |
| SEQ ID NO:6214 | 60/200,999 | 05/01/2000 |
| SEQ ID NO:6215 | 60/200,999 | 05/01/2000 |
| SEQ ID NO:6216 | 60/200,999 | 05/01/2000 |
| SEQ ID NO:6217 | 60/200,999 | 05/01/2000 |
| SEQ ID NO:6218 | 60/200,999 | 05/01/2000 |
| SEQ ID NO:6219 | 60/200,999 | 05/01/2000 |
| SEQ ID NO:6220 | 60/200,999 | 05/01/2000 |
| SEQ ID NO:6221 | 60/200,999 | 05/01/2000 |
| SEQ ID NO:6222 | 60/202,084 | 05/04/2000 |
| SEQ ID NO:6223 | 60/200,545 | 04/27/2000 |
| SEQ ID NO:6224 | 60/200,545 | 04/27/2000 |
| SEQ ID NO:6225 | 60/200,545 | 04/27/2000 |
| SEQ ID NO:6226 | 60/200,545 | 04/27/2000 |
| SEQ ID NO:6227 | 60/200,545 | 04/27/2000 |
| SEQ ID NO:6228 | 60/200,545 | 04/27/2000 |
| SEQ ID NO:6229 | 60/200,545 | 04/27/2000 |
| SEQ ID NO:6230 | 60/200,545 | 04/27/2000 |
| SEQ ID NO:6231 | 60/200,545 | 04/27/2000 |
| SEQ ID NO:6232 | 60/200,545 | 04/27/2000 |
| SEQ ID NO:6233 | 60/200,545 | 04/27/2000 |
| SEQ ID NO:6234 | 60/200,545 | 04/27/2000 |
| SEQ ID NO:6235 | 60/200,545 | 04/27/2000 |
| SEQ ID NO:6236 | 60/200,545 | 04/27/2000 |
| SEQ ID NO:6237 | 60/200,545 | 04/27/2000 |
| SEQ ID NO:6238 | 60/200,545 | 04/27/2000 |
| SEQ ID NO:6239 | 60/200,545 | 04/27/2000 |
| SEQ ID NO:6240 | 60/200,545 | 04/27/2000 |
| SEQ ID NO:6241 | 60/200,545 | 04/27/2000 |
| SEQ ID NO:6242 | 60/200,545 | 04/27/2000 |
| SEQ ID NO:6243 | 60/200,545 | 04/27/2000 |
| SEQ ID NO:6244 | 60/200,545 | 04/27/2000 |
| SEQ ID NO:6245 | 60/200,545 | 04/27/2000 |
| SEQ ID NO:6246 | 60/200,545 | 04/27/2000 |
| SEQ ID NO:6247 | 60/200,545 | 04/27/2000 |
| SEQ ID NO:6248 | 60/200,545 | 04/27/2000 |
| SEQ ID NO:6249 | 60/200,545 | 04/27/2000 |
| SEQ ID NO:6250 | 60/200,545 | 04/27/2000 |
| SEQ ID NO:6251 | 60/200,545 | 04/27/2000 |
| SEQ ID NO:6252 | 60/200,545 | 04/27/2000 |
| SEQ ID NO:6253 | 60/200,545 | 04/27/2000 |
| SEQ ID NO:6254 | 60/200,545 | 04/27/2000 |
| SEQ ID NO:6255 | 60/200,545 | 04/27/2000 |
| SEQ ID NO:6256 | 60/200,545 | 04/27/2000 |
| SEQ ID NO:6257 | 60/200,545 | 04/27/2000 |
| SEQ ID NO:6258 | 60/200,545 | 04/27/2000 |
| SEQ ID NO:6259 | 60/200,545 | 04/27/2000 |
| SEQ ID NO:6260 | 60/200,545 | 04/27/2000 |
| SEQ ID NO:6261 | 60/200,545 | 04/27/2000 |
| SEQ ID NO:6262 | 60/200,545 | 04/27/2000 |
| SEQ ID NO:6263 | 60/200,545 | 04/27/2000 |
| SEQ ID NO:6264 | 60/200,545 | 04/27/2000 |
| SEQ ID NO:6265 | 60/200,545 | 04/27/2000 |
| SEQ ID NO:6266 | 60/200,545 | 04/27/2000 |
| SEQ ID NO:6267 | 60/200,545 | 04/27/2000 |
| SEQ ID NO:6268 | 60/200,545 | 04/27/2000 |
| SEQ ID NO:6269 | 60/200,545 | 04/27/2000 |
| SEQ ID NO:6270 | 60/200,545 | 04/27/2000 |
| SEQ ID NO:6271 | 60/200,545 | 04/27/2000 |
| SEQ ID NO:6272 | 60/200,545 | 04/27/2000 |
| SEQ ID NO:6273 | 60/200,545 | 04/27/2000 |
| SEQ ID NO:6274 | 60/200,545 | 04/27/2000 |
| SEQ ID NO:6275 | 60/200,545 | 04/27/2000 |
| SEQ ID NO:6276 | 60/200,545 | 04/27/2000 |
| SEQ ID NO:6277 | 60/200,545 | 04/27/2000 |
| SEQ ID NO:6278 | 60/200,545 | 04/27/2000 |
| SEQ ID NO:6279 | 60/200,545 | 04/27/2000 |
| SEQ ID NO:6280 | 60/200,545 | 04/27/2000 |
| SEQ ID NO:6281 | 60/200,545 | 04/27/2000 |
| SEQ ID NO:6282 | 60/200,545 | 04/27/2000 |
| SEQ ID NO:6283 | 60/200,545 | 04/27/2000 |
| SEQ ID NO:6284 | 60/200,545 | 04/27/2000 |
| SEQ ID NO:6285 | 60/200,545 | 04/27/2000 |
| SEQ ID NO:6286 | 60/200,545 | 04/27/2000 |
| SEQ ID NO:6287 | 60/200,545 | 04/27/2000 |
| SEQ ID NO:6288 | 60/200,545 | 04/27/2000 |
| SEQ ID NO:6289 | 60/200,545 | 04/27/2000 |
| SEQ ID NO:6290 | 60/200,545 | 04/27/2000 |
| SEQ ID NO:6291 | 60/200,545 | 04/27/2000 |
| SEQ ID NO:6292 | 60/200,545 | 04/27/2000 |
| SEQ ID NO:6293 | 60/200,545 | 04/27/2000 |
| SEQ ID NO:6294 | 60/200,545 | 04/27/2000 |
| SEQ ID NO:6295 | 60/200,545 | 04/27/2000 |
| SEQ ID NO:6296 | 60/200,545 | 04/27/2000 |
| SEQ ID NO:6297 | 60/200,545 | 04/27/2000 |
| SEQ ID NO:6298 | 60/200,545 | 04/27/2000 |
| SEQ ID NO:6299 | 60/200,545 | 04/27/2000 |
| SEQ ID NO:6300 | 60/200,545 | 04/27/2000 |
| SEQ ID NO:6301 | 60/200,545 | 04/27/2000 |
| SEQ ID NO:6302 | 60/200,545 | 04/27/2000 |
| SEQ ID NO:6303 | 60/200,545 | 04/27/2000 |
| SEQ ID NO:6304 | 60/200,545 | 04/27/2000 |
| SEQ ID NO:6305 | 60/200,545 | 04/27/2000 |
| SEQ ID NO:6306 | 60/200,545 | 04/27/2000 |
| SEQ ID NO:6307 | 60/200,545 | 04/27/2000 |
| SEQ ID NO:6308 | 60/200,545 | 04/27/2000 |
| SEQ ID NO:6309 | 60/200,545 | 04/27/2000 |
| SEQ ID NO:6310 | 60/200,545 | 04/27/2000 |
| SEQ ID NO:6311 | 60/200,545 | 04/27/2000 |
| SEQ ID NO:6312 | 60/200,545 | 04/27/2000 |
| SEQ ID NO:6313 | 60/200,545 | 04/27/2000 |
| SEQ ID NO:6314 | 60/200,545 | 04/27/2000 |
| SEQ ID NO:6315 | 60/200,545 | 04/27/2000 |
| SEQ ID NO:6316 | 60/200,545 | 04/27/2000 |
| SEQ ID NO:6317 | 60/200,545 | 04/27/2000 |
| SEQ ID NO:6318 | 60/200,545 | 04/27/2000 |
| SEQ ID NO:6319 | 60/200,545 | 04/27/2000 |
| SEQ ID NO:6320 | 60/200,545 | 04/27/2000 |
| SEQ ID NO:6321 | 60/200,545 | 04/27/2000 |
| SEQ ID NO:6322 | 60/200,545 | 04/27/2000 |
| SEQ ID NO:6323 | 60/200,545 | 04/27/2000 |
| SEQ ID NO:6324 | 60/200,545 | 04/27/2000 |
| SEQ ID NO:6325 | 60/200,545 | 04/27/2000 |
| SEQ ID NO:6326 | 60/200,545 | 04/27/2000 |
| SEQ ID NO:6327 | 60/200,545 | 04/27/2000 |
| SEQ ID NO:6328 | 60/200,545 | 04/27/2000 |
| SEQ ID NO:6329 | 60/200,545 | 04/27/2000 |
| SEQ ID NO:6330 | 60/200,545 | 04/27/2000 |
| SEQ ID NO:6331 | 60/200,545 | 04/27/2000 |
| SEQ ID NO:6332 | 60/200,545 | 04/27/2000 |
| SEQ ID NO:6333 | 60/200,545 | 04/27/2000 |
| SEQ ID NO:6334 | 60/200,545 | 04/27/2000 |
| SEQ ID NO:6335 | 60/200,545 | 04/27/2000 |
| SEQ ID NO:6336 | 60/200,545 | 04/27/2000 |
| SEQ ID NO:6337 | 60/200,545 | 04/27/2000 |
| SEQ ID NO:6338 | 60/200,545 | 04/27/2000 |
| SEQ ID NO:6339 | 60/200,545 | 04/27/2000 |
| SEQ ID NO:6340 | 60/200,545 | 04/27/2000 |
| SEQ ID NO:6341 | 60/200,545 | 04/27/2000 |
| SEQ ID NO:6342 | 60/200,545 | 04/27/2000 |
| SEQ ID NO:6343 | 60/200,545 | 04/27/2000 |
| SEQ ID NO:6344 | 60/200,545 | 04/27/2000 |
| SEQ ID NO:6345 | 60/200,545 | 04/27/2000 |
| SEQ ID NO:6346 | 60/200,545 | 04/27/2000 |
| SEQ ID NO:6347 | 60/200,545 | 04/27/2000 |
| SEQ ID NO:6348 | 60/200,545 | 04/27/2000 |
| SEQ ID NO:6349 | 60/200,545 | 04/27/2000 |
| SEQ ID NO:6350 | 60/200,545 | 04/27/2000 |
| SEQ ID NO:6351 | 60/200,545 | 04/27/2000 |
| SEQ ID NO:6352 | 60/200,545 | 04/27/2000 |
| SEQ ID NO:6353 | 60/200,545 | 04/27/2000 |
| SEQ ID NO:6354 | 60/200,545 | 04/27/2000 |
| SEQ ID NO:6355 | 60/200,545 | 04/27/2000 |
| SEQ ID NO:6356 | 60/200,545 | 04/27/2000 |
| SEQ ID NO:6357 | 60/200,545 | 04/27/2000 |
| SEQ ID NO:6358 | 60/200,545 | 04/27/2000 |
| SEQ ID NO:6359 | 60/200,545 | 04/27/2000 |
| SEQ ID NO:6360 | 60/200,545 | 04/27/2000 |
| SEQ ID NO:6361 | 60/200,545 | 04/27/2000 |
| SEQ ID NO:6362 | 60/200,545 | 04/27/2000 |
| SEQ ID NO:6363 | 60/200,545 | 04/27/2000 |
| SEQ ID NO:6364 | 60/200,545 | 04/27/2000 |
| SEQ ID NO:6365 | 60/200,545 | 04/27/2000 |
| SEQ ID NO:6366 | 60/200,545 | 04/27/2000 |
| SEQ ID NO:6367 | 60/200,545 | 04/27/2000 |
| SEQ ID NO:6368 | 60/200,545 | 04/27/2000 |
| SEQ ID NO:6369 | 60/200,545 | 04/27/2000 |
| SEQ ID NO:6370 | 60/200,545 | 04/27/2000 |
| SEQ ID NO:6371 | 60/200,545 | 04/27/2000 |
| SEQ ID NO:6372 | 60/200,545 | 04/27/2000 |
| SEQ ID NO:6373 | 60/200,545 | 04/27/2000 |
| SEQ ID NO:6374 | 60/200,545 | 04/27/2000 |
| SEQ ID NO:6375 | 60/200,545 | 04/27/2000 |
| SEQ ID NO:6376 | 60/200,545 | 04/27/2000 |
| SEQ ID NO:6377 | 60/200,545 | 04/27/2000 |
| SEQ ID NO:6378 | 60/200,545 | 04/27/2000 |
| SEQ ID NO:6379 | 60/200,545 | 04/27/2000 |
| SEQ ID NO:6380 | 60/200,545 | 04/27/2000 |
| SEQ ID NO:6381 | 60/200,545 | 04/27/2000 |
| SEQ ID NO:6382 | 60/200,545 | 04/27/2000 |
| SEQ ID NO:6383 | 60/200,545 | 04/27/2000 |
| SEQ ID NO:6384 | 60/200,545 | 04/27/2000 |
| SEQ ID NO:6385 | 60/200,545 | 04/27/2000 |
| SEQ ID NO:6386 | 60/200,545 | 04/27/2000 |
| SEQ ID NO:6387 | 60/200,545 | 04/27/2000 |
| SEQ ID NO:6388 | 60/200,545 | 04/27/2000 |
| SEQ ID NO:6389 | 60/200,545 | 04/27/2000 |
| SEQ ID NO:6390 | 60/200,545 | 04/27/2000 |
| SEQ ID NO:6391 | 60/200,545 | 04/27/2000 |
| SEQ ID NO:6392 | 60/200,545 | 04/27/2000 |
| SEQ ID NO:6393 | 60/200,545 | 04/27/2000 |
| SEQ ID NO:6394 | 60/200,545 | 04/27/2000 |
| SEQ ID NO:6395 | 60/200,545 | 04/27/2000 |
| SEQ ID NO:6396 | 60/200,545 | 04/27/2000 |
| SEQ ID NO:6397 | 60/200,545 | 04/27/2000 |
| SEQ ID NO:6398 | 60/200,545 | 04/27/2000 |
| SEQ ID NO:6399 | 60/200,545 | 04/27/2000 |
| SEQ ID NO:6400 | 60/200,545 | 04/27/2000 |
| SEQ ID NO:6401 | 60/200,545 | 04/27/2000 |
| SEQ ID NO:6402 | 60/200,545 | 04/27/2000 |
| SEQ ID NO:6403 | 60/200,545 | 04/27/2000 |
| SEQ ID NO:6404 | 60/200,545 | 04/27/2000 |
| SEQ ID NO:6405 | 60/200,545 | 04/27/2000 |
| SEQ ID NO:6406 | 60/200,545 | 04/27/2000 |
| SEQ ID NO:6407 | 60/200,545 | 04/27/2000 |
| SEQ ID NO:6408 | 60/200,545 | 04/27/2000 |
| SEQ ID NO:6409 | 60/200,545 | 04/27/2000 |
| SEQ ID NO:6410 | 60/200,545 | 04/27/2000 |
| SEQ ID NO:6411 | 60/200,545 | 04/27/2000 |
| SEQ ID NO:6412 | 60/200,545 | 04/27/2000 |
| SEQ ID NO:6413 | 60/200,545 | 04/27/2000 |
| SEQ ID NO:6414 | 60/200,545 | 04/27/2000 |
| SEQ ID NO:6415 | 60/200,545 | 04/27/2000 |
| SEQ ID NO:6416 | 60/200,545 | 04/27/2000 |
| SEQ ID NO:6417 | 60/200,545 | 04/27/2000 |
| SEQ ID NO:6418 | 60/200,545 | 04/27/2000 |
| SEQ ID NO:6419 | 60/200,545 | 04/27/2000 |
| SEQ ID NO:6420 | 60/200,545 | 04/27/2000 |
| SEQ ID NO:6421 | 60/200,545 | 04/27/2000 |
| SEQ ID NO:6422 | 60/200,545 | 04/27/2000 |
| SEQ ID NO:6423 | 60/200,545 | 04/27/2000 |
| SEQ ID NO:6424 | 60/200,545 | 04/27/2000 |
| SEQ ID NO:6425 | 60/200,545 | 04/27/2000 |
| SEQ ID NO:6426 | 60/200,545 | 04/27/2000 |
| SEQ ID NO:6427 | 60/200,545 | 04/27/2000 |
| SEQ ID NO:6428 | 60/200,545 | 04/27/2000 |
| SEQ ID NO:6429 | 60/200,545 | 04/27/2000 |
| SEQ ID NO:6430 | 60/200,545 | 04/27/2000 |
| SEQ ID NO:6431 | 60/200,545 | 04/27/2000 |
| SEQ ID NO:6432 | 60/200,545 | 04/27/2000 |
| SEQ ID NO:6433 | 60/200,545 | 04/27/2000 |
| SEQ ID NO:6434 | 60/200,545 | 04/27/2000 |
| SEQ ID NO:6435 | 60/200,545 | 04/27/2000 |
| SEQ ID NO:6436 | 60/200,545 | 04/27/2000 |
| SEQ ID NO:6437 | 60/200,545 | 04/27/2000 |
| SEQ ID NO:6438 | 60/200,545 | 04/27/2000 |
| SEQ ID NO:6439 | 60/200,545 | 04/27/2000 |
| SEQ ID NO:6440 | 60/200,545 | 04/27/2000 |
| SEQ ID NO:6441 | 60/200,545 | 04/27/2000 |
| SEQ ID NO:6442 | 60/200,545 | 04/27/2000 |
| SEQ ID NO:6443 | 60/200,545 | 04/27/2000 |
| SEQ ID NO:6444 | 60/200,545 | 04/27/2000 |
| SEQ ID NO:6445 | 60/200,545 | 04/27/2000 |
| SEQ ID NO:6446 | 60/200,545 | 04/27/2000 |
| SEQ ID NO:6447 | 60/200,545 | 04/27/2000 |
| SEQ ID NO:6448 | 60/200,545 | 04/27/2000 |
| SEQ ID NO:6449 | 60/200,545 | 04/27/2000 |
| SEQ ID NO:6450 | 60/200,545 | 04/27/2000 |
| SEQ ID NO:6451 | 60/200,545 | 04/27/2000 |
| SEQ ID NO:6452 | 60/200,545 | 04/27/2000 |
| SEQ ID NO:6453 | 60/200,545 | 04/27/2000 |
| SEQ ID NO:6454 | 60/200,545 | 04/27/2000 |
| SEQ ID NO:6455 | 60/200,545 | 04/27/2000 |
| SEQ ID NO:6456 | 60/200,545 | 04/27/2000 |
| SEQ ID NO:6457 | 60/200,545 | 04/27/2000 |
| SEQ ID NO:6458 | 60/200,545 | 04/27/2000 |
| SEQ ID NO:6459 | 60/200,545 | 04/27/2000 |
| SEQ ID NO:6460 | 60/200,545 | 04/27/2000 |
| SEQ ID NO:6461 | 60/200,545 | 04/27/2000 |
| SEQ ID NO:6462 | 60/200,545 | 04/27/2000 |
| SEQ ID NO:6463 | 60/200,545 | 04/27/2000 |
| SEQ ID NO:6464 | 60/200,545 | 04/27/2000 |
| SEQ ID NO:6465 | 60/200,545 | 04/27/2000 |
| SEQ ID NO:6466 | 60/200,545 | 04/27/2000 |
| SEQ ID NO:6467 | 60/200,545 | 04/27/2000 |
| SEQ ID NO:6468 | 60/200,545 | 04/27/2000 |
| SEQ ID NO:6469 | 60/200,545 | 04/27/2000 |
| SEQ ID NO:6470 | 60/200,545 | 04/27/2000 |
| SEQ ID NO:6471 | 60/200,545 | 04/27/2000 |
| SEQ ID NO:6472 | 60/200,545 | 04/27/2000 |
| SEQ ID NO:6473 | 60/200,545 | 04/27/2000 |
| SEQ ID NO:6474 | 60/200,545 | 04/27/2000 |
| SEQ ID NO:6475 | 60/200,545 | 04/27/2000 |
| SEQ ID NO:6476 | 60/200,545 | 04/27/2000 |
| SEQ ID NO:6477 | 60/200,545 | 04/27/2000 |
| SEQ ID NO:6478 | 60/200,545 | 04/27/2000 |
| SEQ ID NO:6479 | 60/200,545 | 04/27/2000 |
| SEQ ID NO:6480 | 60/200,545 | 04/27/2000 |
| SEQ ID NO:6481 | 60/200,545 | 04/27/2000 |
| SEQ ID NO:6482 | 60/200,545 | 04/27/2000 |
| SEQ ID NO:6483 | 60/200,545 | 04/27/2000 |
| SEQ ID NO:6484 | 60/200,545 | 04/27/2000 |
| SEQ ID NO:6485 | 60/200,545 | 04/27/2000 |
| SEQ ID NO:6486 | 60/200,545 | 04/27/2000 |
| SEQ ID NO:6487 | 60/200,545 | 04/27/2000 |
| SEQ ID NO:6488 | 60/200,545 | 04/27/2000 |
| SEQ ID NO:6489 | 60/200,545 | 04/27/2000 |
| SEQ ID NO:6490 | 60/200,545 | 04/27/2000 |
| SEQ ID NO:6491 | 60/200,545 | 04/27/2000 |
| SEQ ID NO:6492 | 60/200,545 | 04/27/2000 |
| SEQ ID NO:6493 | 60/200,545 | 04/27/2000 |
| SEQ ID NO:6494 | 60/200,545 | 04/27/2000 |
| SEQ ID NO:6495 | 60/200,545 | 04/27/2000 |
| SEQ ID NO:6496 | 60/200,545 | 04/27/2000 |
| SEQ ID NO:6497 | 60/200,545 | 04/27/2000 |
| SEQ ID NO:6498 | 60/200,545 | 04/27/2000 |
| SEQ ID NO:6499 | 60/200,545 | 04/27/2000 |
| SEQ ID NO:6500 | 60/200,545 | 04/27/2000 |
| SEQ ID NO:6501 | 60/200,545 | 04/27/2000 |
| SEQ ID NO:6502 | 60/200,545 | 04/27/2000 |
| SEQ ID NO:6503 | 60/200,545 | 04/27/2000 |
| SEQ ID NO:6504 | 60/200,545 | 04/27/2000 |
| SEQ ID NO:6505 | 60/200,545 | 04/27/2000 |
| SEQ ID NO:6506 | 60/200,545 | 04/27/2000 |
| SEQ ID NO:6507 | 60/200,545 | 04/27/2000 |
| SEQ ID NO:6508 | 60/200,545 | 04/27/2000 |
| SEQ ID NO:6509 | 60/200,545 | 04/27/2000 |
| SEQ ID NO:6510 | 60/200,545 | 04/27/2000 |
| SEQ ID NO:6511 | 60/200,545 | 04/27/2000 |
| SEQ ID NO:6512 | 60/200,545 | 04/27/2000 |
| SEQ ID NO:6513 | 60/200,545 | 04/27/2000 |
| SEQ ID NO:6514 | 60/200,545 | 04/27/2000 |
| SEQ ID NO:6515 | 60/200,545 | 04/27/2000 |
| SEQ ID NO:6516 | 60/200,545 | 04/27/2000 |
| SEQ ID NO:6517 | 60/200,545 | 04/27/2000 |
| SEQ ID NO:6518 | 60/200,545 | 04/27/2000 |
| SEQ ID NO:6519 | 60/200,545 | 04/27/2000 |
| SEQ ID NO:6520 | 60/200,545 | 04/27/2000 |
| SEQ ID NO:6521 | 60/200,545 | 04/27/2000 |
| SEQ ID NO:6522 | 60/200,545 | 04/27/2000 |
| SEQ ID NO:6523 | 60/200,545 | 04/27/2000 |
| SEQ ID NO:6524 | 60/200,545 | 04/27/2000 |
| SEQ ID NO:6525 | 60/200,545 | 04/27/2000 |
| SEQ ID NO:6526 | 60/200,545 | 04/27/2000 |
| SEQ ID NO:6527 | 60/200,545 | 04/27/2000 |
| SEQ ID NO:6528 | 60/200,545 | 04/27/2000 |
| SEQ ID NO:6529 | 60/200,545 | 04/27/2000 |
| SEQ ID NO:6530 | 60/200,545 | 04/27/2000 |
| SEQ ID NO:6531 | 60/200,545 | 04/27/2000 |
| SEQ ID NO:6532 | 60/200,545 | 04/27/2000 |
| SEQ ID NO:6533 | 60/200,545 | 04/27/2000 |
| SEQ ID NO:6534 | 60/200,545 | 04/27/2000 |
| SEQ ID NO:6535 | 60/200,545 | 04/27/2000 |
| SEQ ID NO:6536 | 60/200,545 | 04/27/2000 |
| SEQ ID NO:6537 | 60/200,545 | 04/27/2000 |
| SEQ ID NO:6538 | 60/200,545 | 04/27/2000 |
| SEQ ID NO:6539 | 60/200,545 | 04/27/2000 |
| SEQ ID NO:6540 | 60/200,545 | 04/27/2000 |
| SEQ ID NO:6541 | 60/200,545 | 04/27/2000 |
| SEQ ID NO:6542 | 60/200,545 | 04/27/2000 |
| SEQ ID NO:6543 | 60/200,545 | 04/27/2000 |
| SEQ ID NO:6544 | 60/200,545 | 04/27/2000 |
| SEQ ID NO:6545 | 60/200,545 | 04/27/2000 |
| SEQ ID NO:6546 | 60/200,545 | 04/27/2000 |
| SEQ ID NO:6547 | 60/200,545 | 04/27/2000 |
| SEQ ID NO:6548 | 60/200,545 | 04/27/2000 |
| SEQ ID NO:6549 | 60/200,545 | 04/27/2000 |
| SEQ ID NO:6550 | 60/200,545 | 04/27/2000 |
| SEQ ID NO:6551 | 60/200,545 | 04/27/2000 |
| SEQ ID NO:6552 | 60/200,545 | 04/27/2000 |
| SEQ ID NO:6553 | 60/200,545 | 04/27/2000 |
| SEQ ID NO:6554 | 60/200,545 | 04/27/2000 |
| SEQ ID NO:6555 | 60/200,545 | 04/27/2000 |
| SEQ ID NO:6556 | 60/200,545 | 04/27/2000 |
| SEQ ID NO:6557 | 60/200,545 | 04/27/2000 |
| SEQ ID NO:6558 | 60/200,545 | 04/27/2000 |
| SEQ ID NO:6559 | 60/200,545 | 04/27/2000 |
| SEQ ID NO:6560 | 60/200,545 | 04/27/2000 |
| SEQ ID NO:6561 | 60/200,545 | 04/27/2000 |
| SEQ ID NO:6562 | 60/200,545 | 04/27/2000 |
| SEQ ID NO:6563 | 60/200,545 | 04/27/2000 |
| SEQ ID NO:6564 | 60/200,545 | 04/27/2000 |
| SEQ ID NO:6565 | 60/200,545 | 04/27/2000 |
| SEQ ID NO:6566 | 60/200,545 | 04/27/2000 |
| SEQ ID NO:6567 | 60/200,545 | 04/27/2000 |
| SEQ ID NO:6568 | 60/200,545 | 04/27/2000 |
| SEQ ID NO:6569 | 60/200,545 | 04/27/2000 |
| SEQ ID NO:6570 | 60/200,545 | 04/27/2000 |
| SEQ ID NO:6571 | 60/200,545 | 04/27/2000 |
| SEQ ID NO:6572 | 60/200,545 | 04/27/2000 |
| SEQ ID NO:6573 | 60/200,545 | 04/27/2000 |
| SEQ ID NO:6574 | 60/200,545 | 04/27/2000 |
| SEQ ID NO:6575 | 60/200,545 | 04/27/2000 |
| SEQ ID NO:6576 | 60/200,545 | 04/27/2000 |
| SEQ ID NO:6577 | 60/200,545 | 04/27/2000 |
| SEQ ID NO:6578 | 60/200,545 | 04/27/2000 |
| SEQ ID NO:6579 | 60/200,545 | 04/27/2000 |
| SEQ ID NO:6580 | 60/200,545 | 04/27/2000 |
| SEQ ID NO:658l | 60/200,545 | 04/27/2000 |
| SEQ ID NO:6582 | 60/200,545 | 04/27/2000 |
| SEQ ID NO:6583 | 60/200,545 | 04/27/2000 |
| SEQ ID NO:6584 | 60/200,545 | 04/27/2000 |
| SEQ ID NO:6585 | 60/200,545 | 04/27/2000 |
| SEQ ID NO:6586 | 60/200,545 | 04/27/2000 |
| SEQ ID NO:6587 | 60/200,545 | 04/27/2000 |
| SEQ ID NO:6588 | 60/200,545 | 04/27/2000 |
| SEQ ID NO:6589 | 60/200,545 | 04/27/2000 |
| SEQ ID NO:6590 | 60/200,545 | 04/27/2000 |
| SEQ ID NO:6591 | 60/200,545 | 04/27/2000 |
| SEQ ID NO:6592 | 60/200,545 | 04/27/2000 |
| SEQ ID NO:6593 | 60/200,545 | 04/27/2000 |
| SEQ ID NO:6594 | 60/200,545 | 04/27/2000 |
| SEQ ID NO:6595 | 60/200,545 | 04/27/2000 |
| SEQ ID NO:6596 | 60/200,545 | 04/27/2000 |
| SEQ ID NO:6597 | 60/200,545 | 04/27/2000 |
| SEQ ID NO:6598 | 60/200,545 | 04/27/2000 |
| SEQ ID NO:6599 | 60/200,545 | 04/27/2000 |
| SEQ ID NO:6600 | 60/200,545 | 04/27/2000 |
| SEQ ID NO:6601 | 60/200,545 | 04/27/2000 |
| SEQ ID NO:6602 | 60/200,545 | 04/27/2000 |
| SEQ ID NO:6603 | 60/200,545 | 04/27/2000 |
| SEQ ID NO:6604 | 60/200,545 | 04/27/2000 |
| SEQ ID NO:6605 | 60/200,545 | 04/27/2000 |
| SEQ ID NO:6606 | 60/200,545 | 04/27/2000 |
| SEQ ID NO:6607 | 60/200,545 | 04/27/2000 |
| SEQ ID NO:6608 | 60/200,545 | 04/27/2000 |
| SEQ ID NO:6609 | 60/200,545 | 04/27/2000 |
| SEQ ID NO:6610 | 60/200,545 | 04/27/2000 |
| SEQ ID NO:6611 | 60/200,545 | 04/27/2000 |
| SEQ ID NO:6612 | 60/200,545 | 04/27/2000 |
| SEQ ID NO:6613 | 60/200,545 | 04/27/2000 |
| SEQ ID NO:6614 | 60/200,545 | 04/27/2000 |
| SEQ ID NO:6615 | 60/200,545 | 04/27/2000 |
| SEQ ID NO:6616 | 60/200,545 | 04/27/2000 |
| SEQ ID NO:6617 | 60/200,545 | 04/27/2000 |
| SEQ ID NO:6618 | 60/200,545 | 04/27/2000 |
| SEQ ID NO:6619 | 60/200,545 | 04/27/2000 |
| SEQ ID NO:6620 | 60/200,545 | 04/27/2000 |
| SEQ ID NO:6621 | 60/200,545 | 04/27/2000 |
| SEQ ID NO:6622 | 60/200,545 | 04/27/2000 |
| SEQ ID NO:6623 | 60/200,545 | 04/27/2000 |
| SEQ ID NO:6624 | 60/200,545 | 04/27/2000 |
| SEQ ID NO:6625 | 60/200,545 | 04/27/2000 |
| SEQ ID NO:6626 | 60/200,545 | 04/27/2000 |
| SEQ ID NO:6627 | 60/200,545 | 04/27/2000 |
| SEQ ID NO:6628 | 60/200,545 | 04/27/2000 |
| SEQ ID NO:6629 | 60/200,545 | 04/27/2000 |
| SEQ ID NO:6630 | 60/200,545 | 04/27/2000 |
| SEQ ID NO:6631 | 60/200,545 | 04/27/2000 |
| SEQ ID NO:6632 | 60/200,545 | 04/27/2000 |
| SEQ ID NO:6633 | 60/200,545 | 04/27/2000 |
| SEQ ID NO:6634 | 60/200,545 | 04/27/2000 |
| SEQ ID NO:6635 | 60/200,545 | 04/27/2000 |
| SEQ ID NO:6636 | 60/200,545 | 04/27/2000 |
| SEQ ID NO:6637 | 60/200,545 | 04/27/2000 |
| SEQ ID NO:6638 | 60/200,545 | 04/27/2000 |
| SEQ ID NO:6639 | 60/200,545 | 04/27/2000 |
| SEQ ID NO:6640 | 60/200,545 | 04/27/2000 |
| SEQ ID NO:6641 | 60/200,545 | 04/27/2000 |
| SEQ ID NO:6642 | 60/200,545 | 04/27/2000 |
| SEQ ID NO:6643 | 60/200,545 | 04/27/2000 |
| SEQ ID NO:6644 | 60/200,545 | 04/27/2000 |
| SEQ ID NO:6645 | 60/200,545 | 04/27/2000 |
| SEQ ID NO:6646 | 60/200,545 | 04/27/2000 |
| SEQ ID NO:6647 | 60/200,545 | 04/27/2000 |
| SEQ ID NO:6648 | 60/200,545 | 04/27/2000 |
| SEQ ID NO:6649 | 60/200,545 | 04/27/2000 |
| SEQ ID NO:6650 | 60/200,545 | 04/27/2000 |
| SEQ ID NO:6651 | 60/200,545 | 04/27/2000 |
| SEQ ID NO:6652 | 60/200,545 | 04/27/2000 |
| SEQ ID NO:6653 | 60/200,545 | 04/27/2000 |
| SEQ ID NO:6654 | 60/200,545 | 04/27/2000 |
| SEQ ID NO:6655 | 60/200,545 | 04/27/2000 |
| SEQ ID NO:6656 | 60/200,545 | 04/27/2000 |
| SEQ ID NO:6657 | 60/200,545 | 04/27/2000 |
| SEQ ID NO:6658 | 60/200,545 | 04/27/2000 |
| SEQ ID NO:6659 | 60/200,545 | 04/27/2000 |
| SEQ ID NO:6660 | 60/200,545 | 04/27/2000 |
| SEQ ID NO:6661 | 60/200,545 | 04/27/2000 |
| SEQ ID NO:6662 | 60/200,545 | 04/27/2000 |
| SEQ ID NO:6663 | 60/200,545 | 04/27/2000 |
| SEQ ID NO:6664 | 60/200,545 | 04/27/2000 |
| SEQ ID NO:6665 | 60/200,545 | 04/27/2000 |
| SEQ ID NO:6666 | 60/200,545 | 04/27/2000 |
| SEQ ID NO:6667 | 60/200,545 | 04/27/2000 |
| SEQ ID NO:6668 | 60/200,545 | 04/27/2000 |
| SEQ ID NO:6669 | 60/200,545 | 04/27/2000 |
| SEQ ID NO:6670 | 60/200,545 | 04/27/2000 |
| SEQ ID NO:6671 | 60/200,545 | 04/27/2000 |
| SEQ ID NO:6672 | 60/200,545 | 04/27/2000 |
| SEQ ID NO:6673 | 60/200,545 | 04/27/2000 |
| SEQ ID NO:6674 | 60/200,545 | 04/27/2000 |
| SEQ ID NO:6675 | 60/200,545 | 04/27/2000 |
| SEQ ID NO:6676 | 60/200,545 | 04/27/2000 |
| SEQ ID NO:6677 | 60/200,545 | 04/27/2000 |
| SEQ ID NO:6678 | 60/200,545 | 04/27/2000 |
| SEQ ID NO:6679 | 60/200,545 | 04/27/2000 |
| SEQ ID NO:6680 | 60/200,545 | 04/27/2000 |
| SEQ ID NO:6681 | 60/200,545 | 04/27/2000 |
| SEQ ID NO:6682 | 60/200,545 | 04/27/2000 |
| SEQ ID NO:6683 | 60/200,545 | 04/27/2000 |
| SEQ ID NO:6684 | 60/200,545 | 04/27/2000 |
| SEQ ID NO:6685 | 60/200,545 | 04/27/2000 |
| SEQ ID NO:6686 | 60/200,545 | 04/27/2000 |
| SEQ ID NO:6687 | 60/200,545 | 04/27/2000 |
| SEQ ID NO:6688 | 60/200,545 | 04/27/2000 |
| SEQ ID NO:6689 | 60/200,545 | 04/27/2000 |
| SEQ ID NO:6690 | 60/206,201 | 05/22/2000 |
| SEQ ID NO:6691 | 60/206,201 | 05/22/2000 |
| SEQ ID NO:6692 | 60/206,201 | 05/22/2000 |
| SEQ ID NO:6693 | 60/206,201 | 05/22/2000 |
| SEQ ID NO:6694 | 60/206,201 | 05/22/2000 |
| SEQ ID NO:6695 | 60/206,201 | 05/22/2000 |
| SEQ ID NO:6696 | 60/206,201 | 05/22/2000 |
| SEQ ID NO:6697 | 60/206,201 | 05/22/2000 |
| SEQ ID NO:6698 | 60/206,201 | 05/22/2000 |
| SEQ ID NO:6699 | 60/206,201 | 05/22/2000 |
| SEQ ID NO:6700 | 60/206,201 | 05/22/2000 |
| SEQ ID NO:6701 | 60/206,201 | 05/22/2000 |
| SEQ ID NO:6702 | 60/206,201 | 05/22/2000 |
| SEQ ID NO:6703 | 60/206,201 | 05/22/2000 |
| SEQ ID NO:6704 | 60/206,201 | 05/22/2000 |
| SEQ ID NO:6705 | 60/206,201 | 05/22/2000 |
| SEQ ID NO:6706 | 60/206,201 | 05/22/2000 |
| SEQ ID NO:6707 | 60/206,201 | 05/22/2000 |
| SEQ ID NO:6708 | 60/206,201 | 05/22/2000 |
| SEQ ID NO:6709 | 60/206,201 | 05/22/2000 |
| SEQ ID NO:6710 | 60/206,201 | 05/22/2000 |
| SEQ ID NO:6711 | 60/206,201 | 05/22/2000 |
| SEQ ID NO:6712 | 60/206,201 | 05/22/2000 |
| SEQ ID NO:6713 | 60/206,201 | 05/22/2000 |
| SEQ ID NO:6714 | 60/206,201 | 05/22/2000 |
| SEQ ID NO:6715 | 60/206,201 | 05/22/2000 |
| SEQ ID NO:6716 | 60/206,201 | 05/22/2000 |
| SEQ ID NO:6717 | 60/206,201 | 05/22/2000 |
| SEQ ID NO:6718 | 60/206,201 | 05/22/2000 |
| SEQ ID NO:6719 | 60/206,201 | 05/22/2000 |
| SEQ ID NO:6720 | 60/206,201 | 05/22/2000 |
| SEQ ID NO:6721 | 60/206,201 | 05/22/2000 |
| SEQ ID NO:6722 | 60/206,201 | 05/22/2000 |
| SEQ ID NO:6723 | 60/206,201 | 05/22/2000 |
| SEQ ID NO:6724 | 60/206,201 | 05/22/2000 |
| SEQ ID NO:6725 | 60/206,201 | 05/22/2000 |
| SEQ ID NO:6726 | 60/206,201 | 05/22/2000 |
| SEQ ID NO:6727 | 60/206,201 | 05/22/2000 |
| SEQ ID NO:6728 | 60/206,201 | 05/22/2000 |
| SEQ ID NO:6729 | 60/206,201 | 05/22/2000 |
| SEQ ID NO:6730 | 60/206,201 | 05/22/2000 |
| SEQ ID NO:6731 | 60/206,201 | 05/22/2000 |
| SEQ ID NO:6732 | 60/206,201 | 05/22/2000 |
| SEQ ID NO:6733 | 60/206,201 | 05/22/2000 |
| SEQ ID NO:6734 | 60/206,201 | 05/22/2000 |
| SEQ ID NO:6735 | 60/206,201 | 05/22/2000 |
| SEQ ID NO:6736 | 60/206,201 | 05/22/2000 |
| SEQ ID NO:6737 | 60/206,201 | 05/22/2000 |
| SEQ ID NO:6738 | 60/206,201 | 05/22/2000 |
| SEQ ID NO:6739 | 60/206,201 | 05/22/2000 |
| SEQ ID NO:6740 | 60/206,201 | 05/22/2000 |
| SEQ ID NO:6741 | 60/206,201 | 05/22/2000 |
| SEQ ID NO:6742 | 60/206,201 | 05/22/2000 |
| SEQ ID NO:6743 | 60/206,201 | 05/22/2000 |
| SEQ ID NO:6744 | 60/206,201 | 05/22/2000 |
| SEQ ID NO:6745 | 60/206,201 | 05/22/2000 |
| SEQ ID NO:6746 | 60/206,201 | 05/22/2000 |
| SEQ ID NO:6747 | 60/206,201 | 05/22/2000 |
| SEQ ID NO:6748 | 60/206,201 | 05/22/2000 |
| SEQ ID NO:6749 | 60/206,201 | 05/22/2000 |
| SEQ ID NO:6750 | 60/206,201 | 05/22/2000 |
| SEQ ID NO:6751 | 60/206,201 | 05/22/2000 |
| SEQ ID NO:6752 | 60/206,201 | 05/22/2000 |
| SEQ ID NO:6753 | 60/206,201 | 05/22/2000 |
| SEQ ID NO:6754 | 60/206,201 | 05/22/2000 |
| SEQ ID NO:6755 | 60/206,201 | 05/22/2000 |
| SEQ ID NO:6756 | 60/206,201 | 05/22/2000 |
| SEQ ID NO:6757 | 60/206,201 | 05/22/2000 |
| SEQ ID NO:6758 | 60/206,201 | 05/22/2000 |
| SEQ ID NO:6759 | 60/206,201 | 05/22/2000 |
| SEQ ID NO:6760 | 60/206,201 | 05/22/2000 |
| SEQ ID NO:6761 | 60/206,201 | 05/22/2000 |
| SEQ ID NO:6762 | 60/206,201 | 05/22/2000 |
| SEQ ID NO:6763 | 60/206,201 | 05/22/2000 |
| SEQ ID NO:6764 | 60/206,201 | 05/22/2000 |
| SEQ ID NO:6765 | 60/206,201 | 05/22/2000 |
| SEQ ID NO:6766 | 60/206,201 | 05/22/2000 |
| SEQ ID NO:6767 | 60/206,201 | 05/22/2000 |
| SEQ ID NO:6768 | 60/206,201 | 05/22/2000 |
| SEQ ID NO:6769 | 60/206,201 | 05/22/2000 |
| SEQ ID NO:6770 | 60/206,201 | 05/22/2000 |
| SEQ ID NO:6771 | 60/206,201 | 05/22/2000 |
| SEQ ID NO:6772 | 60/206,201 | 05/22/2000 |
| SEQ ID NO:6773 | 60/206,201 | 05/22/2000 |
| SEQ ID NO:6774 | 60/206,201 | 05/22/2000 |
| SEQ ID NO:6775 | 60/206,201 | 05/22/2000 |
| SEQ ID NO:6776 | 60/206,201 | 05/22/2000 |
| SEQ ID NO:6777 | 60/206,201 | 05/22/2000 |
| SEQ ID NO:6778 | 60/206,201 | 05/22/2000 |
| SEQ ID NO:6779 | 60/206,201 | 05/22/2000 |
| SEQ ID NO:6780 | 60/206,201 | 05/22/2000 |
| SEQ ID NO:6781 | 60/206,201 | 05/22/2000 |
| SEQ ID NO:6782 | 60/206,201 | 05/22/2000 |
| SEQ ID NO:6783 | 60/206,201 | 05/22/2000 |
| SEQ ID NO:6784 | 60/206,201 | 05/22/2000 |
| SEQ ID NO:6785 | 60/206,201 | 05/22/2000 |
| SEQ ID NO:6786 | 60/206,201 | 05/22/2000 |
| SEQ ID NO:6787 | 60/206,201 | 05/22/2000 |
| SEQ ID NO:6788 | 60/206,201 | 05/22/2000 |
| SEQ ID NO:6789 | 60/206,201 | 05/22/2000 |
| SEQ ID NO:6790 | 60/206,201 | 05/22/2000 |
| SEQ ID NO:6791 | 60/206,201 | 05/22/2000 |
| SEQ ID NO:6792 | 60/206,201 | 05/22/2000 |
| SEQ ID NO:6793 | 60/206,201 | 05/22/2000 |
| SEQ ID NO:6794 | 60/206,201 | 05/22/2000 |
| SEQ ID NO:6795 | 60/206,201 | 05/22/2000 |
| SEQ ID NO:6796 | 60/206,201 | 05/22/2000 |
| SEQ ID NO:6797 | 60/206,201 | 05/22/2000 |
| SEQ ID NO:6798 | 60/206,201 | 05/22/2000 |
| SEQ ID NO:6799 | 60/206,201 | 05/22/2000 |
| SEQ ID NO:6800 | 60/206,201 | 05/22/2000 |
| SEQ ID NO:6801 | 60/206,201 | 05/22/2000 |
| SEQ ID NO:6802 | 60/206,201 | 05/22/2000 |
| SEQ ID NO:6803 | 60/206,201 | 05/22/2000 |
| SEQ ID NO:6804 | 60/206,201 | 05/22/2000 |
| SEQ ID NO:6805 | 60/206,201 | 05/22/2000 |
| SEQ ID NO:6806 | 60/206,201 | 05/22/2000 |
| SEQ ID NO:6807 | 60/206,201 | 05/22/2000 |
| SEQ ID NO:6808 | 60/206,201 | 05/22/2000 |
| SEQ ID NO:6809 | 60/206,201 | 05/22/2000 |
| SEQ ID NO:6810 | 60/206,201 | 05/22/2000 |
| SEQ ID NO:6811 | 60/206,201 | 05/22/2000 |
| SEQ ID NO:6812 | 60/206,201 | 05/22/2000 |
| SEQ ID NO:6813 | 60/206,201 | 05/22/2000 |
| SEQ ID NO:6814 | 60/206,201 | 05/22/2000 |
| SEQ ID NO:6815 | 60/206,201 | 05/22/2000 |
| SEQ ID NO:6816 | 60/206,201 | 05/22/2000 |
| SEQ ID NO:6817 | 60/206,201 | 05/22/2000 |
| SEQ ID NO:6818 | 60/206,201 | 05/22/2000 |
| SEQ ID NO:6819 | 60/206,201 | 05/22/2000 |
| SEQ ID NO:6820 | 60/206,201 | 05/22/2000 |
| SEQ ID NO:6821 | 60/206,201 | 05/22/2000 |
| SEQ ID NO:6822 | 60/206,201 | 05/22/2000 |
| SEQ ID NO:6823 | 60/206,201 | 05/22/2000 |
| SEQ ID NO:6824 | 60/206,201 | 05/22/2000 |
| SEQ ID NO:6825 | 60/206,201 | 05/22/2000 |
| SEQ ID NO:6826 | 60/206,201 | 05/22/2000 |
| SEQ ID NO:6827 | 60/206,201 | 05/22/2000 |
| SEQ ID NO:6828 | 60/206,201 | 05/22/2000 |
| SEQ ID NO:6829 | 60/206,201 | 05/22/2000 |
| SEQ ID NO:6830 | 60/206,201 | 05/22/2000 |
| SEQ ID NO:6831 | 60/206,201 | 05/22/2000 |
| SEQ ID NO:6832 | 60/206,201 | 05/22/2000 |
| SEQ ID NO:6833 | 60/206,201 | 05/22/2000 |
| SEQ ID NO:6834 | 60/206,201 | 05/22/2000 |
| SEQ ID NO:6835 | 60/206,201 | 05/22/2000 |
| SEQ ID NO:6836 | 60/206,201 | 05/22/2000 |
| SEQ ID NO:6837 | 60/206,201 | 05/22/2000 |
| SEQ ID NO:6838 | 60/206,201 | 05/22/2000 |
| SEQ ID NO:6839 | 60/206,201 | 05/22/2000 |
| SEQ ID NO:6840 | 60/206,201 | 05/22/2000 |
| SEQ ID NO:6841 | 60/206,201 | 05/22/2000 |
| SEQ ID NO:6842 | 60/206,201 | 05/22/2000 |
| SEQ ID NO:6843 | 60/206,201 | 05/22/2000 |
| SEQ ID NO:6844 | 60/206,201 | 05/22/2000 |
| SEQ ID NO:6845 | 60/206,201 | 05/22/2000 |
| SEQ ID NO:6846 | 60/206,201 | 05/22/2000 |
| SEQ ID NO:6847 | 60/206,201 | 05/22/2000 |
| SEQ ID NO:6848 | 60/206,201 | 05/22/2000 |
| SEQ ID NO:6849 | 60/206,201 | 05/22/2000 |
| SEQ ID NO:6850 | 60/206,201 | 05/22/2000 |
| SEQ ID NO:6851 | 60/206,201 | 05/22/2000 |
| SEQ ID NO:6852 | 60/206,201 | 05/22/2000 |
| SEQ ID NO:6853 | 60/206,201 | 05/22/2000 |
| SEQ ID NO:6854 | 60/206,201 | 05/22/2000 |
| SEQ ID NO:6855 | 60/206,201 | 05/22/2000 |
| SEQ ID NO:6856 | 60/206,201 | 05/22/2000 |
| SEQ ID NO:6857 | 60/206,201 | 05/22/2000 |
| SEQ ID NO:6858 | 60/206,201 | 05/22/2000 |
| SEQ ID NO:6859 | 60/206,201 | 05/22/2000 |
| SEQ ID NO:6860 | 60/206,201 | 05/22/2000 |
| SEQ ID NO:6861 | 60/206,201 | 05/22/2000 |
| SEQ ID NO:6862 | 60/206,201 | 05/22/2000 |
| SEQ ID NO:6863 | 60/206,201 | 05/22/2000 |
| SEQ ID NO:6864 | 60/206,201 | 05/22/2000 |
| SEQ ID NO:6865 | 60/206,201 | 05/22/2000 |
| SEQ ID NO:6866 | 60/206,201 | 05/22/2000 |
| SEQ ID NO:6867 | 60/206,201 | 05/22/2000 |
| SEQ ID NO:6868 | 60/206,201 | 05/22/2000 |
| SEQ ID NO:6869 | 60/206,201 | 05/22/2000 |
| SEQ ID NO:6870 | 60/206,201 | 05/22/2000 |
| SEQ ID NO:6871 | 60/206,201 | 05/22/2000 |
| SEQ ID NO:6872 | 60/206,201 | 05/22/2000 |
| SEQ ID NO:6873 | 60/206,201 | 05/22/2000 |
| SEQ ID NO:6874 | 60/206,201 | 05/22/2000 |
| SEQ ID NO:6875 | 60/206,201 | 05/22/2000 |
| SEQ ID NO:6876 | 60/206,201 | 05/22/2000 |
| SEQ ID NO:6877 | 60/206,201 | 05/22/2000 |
| SEQ ID NO:6878 | 60/206,201 | 05/22/2000 |
| SEQ ID NO:6879 | 60/206,201 | 05/22/2000 |
| SEQ ID NO:6880 | 60/206,201 | 05/22/2000 |
| SEQ ID NO:6881 | 60/206,201 | 05/22/2000 |
| SEQ ID NO:6882 | 60/206,201 | 05/22/2000 |
| SEQ ID NO:6883 | 60/206,201 | 05/22/2000 |
| SEQ ID NO:6884 | 60/206,201 | 05/22/2000 |
| SEQ ID NO:6885 | 60/206,201 | 05/22/2000 |
| SEQ ID NO:6886 | 60/206,201 | 05/22/2000 |
| SEQ ID NO:6887 | 60/206,201 | 05/22/2000 |
| SEQ ID NO:6888 | 60/206,201 | 05/22/2000 |
| SEQ ID NO:6889 | 60/206,201 | 05/22/2000 |
| SEQ ID NO:6890 | 60/206,201 | 05/22/2000 |
| SEQ ID NO:6891 | 60/206,201 | 05/22/2000 |
| SEQ ID NO:6892 | 60/206,201 | 05/22/2000 |
| SEQ ID NO:6893 | 60/206,201 | 05/22/2000 |
| SEQ ID NO:6894 | 60/206,201 | 05/22/2000 |
| SEQ ID NO:6895 | 60/206,201 | 05/22/2000 |
| SEQ ID NO:6896 | 60/206,201 | 05/22/2000 |
| SEQ ID NO:6897 | 60/206,201 | 05/22/2000 |
| SEQ ID NO:6898 | 60/206,201 | 05/22/2000 |
| SEQ ID NO:6899 | 60/206,201 | 05/22/2000 |
| SEQ ID NO:6900 | 60/206,201 | 05/22/2000 |
| SEQ ID NO:6901 | 60/206,201 | 05/22/2000 |
| SEQ ID NO:6902 | 60/206,201 | 05/22/2000 |
| SEQ ID NO:6903 | 60/206,201 | 05/22/2000 |
| SEQ ID NO:6904 | 60/206,201 | 05/22/2000 |
| SEQ ID NO:6905 | 60/206,201 | 05/22/2000 |
| SEQ ID NO:6906 | 60/206,201 | 05/22/2000 |
| SEQ ID NO:6907 | 60/206,201 | 05/22/2000 |
| SEQ ID NO:6908 | 60/206,201 | 05/22/2000 |
| SEQ ID NO:6909 | 60/206,201 | 05/22/2000 |
| SEQ ID NO:6910 | 60/206,201 | 05/22/2000 |
| SEQ ID NO:6911 | 60/206,201 | 05/22/2000 |
| SEQ ID NO:6912 | 60/206,201 | 05/22/2000 |
| SEQ ID NO:6913 | 60/206,201 | 05/22/2000 |
| SEQ ID NO:6914 | 60/206,201 | 05/22/2000 |
| SEQ ID NO:6915 | 60/206,201 | 05/22/2000 |
| SEQ ID NO:6916 | 60/206,201 | 05/22/2000 |
| SEQ ID NO:6917 | 60/206,201 | 05/22/2000 |
| SEQ ID NO:6918 | 60/206,201 | 05/22/2000 |
| SEQ ID NO:6919 | 60/206,201 | 05/22/2000 |
| SEQ ID NO:6920 | 60/206,201 | 05/22/2000 |
| SEQ ID NO:6921 | 60/206,201 | 05/22/2000 |
| SEQ ID NO:6922 | 60/206,201 | 05/22/2000 |
| SEQ ID NO:6923 | 60/206,201 | 05/22/2000 |
| SEQ ID NO:6924 | 60/206,201 | 05/22/2000 |
| SEQ ID NO:6925 | 60/206,201 | 05/22/2000 |
| SEQ ID NO:6926 | 60/206,201 | 05/22/2000 |
| SEQ ID NO:6927 | 60/206,201 | 05/22/2000 |
| SEQ ID NO:6928 | 60/206,201 | 05/22/2000 |
| SEQ ID NO:6929 | 60/206,201 | 05/22/2000 |
| SEQ ID NO:6930 | 60/206,201 | 05/22/2000 |
| SEQ ID NO:6931 | 60/206,201 | 05/22/2000 |
| SEQ ID NO:6932 | 60/206,201 | 05/22/2000 |
| SEQ ID NO:6933 | 60/206,201 | 05/22/2000 |
| SEQ ID NO:6934 | 60/206,201 | 05/22/2000 |
| SEQ ID NO:6935 | 60/206,201 | 05/22/2000 |
| SEQ ID NO:6936 | 60/206,201 | 05/22/2000 |
| SEQ ID NO:6937 | 60/206,201 | 05/22/2000 |
| SEQ ID NO:6938 | 60/206,201 | 05/22/2000 |
| SEQ ID NO:6939 | 60/206,201 | 05/22/2000 |
| SEQ ID NO:6940 | 60/206,201 | 05/22/2000 |
| SEQ ID NO:6941 | 60/206,201 | 05/22/2000 |
| SEQ ID NO:6942 | 60/206,201 | 05/22/2000 |
| SEQ ID NO:6943 | 60/206,201 | 05/22/2000 |
| SEQ ID NO:6944 | 60/206,201 | 05/22/2000 |
| SEQ ID NO:6945 | 60/206,201 | 05/22/2000 |
| SEQ ID NO:6946 | 60/206,201 | 05/22/2000 |
| SEQ ID NO:6947 | 60/206,201 | 05/22/2000 |
| SEQ ID NO:6948 | 60/206,201 | 05/22/2000 |
| SEQ ID NO:6949 | 60/206,201 | 05/22/2000 |
| SEQ ID NO:6950 | 60/206,201 | 05/22/2000 |
| SEQ ID NO:6951 | 60/206,201 | 05/22/2000 |
| SEQ ID NO:6952 | 60/206,201 | 05/22/2000 |
| SEQ ID NO:6953 | 60/206,201 | 05/22/2000 |
| SEQ ID NO:6954 | 60/206,201 | 05/22/2000 |
| SEQ ID NO:6955 | 60/206,201 | 05/22/2000 |
| SEQ ID NO:6956 | 60/206,201 | 05/22/2000 |
| SEQ ID NO:6957 | 60/206,201 | 05/22/2000 |
| SEQ ID NO:6958 | 60/206,201 | 05/22/2000 |
| SEQ ID NO:6959 | 60/206,201 | 05/22/2000 |
| SEQ ID NO:6960 | 60/206,201 | 05/22/2000 |
| SEQ ID NO:6961 | 60/206,201 | 05/22/2000 |
| SEQ ID NO:6962 | 60/206,201 | 05/22/2000 |
| SEQ ID NO:6963 | 60/206,201 | 05/22/2000 |
| SEQ ID NO:6964 | 60/206,201 | 05/22/2000 |
| SEQ ID NO:6965 | 60/206,201 | 05/22/2000 |
| SEQ ID NO:6966 | 60/206,201 | 05/22/2000 |
| SEQ ID NO:6967 | 60/206,201 | 05/22/2000 |
| SEQ ID NO:6968 | 60/206,201 | 05/22/2000 |
| SEQ ID NO:6969 | 60/206,201 | 05/22/2000 |
| SEQ ID NO:6970 | 60/206,201 | 05/22/2000 |
| SEQ ID NO:6971 | 60/206,201 | 05/22/2000 |
| SEQ ID NO:6972 | 60/206,201 | 05/22/2000 |
| SEQ ID NO:6973 | 60/206,201 | 05/22/2000 |
| SEQ ID NO:6974 | 60/206,201 | 05/22/2000 |
| SEQ ID NO:6975 | 60/206,201 | 05/22/2000 |
| SEQ ID NO:6976 | 60/206,201 | 05/22/2000 |
| SEQ ID NO:6977 | 60/206,201 | 05/22/2000 |
| SEQ ID NO:6978 | 60/206,201 | 05/22/2000 |
| SEQ ID NO:6979 | 60/206,201 | 05/22/2000 |
| SEQ ID NO:6980 | 60/206,201 | 05/22/2000 |
| SEQ ID NO:6981 | 60/206,201 | 05/22/2000 |
| SEQ ID NO:6982 | 60/206,201 | 05/22/2000 |
| SEQ ID NO:6983 | 60/206,201 | 05/22/2000 |
| SEQ ID NO:6984 | 60/206,201 | 05/22/2000 |
| SEQ ID NO:6985 | 60/206,201 | 05/22/2000 |
| SEQ ID NO:6986 | 60/206,201 | 05/22/2000 |
| SEQ ID NO:6987 | 60/206,201 | 05/22/2000 |
| SEQ ID NO:6988 | 60/206,201 | 05/22/2000 |
| SEQ ID NO:6989 | 60/206,201 | 05/22/2000 |
| SEQ ID NO:6990 | 60/206,201 | 05/22/2000 |
| SEQ ID NO:6991 | 60/206,201 | 05/22/2000 |
| SEQ ID NO:6992 | 60/206,201 | 05/22/2000 |
| SEQ ID NO:6993 | 60/206,201 | 05/22/2000 |
| SEQ ID NO:6994 | 60/206,201 | 05/22/2000 |
| SEQ ID NO:6995 | 60/206,201 | 05/22/2000 |
| SEQ ID NO:6996 | 60/206,201 | 05/22/2000 |
| SEQ ID NO:6997 | 60/206,201 | 05/22/2000 |
| SEQ ID NO:6998 | 60/206,201 | 05/22/2000 |
| SEQ ID NO:6999 | 60/206,201 | 05/22/2000 |
| SEQ ID NO:7000 | 60/206,201 | 05/22/2000 |
| SEQ ID NO:7001 | 60/206,201 | 05/22/2000 |
| SEQ ID NO:7002 | 60/206,201 | 05/22/2000 |
| SEQ ID NO:7003 | 60/206,201 | 05/22/2000 |
| SEQ ID NO:7004 | 60/206,201 | 05/22/2000 |
| SEQ ID NO:7005 | 60/206,201 | 05/22/2000 |
| SEQ ID NO:7006 | 60/206,201 | 05/22/2000 |
| SEQ ID NO:7007 | 60/206,201 | 05/22/2000 |
| SEQ ID NO:7008 | 60/206,201 | 05/22/2000 |
| SEQ ID NO:7009 | 60/206,201 | 05/22/2000 |
| SEQ ID NO:7010 | 60/206,201 | 05/22/2000 |
| SEQ ID NO:7011 | 60/206,201 | 05/22/2000 |
| SEQ ID NO:7012 | 60/206,201 | 05/22/2000 |
| SEQ ID NO:7013 | 60/206,201 | 05/22/2000 |
| SEQ ID NO:7014 | 60/206,201 | 05/22/2000 |
| SEQ ID NO:7015 | 60/206,201 | 05/22/2000 |
| SEQ ID NO:7016 | 60/206,201 | 05/22/2000 |
| SEQ ID NO:7017 | 60/206,201 | 05/22/2000 |
| SEQ ID NO:7018 | 60/206,201 | 05/22/2000 |
| SEQ ID NO:7019 | 60/206,201 | 05/22/2000 |
| SEQ ID NO:7020 | 60/206,201 | 05/22/2000 |
| SEQ ID NO:7021 | 60/206,201 | 05/22/2000 |
| SEQ ID NO:7022 | 60/206,201 | 05/22/2000 |
| SEQ ID NO:7023 | 60/206,201 | 05/22/2000 |
| SEQ ID NO:7024 | 60/206,201 | 05/22/2000 |
| SEQ ID NO:7025 | 60/206,201 | 05/22/2000 |
| SEQ ID NO:7026 | 60/206,201 | 05/22/2000 |
| SEQ ID NO:7027 | 60/206,201 | 05/22/2000 |
| SEQ ID NO:7028 | 60/206,201 | 05/22/2000 |
| SEQ ID NO:7029 | 60/206,201 | 05/22/2000 |
| SEQ ID NO:7030 | 60/206,201 | 05/22/2000 |
| SEQ ID NO:7031 | 60/206,201 | 05/22/2000 |
| SEQ ID NO:7032 | 60/206,201 | 05/22/2000 |
| SEQ ID NO:7033 | 60/206,201 | 05/22/2000 |
| SEQ ID NO:7034 | 60/206,201 | 05/22/2000 |
| SEQ ID NO:7035 | 60/206,201 | 05/22/2000 |
| SEQ ID NO:7036 | 60/206,201 | 05/22/2000 |
| SEQ ID NO:7037 | 60/206,201 | 05/22/2000 |
| SEQ ID NO:7038 | 60/206,201 | 05/22/2000 |
| SEQ ID NO:7039 | 60/206,201 | 05/22/2000 |
| SEQ ID NO:7040 | 60/206,201 | 05/22/2000 |
| SEQ ID NO:7041 | 60/206,201 | 05/22/2000 |
| SEQ ID NO:7042 | 60/206,201 | 05/22/2000 |
| SEQ ID NO:7043 | 60/206,201 | 05/22/2000 |
| SEQ ID NO:7044 | 60/206,201 | 05/22/2000 |
| SEQ ID NO:7045 | 60/206,201 | 05/22/2000 |
| SEQ ID NO:7046 | 60/206,201 | 05/22/2000 |
| SEQ ID NO:7047 | 60/206,201 | 05/22/2000 |
| SEQ ID NO:7048 | 60/206,201 | 05/22/2000 |
| SEQ ID NO:7049 | 60/206,201 | 05/22/2000 |
| SEQ ID NO:7050 | 60/206,201 | 05/22/2000 |
| SEQ ID NO:7051 | 60/206,201 | 05/22/2000 |
| SEQ ID NO:7052 | 60/206,201 | 05/22/2000 |
| SEQ ID NO:7053 | 60/206,201 | 05/22/2000 |
| SEQ ID NO:7054 | 60/206,201 | 05/22/2000 |
| SEQ ID NO:7055 | 60/206,201 | 05/22/2000 |
| SEQ ID NO:7056 | 60/206,201 | 05/22/2000 |
| SEQ ID NO:7057 | 60/206,201 | 05/22/2000 |
| SEQ ID NO:7058 | 60/206,201 | 05/22/2000 |
| SEQ ID NO:7059 | 60/206,201 | 05/22/2000 |
| SEQ ID NO:7060 | 60/206,201 | 05/22/2000 |
| SEQ ID NO:7061 | 60/206,201 | 05/22/2000 |
| SEQ ID NO:7062 | 60/206,201 | 05/22/2000 |
| SEQ ID NO:7063 | 60/206,201 | 05/22/2000 |
| SEQ ID NO:7064 | 60/206,201 | 05/22/2000 |
| SEQ ID NO:7065 | 60/206,201 | 05/22/2000 |
| SEQ ID NO:7066 | 60/206,201 | 05/22/2000 |
| SEQ ID NO:7067 | 60/206,201 | 05/22/2000 |
| SEQ ID NO:7068 | 60/206,201 | 05/22/2000 |
| SEQ ID NO:7069 | 60/206,201 | 05/22/2000 |
| SEQ ID NO:7070 | 60/206,201 | 05/22/2000 |
| SEQ ID NO:7071 | 60/206,201 | 05/22/2000 |
| SEQ ID NO:7072 | 60/206,201 | 05/22/2000 |
| SEQ ID NO:7073 | 60/206,201 | 05/22/2000 |
| SEQ ID NO:7074 | 60/206,201 | 05/22/2000 |
| SEQ ID NO:7075 | 60/206,201 | 05/22/2000 |
| SEQ ID NO:7076 | 60/206,201 | 05/22/2000 |
| SEQ ID NO:7077 | 60/206,201 | 05/22/2000 |
| SEQ ID NO:7078 | 60/206,201 | 05/22/2000 |
| SEQ ID NO:7079 | 60/206,201 | 05/22/2000 |
| SEQ ID NO:7080 | 60/206,201 | 05/22/2000 |
| SEQ ID NO:7081 | 60/206,201 | 05/22/2000 |
| SEQ ID NO:7082 | 60/206,201 | 05/22/2000 |
| SEQ ID NO:7083 | 60/206,201 | 05/22/2000 |
| SEQ ID NO:7084 | 60/206,201 | 05/22/2000 |
| SEQ ID NO:7085 | 60/206,201 | 05/22/2000 |
| SEQ ID NO:7086 | 60/206,201 | 05/22/2000 |
| SEQ ID NO:7087 | 60/206,201 | 05/22/2000 |
| SEQ ID NO:7088 | 60/206,201 | 05/22/2000 |
| SEQ ID NO:7089 | 60/206,201 | 05/22/2000 |
| SEQ ID NO:7090 | 60/206,201 | 05/22/2000 |
| SEQ ID NO:7091 | 60/206,201 | 05/22/2000 |
| SEQ ID NO:7092 | 60/206,201 | 05/22/2000 |
| SEQ ID NO:7093 | 60/206,201 | 05/22/2000 |
| SEQ ID NO:7094 | 60/206,201 | 05/22/2000 |
| SEQ ID NO:7095 | 60/206,201 | 05/22/2000 |
| SEQ ID NO:7096 | 60/206,201 | 05/22/2000 |
| SEQ ID NO:7097 | 60/206,201 | 05/22/2000 |
| SEQ ID NO:7098 | 60/206,201 | 05/22/2000 |
| SEQ ID NO:7099 | 60/206,201 | 05/22/2000 |
| SEQ ID NO:7100 | 60/206,201 | 05/22/2000 |
| SEQ ID NO:7101 | 60/206,201 | 05/22/2000 |
| SEQ ID NO:7102 | 60/206,201 | 05/22/2000 |
| SEQ ID NO:7103 | 60/206,201 | 05/22/2000 |
| SEQ ID NO:7104 | 60/206,201 | 05/22/2000 |
| SEQ ID NO:7105 | 60/206,201 | 05/22/2000 |
| SEQ ID NO:7106 | 60/206,201 | 05/22/2000 |
| SEQ ID NO:7107 | 60/206,201 | 05/22/2000 |
| SEQ ID NO:7108 | 60/206,201 | 05/22/2000 |
| SEQ ID NO:7109 | 60/206,201 | 05/22/2000 |
| SEQ ID NO:7110 | 60/206,201 | 05/22/2000 |
| SEQ ID NO:7111 | 60/206,201 | 05/22/2000 |
| SEQ ID NO:7112 | 60/206,201 | 05/22/2000 |
| SEQ ID NO:7113 | 60/206,201 | 05/22/2000 |
| SEQ ID NO:7114 | 60/206,201 | 05/22/2000 |
| SEQ ID NO:7115 | 60/206,201 | 05/22/2000 |
| SEQ ID NO:7116 | 60/206,201 | 05/22/2000 |
| SEQ ID NO:7117 | 60/206,201 | 05/22/2000 |
| SEQ ID NO:7118 | 60/206,201 | 05/22/2000 |
| SEQ ID NO:7119 | 60/206,201 | 05/22/2000 |
| SEQ ID NO:7120 | 60/206,201 | 05/22/2000 |
| SEQ ID NO:7121 | 60/206,201 | 05/22/2000 |
| SEQ ID NO:7122 | 60/206,201 | 05/22/2000 |
| SEQ ID NO:7123 | 60/206,201 | 05/22/2000 |
| SEQ ID NO:7124 | 60/206,201 | 05/22/2000 |
| SEQ ID NO:7125 | 60/206,201 | 05/22/2000 |
| SEQ ID NO:7126 | 60/206,201 | 05/22/2000 |
| SEQ ID NO:7127 | 60/206,201 | 05/22/2000 |
| SEQ ID NO:7128 | 60/206,201 | 05/22/2000 |
| SEQ ID NO:7129 | 60/206,201 | 05/22/2000 |
| SEQ ID NO:7130 | 60/206,201 | 05/22/2000 |
| SEQ ID NO:7131 | 60/206,201 | 05/22/2000 |
| SEQ ID NO:7132 | 60/206,201 | 05/22/2000 |
| SEQ ID NO:7133 | 60/206,201 | 05/22/2000 |
| SEQ ID NO:7134 | 60/206,201 | 05/22/2000 |
| SEQ ID NO:7135 | 60/206,201 | 05/22/2000 |
| SEQ ID NO:7136 | 60/206,201 | 05/22/2000 |
| SEQ ID NO:7137 | 60/206,201 | 05/22/2000 |
| SEQ ID NO:7138 | 60/206,201 | 05/22/2000 |
| SEQ ID NO:7139 | 60/206,201 | 05/22/2000 |
| SEQ ID NO:7140 | 60/206,201 | 05/22/2000 |
| SEQ ID NO:7141 | 60/206,201 | 05/22/2000 |
| SEQ ID NO:7142 | 60/206,201 | 05/22/2000 |
| SEQ ID NO:7143 | 60/206,201 | 05/22/2000 |
| SEQ ID NO:7144 | 60/206,201 | 05/22/2000 |
| SEQ ID NO:7145 | 60/206,201 | 05/22/2000 |
| SEQ ID NO:7146 | 60/206,201 | 05/22/2000 |
| SEQ ID NO:7147 | 60/206,201 | 05/22/2000 |
| SEQ ID NO:7148 | 60/206,201 | 05/22/2000 |
| SEQ ID NO:7149 | 60/206,201 | 05/22/2000 |
| SEQ ID NO:7150 | 60/206,201 | 05/22/2000 |
| SEQ ID NO:7151 | 60/206,201 | 05/22/2000 |
| SEQ ID NO:7152 | 60/206,201 | 05/22/2000 |
| SEQ ID NO:7153 | 60/206,201 | 05/22/2000 |
| SEQ ID NO:7154 | 60/206,201 | 05/22/2000 |
| SEQ ID NO:7155 | 60/206,201 | 05/22/2000 |
| SEQ ID NO:7156 | 60/206,201 | 05/22/2000 |
| SEQ ID NO:7157 | 60/206,201 | 05/22/2000 |
| SEQ ID NO:7158 | 60/206,201 | 05/22/2000 |
| SEQ ID NO:7159 | 60/206,201 | 05/22/2000 |
| SEQ ID NO:7160 | 60/206,201 | 05/22/2000 |
| SEQ ID NO:7161 | 60/206,201 | 05/22/2000 |
| SEQ ID NO:7162 | 60/206,201 | 05/22/2000 |
| SEQ ID NO:7163 | 60/206,201 | 05/22/2000 |
| SEQ ID NO:7164 | 60/206,201 | 05/22/2000 |
| SEQ ID NO:7165 | 60/206,201 | 05/22/2000 |
| SEQ ID NO:7166 | 60/206,201 | 05/22/2000 |
| SEQ ID NO:7167 | 60/206,201 | 05/22/2000 |
| SEQ ID NO:7168 | 60/206,201 | 05/22/2000 |
| SEQ ID NO:7169 | 60/206,201 | 05/22/2000 |
| SEQ ID NO:7170 | 60/206,201 | 05/22/2000 |
| SEQ ID NO:7171 | 60/206,201 | 05/22/2000 |
| SEQ ID NO:7172 | 60/206,201 | 05/22/2000 |
| SEQ ID NO:7173 | 60/206,201 | 05/22/2000 |
| SEQ ID NO:7174 | 60/206,201 | 05/22/2000 |
| SEQ ID NO:7175 | 60/206,201 | 05/22/2000 |
| SEQ ID NO:7176 | 60/206,201 | 05/22/2000 |
| SEQ ID NO:7177 | 60/206,201 | 05/22/2000 |
| SEQ ID NO:7178 | 60/206,201 | 05/22/2000 |
| SEQ ID NO:7179 | 60/206,201 | 05/22/2000 |
| SEQ ID NO:7180 | 60/206,201 | 05/22/2000 |
| SEQ ID NO:7181 | 60/206,201 | 05/22/2000 |
| SEQ ID NO:7182 | 60/206,201 | 05/22/2000 |
| SEQ ID NO:7183 | 60/206,201 | 05/22/2000 |
| SEQ ID NO:7184 | 60/206,201 | 05/22/2000 |
| SEQ ID NO:7185 | 60/206,201 | 05/22/2000 |
| SEQ ID NO:7186 | 60/206,201 | 05/22/2000 |
| SEQ ID NO:7187 | 60/206,201 | 05/22/2000 |
| SEQ ID NO:7188 | 60/206,201 | 05/22/2000 |
| SEQ ID NO:7189 | 60/206,201 | 05/22/2000 |
| SEQ ID NO:7190 | 60/206,201 | 05/22/2000 |
| SEQ ID NO:7191 | 60/206,201 | 05/22/2000 |
| SEQ ID NO:7192 | 60/206,201 | 05/22/2000 |
| SEQ ID NO:7193 | 60/206,201 | 05/22/2000 |
| SEQ ID NO:7194 | 60/206,201 | 05/22/2000 |
| SEQ ID NO:7195 | 60/206,201 | 05/22/2000 |
| SEQ ID NO:7196 | 60/206,201 | 05/22/2000 |
| SEQ ID NO:7197 | 60/206,201 | 05/22/2000 |
| SEQ ID NO:7198 | 60/206,201 | 05/22/2000 |
| SEQ ID NO:7199 | 60/206,201 | 05/22/2000 |
| SEQ ID NO:7200 | 60/206,201 | 05/22/2000 |
| SEQ ID NO:7201 | 60/206,201 | 05/22/2000 |
| SEQ ID NO:7202 | 60/206,201 | 05/22/2000 |
| SEQ ID NO:7203 | 60/206,201 | 05/22/2000 |
| SEQ ID NO:7204 | 60/206,201 | 05/22/2000 |
| SEQ ID NO:7205 | 60/206,201 | 05/22/2000 |
| SEQ ID NO:7206 | 60/206,201 | 05/22/2000 |
| SEQ ID NO:7207 | 60/206,201 | 05/22/2000 |
| SEQ ID NO:7208 | 60/206,201 | 05/22/2000 |
| SEQ ID NO:7209 | 60/206,201 | 05/22/2000 |
| SEQ ID NO:7210 | 60/206,201 | 05/22/2000 |
| SEQ ID NO:7211 | 60/206,201 | 05/22/2000 |
| SEQ ID NO:7212 | 60/206,201 | 05/22/2000 |
| SEQ ID NO:7213 | 60/206,201 | 05/22/2000 |
| SEQ ID NO:7214 | 60/206,201 | 05/22/2000 |
| SEQ ID NO:7215 | 60/206,201 | 05/22/2000 |
| SEQ ID NO:7216 | 60/206,201 | 05/22/2000 |
| SEQ ID NO:7217 | 60/206,201 | 05/22/2000 |
| SEQ ID NO:7218 | 60/206,201 | 05/22/2000 |
| SEQ ID NO:7219 | 60/206,201 | 05/22/2000 |
| SEQ ID NO:7220 | 60/206,201 | 05/22/2000 |
| SEQ ID NO:7221 | 60/206,201 | 05/22/2000 |
| SEQ ID NO:7222 | 60/206,201 | 05/22/2000 |
| SEQ ID NO:7223 | 60/206,201 | 05/22/2000 |
| SEQ ID NO:7224 | 60/206,201 | 05/22/2000 |
| SEQ ID NO:7225 | 60/206,201 | 05/22/2000 |
| SEQ ID NO:7226 | 60/206,201 | 05/22/2000 |
| SEQ ID NO:7227 | 60/206,201 | 05/22/2000 |
| SEQ ID NO:7228 | 60/206,201 | 05/22/2000 |
| SEQ ID NO:7229 | 60/206,201 | 05/22/2000 |
| SEQ ID NO:7230 | 60/206,201 | 05/22/2000 |
| SEQ ID NO:7231 | 60/206,201 | 05/22/2000 |
| SEQ ID NO:7232 | 60/206,201 | 05/22/2000 |
| SEQ ID NO:7233 | 60/206,201 | 05/22/2000 |
| SEQ ID NO:7234 | 60/206,201 | 05/22/2000 |
| SEQ ID NO:7235 | 60/206,201 | 05/22/2000 |
| SEQ ID NO:7236 | 60/206,201 | 05/22/2000 |
| SEQ ID NO:7237 | 60/206,201 | 05/22/2000 |
| SEQ ID NO:7238 | 60/206,201 | 05/22/2000 |
| SEQ ID NO:7239 | 60/206,201 | 05/22/2000 |
| SEQ ID NO:7240 | 60/206,201 | 05/22/2000 |
| SEQ ID NO:7241 | 60/206,201 | 05/22/2000 |
| SEQ ID NO:7242 | 60/206,201 | 05/22/2000 |
| SEQ ID NO:7243 | 60/206,201 | 05/22/2000 |
| SEQ ID NO:7244 | 60/206,201 | 05/22/2000 |
| SEQ ID NO:7245 | 60/206,201 | 05/22/2000 |
| SEQ ID NO:7246 | 60/206,201 | 05/22/2000 |
| SEQ ID NO:7247 | 60/206,201 | 05/22/2000 |
| SEQ ID NO:7248 | 60/206,201 | 05/22/2000 |
| SEQ ID NO:7249 | 60/206,201 | 05/22/2000 |
| SEQ ID NO:7250 | 60/206,201 | 05/22/2000 |
| SEQ ID NO:7251 | 60/206,201 | 05/22/2000 |
| SEQ ID NO:7252 | 60/206,201 | 05/22/2000 |
| SEQ ID NO:7253 | 60/206,201 | 05/22/2000 |
| SEQ ID NO:7254 | 60/206,201 | 05/22/2000 |
| SEQ ID NO:7255 | 60/206,201 | 05/22/2000 |
| SEQ ID NO:7256 | 60/206,201 | 05/22/2000 |
| SEQ ID NO:7257 | 60/206,201 | 05/22/2000 |
| SEQ ID NO:7258 | 60/206,201 | 05/22/2000 |
| SEQ ID NO:7259 | 60/206,201 | 05/22/2000 |
| SEQ ID NO:7260 | 60/206,201 | 05/22/2000 |
| SEQ ID NO:7261 | 60/206,201 | 05/22/2000 |
| SEQ ID NO:7262 | 60/206,201 | 05/22/2000 |
| SEQ ID NO:7263 | 60/206,201 | 05/22/2000 |
| SEQ ID NO:7264 | 60/206,201 | 05/22/2000 |
| SEQ ID NO:7265 | 60/206,201 | 05/22/2000 |
| SEQ ID NO:7266 | 60/206,201 | 05/22/2000 |
| SEQ ID NO:7267 | 60/206,201 | 05/22/2000 |
| SEQ ID NO:7268 | 60/206,201 | 05/22/2000 |
| SEQ ID NO:7269 | 60/206,201 | 05/22/2000 |
| SEQ ID NO:7270 | 60/206,201 | 05/22/2000 |
| SEQ ID NO:7271 | 60/206,201 | 05/22/2000 |
| SEQ ID NO:7272 | 60/206,201 | 05/22/2000 |
| SEQ ID NO:7273 | 60/206,201 | 05/22/2000 |
| SEQ ID NO:7274 | 60/206,201 | 05/22/2000 |
| SEQ ID NO:7275 | 60/206,201 | 05/22/2000 |
| SEQ ID NO:7276 | 60/206,201 | 05/22/2000 |
| SEQ ID NO:7277 | 60/206,201 | 05/22/2000 |
| SEQ ID NO:7278 | 60/206,201 | 05/22/2000 |
| SEQ ID NO:7279 | 60/206,201 | 05/22/2000 |
| SEQ ID NO:7280 | 60/206,201 | 05/22/2000 |
| SEQ ID NO:7281 | 60/206,201 | 05/22/2000 |
| SEQ ID NO:7282 | 60/206,201 | 05/22/2000 |
| SEQ ID NO:7283 | 60/206,201 | 05/22/2000 |
| SEQ ID NO:7284 | 60/206,201 | 05/22/2000 |
| SEQ ID NO:7285 | 60/206,201 | 05/22/2000 |
| SEQ ID NO:7286 | 60/206,201 | 05/22/2000 |
| SEQ ID NO:7287 | 60/206,201 | 05/22/2000 |
| SEQ ID NO:7288 | 60/206,201 | 05/22/2000 |
| SEQ ID NO:7289 | 60/206,201 | 05/22/2000 |
| SEQ ID NO:7290 | 60/206,201 | 05/22/2000 |
| SEQ ID NO:7291 | 60/206,201 | 05/22/2000 |
| SEQ ID NO:7292 | 60/206,201 | 05/22/2000 |
| SEQ ID NO:7293 | 60/206,201 | 05/22/2000 |
| SEQ ID NO:7294 | 60/206,201 | 05/22/2000 |
| SEQ ID NO:7295 | 60/206,201 | 05/22/2000 |
| SEQ ID NO:7296 | 60/206,201 | 05/22/2000 |
| SEQ ID NO:7297 | 60/206,201 | 05/22/2000 |
| SEQ ID NO:7298 | 60/206,201 | 05/22/2000 |
| SEQ ID NO:7299 | 60/206,201 | 05/22/2000 |
| SEQ ID NO:7300 | 60/206,201 | 05/22/2000 |
| SEQ ID NO:7301 | 60/206,201 | 05/22/2000 |
| SEQ ID NO:7302 | 60/206,201 | 05/22/2000 |
| SEQ ID NO:7303 | 60/206,201 | 05/22/2000 |
| SEQ ID NO:7304 | 60/206,201 | 05/22/2000 |
| SEQ ID NO:7305 | 60/206,201 | 05/22/2000 |
| SEQ ID NO:7306 | 60/206,201 | 05/22/2000 |
| SEQ ID NO:7307 | 60/206,201 | 05/22/2000 |
| SEQ ID NO:7308 | 60/206,201 | 05/22/2000 |
| SEQ ID NO:7309 | 60/206,201 | 05/22/2000 |
| SEQ ID NO:7310 | 60/206,201 | 05/22/2000 |
| SEQ ID NO:7311 | 60/206,201 | 05/22/2000 |
| SEQ ID NO:7312 | 60/206,201 | 05/22/2000 |
| SEQ ID NO:7313 | 60/206,201 | 05/22/2000 |
| SEQ ID NO:7314 | 60/206,201 | 05/22/2000 |
| SEQ ID NO:7315 | 60/206,201 | 05/22/2000 |
| SEQ ID NO:7316 | 60/206,201 | 05/22/2000 |
| SEQ ID NO:7317 | 60/206,201 | 05/22/2000 |
| SEQ ID NO:7318 | 60/206,201 | 05/22/2000 |
| SEQ ID NO:7319 | 60/206,201 | 05/22/2000 |
| SEQ ID NO:7320 | 60/206,201 | 05/22/2000 |
| SEQ ID NO:7321 | 60/206,201 | 05/22/2000 |
| SEQ ID NO:7322 | 60/206,201 | 05/22/2000 |
| SEQ ID NO:7323 | 60/206,201 | 05/22/2000 |
| SEQ ID NO:7324 | 60/206,201 | 05/22/2000 |
| SEQ ID NO:7325 | 60/206,201 | 05/22/2000 |
| SEQ ID NO:7326 | 60/206,201 | 05/22/2000 |
| SEQ ID NO:7327 | 60/206,201 | 05/22/2000 |
| SEQ ID NO:7328 | 60/206,201 | 05/22/2000 |
| SEQ ID NO:7329 | 60/206,201 | 05/22/2000 |
| SEQ ID NO:7330 | 60/206,201 | 05/22/2000 |
| SEQ ID NO:7331 | 60/206,201 | 05/22/2000 |
| SEQ ID NO:7332 | 60/206,201 | 05/22/2000 |
| SEQ ID NO:7333 | 60/206,201 | 05/22/2000 |
| SEQ ID NO:7334 | 60/206,201 | 05/22/2000 |
| SEQ ID NO:7335 | 60/206,201 | 05/22/2000 |
| SEQ ID NO:7336 | 60/206,201 | 05/22/2000 |
| SEQ ID NO:7337 | 60/206,201 | 05/22/2000 |
| SEQ ID NO:7338 | 60/206,201 | 05/22/2000 |
| SEQ ID NO:7339 | 60/206,201 | 05/22/2000 |
| SEQ ID NO:7340 | 60/206,201 | 05/22/2000 |
| SEQ ID NO:7341 | 60/206,201 | 05/22/2000 |
| SEQ ID NO:7342 | 60/206,201 | 05/22/2000 |
| SEQ ID NO:7343 | 60/206,201 | 05/22/2000 |
| SEQ ID NO:7344 | 60/206,201 | 05/22/2000 |
| SEQ ID NO:7345 | 60/206,201 | 05/22/2000 |
| SEQ ID NO:7346 | 60/206,201 | 05/22/2000 |
| SEQ ID NO:7347 | 60/206,201 | 05/22/2000 |
| SEQ ID NO:7348 | 60/206,201 | 05/22/2000 |
| SEQ ID NO:7349 | 60/206,201 | 05/22/2000 |
| SEQ ID NO:7350 | 60/206,201 | 05/22/2000 |
| SEQ ID NO:7351 | 60/206,201 | 05/22/2000 |
| SEQ ID NO:7352 | 60/206,201 | 05/22/2000 |
| SEQ ID NO:7353 | 60/206,201 | 05/22/2000 |
| SEQ ID NO:7354 | 60/206,201 | 05/22/2000 |
| SEQ ID NO:7355 | 60/206,201 | 05/22/2000 |
| SEQ ID NO:7356 | 60/206,201 | 05/22/2000 |
| SEQ ID NO:7357 | 60/206,201 | 05/22/2000 |
| SEQ ID NO:7358 | 60/206,201 | 05/22/2000 |
| SEQ ID NO:7359 | 60/206,201 | 05/22/2000 |
| SEQ ID NO:7360 | 60/206,201 | 05/22/2000 |
| SEQ ID NO:7361 | 60/206,201 | 05/22/2000 |
| SEQ ID NO:7362 | 60/206,201 | 05/22/2000 |
| SEQ ID NO:7363 | 60/206,201 | 05/22/2000 |
| SEQ ID NO:7364 | 60/206,201 | 05/22/2000 |
| SEQ ID NO:7365 | 60/206,201 | 05/22/2000 |
| SEQ ID NO:7366 | 60/206,201 | 05/22/2000 |
| SEQ ID NO:7367 | 60/206,201 | 05/22/2000 |
| SEQ ID NO:7368 | 60/206,201 | 05/22/2000 |
| SEQ ID NO:7369 | 60/206,201 | 05/22/2000 |
| SEQ ID NO:7370 | 60/206,201 | 05/22/2000 |
| SEQ ID NO:7371 | 60/206,201 | 05/22/2000 |
| SEQ ID NO:7372 | 60/206,201 | 05/22/2000 |
| SEQ ID NO:7373 | 60/206,201 | 05/22/2000 |
| SEQ ID NO:7374 | 60/206,201 | 05/22/2000 |
| SEQ ID NO:7375 | 60/206,201 | 05/22/2000 |
| SEQ ID NO:7376 | 60/206,201 | 05/22/2000 |
| SEQ ID NO:7377 | 60/206,201 | 05/22/2000 |
| SEQ ID NO:7378 | 60/206,201 | 05/22/2000 |
| SEQ ID NO:7379 | 60/206,201 | 05/22/2000 |
| SEQ ID NO:7380 | 60/206,201 | 05/22/2000 |
| SEQ ID NO:7381 | 60/206,201 | 05/22/2000 |
| SEQ ID NO:7382 | 60/206,201 | 05/22/2000 |
| SEQ ID NO:7383 | 60/206,201 | 05/22/2000 |
| SEQ ID NO:7384 | 60/206,201 | 05/22/2000 |
| SEQ ID NO:7385 | 60/206,201 | 05/22/2000 |
| SEQ ID NO:7386 | 60/206,201 | 05/22/2000 |
| SEQ ID NO:7387 | 60/206,201 | 05/22/2000 |
| SEQ ID NO:7388 | 60/206,201 | 05/22/2000 |
| SEQ ID NO:7389 | 60/206,201 | 05/22/2000 |
| SEQ ID NO:7390 | 60/206,201 | 05/22/2000 |
| SEQ ID NO:7391 | 60/206,201 | 05/22/2000 |
| SEQ ID NO:7392 | 60/206,201 | 05/22/2000 |
| SEQ ID NO:7393 | 60/206,201 | 05/22/2000 |
| SEQ ID NO:7394 | 60/206,201 | 05/22/2000 |
| SEQ ID NO:7395 | 60/206,201 | 05/22/2000 |
| SEQ ID NO:7396 | 60/206,201 | 05/22/2000 |
| SEQ ID NO:7397 | 60/206,201 | 05/22/2000 |
| SEQ ID NO:7398 | 60/206,201 | 05/22/2000 |
| SEQ ID NO:7399 | 60/206,201 | 05/22/2000 |
| SEQ ID NO:7400 | 60/206,201 | 05/22/2000 |
| SEQ ID NO:7401 | 60/206,201 | 05/22/2000 |
| SEQ ID NO:7402 | 60/206,201 | 05/22/2000 |
| SEQ ID NO:7403 | 60/206,201 | 05/22/2000 |
| SEQ ID NO:7404 | 60/206,201 | 05/22/2000 |
| SEQ ID NO:7405 | 60/206,201 | 05/22/2000 |
| SEQ ID NO:7406 | 60/206,201 | 05/22/2000 |
| SEQ ID NO:7407 | 60/206,201 | 05/22/2000 |
| SEQ ID NO:7408 | 60/206,201 | 05/22/2000 |
| SEQ ID NO:7409 | 60/206,201 | 05/22/2000 |
| SEQ ID NO:7410 | 60/206,201 | 05/22/2000 |
| SEQ ID NO:7411 | 60/206,201 | 05/22/2000 |
| SEQ ID NO:7412 | 60/206,201 | 05/22/2000 |
| SEQ ID NO:7413 | 60/206,201 | 05/22/2000 |
| SEQ ID NO:7414 | 60/206,201 | 05/22/2000 |
| SEQ ID NO:7415 | 60/206,201 | 05/22/2000 |
| SEQ ID NO:7416 | 60/206,201 | 05/22/2000 |
| SEQ ID NO:7417 | 60/206,201 | 05/22/2000 |
| SEQ ID NO:7418 | 60/206,201 | 05/22/2000 |
| SEQ ID NO:7419 | 60/206,201 | 05/22/2000 |
| SEQ ID NO:7420 | 60/206,201 | 05/22/2000 |
| SEQ ID NO:7421 | 60/206,201 | 05/22/2000 |
| SEQ ID NO:7422 | 60/206,201 | 05/22/2000 |
| SEQ ID NO:7423 | 60/206,201 | 05/22/2000 |
| SEQ ID NO:7424 | 60/206,201 | 05/22/2000 |
| SEQ ID NO:7425 | 60/206,201 | 05/22/2000 |
| SEQ ID NO:7426 | 60/206,201 | 05/22/2000 |
| SEQ ID NO:7427 | 60/206,201 | 05/22/2000 |
| SEQ ID NO:7428 | 60/206,201 | 05/22/2000 |
| SEQ ID NO:7429 | 60/206,201 | 05/22/2000 |
| SEQ ID NO:7430 | 60/206,201 | 05/22/2000 |
| SEQ ID NO:7431 | 60/206,201 | 05/22/2000 |
| SEQ ID NO:7432 | 60/206,201 | 05/22/2000 |
| SEQ ID NO:7433 | 60/206,201 | 05/22/2000 |
| SEQ ID NO:7434 | 60/206,201 | 05/22/2000 |
| SEQ ID NO:7435 | 60/206,201 | 05/22/2000 |
| SEQ ID NO:7436 | 60/206,201 | 05/22/2000 |
| SEQ ID NO:7437 | 60/206,201 | 05/22/2000 |
| SEQ ID NO:7438 | 60/206,201 | 05/22/2000 |
| SEQ ID NO:7439 | 60/206,201 | 05/22/2000 |
| SEQ ID NO:7440 | 60/206,201 | 05/22/2000 |
| SEQ ID NO:7441 | 60/206,201 | 05/22/2000 |
| SEQ ID NO:7442 | 60/206,201 | 05/22/2000 |
| SEQ ID NO:7443 | 60/206,201 | 05/22/2000 |
| SEQ ID NO:7444 | 60/206,201 | 05/22/2000 |
| SEQ ID NO:7445 | 60/206,201 | 05/22/2000 |
| SEQ ID NO:7446 | 60/206,201 | 05/22/2000 |
| SEQ ID NO:7447 | 60/206,201 | 05/22/2000 |
| SEQ ID NO:7448 | 60/206,201 | 05/22/2000 |
| SEQ ID NO:7449 | 60/206,201 | 05/22/2000 |
| SEQ ID NO:7450 | 60/206,201 | 05/22/2000 |
| SEQ ID NO:7451 | 60/206,201 | 05/22/2000 |
| SEQ ID NO:7452 | 60/206,201 | 05/22/2000 |
| SEQ ID NO:7453 | 60/206,201 | 05/22/2000 |
| SEQ ID NO:7454 | 60/206,201 | 05/22/2000 |
| SEQ ID NO:7455 | 60/206,201 | 05/22/2000 |
| SEQ ID NO:7456 | 60/206,201 | 05/22/2000 |
| SEQ ID NO:7457 | 60/206,201 | 05/22/2000 |
| SEQ ID NO:7458 | 60/206,201 | 05/22/2000 |
| SEQ ID NO:7459 | 60/206,201 | 05/22/2000 |
| SEQ ID NO:7460 | 60/206,201 | 05/22/2000 |
| SEQ ID NO:7461 | 60/206,201 | 05/22/2000 |
| SEQ ID NO:7462 | 60/206,201 | 05/22/2000 |
| SEQ ID NO:7463 | 60/206,201 | 05/22/2000 |
| SEQ ID NO:7464 | 60/206,201 | 05/22/2000 |
| SEQ ID NO:7465 | 60/206,201 | 05/22/2000 |
| SEQ ID NO:7466 | 60/206,201 | 05/22/2000 |
| SEQ ID NO:7467 | 60/206,201 | 05/22/2000 |
| SEQ ID NO:7468 | 60/206,201 | 05/22/2000 |
| SEQ ID NO:7469 | 60/206,201 | 05/22/2000 |
| SEQ ID NO:7470 | 60/206,201 | 05/22/2000 |
| SEQ ID NO:7471 | 60/206,201 | 05/22/2000 |
| SEQ ID NO:7472 | 60/206,201 | 05/22/2000 |
| SEQ ID NO:7473 | 60/206,201 | 05/22/2000 |
| SEQ ID NO:7474 | 60/206,201 | 05/22/2000 |
| SEQ ID NO:7475 | 60/206,201 | 05/22/2000 |
| SEQ ID NO:7476 | 60/206,201 | 05/22/2000 |
| SEQ ID NO:7477 | 60/206,201 | 05/22/2000 |
| SEQ ID NO:7478 | 60/206,201 | 05/22/2000 |
| SEQ ID NO:7479 | 60/206,201 | 05/22/2000 |
| SEQ ID NO:7480 | 60/206,201 | 05/22/2000 |
| SEQ ID NO:7481 | 60/206,201 | 05/22/2000 |
| SEQ ID NO:7482 | 60/206,201 | 05/22/2000 |
| SEQ ID NO:7483 | 60/206,201 | 05/22/2000 |
| SEQ ID NO:7484 | 60/206,201 | 05/22/2000 |
| SEQ ID NO:7485 | 60/206,201 | 05/22/2000 |
| SEQ ID NO:7486 | 60/206,201 | 05/22/2000 |
| SEQ ID NO:7487 | 60/206,201 | 05/22/2000 |
| SEQ ID NO:7488 | 60/206,201 | 05/22/2000 |
| SEQ ID NO:7489 | 60/206,201 | 05/22/2000 |
| SEQ ID NO:7490 | 60/206,201 | 05/22/2000 |
| SEQ ID NO:7491 | 60/206,201 | 05/22/2000 |
| SEQ ID NO:7492 | 60/206,201 | 05/22/2000 |
| SEQ ID NO:7493 | 60/206,201 | 05/22/2000 |
| SEQ ID NO:7494 | 60/206,201 | 05/22/2000 |
| SEQ ID NO:7495 | 60/206,201 | 05/22/2000 |
| SEQ ID NO:7496 | 60/206,201 | 05/22/2000 |
| SEQ ID NO:7497 | 60/206,201 | 05/22/2000 |
| SEQ ID NO:7498 | 60/206,201 | 05/22/2000 |
| SEQ ID NO:7499 | 60/206,201 | 05/22/2000 |
| SEQ ID NO:7500 | 60/206,201 | 05/22/2000 |
| SEQ ID NO:7501 | 60/206,201 | 05/22/2000 |
| SEQ ID NO:7502 | 60/206,201 | 05/22/2000 |
| SEQ ID NO:7503 | 60/206,201 | 05/22/2000 |
| SEQ ID NO:7504 | 60/206,201 | 05/22/2000 |
| SEQ ID NO:7505 | 60/206,201 | 05/22/2000 |
| SEQ ID NO:7506 | 60/206,201 | 05/22/2000 |
| SEQ ID NO:7507 | 60/206,201 | 05/22/2000 |
| SEQ ID NO:7508 | 60/206,201 | 05/22/2000 |
| SEQ ID NO:7509 | 60/206,201 | 05/22/2000 |
| SEQ ID NO:7510 | 60/206,201 | 05/22/2000 |
| SEQ ID NO:7511 | 60/206,201 | 05/22/2000 |
| SEQ ID NO:7512 | 60/206,201 | 05/22/2000 |
| SEQ ID NO:7513 | 60/206,201 | 05/22/2000 |
| SEQ ID NO:7514 | 60/206,201 | 05/22/2000 |
| SEQ ID NO:7515 | 60/206,201 | 05/22/2000 |
| SEQ ID NO:7516 | 60/206,201 | 05/22/2000 |
| SEQ ID NO:7517 | 60/206,201 | 05/22/2000 |
| SEQ ID NO:7518 | 60/206,201 | 05/22/2000 |
| SEQ ID NO:7519 | 60/206,201 | 05/22/2000 |
| SEQ ID NO:7520 | 60/206,201 | 05/22/2000 |
| SEQ ID NO:7521 | 60/206,201 | 05/22/2000 |
| SEQ ID NO:7522 | 60/206,201 | 05/22/2000 |
| SEQ ID NO:7523 | 60/206,201 | 05/22/2000 |
| SEQ ID NO:7524 | 60/206,201 | 05/22/2000 |
| SEQ ID NO:7525 | 60/206,201 | 05/22/2000 |
| SEQ ID NO:7526 | 60/206,201 | 05/22/2000 |
| SEQ ID NO:7527 | 60/206,201 | 05/22/2000 |
| SEQ ID NO:7528 | 60/206,201 | 05/22/2000 |
| SEQ ID NO:7529 | 60/206,201 | 05/22/2000 |
| SEQ ID NO:7530 | 60/206,201 | 05/22/2000 |
| SEQ ID NO:7531 | 60/206,201 | 05/22/2000 |
| SEQ ID NO:7532 | 60/206,201 | 05/22/2000 |
| SEQ ID NO:7533 | 60/206,201 | 05/22/2000 |
| SEQ ID NO:7534 | 60/206,201 | 05/22/2000 |
| SEQ ID NO:7535 | 60/206,201 | 05/22/2000 |
| SEQ ID NO:7536 | 60/206,201 | 05/22/2000 |
| SEQ ID NO:7537 | 60/206,201 | 05/22/2000 |
| SEQ ID NO:7538 | 60/206,201 | 05/22/2000 |
| SEQ ID NO:7539 | 60/206,201 | 05/22/2000 |
| SEQ ID NO:7540 | 60/206,201 | 05/22/2000 |
| SEQ ID NO:7541 | 60/206,201 | 05/22/2000 |
| SEQ ID NO:7542 | 60/206,201 | 05/22/2000 |
| SEQ ID NO:7543 | 60/206,201 | 05/22/2000 |
| SEQ ID NO:7544 | 60/206,201 | 05/22/2000 |
| SEQ ID NO:7545 | 60/206,201 | 05/22/2000 |
| SEQ ID NO:7546 | 60/206,201 | 05/22/2000 |
| SEQ ID NO:7547 | 60/206,201 | 05/22/2000 |
| SEQ ID NO:7548 | 60/206,201 | 05/22/2000 |
| SEQ ID NO:7549 | 60/206,201 | 05/22/2000 |
| SEQ ID NO:7550 | 60/206,201 | 05/22/2000 |
| SEQ ID NO:7551 | 60/206,201 | 05/22/2000 |
| SEQ ID NO:7552 | 60/206,201 | 05/22/2000 |
| SEQ ID NO:7553 | 60/206,201 | 05/22/2000 |
| SEQ ID NO:7554 | 60/206,201 | 05/22/2000 |
| SEQ ID NO:7555 | 60/206,201 | 05/22/2000 |
| SEQ ID NO:7556 | 60/206,201 | 05/22/2000 |
| SEQ ID NO:7557 | 60/206,201 | 05/22/2000 |
| SEQ ID NO:7558 | 60/206,201 | 05/22/2000 |
| SEQ ID NO:7559 | 60/206,201 | 05/22/2000 |
| SEQ ID NO:7560 | 60/206,201 | 05/22/2000 |
| SEQ ID NO:7561 | 60/206,201 | 05/22/2000 |
| SEQ ID NO:7562 | 60/206,201 | 05/22/2000 |
| SEQ ID NO:7563 | 60/206,201 | 05/22/2000 |
| SEQ ID NO:7564 | 60/206,201 | 05/22/2000 |
| SEQ ID NO:7565 | 60/206,201 | 05/22/2000 |
| SEQ ID NO:7566 | 60/206,201 | 05/22/2000 |
| SEQ ID NO:7567 | 60/206,201 | 05/22/2000 |
| SEQ ID NO:7568 | 60/206,201 | 05/22/2000 |
| SEQ ID NO:7569 | 60/206,201 | 05/22/2000 |
| SEQ ID NO:7570 | 60/206,201 | 05/22/2000 |
| SEQ ID NO:7571 | 60/206,201 | 05/22/2000 |
| SEQ ID NO:7572 | 60/206,201 | 05/22/2000 |
| SEQ ID NO:7573 | 60/206,201 | 05/22/2000 |
| SEQ ID NO:7574 | 60/206,201 | 05/22/2000 |
| SEQ ID NO:7575 | 60/206,201 | 05/22/2000 |
| SEQ ID NO:7576 | 60/206,201 | 05/22/2000 |
| SEQ ID NO:7577 | 60/206,201 | 05/22/2000 |
| SEQ ID NO:7578 | 60/206,201 | 05/22/2000 |
| SEQ ID NO:7579 | 60/206,201 | 05/22/2000 |
| SEQ ID NO:7580 | 60/206,201 | 05/22/2000 |
| SEQ ID NO:7581 | 60/206,201 | 05/22/2000 |
| SEQ ID NO:7582 | 60/206,201 | 05/22/2000 |
| SEQ ID NO:7583 | 60/206,201 | 05/22/2000 |
| SEQ ID NO:7584 | 60/206,201 | 05/22/2000 |
| SEQ ID NO:7585 | 60/206,201 | 05/22/2000 |
| SEQ ID NO:7586 | 60/206,201 | 05/22/2000 |
| SEQ ID NO:7587 | 60/206,201 | 05/22/2000 |
| SEQ ID NO:7588 | 60/206,201 | 05/22/2000 |
| SEQ ID NO:7589 | 60/206,201 | 05/22/2000 |
| SEQ ID NO:7590 | 60/206,201 | 05/22/2000 |
| SEQ ID NO:7591 | 60/206,201 | 05/22/2000 |
| SEQ ID NO:7592 | 60/206,201 | 05/22/2000 |
| SEQ ID NO:7593 | 60/206,201 | 05/22/2000 |
| SEQ ID NO:7594 | 60/206,201 | 05/22/2000 |
| SEQ ID NO:7595 | 60/206,201 | 05/22/2000 |
| SEQ ID NO:7596 | 60/206,201 | 05/22/2000 |
| SEQ ID NO:7597 | 60/206,201 | 05/22/2000 |
| SEQ ID NO:7598 | 60/206,201 | 05/22/2000 |
| SEQ ID NO:7599 | 60/206,201 | 05/22/2000 |
| SEQ ID NO:7600 | 60/206,201 | 05/22/2000 |
| SEQ ID NO:7601 | 60/206,201 | 05/22/2000 |
| SEQ ID NO:7602 | 60/206,201 | 05/22/2000 |
| SEQ ID NO:7603 | 60/206,201 | 05/22/2000 |
| SEQ ID NO:7604 | 60/206,201 | 05/22/2000 |
| SEQ ID NO:7605 | 60/206,201 | 05/22/2000 |
| SEQ ID NO:7606 | 60/206,201 | 05/22/2000 |
| SEQ ID NO:7607 | 60/206,201 | 05/22/2000 |
| SEQ ID NO:7608 | 60/206,201 | 05/22/2000 |
| SEQ ID NO:7609 | 60/206,201 | 05/22/2000 |
| SEQ ID NO:7610 | 60/206,201 | 05/22/2000 |
| SEQ ID NO:7611 | 60/206,201 | 05/22/2000 |
| SEQ ID NO:7612 | 60/206,201 | 05/22/2000 |
| SEQ ID NO:7613 | 60/206,201 | 05/22/2000 |
| SEQ ID NO:7614 | 60/206,201 | 05/22/2000 |
| SEQ ID NO:7615 | 60/206,201 | 05/22/2000 |
| SEQ ID NO:7616 | 60/206,201 | 05/22/2000 |
| SEQ ID NO:7617 | 60/206,201 | 05/22/2000 |
| SEQ ID NO:7618 | 60/206,201 | 05/22/2000 |
| SEQ ID NO:7619 | 60/206,201 | 05/22/2000 |
| SEQ ID NO:7620 | 60/206,201 | 05/22/2000 |
| SEQ ID NO:7621 | 60/206,201 | 05/22/2000 |
| SEQ ID NO:7622 | 60/206,201 | 05/22/2000 |
| SEQ ID NO:7623 | 60/206,201 | 05/22/2000 |
| SEQ ID NO:7624 | 60/206,201 | 05/22/2000 |
| SEQ ID NO:7625 | 60/206,201 | 05/22/2000 |
| SEQ ID NO:7626 | 60/206,201 | 05/22/2000 |
| SEQ ID NO:7627 | 60/206,201 | 05/22/2000 |
| SEQ ID NO:7628 | 60/206,201 | 05/22/2000 |
| SEQ ID NO:7629 | 60/206,201 | 05/22/2000 |
| SEQ ID NO:7630 | 60/206,201 | 05/22/2000 |
| SEQ ID NO:7631 | 60/206,201 | 05/22/2000 |
| SEQ ID NO:7632 | 60/206,201 | 05/22/2000 |
| SEQ ID NO:7633 | 60/206,201 | 05/22/2000 |
| SEQ ID NO:7634 | 60/206,201 | 05/22/2000 |
| SEQ ID NO:7635 | 60/206,201 | 05/22/2000 |
| SEQ ID NO:7636 | 60/206,201 | 05/22/2000 |
| SEQ ID NO:7637 | 60/206,201 | 05/22/2000 |
| SEQ ID NO:7638 | 60/206,201 | 05/22/2000 |
| SEQ ID NO:7639 | 60/206,201 | 05/22/2000 |
| SEQ ID NO:7640 | 60/206,201 | 05/22/2000 |
| SEQ ID NO:7641 | 60/206,201 | 05/22/2000 |
| SEQ ID NO:7642 | 60/206,201 | 05/22/2000 |
| SEQ ID NO:7643 | 60/206,201 | 05/22/2000 |
| SEQ ID NO:7644 | 60/206,201 | 05/22/2000 |
| SEQ ID NO:7645 | 60/206,201 | 05/22/2000 |
| SEQ ID NO:7646 | 60/206,201 | 05/22/2000 |
| SEQ ID NO:7647 | 60/206,201 | 05/22/2000 |
| SEQ ID NO:7648 | 60/206,201 | 05/22/2000 |
| SEQ ID NO:7649 | 60/206,201 | 05/22/2000 |
| SEQ ID NO:7650 | 60/206,201 | 05/22/2000 |
| SEQ ID NO:7651 | 60/206,201 | 05/22/2000 |
| SEQ ID NO:7652 | 60/206,201 | 05/22/2000 |
| SEQ ID NO:7653 | 60/206,201 | 05/22/2000 |
| SEQ ID NO:7654 | 60/206,201 | 05/22/2000 |
| SEQ ID NO:7655 | 60/206,201 | 05/22/2000 |
| SEQ ID NO:7656 | 60/206,201 | 05/22/2000 |
| SEQ ID NO:7657 | 60/206,201 | 05/22/2000 |
| SEQ ID NO:7658 | 60/206,201 | 05/22/2000 |
| SEQ ID NO:7659 | 60/206,201 | 05/22/2000 |
| SEQ ID NO:7660 | 60/206,201 | 05/22/2000 |
| SEQ ID NO:7661 | 60/206,201 | 05/22/2000 |
| SEQ ID NO:7662 | 60/206,201 | 05/22/2000 |
| SEQ ID NO:7663 | 60/206,201 | 05/22/2000 |
| SEQ ID NO:7664 | 60/206,201 | 05/22/2000 |
| SEQ ID NO:7665 | 60/206,201 | 05/22/2000 |
| SEQ ID NO:7666 | 60/206,201 | 05/22/2000 |
| SEQ ID NO:7667 | 60/206,201 | 05/22/2000 |
| SEQ ID NO:7668 | 60/206,201 | 05/22/2000 |
| SEQ ID NO:7669 | 60/206,201 | 05/22/2000 |
| SEQ ID NO:7670 | 60/206,201 | 05/22/2000 |
| SEQ ID NO:7671 | 60/206,201 | 05/22/2000 |
| SEQ ID NO:7672 | 60/206,201 | 05/22/2000 |
| SEQ ID NO:7673 | 60/206,201 | 05/22/2000 |
| SEQ ID NO:7674 | 60/206,201 | 05/22/2000 |
| SEQ ID NO:7675 | 60/206,201 | 05/22/2000 |
| SEQ ID NO:7676 | 60/206,201 | 05/22/2000 |
| SEQ ID NO:7677 | 60/206,201 | 05/22/2000 |
| SEQ ID NO:7678 | 60/206,201 | 05/22/2000 |
| SEQ ID NO:7679 | 60/206,201 | 05/22/2000 |
| SEQ ID NO:7680 | 60/206,201 | 05/22/2000 |
| SEQ ID NO:7681 | 60/206,201 | 05/22/2000 |
| SEQ ID NO:7682 | 60/206,201 | 05/22/2000 |
| SEQ ID NO:7683 | 60/206,201 | 05/22/2000 |
| SEQ ID NO:7684 | 60/206,201 | 05/22/2000 |
| SEQ ID NO:7685 | 60/206,201 | 05/22/2000 |
| SEQ ID NO:7686 | 60/206,201 | 05/22/2000 |
| SEQ ID NO:7687 | 60/206,201 | 05/22/2000 |
| SEQ ID NO:7688 | 60/206,201 | 05/22/2000 |
| SEQ ID NO:7689 | 60/206,201 | 05/22/2000 |
| SEQ ID NO:7690 | 60/206,201 | 05/22/2000 |
| SEQ ID NO:7691 | 60/206,201 | 05/22/2000 |
| SEQ ID NO:7692 | 60/206,201 | 05/22/2000 |
| SEQ ID NO:7693 | 60/206,201 | 05/22/2000 |
| SEQ ID NO:7694 | 60/206,201 | 05/22/2000 |
| SEQ ID NO:7695 | 60/206,201 | 05/22/2000 |
| SEQ ID NO:7696 | 60/206,201 | 05/22/2000 |
| SEQ ID NO:7697 | 60/206,201 | 05/22/2000 |
| SEQ ID NO:7698 | 60/206,201 | 05/22/2000 |
| SEQ ID NO:7699 | 60/206,201 | 05/22/2000 |
| SEQ ID NO:7700 | 60/206,201 | 05/22/2000 |
| SEQ ID NO:7701 | 60/206,201 | 05/22/2000 |
| SEQ ID NO:7702 | 60/206,201 | 05/22/2000 |
| SEQ ID NO:7703 | 60/206,201 | 05/22/2000 |
| SEQ ID NO:7704 | 60/206,201 | 05/22/2000 |
| SEQ ID NO:7705 | 60/206,201 | 05/22/2000 |
| SEQ ID NO:7706 | 60/206,201 | 05/22/2000 |
| SEQ ID NO:7707 | 60/206,201 | 05/22/2000 |
| SEQ ID NO:7708 | 60/206,201 | 05/22/2000 |
| SEQ ID NO:7709 | 60/206,201 | 05/22/2000 |
| SEQ ID NO:7710 | 60/206,201 | 05/22/2000 |
| SEQ ID NO:7711 | 60/206,201 | 05/22/2000 |
| SEQ ID NO:7712 | 60/206,201 | 05/22/2000 |
| SEQ ID NO:7713 | 60/206,201 | 05/22/2000 |
| SEQ ID NO:7714 | 60/206,201 | 05/22/2000 |
| SEQ ID NO:7715 | 60/206,201 | 05/22/2000 |
| SEQ ID NO:7716 | 60/206,201 | 05/22/2000 |
| SEQ ID NO:7717 | 60/206,201 | 05/22/2000 |
| SEQ ID NO:7718 | 60/206,201 | 05/22/2000 |
| SEQ ID NO:7719 | 60/206,201 | 05/22/2000 |
| SEQ ID NO:7720 | 60/206,201 | 05/22/2000 |
| SEQ ID NO:7721 | 60/206,201 | 05/22/2000 |
| SEQ ID NO:7722 | 60/206,201 | 05/22/2000 |
| SEQ ID NO:7723 | 60/206,201 | 05/22/2000 |
| SEQ ID NO:7724 | 60/206,201 | 05/22/2000 |
| SEQ ID NO:7725 | 60/206,201 | 05/22/2000 |
| SEQ ID NO:7726 | 60/206,201 | 05/22/2000 |
| SEQ ID NO:7727 | 60/206,201 | 05/22/2000 |
| SEQ ID NO:7728 | 60/206,201 | 05/22/2000 |
| SEQ ID NO:7729 | 60/206,201 | 05/22/2000 |
| SEQ ID NO:7730 | 60/206,201 | 05/22/2000 |
| SEQ ID NO:7731 | 60/206,201 | 05/22/2000 |
| SEQ ID NO:7732 | 60/218,950 | 07/14/2000 |
| SEQ ID NO:7733 | 60/218,950 | 07/14/2000 |
| SEQ ID NO:7734 | 60/218,950 | 07/14/2000 |
| SEQ ID NO:7735 | 60/218,950 | 07/14/2000 |
| SEQ ID NO:7736 | 60/218,950 | 07/14/2000 |
| SEQ ID NO:7737 | 60/218,950 | 07/14/2000 |
| SEQ ID NO:7738 | 60/218,950 | 07/14/2000 |
| SEQ ID NO:7739 | 60/218,950 | 07/14/2000 |
| SEQ ID NO:7740 | 60/218,950 | 07/14/2000 |
| SEQ ID NO:7741 | 60/218,950 | 07/14/2000 |
| SEQ ID NO:7742 | 60/218,950 | 07/14/2000 |
| SEQ ID NO:7743 | 60/218,950 | 07/14/2000 |
| SEQ ID NO:7744 | 60/218,950 | 07/14/2000 |
| SEQ ID NO:7745 | 60/218,950 | 07/14/2000 |
| SEQ ID NO:7746 | 60/218,950 | 07/14/2000 |
| SEQ ID NO:7747 | 60/218,950 | 07/14/2000 |
| SEQ ID NO:7748 | 60/218,950 | 07/14/2000 |
| SEQ ID NO:7749 | 60/218,950 | 07/14/2000 |
| SEQ ID NO:7750 | 60/218,950 | 07/14/2000 |
| SEQ ID NO:7751 | 60/218,950 | 07/14/2000 |
| SEQ ID NO:7752 | 60/218,950 | 07/14/2000 |
| SEQ ID NO:7753 | 60/218,950 | 07/14/2000 |
| SEQ ID NO:7754 | 60/218,950 | 07/14/2000 |
| SEQ ID NO:7755 | 60/218,950 | 07/14/2000 |
| SEQ ID NO:7756 | 60/218,950 | 07/14/2000 |
| SEQ ID NO:7757 | 60/218,950 | 07/14/2000 |
| SEQ ID NO:7758 | 60/218,950 | 07/14/2000 |
| SEQ ID NO:7759 | 60/218,950 | 07/14/2000 |
| SEQ ID NO:7760 | 60/218,950 | 07/14/2000 |
| SEQ ID NO:7761 | 60/218,950 | 07/14/2000 |
| SEQ ID NO:7762 | 60/218,950 | 07/14/2000 |
| SEQ ID NO:7763 | 60/218,950 | 07/14/2000 |
| SEQ ID NO:7764 | 60/218,950 | 07/14/2000 |
| SEQ ID NO:7765 | 60/218,950 | 07/14/2000 |
| SEQ ID NO:7766 | 60/218,950 | 07/14/2000 |
| SEQ ID NO:7767 | 60/218,950 | 07/14/2000 |
| SEQ ID NO:7768 | 60/218,950 | 07/14/2000 |
| SEQ ID NO:7769 | 60/218,950 | 07/14/2000 |
| SEQ ID NO:7770 | 60/218,950 | 07/14/2000 |
| SEQ ID NO:7771 | 60/218,950 | 07/14/2000 |
| SEQ ID NO:7772 | 60/218,950 | 07/14/2000 |
| SEQ ID NO:7773 | 60/218,950 | 07/14/2000 |
| SEQ ID NO:7774 | 60/218,950 | 07/14/2000 |
| SEQ ID NO:7775 | 60/218,950 | 07/14/2000 |
| SEQ ID NO:7776 | 60/218,950 | 07/14/2000 |
| SEQ ID NO:7777 | 60/218,950 | 07/14/2000 |
| SEQ ID NO:7778 | 60/218,950 | 07/14/2000 |
| SEQ ID NO:7779 | 60/218,950 | 07/14/2000 |
| SEQ ID NO:7780 | 60/218,950 | 07/14/2000 |
| SEQ ID NO:7781 | 60/218,950 | 07/14/2000 |
| SEQ ID NO:7782 | 60/218,950 | 07/14/2000 |
| SEQ ID NO:7783 | 60/218,950 | 07/14/2000 |
| SEQ ID NO:7784 | 60/218,950 | 07/14/2000 |
| SEQ ID NO:7785 | 60/218,950 | 07/14/2000 |
| SEQ ID NO:7786 | 60/218,950 | 07/14/2000 |
| SEQ ID NO:7787 | 60/218,950 | 07/14/2000 |
| SEQ ID NO:7788 | 60/218,950 | 07/14/2000 |
| SEQ ID NO:7789 | 60/218,950 | 07/14/2000 |
| SEQ ID NO:7790 | 60/218,950 | 07/14/2000 |
| SEQ ID NO:7791 | 60/218,950 | 07/14/2000 |
| SEQ ID NO:7792 | 60/218,950 | 07/14/2000 |
| SEQ ID NO:7793 | 60/218,950 | 07/14/2000 |
| SEQ ID NO:7794 | 60/218,950 | 07/14/2000 |
| SEQ ID NO:7795 | 60/218,950 | 07/14/2000 |
| SEQ ID NO:7796 | 60/218,950 | 07/14/2000 |
| SEQ ID NO:7797 | 60/218,950 | 07/14/2000 |
| SEQ ID NO:7798 | 60/218,950 | 07/14/2000 |
| SEQ ID NO:7799 | 60/218,950 | 07/14/2000 |
| SEQ ID NO:7800 | 60/218,950 | 07/14/2000 |
| SEQ ID NO:7801 | 60/218,950 | 07/14/2000 |
| SEQ ID NO:7802 | 60/218,950 | 07/14/2000 |
| SEQ ID NO:7803 | 60/218,950 | 07/14/2000 |
| SEQ ID NO:7804 | 60/218,950 | 07/14/2000 |
| SEQ ID NO:7805 | 60/218,950 | 07/14/2000 |
| SEQ ID NO:7806 | 60/218,950 | 07/14/2000 |
| SEQ ID NO:7807 | 60/218,950 | 07/14/2000 |
| SEQ ID NO:7808 | 60/218,950 | 07/14/2000 |
| SEQ ID NO:7809 | 60/218,950 | 07/14/2000 |
| SEQ ID NO:7810 | 60/218,950 | 07/14/2000 |
| SEQ ID NO:7811 | 60/218,950 | 07/14/2000 |
| SEQ ID NO:7812 | 60/218,950 | 07/14/2000 |
| SEQ ID NO:7813 | 60/218,950 | 07/14/2000 |
| SEQ ID NO:7814 | 60/218,950 | 07/14/2000 |
| SEQ ID NO:7815 | 60/218,950 | 07/14/2000 |
| SEQ ID NO:7816 | 60/218,950 | 07/14/2000 |
| SEQ ID NO:7817 | 60/218,950 | 07/14/2000 |
| SEQ ID NO:7818 | 60/218,950 | 07/14/2000 |
| SEQ ID NO:7819 | 60/218,950 | 07/14/2000 |
| SEQ ID NO:7820 | 60/218,950 | 07/14/2000 |
| SEQ ID NO:7821 | 60/218,950 | 07/14/2000 |
| SEQ ID NO:7822 | 60/218,950 | 07/14/2000 |
| SEQ ID NO:7823 | 60/218,950 | 07/14/2000 |
| SEQ ID NO:7824 | 60/218,950 | 07/14/2000 |
| SEQ ID NO:7825 | 60/218,950 | 07/14/2000 |
| SEQ ID NO:7826 | 60/218,950 | 07/14/2000 |
| SEQ ID NO:7827 | 60/218,950 | 07/14/2000 |
| SEQ ID NO:7828 | 60/218,950 | 07/14/2000 |
| SEQ ID NO:7829 | 60/218,950 | 07/14/2000 |
| SEQ ID NO:7830 | 60/218,950 | 07/14/2000 |
| SEQ ID NO:7831 | 60/218,950 | 07/14/2000 |
| SEQ ID NO:7832 | 60/218,950 | 07/14/2000 |
| SEQ ID NO:7833 | 60/218,950 | 07/14/2000 |
| SEQ ID NO:7834 | 60/218,950 | 07/14/2000 |
| SEQ ID NO:7835 | 60/218,950 | 07/14/2000 |
| SEQ ID NO:7836 | 60/218,950 | 07/14/2000 |
| SEQ ID NO:7837 | 60/218,950 | 07/14/2000 |
| SEQ ID NO:7838 | 60/218,950 | 07/14/2000 |
| SEQ ID NO:7839 | 60/218,950 | 07/14/2000 |
| SEQ ID NO:7840 | 60/218,950 | 07/14/2000 |
| SEQ ID NO:7841 | 60/218,950 | 07/14/2000 |
| SEQ ID NO:7842 | 60/218,950 | 07/14/2000 |
| SEQ ID NO:7843 | 60/218,950 | 07/14/2000 |
| SEQ ID NO:7844 | 60/218,950 | 07/14/2000 |
| SEQ ID NO:7845 | 60/218,950 | 07/14/2000 |
| SEQ ID NO:7846 | 60/218,950 | 07/14/2000 |
| SEQ ID NO:7847 | 60/218,950 | 07/14/2000 |
| SEQ ID NO:7848 | 60/218,950 | 07/14/2000 |
| SEQ ID NO:7849 | 60/218,950 | 07/14/2000 |
| SEQ ID NO:7850 | 60/218,950 | 07/14/2000 |
| SEQ ID NO:7851 | 60/218,950 | 07/14/2000 |
| SEQ ID NO:7852 | 60/218,950 | 07/14/2000 |
| SEQ ID NO:7853 | 60/218,950 | 07/14/2000 |
| SEQ ID NO:7854 | 60/218,950 | 07/14/2000 |
| SEQ ID NO:7855 | 60/218,950 | 07/14/2000 |
| SEQ ID NO:7856 | 60/218,950 | 07/14/2000 |
| SEQ ID NO:7857 | 60/218,950 | 07/14/2000 |
| SEQ ID NO:7858 | 60/218,950 | 07/14/2000 |
| SEQ ID NO:7859 | 60/218,950 | 07/14/2000 |
| SEQ ID NO:7860 | 60/218,950 | 07/14/2000 |
| SEQ ID NO:7861 | 60/218,950 | 07/14/2000 |
| SEQ ID NO:7862 | 60/218,950 | 07/14/2000 |
| SEQ ID NO:7863 | 60/218,950 | 07/14/2000 |
| SEQ ID NO:7864 | 60/218,950 | 07/14/2000 |
| SEQ ID NO:7865 | 60/218,950 | 07/14/2000 |
| SEQ ID NO:7866 | 60/218,950 | 07/14/2000 |
| SEQ ID NO:7867 | 60/218,950 | 07/14/2000 |
| SEQ ID NO:7868 | 60/218,950 | 07/14/2000 |
| SEQ ID NO:7869 | 60/218,950 | 07/14/2000 |
| SEQ ID NO:7870 | 60/218,950 | 07/14/2000 |
| SEQ ID NO:7871 | 60/218,950 | 07/14/2000 |
| SEQ ID NO:7872 | 60/218,950 | 07/14/2000 |
| SEQ ID NO:7873 | 60/218,950 | 07/14/2000 |
| SEQ ID NO:7874 | 60/218,950 | 07/14/2000 |
| SEQ ID NO:7875 | 60/218,950 | 07/14/2000 |
| SEQ ID NO:7876 | 60/218,950 | 07/14/2000 |
| SEQ ID NO:7877 | 60/218,950 | 07/14/2000 |
| SEQ ID NO:7878 | 60/218,950 | 07/14/2000 |
| SEQ ID NO:7879 | 60/218,950 | 07/14/2000 |
| SEQ ID NO:7880 | 60/218,950 | 07/14/2000 |
| SEQ ID NO:7881 | 60/218,950 | 07/14/2000 |
| SEQ ID NO:7882 | 60/218,950 | 07/14/2000 |
| SEQ ID NO:7883 | 60/218,950 | 07/14/2000 |
| SEQ ID NO:7884 | 60/218,950 | 07/14/2000 |
| SEQ ID NO:7885 | 60/218,950 | 07/14/2000 |
| SEQ ID NO:7886 | 60/218,950 | 07/14/2000 |
| SEQ ID NO:7887 | 60/218,950 | 07/14/2000 |
| SEQ ID NO:7888 | 60/218,950 | 07/14/2000 |
| SEQ ID NO:7889 | 60/218,950 | 07/14/2000 |
| SEQ ID NO:7890 | 60/218,950 | 07/14/2000 |
| SEQ ID NO:7891 | 60/218,950 | 07/14/2000 |
| SEQ ID NO:7892 | 60/218,950 | 07/14/2000 |
| SEQ ID NO:7893 | 60/218,950 | 07/14/2000 |
| SEQ ID NO:7894 | 60/218,950 | 07/14/2000 |
| SEQ ID NO:7895 | 60/218,950 | 07/14/2000 |
| SEQ ID NO:7896 | 60/218,950 | 07/14/2000 |
| SEQ ID NO:7897 | 60/218,950 | 07/14/2000 |
| SEQ ID NO:7898 | 60/218,950 | 07/14/2000 |
| SEQ ID NO:7899 | 60/218,950 | 07/14/2000 |
| SEQ ID NO:7900 | 60/218,950 | 07/14/2000 |
| SEQ ID NO:7901 | 60/218,950 | 07/14/2000 |
| SEQ ID NO:7902 | 60/218,950 | 07/14/2000 |
| SEQ ID NO:7903 | 60/218,950 | 07/14/2000 |
| SEQ ID NO:7904 | 60/218,950 | 07/14/2000 |
| SEQ ID NO:7905 | 60/218,950 | 07/14/2000 |
| SEQ ID NO:7906 | 60/218,950 | 07/14/2000 |
| SEQ ID NO:7907 | 60/218,950 | 07/14/2000 |
| SEQ ID NO:7908 | 60/218,950 | 07/14/2000 |
| SEQ ID NO:7909 | 60/218,950 | 07/14/2000 |
| SEQ ID NO:7910 | 60/218,950 | 07/14/2000 |
| SEQ ID NO:7911 | 60/218,950 | 07/14/2000 |
| SEQ ID NO:7912 | 60/218,950 | 07/14/2000 |
| SEQ ID NO:7913 | 60/218,950 | 07/14/2000 |
| SEQ ID NO:7914 | 60/218,950 | 07/14/2000 |
| SEQ ID NO:7915 | 60/218,950 | 07/14/2000 |
| SEQ ID NO:7916 | 60/218,950 | 07/14/2000 |
| SEQ ID NO:7917 | 60/218,950 | 07/14/2000 |
| SEQ ID NO:7918 | 60/218,950 | 07/14/2000 |
| SEQ ID NO:7919 | 60/218,950 | 07/14/2000 |
| SEQ ID NO:7920 | 60/218,950 | 07/14/2000 |
| SEQ ID NO:7921 | 60/218,950 | 07/14/2000 |
| SEQ ID NO:7922 | 60/218,950 | 07/14/2000 |
| SEQ ID NO:7923 | 60/218,950 | 07/14/2000 |
| SEQ ID NO:7924 | 60/218,950 | 07/14/2000 |
| SEQ ID NO:7925 | 60/218,950 | 07/14/2000 |
| SEQ ID NO:7926 | 60/218,950 | 07/14/2000 |
| SEQ ID NO:7927 | 60/218,950 | 07/14/2000 |
| SEQ ID NO:7928 | 60/218,950 | 07/14/2000 |
| SEQ ID NO:7929 | 60/218,950 | 07/14/2000 |
| SEQ ID NO:7930 | 60/218,950 | 07/14/2000 |
| SEQ ID NO:7931 | 60/218,950 | 07/14/2000 |
| SEQ ID NO:7932 | 60/218,950 | 07/14/2000 |
| SEQ ID NO:7933 | 60/218,950 | 07/14/2000 |
| SEQ ID NO:7934 | 60/218,950 | 07/14/2000 |
| SEQ ID NO:7935 | 60/218,950 | 07/14/2000 |
| SEQ ID NO:7936 | 60/218,950 | 07/14/2000 |
| SEQ ID NO:7937 | 60/218,950 | 07/14/2000 |
| SEQ ID NO:7938 | 60/218,950 | 07/14/2000 |
| SEQ ID NO:7939 | 60/218,950 | 07/14/2000 |
| SEQ ID NO:7940 | 60/218,950 | 07/14/2000 |
| SEQ ID NO:7941 | 60/218,950 | 07/14/2000 |
| SEQ ID NO:7942 | 60/218,950 | 07/14/2000 |
| SEQ ID NO:7943 | 60/218,950 | 07/14/2000 |
| SEQ ID NO:7944 | 60/218,950 | 07/14/2000 |
| SEQ ID NO:7945 | 60/218,950 | 07/14/2000 |
| SEQ ID NO:7946 | 60/218,950 | 07/14/2000 |
| SEQ ID NO:7947 | 60/218,950 | 07/14/2000 |
| SEQ ID NO:7948 | 60/218,950 | 07/14/2000 |
| SEQ ID NO:7949 | 60/218,950 | 07/14/2000 |
| SEQ ID NO:7950 | 60/218,950 | 07/14/2000 |
| SEQ ID NO:7951 | 60/218,950 | 07/14/2000 |
| SEQ ID NO:7952 | 60/218,950 | 07/14/2000 |
| SEQ ID NO:7953 | 60/218,950 | 07/14/2000 |
| SEQ ID NO:7954 | 60/218,950 | 07/14/2000 |
| SEQ ID NO:7955 | 60/218,950 | 07/14/2000 |
| SEQ ID NO:7956 | 60/218,950 | 07/14/2000 |
| SEQ ID NO:7957 | 60/218,950 | 07/14/2000 |
| SEQ ID NO:7958 | 60/218,950 | 07/14/2000 |
| SEQ ID NO:7959 | 60/218,950 | 07/14/2000 |
| SEQ ID NO:7960 | 60/218,950 | 07/14/2000 |
| SEQ ID NO:7961 | 60/218,950 | 07/14/2000 |
| SEQ ID NO:7962 | 60/218,950 | 07/14/2000 |
| SEQ ID NO:7963 | 60/218,950 | 07/14/2000 |
| SEQ ID NO:7964 | 60/218,950 | 07/14/2000 |
| SEQ ID NO:7965 | 60/218,950 | 07/14/2000 |
| SEQ ID NO:7966 | 60/218,950 | 07/14/2000 |
| SEQ ID NO:7967 | 60/218,950 | 07/14/2000 |
| SEQ ID NO:7968 | 60/218,950 | 07/14/2000 |
| SEQ ID NO:7969 | 60/218,950 | 07/14/2000 |
| SEQ ID NO:7970 | 60/218,950 | 07/14/2000 |
| SEQ ID NO:7971 | 60/218,950 | 07/14/2000 |
| SEQ ID NO:7972 | 60/218,950 | 07/14/2000 |
| SEQ ID NO:7973 | 60/218,950 | 07/14/2000 |
| SEQ ID NO:7974 | 60/218,950 | 07/14/2000 |
| SEQ ID NO:7975 | 60/218,950 | 07/14/2000 |
| SEQ ID NO:7976 | 60/218,950 | 07/14/2000 |
| SEQ ID NO:7977 | 60/218,950 | 07/14/2000 |
| SEQ ID NO:7978 | 60/218,950 | 07/14/2000 |
| SEQ ID NO:7979 | 60/218,950 | 07/14/2000 |
| SEQ ID NO:7980 | 60/218,950 | 07/14/2000 |
| SEQ ID NO:7981 | 60/218,950 | 07/14/2000 |
| SEQ ID NO:7982 | 60/218,950 | 07/14/2000 |
| SEQ ID NO:7983 | 60/218,950 | 07/14/2000 |
| SEQ ID NO:7984 | 60/218,950 | 07/14/2000 |
| SEQ ID NO:7985 | 60/218,950 | 07/14/2000 |
| SEQ ID NO:7986 | 60/218,950 | 07/14/2000 |
| SEQ ID NO:7987 | 60/218,950 | 07/14/2000 |
| SEQ ID NO:7988 | 60/218,950 | 07/14/2000 |
| SEQ ID NO:7989 | 60/218,950 | 07/14/2000 |
| SEQ ID NO:7990 | 60/218,950 | 07/14/2000 |
| SEQ ID NO:7991 | 60/218,950 | 07/14/2000 |
| SEQ ID NO:7992 | 60/218,950 | 07/14/2000 |
| SEQ ID NO:7993 | 60/218,950 | 07/14/2000 |
| SEQ ID NO:7994 | 60/218,950 | 07/14/2000 |
| SEQ ID NO:7995 | 60/218,950 | 07/14/2000 |
| SEQ ID NO:7996 | 60/218,950 | 07/14/2000 |
| SEQ ID NO:7997 | 60/218,950 | 07/14/2000 |
| SEQ ID NO:7998 | 60/218,950 | 07/14/2000 |
| SEQ ID NO:7999 | 60/218,950 | 07/14/2000 |
| SEQ ID NO:8000 | 60/218,950 | 07/14/2000 |
| SEQ ID NO:8001 | 60/218,950 | 07/14/2000 |
| SEQ ID NO:8002 | 60/218,950 | 07/14/2000 |
| SEQ ID NO:8003 | 60/218,950 | 07/14/2000 |
| SEQ ID NO:8004 | 60/218,950 | 07/14/2000 |
| SEQ ID NO:8005 | 60/218,950 | 07/14/2000 |
| SEQ ID NO:8006 | 60/218,950 | 07/14/2000 |
| SEQ ID NO:8007 | 60/218,950 | 07/14/2000 |
| SEQ ID NO:8008 | 60/218,950 | 07/14/2000 |
| SEQ ID NO:8009 | 60/218,950 | 07/14/2000 |
| SEQ ID NO:8010 | 60/218,950 | 07/14/2000 |
| SEQ ID NO:8011 | 60/218,950 | 07/14/2000 |
| SEQ ID NO:8012 | 60/218,950 | 07/14/2000 |
| SEQ ID NO:8013 | 60/218,950 | 07/14/2000 |
| SEQ ID NO:8014 | 60/218,950 | 07/14/2000 |
| SEQ ID NO:8015 | 60/218,950 | 07/14/2000 |
| SEQ ID NO:8016 | 60/218,950 | 07/14/2000 |
| SEQ ID NO:8017 | 60/218,950 | 07/14/2000 |
| SEQ ID NO:8018 | 60/218,950 | 07/14/2000 |
| SEQ ID NO:8019 | 60/218,950 | 07/14/2000 |
| SEQ ID NO:8020 | 60/218,950 | 07/14/2000 |
| SEQ ID NO:8021 | 60/218,950 | 07/14/2000 |
| SEQ ID NO:8022 | 60/218,950 | 07/14/2000 |
| SEQ ID NO:8023 | 60/218,950 | 07/14/2000 |
| SEQ ID NO:8024 | 60/218,950 | 07/14/2000 |
| SEQ ID NO:8025 | 60/218,950 | 07/14/2000 |
| SEQ ID NO:8026 | 60/218,950 | 07/14/2000 |
| SEQ ID NO:8027 | 60/218,950 | 07/14/2000 |
| SEQ ID NO:8028 | 60/218,950 | 07/14/2000 |
| SEQ ID NO:8029 | 60/218,950 | 07/14/2000 |
| SEQ ID NO:8030 | 60/218,950 | 07/14/2000 |
| SEQ ID NO:8031 | 60/218,950 | 07/14/2000 |
| SEQ ID NO:8032 | 60/218,950 | 07/14/2000 |
| SEQ ID NO:8033 | 60/218,950 | 07/14/2000 |
| SEQ ID NO:8034 | 60/218,950 | 07/14/2000 |
| SEQ ID NO:8035 | 60/218,950 | 07/14/2000 |
| SEQ ID NO:8036 | 60/218,950 | 07/14/2000 |
| SEQ ID NO:8037 | 60/218,950 | 07/14/2000 |
| SEQ ID NO:8038 | 60/218,950 | 07/14/2000 |
| SEQ ID NO:8039 | 60/218,950 | 07/14/2000 |
| SEQ ID NO:8040 | 60/218,950 | 07/14/2000 |
| SEQ ID NO:8041 | 60/218,950 | 07/14/2000 |
| SEQ ID NO:8042 | 60/218,950 | 07/14/2000 |
| SEQ ID NO:8043 | 60/218,950 | 07/14/2000 |
| SEQ ID NO:8044 | 60/218,950 | 07/14/2000 |
| SEQ ID NO:8045 | 60/218,950 | 07/14/2000 |
| SEQ ID NO:8046 | 60/218,950 | 07/14/2000 |
| SEQ ID NO:8047 | 60/218,950 | 07/14/2000 |
| SEQ ID NO:8048 | 60/218,950 | 07/14/2000 |
| SEQ ID NO:8049 | 60/218,950 | 07/14/2000 |
| SEQ ID NO:8050 | 60/218,950 | 07/14/2000 |
| SEQ ID NO:8051 | 60/218,950 | 07/14/2000 |
| SEQ ID NO:8052 | 60/218,950 | 07/14/2000 |
| SEQ ID NO:8053 | 60/218,950 | 07/14/2000 |
| SEQ ID NO:8054 | 60/218,950 | 07/14/2000 |
| SEQ ID NO:8055 | 60/218,950 | 07/14/2000 |
| SEQ ID NO:8056 | 60/218,950 | 07/14/2000 |
| SEQ ID NO:8057 | 60/218,950 | 07/14/2000 |
| SEQ ID NO:8058 | 60/218,950 | 07/14/2000 |
| SEQ ID NO:8059 | 60/218,950 | 07/14/2000 |
| SEQ ID NO:8060 | 60/218,950 | 07/14/2000 |
| SEQ ID NO:8061 | 60/218,950 | 07/14/2000 |
| SEQ ID NO:8062 | 60/218,950 | 07/14/2000 |
| SEQ ID NO:8063 | 60/218,950 | 07/14/2000 |
| SEQ ID NO:8064 | 60/218,950 | 07/14/2000 |
| SEQ ID NO:8065 | 60/218,950 | 07/14/2000 |
| SEQ ID NO:8066 | 60/218,950 | 07/14/2000 |
| SEQ ID NO:8067 | 60/218,950 | 07/14/2000 |
| SEQ ID NO:8068 | 60/218,950 | 07/14/2000 |
| SEQ ID NO:8069 | 60/218,950 | 07/14/2000 |
| SEQ ID NO:8070 | 60/218,950 | 07/14/2000 |
| SEQ ID NO:8071 | 60/218,950 | 07/14/2000 |
| SEQ ID NO:8072 | 60/218,950 | 07/14/2000 |
| SEQ ID NO:8073 | 60/218,950 | 07/14/2000 |
| SEQ ID NO:8074 | 60/218,950 | 07/14/2000 |
| SEQ ID NO:8075 | 60/218,950 | 07/14/2000 |
| SEQ ID NO:8076 | 60/218,950 | 07/14/2000 |
| SEQ ID NO:8077 | 60/218,950 | 07/14/2000 |
| SEQ ID NO:8078 | 60/218,950 | 07/14/2000 |
| SEQ ID NO:8079 | 60/218,950 | 07/14/2000 |
| SEQ ID NO:8080 | 60/218,950 | 07/14/2000 |
| SEQ ID NO:8081 | 60/218,950 | 07/14/2000 |
| SEQ ID NO:8082 | 60/218,950 | 07/14/2000 |
| SEQ ID NO:8083 | 60/218,950 | 07/14/2000 |
| SEQ ID NO:8084 | 60/218,950 | 07/14/2000 |
| SEQ ID NO:8085 | 60/218,950 | 07/14/2000 |
| SEQ ID NO:8086 | 60/218,950 | 07/14/2000 |
| SEQ ID NO:8087 | 60/218,950 | 07/14/2000 |
| SEQ ID NO:8088 | 60/218,950 | 07/14/2000 |
| SEQ ID NO:8089 | 60/218,950 | 07/14/2000 |
| SEQ ID NO:8090 | 60/218,950 | 07/14/2000 |
| SEQ ID NO:8091 | 60/218,950 | 07/14/2000 |
| SEQ ID NO:8092 | 60/218,950 | 07/14/2000 |
| SEQ ID NO:8093 | 60/218,950 | 07/14/2000 |
| SEQ ID NO:8094 | 60/218,950 | 07/14/2000 |
| SEQ ID NO:8095 | 60/218,950 | 07/14/2000 |
| SEQ ID NO:8096 | 60/218,950 | 07/14/2000 |
| SEQ ID NO:8097 | 60/218,950 | 07/14/2000 |
| SEQ ID NO:8098 | 60/218,950 | 07/14/2000 |
| SEQ ID NO:8099 | 60/218,950 | 07/14/2000 |
| SEQ ID NO:8100 | 60/218,950 | 07/14/2000 |
| SEQ ID NO:8101 | 60/218,950 | 07/14/2000 |
| SEQ ID NO:8102 | 60/218,950 | 07/14/2000 |
| SEQ ID NO:8103 | 60/218,950 | 07/14/2000 |
| SEQ ID NO:8104 | 60/218,950 | 07/14/2000 |
| SEQ ID NO:8105 | 60/218,950 | 07/14/2000 |
| SEQ ID NO:8106 | 60/218,950 | 07/14/2000 |
| SEQ ID NO:8107 | 60/218,950 | 07/14/2000 |
| SEQ ID NO:8108 | 60/218,950 | 07/14/2000 |
| SEQ ID NO:8109 | 60/218,950 | 07/14/2000 |
| SEQ ID NO:8110 | 60/218,950 | 07/14/2000 |
| SEQ ID NO:8111 | 60/218,950 | 07/14/2000 |
| SEQ ID NO:8112 | 60/218,950 | 07/14/2000 |
| SEQ ID NO:8113 | 60/218,950 | 07/14/2000 |
| SEQ ID NO:8114 | 60/218,950 | 07/14/2000 |
| SEQ ID NO:8115 | 60/218,950 | 07/14/2000 |
| SEQ ID NO:8116 | 60/218,950 | 07/14/2000 |
| SEQ ID NO:8117 | 60/218,950 | 07/14/2000 |
| SEQ ID NO:8118 | 60/218,950 | 07/14/2000 |
| SEQ ID NO:8119 | 60/218,950 | 07/14/2000 |
| SEQ ID NO:8120 | 60/218,950 | 07/14/2000 |
| SEQ ID NO:8121 | 60/218,950 | 07/14/2000 |
| SEQ ID NO:8122 | 60/218,950 | 07/14/2000 |
| SEQ ID NO:8123 | 60/218,950 | 07/14/2000 |
| SEQ ID NO:8124 | 60/218,950 | 07/14/2000 |
| SEQ ID NO:8125 | 60/218,950 | 07/14/2000 |
| SEQ ID NO:8126 | 60/218,950 | 07/14/2000 |
| SEQ ID NO:8127 | 60/218,950 | 07/14/2000 |
| SEQ ID NO:8128 | 60/218,950 | 07/14/2000 |
| SEQ ID NO:8129 | 60/218,950 | 07/14/2000 |
| SEQ ID NO:8130 | 60/218,950 | 07/14/2000 |
| SEQ ID NO:8131 | 60/218,950 | 07/14/2000 |
| SEQ ID NO:8132 | 60/218,950 | 07/14/2000 |
| SEQ ID NO:8133 | 60/218,950 | 07/14/2000 |
| SEQ ID NO:8134 | 60/218,950 | 07/14/2000 |
| SEQ ID NO:8135 | 60/218,950 | 07/14/2000 |
| SEQ ID NO:8136 | 60/218,950 | 07/14/2000 |
| SEQ ID NO:8137 | 60/218,950 | 07/14/2000 |
| SEQ ID NO:8138 | 60/218,950 | 07/14/2000 |
| SEQ ID NO:8139 | 60/218,950 | 07/14/2000 |
| SEQ ID NO:8140 | 60/218,950 | 07/14/2000 |
| SEQ ID NO:8141 | 60/218,950 | 07/14/2000 |
| SEQ ID NO:8142 | 60/218,950 | 07/14/2000 |
| SEQ ID NO:8143 | 60/218,950 | 07/14/2000 |
| SEQ ID NO:8144 | 60/218,950 | 07/14/2000 |
| SEQ ID NO:8145 | 60/218,950 | 07/14/2000 |
| SEQ ID NO:8146 | 60/218,950 | 07/14/2000 |
| SEQ ID NO:8147 | 60/218,950 | 07/14/2000 |
| SEQ ID NO:8148 | 60/218,950 | 07/14/2000 |
| SEQ ID NO:8149 | 60/218,950 | 07/14/2000 |
| SEQ ID NO:8150 | 60/218,950 | 07/14/2000 |
| SEQ ID NO:8151 | 60/218,950 | 07/14/2000 |
| SEQ ID NO:8152 | 60/218,950 | 07/14/2000 |
| SEQ ID NO:8153 | 60/218,950 | 07/14/2000 |
| SEQ ID NO:8154 | 60/218,950 | 07/14/2000 |
| SEQ ID NO:8155 | 60/218,950 | 07/14/2000 |
| SEQ ID NO:8156 | 60/218,950 | 07/14/2000 |
| SEQ ID NO:8157 | 60/218,950 | 07/14/2000 |
| SEQ ID NO:8158 | 60/218,950 | 07/14/2000 |
| SEQ ID NO:8159 | 60/218,950 | 07/14/2000 |
| SEQ ID NO:8160 | 60/218,950 | 07/14/2000 |
| SEQ ID NO:8161 | 60/218,950 | 07/14/2000 |
| SEQ ID NO:8162 | 60/218,950 | 07/14/2000 |
| SEQ ID NO:8163 | 60/218,950 | 07/14/2000 |
| SEQ ID NO:8164 | 60/218,950 | 07/14/2000 |
| SEQ ID NO:8165 | 60/218,950 | 07/14/2000 |
| SEQ ID NO:8166 | 60/218,950 | 07/14/2000 |
| SEQ ID NO:8167 | 60/218,950 | 07/14/2000 |
| SEQ ID NO:8168 | 60/218,950 | 07/14/2000 |
| SEQ ID NO:8169 | 60/218,950 | 07/14/2000 |
| SEQ ID NO:8170 | 60/218,950 | 07/14/2000 |
| SEQ ID NO:8171 | 60/218,950 | 07/14/2000 |
| SEQ ID NO:8172 | 60/218,950 | 07/14/2000 |
| SEQ ID NO:8173 | 60/218,950 | 07/14/2000 |
| SEQ ID NO:8174 | 60/218,950 | 07/14/2000 |
| SEQ ID NO:8175 | 60/218,950 | 07/14/2000 |
| SEQ ID NO:8176 | 60/218,950 | 07/14/2000 |
| SEQ ID NO:8177 | 60/218,950 | 07/14/2000 |
| SEQ ID NO:8178 | 60/218,950 | 07/14/2000 |
| SEQ ID NO:8179 | 60/218,950 | 07/14/2000 |
| SEQ ID NO:8180 | 60/218,950 | 07/14/2000 |
| SEQ ID NO:8181 | 60/218,950 | 07/14/2000 |
| SEQ ID NO:8182 | 60/218,950 | 07/14/2000 |
| SEQ ID NO:8183 | 60/218,950 | 07/14/2000 |
| SEQ ID NO:8184 | 60/218,950 | 07/14/2000 |
| SEQ ID NO:8185 | 60/218,950 | 07/14/2000 |
| SEQ ID NO:8186 | 60/218,950 | 07/14/2000 |
| SEQ ID NO:8187 | 60/218,950 | 07/14/2000 |
| SEQ ID NO:8188 | 60/218,950 | 07/14/2000 |
| SEQ ID NO:8189 | 60/218,950 | 07/14/2000 |
| SEQ ID NO:8190 | 60/218,950 | 07/14/2000 |
| SEQ ID NO:8191 | 60/218,950 | 07/14/2000 |
| SEQ ID NO:8192 | 60/218,950 | 07/14/2000 |
| SEQ ID NO:8193 | 60/218,950 | 07/14/2000 |
| SEQ ID NO:8194 | 60/218,950 | 07/14/2000 |
| SEQ ID NO:8195 | 60/218,950 | 07/14/2000 |
| SEQ ID NO:8196 | 60/218,950 | 07/14/2000 |
| SEQ ID NO:8197 | 60/218,950 | 07/14/2000 |
| SEQ ID NO:8198 | 60/218,950 | 07/14/2000 |
| SEQ ID NO:8199 | 60/218,950 | 07/14/2000 |
| SEQ ID NO:8200 | 60/218,950 | 07/14/2000 |
| SEQ ID NO:8201 | 60/218,950 | 07/14/2000 |
| SEQ ID NO:8202 | 60/218,950 | 07/14/2000 |
| SEQ ID NO:8203 | 60/218,950 | 07/14/2000 |
| SEQ ID NO:8204 | 60/218,950 | 07/14/2000 |
| SEQ ID NO:8205 | 60/218,950 | 07/14/2000 |
| SEQ ID NO:8206 | 60/218,950 | 07/14/2000 |
| SEQ ID NO:8207 | 60/218,950 | 07/14/2000 |
| SEQ ID NO:8208 | 60/218,950 | 07/14/2000 |
| SEQ ID NO:8209 | 60/218,950 | 07/14/2000 |
| SEQ ID NO:8210 | 60/218,950 | 07/14/2000 |
| SEQ ID NO:8211 | 60/218,950 | 07/14/2000 |
| SEQ ID NO:8212 | 60/218,950 | 07/14/2000 |
| SEQ ID NO:8213 | 60/218,950 | 07/14/2000 |
| SEQ ID NO:8214 | 60/218,950 | 07/14/2000 |
| SEQ ID NO:8215 | 60/218,950 | 07/14/2000 |
| SEQ ID NO:8216 | 60/218,950 | 07/14/2000 |
| SEQ ID NO:8217 | 60/218,950 | 07/14/2000 |
| SEQ ID NO:8218 | 60/218,950 | 07/14/2000 |
| SEQ ID NO:8219 | 60/218,950 | 07/14/2000 |
| SEQ ID NO:8220 | 60/218,950 | 07/14/2000 |
| SEQ ID NO:8221 | 60/218,950 | 07/14/2000 |
| SEQ ID NO:8222 | 60/218,950 | 07/14/2000 |
| SEQ ID NO:8223 | 60/218,950 | 07/14/2000 |
| SEQ ID NO:8224 | 60/218,950 | 07/14/2000 |
| SEQ ID NO:8225 | 60/218,950 | 07/14/2000 |
| SEQ ID NO:8226 | 60/218,950 | 07/14/2000 |
| SEQ ID NO:8227 | 60/218,950 | 07/14/2000 |
| SEQ ID NO:8228 | 60/218,950 | 07/14/2000 |
| SEQ ID NO:8229 | 60/218,950 | 07/14/2000 |
| SEQ ID NO:8230 | 60/218,950 | 07/14/2000 |
| SEQ ID NO:8231 | 60/218,950 | 07/14/2000 |
| SEQ ID NO:8232 | 60/218,950 | 07/14/2000 |
| SEQ ID NO:8233 | 60/218,950 | 07/14/2000 |
| SEQ ID NO:8234 | 60/218,950 | 07/14/2000 |
| SEQ ID NO:8235 | 60/218,950 | 07/14/2000 |
| SEQ ID NO:8236 | 60/218,950 | 07/14/2000 |
| SEQ ID NO:8237 | 60/218,950 | 07/14/2000 |
| SEQ ID NO:8238 | 60/218,950 | 07/14/2000 |
| SEQ ID NO:8239 | 60/218,950 | 07/14/2000 |
| SEQ ID NO:8240 | 60/218,950 | 07/14/2000 |
| SEQ ID NO:8241 | 60/218,950 | 07/14/2000 |
| SEQ ID NO:8242 | 60/218,950 | 07/14/2000 |
| SEQ ID NO:8243 | 60/218,950 | 07/14/2000 |
| SEQ ID NO:8244 | 60/218,950 | 07/14/2000 |
| SEQ ID NO:8245 | 60/218,950 | 07/14/2000 |
| SEQ ID NO:8246 | 60/218,950 | 07/14/2000 |
| SEQ ID NO:8247 | 60/218,950 | 07/14/2000 |
| SEQ ID NO:8248 | 60/218,950 | 07/14/2000 |
| SEQ ID NO:8249 | 60/218,950 | 07/14/2000 |
| SEQ ID NO:8250 | 60/218,950 | 07/14/2000 |
| SEQ ID NO:8251 | 60/218,950 | 07/14/2000 |
| SEQ ID NO:8252 | 60/218,950 | 07/14/2000 |
| SEQ ID NO:8253 | 60/218,950 | 07/14/2000 |
| SEQ ID NO:8254 | 60/218,950 | 07/14/2000 |
| SEQ ID NO:8255 | 60/218,950 | 07/14/2000 |
| SEQ ID NO:8256 | 60/218,950 | 07/14/2000 |
| SEQ ID NO:8257 | 60/218,950 | 07/14/2000 |
| SEQ ID NO:8258 | 60/218,950 | 07/14/2000 |
| SEQ ID NO:8259 | 60/218,950 | 07/14/2000 |
| SEQ ID NO:8260 | 60/218,950 | 07/14/2000 |
| SEQ ID NO:8261 | 60/218,950 | 07/14/2000 |
| SEQ ID NO:8262 | 60/218,950 | 07/14/2000 |
| SEQ ID NO:8263 | 60/218,950 | 07/14/2000 |
| SEQ ID NO:8264 | 60/218,950 | 07/14/2000 |
| SEQ ID NO:8265 | 60/218,950 | 07/14/2000 |
| SEQ ID NO:8266 | 60/218,950 | 07/14/2000 |
| SEQ ID NO:8267 | 60/218,950 | 07/14/2000 |
| SEQ ID NO:8268 | 60/218,950 | 07/14/2000 |
| SEQ ID NO:8269 | 60/218,950 | 07/14/2000 |
| SEQ ID NO:8270 | 60/218,950 | 07/14/2000 |
| SEQ ID NO:8271 | 60/218,950 | 07/14/2000 |
| SEQ ID NO:8272 | 60/218,950 | 07/14/2000 |
| SEQ ID NO:8273 | 60/218,950 | 07/14/2000 |
| SEQ ID NO:8274 | 60/218,950 | 07/14/2000 |
| SEQ ID NO:8275 | 60/218,950 | 07/14/2000 |
| SEQ ID NO:8276 | 60/218,950 | 07/14/2000 |
| SEQ ID NO:8277 | 60/218,950 | 07/14/2000 |
| SEQ ID NO:8278 | 60/218,950 | 07/14/2000 |
| SEQ ID NO:8279 | 60/218,950 | 07/14/2000 |
| SEQ ID NO:8280 | 60/218,950 | 07/14/2000 |
| SEQ ID NO:8281 | 60/218,950 | 07/14/2000 |
| SEQ ID NO:8282 | 60/218,950 | 07/14/2000 |
| SEQ ID NO:8283 | 60/218,950 | 07/14/2000 |
| SEQ ID NO:8284 | 60/218,950 | 07/14/2000 |
| SEQ ID NO:8285 | 60/218,950 | 07/14/2000 |
| SEQ ID NO:8286 | 60/218,950 | 07/14/2000 |
| SEQ ID NO:8287 | 60/218,950 | 07/14/2000 |
| SEQ ID NO:8288 | 60/218,950 | 07/14/2000 |
| SEQ ID NO:8289 | 60/218,950 | 07/14/2000 |
| SEQ ID NO:8290 | 60/218,950 | 07/14/2000 |
| SEQ ID NO:8291 | 60/218,950 | 07/14/2000 |
| SEQ ID NO:8292 | 60/218,950 | 07/14/2000 |
| SEQ ID NO:8293 | 60/218,950 | 07/14/2000 |
| SEQ ID NO:8294 | 60/218,950 | 07/14/2000 |
| SEQ ID NO:8295 | 60/218,950 | 07/14/2000 |
| SEQ ID NO:8296 | 60/218,950 | 07/14/2000 |
| SEQ ID NO:8297 | 60/218,950 | 07/14/2000 |
| SEQ ID NO:8298 | 60/218,950 | 07/14/2000 |
| SEQ ID NO:8299 | 60/218,950 | 07/14/2000 |
| SEQ ID NO:8300 | 60/218,950 | 07/14/2000 |
| SEQ ID NO:8301 | 60/218,950 | 07/14/2000 |
| SEQ ID NO:8302 | 60/218,950 | 07/14/2000 |
| SEQ ID NO:8303 | 60/218,950 | 07/14/2000 |
| SEQ ID NO:8304 | 60/218,950 | 07/14/2000 |
| SEQ ID NO:8305 | 60/218,950 | 07/14/2000 |
| SEQ ID NO:8306 | 60/218,950 | 07/14/2000 |
| SEQ ID NO:8307 | 60/218,950 | 07/14/2000 |
| SEQ ID NO:8308 | 60/218,950 | 07/14/2000 |
| SEQ ID NO:8309 | 60/218,950 | 07/14/2000 |
| SEQ ID NO:8310 | 60/218,950 | 07/14/2000 |
| SEQ ID NO:8311 | 60/218,950 | 07/14/2000 |
| SEQ ID NO:8312 | 60/218,950 | 07/14/2000 |
| SEQ ID NO:8313 | 60/218,950 | 07/14/2000 |
| SEQ ID NO:8314 | 60/218,950 | 07/14/2000 |
| SEQ ID NO:8315 | 60/218,950 | 07/14/2000 |
| SEQ ID NO:8316 | 60/218,950 | 07/14/2000 |
| SEQ ID NO:8317 | 60/218,950 | 07/14/2000 |
| SEQ ID NO:8318 | 60/218,950 | 07/14/2000 |
| SEQ ID NO:8319 | 60/218,950 | 07/14/2000 |
| SEQ ID NO:8320 | 60/218,950 | 07/14/2000 |
| SEQ ID NO:8321 | 60/218,950 | 07/14/2000 |
| SEQ ID NO:8322 | 60/218,950 | 07/14/2000 |
| SEQ ID NO:8323 | 60/218,950 | 07/14/2000 |
| SEQ ID NO:8324 | 60/218,950 | 07/14/2000 |
| SEQ ID NO:8325 | 60/218,950 | 07/14/2000 |
| SEQ ID NO:8326 | 60/218,950 | 07/14/2000 |
| SEQ ID NO:8327 | 60/218,950 | 07/14/2000 |
| SEQ ID NO:8328 | 60/218,950 | 07/14/2000 |
| SEQ ID NO:8329 | 60/218,950 | 07/14/2000 |
| SEQ ID NO:8330 | 60/218,950 | 07/14/2000 |
| SEQ ID NO:8331 | 60/218,950 | 07/14/2000 |
| SEQ ID NO:8332 | 60/218,950 | 07/14/2000 |
| SEQ ID NO:8333 | 60/218,950 | 07/14/2000 |
| SEQ ID NO:8334 | 60/218,950 | 07/14/2000 |
| SEQ ID NO:8335 | 60/218,950 | 07/14/2000 |
| SEQ ID NO:8336 | 60/218,950 | 07/14/2000 |
| SEQ ID NO:8337 | 60/218,950 | 07/14/2000 |
| SEQ ID NO:8338 | 60/218,950 | 07/14/2000 |
| SEQ ID NO:8339 | 60/218,950 | 07/14/2000 |
| SEQ ID NO:8340 | 60/218,950 | 07/14/2000 |
| SEQ ID NO:8341 | 60/218,950 | 07/14/2000 |
| SEQ ID NO:8342 | 60/218,950 | 07/14/2000 |
| SEQ ID NO:8343 | 60/218,950 | 07/14/2000 |
| SEQ ID NO:8344 | 60/218,950 | 07/14/2000 |
| SEQ ID NO:8345 | 60/218,950 | 07/14/2000 |
| SEQ ID NO:8346 | 60/218,950 | 07/14/2000 |
| SEQ ID NO:8347 | 60/218,950 | 07/14/2000 |
| SEQ ID NO:8348 | 60/218,950 | 07/14/2000 |
| SEQ ID NO:8349 | 60/218,950 | 07/14/2000 |
| SEQ ID NO:8350 | 60/218,950 | 07/14/2000 |
| SEQ ID NO:8351 | 60/218,950 | 07/14/2000 |
| SEQ ID NO:8352 | 60/218,950 | 07/14/2000 |
| SEQ ID NO:8353 | 60/218,950 | 07/14/2000 |
| SEQ ID NO:8354 | 60/218,950 | 07/14/2000 |
| SEQ ID NO:8355 | 60/218,950 | 07/14/2000 |
| SEQ ID NO:8356 | 60/218,950 | 07/14/2000 |
| SEQ ID NO:8357 | 60/218,950 | 07/14/2000 |
| SEQ ID NO:8358 | 60/218,950 | 07/14/2000 |
| SEQ ID NO:8359 | 60/218,950 | 07/14/2000 |
| SEQ ID NO:8360 | 60/218,950 | 07/14/2000 |
| SEQ ID NO:8361 | 60/218,950 | 07/14/2000 |
| SEQ ID NO:8362 | 60/218,950 | 07/14/2000 |
| SEQ ID NO:8363 | 60/218,950 | 07/14/2000 |
| SEQ ID NO:8364 | 60/218,950 | 07/14/2000 |
| SEQ ID NO:8365 | 60/218,950 | 07/14/2000 |
| SEQ ID NO:8366 | 60/218,950 | 07/14/2000 |
| SEQ ID NO:8367 | 60/218,950 | 07/14/2000 |
| SEQ ID NO:8368 | 60/218,950 | 07/14/2000 |
| SEQ ID NO:8369 | 60/218,950 | 07/14/2000 |
| SEQ ID NO:8370 | 60/218,950 | 07/14/2000 |
| SEQ ID NO:8371 | 60/218,950 | 07/14/2000 |
| SEQ ID NO:8372 | 60/218,950 | 07/14/2000 |
| SEQ ID NO:8373 | 60/218,950 | 07/14/2000 |
| SEQ ID NO:8374 | 60/218,950 | 07/14/2000 |
| SEQ ID NO:8375 | 60/218,950 | 07/14/2000 |
| SEQ ID NO:8376 | 60/218,950 | 07/14/2000 |
| SEQ ID NO:8377 | 60/218,950 | 07/14/2000 |
| SEQ ID NO:8378 | 60/218,950 | 07/14/2000 |
| SEQ ID NO:8379 | 60/218,950 | 07/14/2000 |
| SEQ ID NO:8380 | 60/218,950 | 07/14/2000 |
| SEQ ID NO:8381 | 60/218,950 | 07/14/2000 |
| SEQ ID NO:8382 | 60/218,950 | 07/14/2000 |
| SEQ ID NO:8383 | 60/218,950 | 07/14/2000 |
| SEQ ID NO:8384 | 60/218,950 | 07/14/2000 |
| SEQ ID NO:8385 | 60/218,950 | 07/14/2000 |
| SEQ ID NO:8386 | 60/218,950 | 07/14/2000 |
| SEQ ID NO:8387 | 60/218,950 | 07/14/2000 |
| SEQ ID NO:8388 | 60/218,950 | 07/14/2000 |
| SEQ ID NO:8389 | 60/218,950 | 07/14/2000 |
| SEQ ID NO:8390 | 60/218,950 | 07/14/2000 |
| SEQ ID NO:8391 | 60/218,950 | 07/14/2000 |
| SEQ ID NO:8392 | 60/218,950 | 07/14/2000 |
| SEQ ID NO:8393 | 60/218,950 | 07/14/2000 |
| SEQ ID NO:8394 | 60/218,950 | 07/14/2000 |
| SEQ ID NO:8395 | 60/218,950 | 07/14/2000 |
| SEQ ID NO:8396 | 60/218,950 | 07/14/2000 |
| SEQ ID NO:8397 | 60/218,950 | 07/14/2000 |
| SEQ ID NO:8398 | 60/218,950 | 07/14/2000 |
| SEQ ID NO:8399 | 60/218,950 | 07/14/2000 |
| SEQ ID NO:8400 | 60/218,950 | 07/14/2000 |
| SEQ ID NO:8401 | 60/218,950 | 07/14/2000 |
| SEQ ID NO:8402 | 60/218,950 | 07/14/2000 |
| SEQ ID NO:8403 | 60/218,950 | 07/14/2000 |
| SEQ ID NO:8404 | 60/218,950 | 07/14/2000 |
| SEQ ID NO:8405 | 60/218,950 | 07/14/2000 |
| SEQ ID NO:8406 | 60/218,950 | 07/14/2000 |
| SEQ ID NO:8407 | 60/218,950 | 07/14/2000 |
| SEQ ID NO:8408 | 60/218,950 | 07/14/2000 |
| SEQ ID NO:8409 | 60/218,950 | 07/14/2000 |
| SEQ ID NO:8410 | 60/218,950 | 07/14/2000 |
| SEQ ID NO:8411 | 60/218,950 | 07/14/2000 |
| SEQ ID NO:8412 | 60/218,950 | 07/14/2000 |
| SEQ ID NO:8413 | 60/218,950 | 07/14/2000 |
| SEQ ID NO:8414 | 60/218,950 | 07/14/2000 |
| SEQ ID NO:8415 | 60/218,950 | 07/14/2000 |
| SEQ ID NO:8416 | 60/218,950 | 07/14/2000 |
| SEQ ID NO:8417 | 60/218,950 | 07/14/2000 |
| SEQ ID NO:8418 | 60/218,950 | 07/14/2000 |
| SEQ ID NO:8419 | 60/218,950 | 07/14/2000 |
| SEQ ID NO:8420 | 60/218,950 | 07/14/2000 |
| SEQ ID NO:8421 | 60/218,950 | 07/14/2000 |
| SEQ ID NO:8422 | 60/218,950 | 07/14/2000 |
| SEQ ID NO:8423 | 60/218,950 | 07/14/2000 |
| SEQ ID NO:8424 | 60/218,950 | 07/14/2000 |
| SEQ ID NO:8425 | 60/218,950 | 07/14/2000 |
| SEQ ID NO:8426 | 60/218,950 | 07/14/2000 |
| SEQ ID NO:8427 | 60/218,950 | 07/14/2000 |
| SEQ ID NO:8428 | 60/218,950 | 07/14/2000 |
| SEQ ID NO:8429 | 60/218,950 | 07/14/2000 |
| SEQ ID NO:8430 | 60/218,950 | 07/14/2000 |
| SEQ ID NO:8431 | 60/218,950 | 07/14/2000 |
| SEQ ID NO:8432 | 60/218,950 | 07/14/2000 |
| SEQ ID NO:8433 | 60/218,950 | 07/14/2000 |
| SEQ ID NO:8434 | 60/218,950 | 07/14/2000 |
| SEQ ID NO:8435 | 60/218,950 | 07/14/2000 |
| SEQ ID NO:8436 | 60/218,950 | 07/14/2000 |
| SEQ ID NO:8437 | 60/218,950 | 07/14/2000 |
| SEQ ID NO:8438 | 60/218,950 | 07/14/2000 |
| SEQ ID NO:8439 | 60/218,950 | 07/14/2000 |
| SEQ ID NO:8440 | 60/218,950 | 07/14/2000 |
| SEQ ID NO:8441 | 60/218,950 | 07/14/2000 |
| SEQ ID NO:8442 | 60/218,950 | 07/14/2000 |
| SEQ ID NO:8443 | 60/218,950 | 07/14/2000 |
| SEQ ID NO:8444 | 60/218,950 | 07/14/2000 |
| SEQ ID NO:8445 | 60/218,950 | 07/14/2000 |
| SEQ ID NO:8446 | 60/218,950 | 07/14/2000 |
| SEQ ID NO:8447 | 60/218,950 | 07/14/2000 |
| SEQ ID NO:8448 | 60/218,950 | 07/14/2000 |
| SEQ ID NO:8449 | 60/218,950 | 07/14/2000 |
| SEQ ID NO:8450 | 60/218,950 | 07/14/2000 |
| SEQ ID NO:8451 | 60/218,950 | 07/14/2000 |
| SEQ ID NO:8452 | 60/218,950 | 07/14/2000 |
| SEQ ID NO:8453 | 60/218,950 | 07/14/2000 |
| SEQ ID NO:8454 | 60/218,950 | 07/14/2000 |
| SEQ ID NO:8455 | 60/218,950 | 07/14/2000 |
| SEQ ID NO:8456 | 60/218,950 | 07/14/2000 |
| SEQ ID NO:8457 | 60/218,950 | 07/14/2000 |
| SEQ ID NO:8458 | 60/218,950 | 07/14/2000 |
| SEQ ID NO:8459 | 60/218,950 | 07/14/2000 |
| SEQ ID NO:8460 | 60/218,950 | 07/14/2000 |
| SEQ ID NO:8461 | 60/218,950 | 07/14/2000 |
| SEQ ID NO:8462 | 60/218,950 | 07/14/2000 |
| SEQ ID NO:8463 | 60/218,950 | 07/14/2000 |
| SEQ ID NO:8464 | 60/218,950 | 07/14/2000 |
| SEQ ID NO:8465 | 60/218,950 | 07/14/2000 |
| SEQ ID NO:8466 | 60/218,950 | 07/14/2000 |
| SEQ ID NO:8467 | 60/218,950 | 07/14/2000 |
| SEQ ID NO:8468 | 60/218,950 | 07/14/2000 |
| SEQ ID NO:8469 | 60/218,950 | 07/14/2000 |
| SEQ ID NO:8470 | 60/218,950 | 07/14/2000 |
| SEQ ID NO:8471 | 60/218,950 | 07/14/2000 |
| SEQ ID NO:8472 | 60/218,950 | 07/14/2000 |
| SEQ ID NO:8473 | 60/218,950 | 07/14/2000 |
| SEQ ID NO:8474 | 60/218,950 | 07/14/2000 |
| SEQ ID NO:8475 | 60/218,950 | 07/14/2000 |
| SEQ ID NO:8476 | 60/218,950 | 07/14/2000 |
| SEQ ID NO:8477 | 60/218,950 | 07/14/2000 |
| SEQ ID NO:8478 | 60/218,950 | 07/14/2000 |
| SEQ ID NO:8479 | 60/218,950 | 07/14/2000 |
| SEQ ID NO:8480 | 60/218,950 | 07/14/2000 |
| SEQ ID NO:8481 | 60/218,950 | 07/14/2000 |
| SEQ ID NO:8482 | 60/218,950 | 07/14/2000 |
| SEQ ID NO:8483 | 60/218,950 | 07/14/2000 |
| SEQ ID NO:8484 | 60/218,950 | 07/14/2000 |
| SEQ ID NO:8485 | 60/218,950 | 07/14/2000 |
| SEQ ID NO:8486 | 60/218,950 | 07/14/2000 |
| SEQ ID NO:8487 | 60/218,950 | 07/14/2000 |
| SEQ ID NO:8488 | 60/218,950 | 07/14/2000 |
| SEQ ID NO:8489 | 60/218,950 | 07/14/2000 |
| SEQ ID NO:8490 | 60/218,950 | 07/14/2000 |
| SEQ ID NO:8491 | 60/218,950 | 07/14/2000 |
| SEQ ID NO:8492 | 60/218,950 | 07/14/2000 |
| SEQ ID NO:8493 | 60/218,950 | 07/14/2000 |
| SEQ ID NO:8494 | 60/218,950 | 07/14/2000 |
| SEQ ID NO:8495 | 60/218,950 | 07/14/2000 |
| SEQ ID NO:8496 | 60/218,950 | 07/14/2000 |
| SEQ ID NO:8497 | 60/218,950 | 07/14/2000 |
| SEQ ID NO:8498 | 60/218,950 | 07/14/2000 |
| SEQ ID NO:8499 | 60/218,950 | 07/14/2000 |
| SEQ ID NO:8500 | 60/218,950 | 07/14/2000 |
| SEQ ID NO:8501 | 60/218,950 | 07/14/2000 |
| SEQ ID NO:8502 | 60/218,950 | 07/14/2000 |
| SEQ ID NO:8503 | 60/218,950 | 07/14/2000 |
| SEQ ID NO:8504 | 60/218,950 | 07/14/2000 |
| SEQ ID NO:8505 | 60/218,950 | 07/14/2000 |
| SEQ ID NO:8506 | 60/218,950 | 07/14/2000 |
| SEQ ID NO:8507 | 60/218,950 | 07/14/2000 |
| SEQ ID NO:8508 | 60/218,950 | 07/14/2000 |
| SEQ ID NO:8509 | 60/218,950 | 07/14/2000 |
| SEQ ID NO:8510 | 60/218,950 | 07/14/2000 |
| SEQ ID NO:8511 | 60/218,950 | 07/14/2000 |
| SEQ ID NO:8512 | 60/218,950 | 07/14/2000 |
| SEQ ID NO:8513 | 60/218,950 | 07/14/2000 |
| SEQ ID NO:8514 | 60/218,950 | 07/14/2000 |
| SEQ ID NO:8515 | 60/218,950 | 07/14/2000 |
| SEQ ID NO:8516 | 60/218,950 | 07/14/2000 |
| SEQ ID NO:8517 | 60/218,950 | 07/14/2000 |
| SEQ ID NO:8518 | 60/218,950 | 07/14/2000 |
| SEQ ID NO:8519 | 60/218,950 | 07/14/2000 |
| SEQ ID NO:8520 | 60/218,950 | 07/14/2000 |
| SEQ ID NO:8521 | 60/218,950 | 07/14/2000 |
| SEQ ID NO:8522 | 60/218,950 | 07/14/2000 |
| SEQ ID NO:8523 | 60/218,950 | 07/14/2000 |
| SEQ ID NO:8524 | 60/218,950 | 07/14/2000 |
| SEQ ID NO:8525 | 60/218,950 | 07/14/2000 |
| SEQ ID NO:8526 | 60/218,950 | 07/14/2000 |
| SEQ ID NO:8527 | 60/218,950 | 07/14/2000 |
| SEQ ID NO:8528 | 60/218,950 | 07/14/2000 |
| SEQ ID NO:8529 | 60/218,950 | 07/14/2000 |
| SEQ ID NO:8530 | 60/218,950 | 07/14/2000 |
| SEQ ID NO:8531 | 60/218,950 | 07/14/2000 |
| SEQ ID NO:8532 | 60/218,950 | 07/14/2000 |
| SEQ ID NO:8533 | 60/218,950 | 07/14/2000 |
| SEQ ID NO:8534 | 60/218,950 | 07/14/2000 |
| SEQ ID NO:8535 | 60/218,950 | 07/14/2000 |
| SEQ ID NO:8536 | 60/218,950 | 07/14/2000 |
| SEQ ID NO:8537 | 60/218,950 | 07/14/2000 |
| SEQ ID NO:8538 | 60/218,950 | 07/14/2000 |
| SEQ ID NO:8539 | 60/218,950 | 07/14/2000 |
| SEQ ID NO:8540 | 60/218,950 | 07/14/2000 |
| SEQ ID NO:8541 | 60/218,950 | 07/14/2000 |
| SEQ ID NO:8542 | 60/218,950 | 07/14/2000 |
| SEQ ID NO:8543 | 60/218,950 | 07/14/2000 |
| SEQ ID NO:8544 | 60/218,950 | 07/14/2000 |
| SEQ ID NO:8545 | 60/218,950 | 07/14/2000 |
| SEQ ID NO:8546 | 60/218,950 | 07/14/2000 |
| SEQ ID NO:8547 | 60/218,950 | 07/14/2000 |
| SEQ ID NO:8548 | 60/218,950 | 07/14/2000 |
| SEQ ID NO:8549 | 60/218,950 | 07/14/2000 |
| SEQ ID NO:8550 | 60/218,950 | 07/14/2000 |
| SEQ ID NO:8551 | 60/218,950 | 07/14/2000 |
| SEQ ID NO:8552 | 60/218,950 | 07/14/2000 |
| SEQ ID NO:8553 | 60/218,950 | 07/14/2000 |
| SEQ ID NO:8554 | 60/218,950 | 07/14/2000 |
| SEQ ID NO:8555 | 60/218,950 | 07/14/2000 |
| SEQ ID NO:8556 | 60/218,950 | 07/14/2000 |
| SEQ ID NO:8557 | 60/218,950 | 07/14/2000 |
| SEQ ID NO:8558 | 60/218,950 | 07/14/2000 |
| SEQ ID NO:8559 | 60/218,950 | 07/14/2000 |
| SEQ ID NO:8560 | 60/218,950 | 07/14/2000 |
| SEQ ID NO:8561 | 60/218,950 | 07/14/2000 |
| SEQ ID NO:8562 | 60/218,950 | 07/14/2000 |
| SEQ ID NO:8563 | 60/218,950 | 07/14/2000 |
| SEQ ID NO:8564 | 60/218,950 | 07/14/2000 |
| SEQ ID NO:8565 | 60/218,950 | 07/14/2000 |
| SEQ ID NO:8566 | 60/218,950 | 07/14/2000 |
| SEQ ID NO:8567 | 60/218,950 | 07/14/2000 |
| SEQ ID NO:8568 | 60/218,950 | 07/14/2000 |
| SEQ ID NO:8569 | 60/218,950 | 07/14/2000 |
| SEQ ID NO:8570 | 60/218,950 | 07/14/2000 |
| SEQ ID NO:8571 | 60/218,950 | 07/14/2000 |
| SEQ ID NO:8572 | 60/218,950 | 07/14/2000 |
| SEQ ID NO:8573 | 60/218,950 | 07/14/2000 |
| SEQ ID NO:8574 | 60/218,950 | 07/14/2000 |
| SEQ ID NO:8575 | 60/218,950 | 07/14/2000 |
| SEQ ID NO:8576 | 60/218,950 | 07/14/2000 |
| SEQ ID NO:8577 | 60/218,950 | 07/14/2000 |
| SEQ ID NO:8578 | 60/218,950 | 07/14/2000 |
| SEQ ID NO:8579 | 60/218,950 | 07/14/2000 |
| SEQ ID NO:8580 | 60/218,950 | 07/14/2000 |
| SEQ ID NO:8581 | 60/218,950 | 07/14/2000 |
| SEQ ID NO:8582 | 60/218,950 | 07/14/2000 |
| SEQ ID NO:8583 | 60/218,950 | 07/14/2000 |
| SEQ ID NO:8584 | 60/218,950 | 07/14/2000 |
| SEQ ID NO:8585 | 60/218,950 | 07/14/2000 |
| SEQ ID NO:8586 | 60/218,950 | 07/14/2000 |
| SEQ ID NO:8587 | 60/218,950 | 07/14/2000 |
| SEQ ID NO:8588 | 60/218,950 | 07/14/2000 |
| SEQ ID NO:8589 | 60/218,950 | 07/14/2000 |
| SEQ ID NO:8590 | 60/218,950 | 07/14/2000 |
| SEQ ID NO:8591 | 60/218,950 | 07/14/2000 |
| SEQ ID NO:8592 | 60/218,950 | 07/14/2000 |
| SEQ ID NO:8593 | 60/218,950 | 07/14/2000 |
| SEQ ID NO:8594 | 60/218,950 | 07/14/2000 |
| SEQ ID NO:8595 | 60/218,950 | 07/14/2000 |
| SEQ ID NO:8596 | 60/218,950 | 07/14/2000 |
| SEQ ID NO:8597 | 60/218,950 | 07/14/2000 |
| SEQ ID NO:8598 | 60/218,950 | 07/14/2000 |
| SEQ ID NO:8599 | 60/218,950 | 07/14/2000 |
| SEQ ID NO:8600 | 60/218,950 | 07/14/2000 |
| SEQ ID NO:8601 | 60/218,950 | 07/14/2000 |
| SEQ ID NO:8602 | 60/218,950 | 07/14/2000 |
| SEQ ID NO:8603 | 60/218,950 | 07/14/2000 |
| SEQ ID NO:8604 | 60/218,950 | 07/14/2000 |
| SEQ ID NO:8605 | 60/218,950 | 07/14/2000 |
| SEQ ID NO:8606 | 60/218,950 | 07/14/2000 |
| SEQ ID NO:8607 | 60/218,950 | 07/14/2000 |
| SEQ ID NO:8608 | 60/218,950 | 07/14/2000 |
| SEQ ID NO:8609 | 60/218,950 | 07/14/2000 |
| SEQ ID NO:8610 | 60/218,950 | 07/14/2000 |
| SEQ ID NO:8611 | 60/218,950 | 07/14/2000 |
| SEQ ID NO:8612 | 60/218,950 | 07/14/2000 |
| SEQ ID NO:8613 | 60/218,950 | 07/14/2000 |
| SEQ ID NO:8614 | 60/218,950 | 07/14/2000 |
| SEQ ID NO:8615 | 60/218,950 | 07/14/2000 |
| SEQ ID NO:8616 | 60/218,950 | 07/14/2000 |
| SEQ ID NO:8617 | 60/218,950 | 07/14/2000 |
| SEQ ID NO:8618 | 60/218,950 | 07/14/2000 |
| SEQ ID NO:8619 | 60/218,950 | 07/14/2000 |
| SEQ ID NO:8620 | 60/218,950 | 07/14/2000 |
| SEQ ID NO:8621 | 60/218,950 | 07/14/2000 |
| SEQ ID NO:8622 | 60/218,950 | 07/14/2000 |
| SEQ ID NO:8623 | 60/218,950 | 07/14/2000 |
| SEQ ID NO:8624 | 60/218,950 | 07/14/2000 |
| SEQ ID NO:8625 | 60/218,950 | 07/14/2000 |
| SEQ ID NO:8626 | 60/218,950 | 07/14/2000 |
| SEQ ID NO:8627 | 60/218,950 | 07/14/2000 |
| SEQ ID NO:8628 | 60/218,950 | 07/14/2000 |
| SEQ ID NO:8629 | 60/218,950 | 07/14/2000 |
| SEQ ID NO:8630 | 60/218,950 | 07/14/2000 |
| SEQ ID NO:8631 | 60/218,950 | 07/14/2000 |
| SEQ ID NO:8632 | 60/218,950 | 07/14/2000 |
| SEQ ID NO:8633 | 60/218,950 | 07/14/2000 |
| SEQ ID NO:8634 | 60/218,950 | 07/14/2000 |
| SEQ ID NO:8635 | 60/218,950 | 07/14/2000 |
| SEQ ID NO:8636 | 60/218,950 | 07/14/2000 |
| SEQ ID NO:8637 | 60/218,950 | 07/14/2000 |
| SEQ ID NO:8638 | 60/218,950 | 07/14/2000 |
| SEQ ID NO:8639 | 60/218,950 | 07/14/2000 |
| SEQ ID NO:8640 | 60/218,950 | 07/14/2000 |
| SEQ ID NO:8641 | 60/218,950 | 07/14/2000 |
| SEQ ID NO:8642 | 60/218,950 | 07/14/2000 |
| SEQ ID NO:8643 | 60/218,950 | 07/14/2000 |
| SEQ ID NO:8644 | 60/218,950 | 07/14/2000 |
| SEQ ID NO:8645 | 60/218,950 | 07/14/2000 |
| SEQ ID NO:8646 | 60/218,950 | 07/14/2000 |
| SEQ ID NO:8647 | 60/218,950 | 07/14/2000 |
| SEQ ID NO:8648 | 60/218,950 | 07/14/2000 |
| SEQ ID NO:8649 | 60/218,950 | 07/14/2000 |
| SEQ ID NO:8650 | 60/218,950 | 07/14/2000 |
| SEQ ID NO:8651 | 60/218,950 | 07/14/2000 |
| SEQ ID NO:8652 | 60/218,950 | 07/14/2000 |
| SEQ ID NO:8653 | 60/218,950 | 07/14/2000 |
| SEQ ID NO:8654 | 60/218,950 | 07/14/2000 |
| SEQ ID NO:8655 | 60/218,950 | 07/14/2000 |
| SEQ ID NO:8656 | 60/218,950 | 07/14/2000 |
| SEQ ID NO:8657 | 60/218,950 | 07/14/2000 |
| SEQ ID NO:8658 | 60/218,950 | 07/14/2000 |
| SEQ ID NO:8659 | 60/218,950 | 07/14/2000 |
| SEQ ID NO:8660 | 60/218,950 | 07/14/2000 |
| SEQ ID NO:8661 | 60/218,950 | 07/14/2000 |
| SEQ ID NO:8662 | 60/218,950 | 07/14/2000 |
| SEQ ID NO:8663 | 60/218,950 | 07/14/2000 |
| SEQ ID NO:8664 | 60/218,950 | 07/14/2000 |
| SEQ ID NO:8665 | 60/218,950 | 07/14/2000 |
| SEQ ID NO:8666 | 60/218,950 | 07/14/2000 |
| SEQ ID NO:8667 | 60/218,950 | 07/14/2000 |
| SEQ ID NO:8668 | 60/218,950 | 07/14/2000 |
| SEQ ID NO:8669 | 60/218,950 | 07/14/2000 |
| SEQ ID NO:8670 | 60/218,950 | 07/14/2000 |
| SEQ ID NO:8671 | 60/218,950 | 07/14/2000 |
| SEQ ID NO:8672 | 60/218,950 | 07/14/2000 |
| SEQ ID NO:8673 | 60/218,950 | 07/14/2000 |
| SEQ ID NO:8674 | 60/218,950 | 07/14/2000 |
| SEQ ID NO:8675 | 60/218,950 | 07/14/2000 |
| SEQ ID NO:8676 | 60/218,950 | 07/14/2000 |
| SEQ ID NO:8677 | 60/218,950 | 07/14/2000 |
| SEQ ID NO:8678 | 60/218,950 | 07/14/2000 |
| SEQ ID NO:8679 | 60/218,950 | 07/14/2000 |
| SEQ ID NO:8680 | 60/218,950 | 07/14/2000 |
| SEQ ID NO:8681 | 60/218,950 | 07/14/2000 |
| SEQ ID NO:8682 | 60/218,950 | 07/14/2000 |
| SEQ ID NO:8683 | 60/218,950 | 07/14/2000 |
| SEQ ID NO:8684 | 60/218,950 | 07/14/2000 |
| SEQ ID NO:8685 | 60/218,950 | 07/14/2000 |
| SEQ ID NO:8686 | 60/218,950 | 07/14/2000 |
| SEQ ID NO:8687 | 60/218,950 | 07/14/2000 |
| SEQ ID NO:8688 | 60/218,950 | 07/14/2000 |
| SEQ ID NO:8689 | 60/218,950 | 07/14/2000 |
| SEQ ID NO:8690 | 60/218,950 | 07/14/2000 |
| SEQ ID NO:8691 | 60/218,950 | 07/14/2000 |
| SEQ ID NO:8692 | 60/218,950 | 07/14/2000 |
| SEQ ID NO:8693 | 60/218,950 | 07/14/2000 |
| SEQ ID NO:8694 | 60/218,950 | 07/14/2000 |
| SEQ ID NO:8695 | 60/218,950 | 07/14/2000 |
| SEQ ID NO:8696 | 60/218,950 | 07/14/2000 |
| SEQ ID NO:8697 | 60/218,950 | 07/14/2000 |
| SEQ ID NO:8698 | 60/218,950 | 07/14/2000 |
| SEQ ID NO:8699 | 60/218,950 | 07/14/2000 |
| SEQ ID NO:8700 | 60/218,950 | 07/14/2000 |
| SEQ ID NO:8701 | 60/218,950 | 07/14/2000 |
| SEQ ID NO:8702 | 60/218,950 | 07/14/2000 |
| SEQ ID NO:8703 | 60/218,950 | 07/14/2000 |
| SEQ ID NO:8704 | 60/218,950 | 07/14/2000 |
| SEQ ID NO:8705 | 60/218,950 | 07/14/2000 |
| SEQ ID NO:8706 | 60/218,950 | 07/14/2000 |
| SEQ ID NO:8707 | 60/218,950 | 07/14/2000 |
| SEQ ID NO:8708 | 60/218,950 | 07/14/2000 |
| SEQ ID NO:8709 | 60/218,950 | 07/14/2000 |
| SEQ ID NO:8710 | 60/218,950 | 07/14/2000 |
| SEQ ID NO:8711 | 60/218,950 | 07/14/2000 |
| SEQ ID NO:8712 | 60/218,950 | 07/14/2000 |
| SEQ ID NO:8713 | 60/218,950 | 07/14/2000 |
| SEQ ID NO:8714 | 60/218,950 | 07/14/2000 |
| SEQ ID NO:8715 | 60/218,950 | 07/14/2000 |
| SEQ ID NO:8716 | 60/218,950 | 07/14/2000 |
| SEQ ID NO:8717 | 60/218,950 | 07/14/2000 |
| SEQ ID NO:8718 | 60/218,950 | 07/14/2000 |
| SEQ ID NO:8719 | 60/218,950 | 07/14/2000 |
| SEQ ID NO:8720 | 60/218,950 | 07/14/2000 |
| SEQ ID NO:8721 | 60/218,950 | 07/14/2000 |
| SEQ ID NO:8722 | 60/218,950 | 07/14/2000 |
| SEQ ID NO:8723 | 60/218,950 | 07/14/2000 |
| SEQ ID NO:8724 | 60/218,950 | 07/14/2000 |
| SEQ ID NO:8725 | 60/218,950 | 07/14/2000 |
| SEQ ID NO:8726 | 60/218,950 | 07/14/2000 |
| SEQ ID NO:8727 | 60/218,950 | 07/14/2000 |
| SEQ ID NO:8728 | 60/218,950 | 07/14/2000 |
| SEQ ID NO:8729 | 60/218,950 | 07/14/2000 |
| SEQ ID NO:8730 | 60/218,950 | 07/14/2000 |
| SEQ ID NO:8731 | 60/218,950 | 07/14/2000 |
| SEQ ID NO:8732 | 60/218,950 | 07/14/2000 |
| SEQ ID NO:8733 | 60/218,950 | 07/14/2000 |
| SEQ ID NO:8734 | 60/218,950 | 07/14/2000 |
| SEQ ID NO:8735 | 60/218,950 | 07/14/2000 |
| SEQ ID NO:8736 | 60/218,950 | 07/14/2000 |
| SEQ ID NO:8737 | 60/218,950 | 07/14/2000 |
| SEQ ID NO:8738 | 60/218,950 | 07/14/2000 |
| SEQ ID NO:8739 | 60/218,950 | 07/14/2000 |
| SEQ ID NO:8740 | 60/218,950 | 07/14/2000 |
| SEQ ID NO:8741 | 60/218,950 | 07/14/2000 |
| SEQ ID NO:8742 | 60/218,950 | 07/14/2000 |
| SEQ ID NO:8743 | 60/218,950 | 07/14/2000 |
| SEQ ID NO:8744 | 60/218,950 | 07/14/2000 |
| SEQ ID NO:8745 | 60/218,950 | 07/14/2000 |
| SEQ ID NO:8746 | 60/218,950 | 07/14/2000 |
| SEQ ID NO:8747 | 60/218,950 | 07/14/2000 |
| SEQ ID NO:8748 | 60/218,950 | 07/14/2000 |
| SEQ ID NO:8749 | 60/218,950 | 07/14/2000 |
| SEQ ID NO:8750 | 60/218,950 | 07/14/2000 |
| SEQ ID NO:8751 | 60/218,950 | 07/14/2000 |
| SEQ ID NO:8752 | 60/218,950 | 07/14/2000 |
| SEQ ID NO:8753 | 60/218,950 | 07/14/2000 |
| SEQ ID NO:8754 | 60/218,950 | 07/14/2000 |
| SEQ ID NO:8755 | 60/218,950 | 07/14/2000 |
| SEQ ID NO:8756 | 60/218,950 | 07/14/2000 |
| SEQ ID NO:8757 | 60/218,950 | 07/14/2000 |
| SEQ ID NO:8758 | 60/218,950 | 07/14/2000 |
| SEQ ID NO:8759 | 60/218,950 | 07/14/2000 |
| SEQ ID NO:8760 | 60/218,950 | 07/14/2000 |
| SEQ ID NO:8761 | 60/218,950 | 07/14/2000 |
| SEQ ID NO:8762 | 60/218,950 | 07/14/2000 |
| SEQ ID NO:8763 | 60/218,950 | 07/14/2000 |
| SEQ ID NO:8764 | 60/218,950 | 07/14/2000 |
| SEQ ID NO:8765 | 60/218,950 | 07/14/2000 |
| SEQ ID NO:8766 | 60/218,950 | 07/14/2000 |
| SEQ ID NO:8767 | 60/218,950 | 07/14/2000 |
| SEQ ID NO:8768 | 60/218,950 | 07/14/2000 |
| SEQ ID NO:8769 | 60/218,950 | 07/14/2000 |
| SEQ ID NO:8770 | 60/218,950 | 07/14/2000 |
| SEQ ID NO:8771 | 60/218,950 | 07/14/2000 |
| SEQ ID NO:8772 | 60/218,950 | 07/14/2000 |
| SEQ ID NO:8773 | 60/218,950 | 07/14/2000 |
| SEQ ID NO:8774 | 60/218,950 | 07/14/2000 |
| SEQ ID NO:8775 | 60/218,950 | 07/14/2000 |
| SEQ ID NO:8776 | 60/218,950 | 07/14/2000 |
| SEQ ID NO:8777 | 60/218,950 | 07/14/2000 |
| SEQ ID NO:8778 | 60/218,950 | 07/14/2000 |
| SEQ ID NO:8779 | 60/218,950 | 07/14/2000 |
| SEQ ID NO:8780 | 60/218,950 | 07/14/2000 |
| SEQ ID NO:8781 | 60/218,950 | 07/14/2000 |
| SEQ ID NO:8782 | 60/218,950 | 07/14/2000 |
| SEQ ID NO:8783 | 60/218,950 | 07/14/2000 |
| SEQ ID NO:8784 | 60/218,950 | 07/14/2000 |
| SEQ ID NO:8785 | 60/218,950 | 07/14/2000 |
| SEQ ID NO:8786 | 60/218,950 | 07/14/2000 |
| SEQ ID NO:8787 | 60/218,950 | 07/14/2000 |
| SEQ ID NO:8788 | 60/218,950 | 07/14/2000 |
| SEQ ID NO:8789 | 60/218,950 | 07/14/2000 |
| SEQ ID NO:8790 | 60/218,950 | 07/14/2000 |
| SEQ ID NO:8791 | 60/218,950 | 07/14/2000 |
| SEQ ID NO:8792 | 60/218,950 | 07/14/2000 |
| SEQ ID NO:8793 | 60/218,950 | 07/14/2000 |
| SEQ ID NO:8794 | 60/218,950 | 07/14/2000 |
| SEQ ID NO:8795 | 60/218,950 | 07/14/2000 |
| SEQ ID NO:8796 | 60/218,950 | 07/14/2000 |
| SEQ ID NO:8797 | 60/218,950 | 07/14/2000 |
| SEQ ID NO:8798 | 60/218,950 | 07/14/2000 |
| SEQ ID NO:8799 | 60/218,950 | 07/14/2000 |
| SEQ ID NO:8800 | 60/218,950 | 07/14/2000 |
| SEQ ID NO:8801 | 60/218,950 | 07/14/2000 |
| SEQ ID NO:8802 | 60/218,950 | 07/14/2000 |
| SEQ ID NO:8803 | 60/218,950 | 07/14/2000 |
| SEQ ID NO:8804 | 60/218,950 | 07/14/2000 |
| SEQ ID NO:8805 | 60/218,950 | 07/14/2000 |
| SEQ ID NO:8806 | 60/218,950 | 07/14/2000 |
| SEQ ID NO:8807 | 60/218,950 | 07/14/2000 |
| SEQ ID NO:8808 | 60/218,950 | 07/14/2000 |
| SEQ ID NO:8809 | 60/218,950 | 07/14/2000 |
| SEQ ID NO:8810 | 60/218,950 | 07/14/2000 |
| SEQ ID NO:8811 | 60/218,950 | 07/14/2000 |
| SEQ ID NO:8812 | 60/218,950 | 07/14/2000 |
| SEQ ID NO:8813 | 60/218,950 | 07/14/2000 |
| SEQ ID NO:8814 | 60/218,950 | 07/14/2000 |
| SEQ ID NO:8815 | 60/218,950 | 07/14/2000 |
| SEQ ID NO:8816 | 60/218,950 | 07/14/2000 |
| SEQ ID NO:8817 | 60/218,950 | 07/14/2000 |
| SEQ ID NO:8818 | 60/218,950 | 07/14/2000 |
| SEQ ID NO:8819 | 60/218,950 | 07/14/2000 |
| SEQ ID NO:8820 | 60/218,950 | 07/14/2000 |
| SEQ ID NO:8821 | 60/218,950 | 07/14/2000 |
| SEQ ID NO:8822 | 60/218,950 | 07/14/2000 |
| SEQ ID NO:8823 | 60/218,950 | 07/14/2000 |
| SEQ ID NO:8824 | 60/218,950 | 07/14/2000 |
| SEQ ID NO:8825 | 60/218,950 | 07/14/2000 |
| SEQ ID NO:8826 | 60/218,950 | 07/14/2000 |
| SEQ ID NO:8827 | 60/218,950 | 07/14/2000 |
| SEQ ID NO:8828 | 60/218,950 | 07/14/2000 |
| SEQ ID NO:8829 | 60/218,950 | 07/14/2000 |
| SEQ ID NO:8830 | 60/218,950 | 07/14/2000 |
| SEQ ID NO:8831 | 60/218,950 | 07/14/2000 |
| SEQ ID NO:8832 | 60/218,950 | 07/14/2000 |
| SEQ ID NO:8833 | 60/218,950 | 07/14/2000 |
| SEQ ID NO:8834 | 60/218,950 | 07/14/2000 |
| SEQ ID NO:8835 | 60/218,950 | 07/14/2000 |
| SEQ ID NO:8836 | 60/218,950 | 07/14/2000 |
| SEQ ID NO:8837 | 60/218,950 | 07/14/2000 |
| SEQ ID NO:8838 | 60/218,950 | 07/14/2000 |
| SEQ ID NO:8839 | 60/218,950 | 07/14/2000 |
| SEQ ID NO:8840 | 60/218,950 | 07/14/2000 |
| SEQ ID NO:8841 | 60/218,950 | 07/14/2000 |
| SEQ ID NO:8842 | 60/218,950 | 07/14/2000 |
| SEQ ID NO:8843 | 60/218,950 | 07/14/2000 |
| SEQ ID NO:8844 | 60/218,950 | 07/14/2000 |
| SEQ ID NO:8845 | 60/218,950 | 07/14/2000 |
| SEQ ID NO:8846 | 60/218,950 | 07/14/2000 |
| SEQ ID NO:8847 | 60/218,950 | 07/14/2000 |
| SEQ ID NO:8848 | 60/218,950 | 07/14/2000 |
| SEQ ID NO:8849 | 60/218,950 | 07/14/2000 |
| SEQ ID NO:8850 | 60/218,950 | 07/14/2000 |
| SEQ ID NO:8851 | 60/218,950 | 07/14/2000 |
| SEQ ID NO:8852 | 60/218,950 | 07/14/2000 |
| SEQ ID NO:8853 | 60/218,950 | 07/14/2000 |
| SEQ ID NO:8854 | 60/218,950 | 07/14/2000 |
| SEQ ID NO:8855 | 60/218,950 | 07/14/2000 |
| SEQ ID NO:8856 | 60/218,950 | 07/14/2000 |
| SEQ ID NO:8857 | 60/218,950 | 07/14/2000 |
| SEQ ID NO:8858 | 60/218,950 | 07/14/2000 |
| SEQ ID NO:8859 | 60/218,950 | 07/14/2000 |
| SEQ ID NO:8860 | 60/218,950 | 07/14/2000 |
| SEQ ID NO:8861 | 60/218,950 | 07/14/2000 |
| SEQ ID NO:8862 | 60/218,950 | 07/14/2000 |
| SEQ ID NO:8863 | 60/218,950 | 07/14/2000 |
| SEQ ID NO:8864 | 60/218,950 | 07/14/2000 |
| SEQ ID NO:8865 | 60/218,950 | 07/14/2000 |
| SEQ ID NO:8866 | 60/218,950 | 07/14/2000 |
| SEQ ID NO:8867 | 60/218,950 | 07/14/2000 |
| SEQ ID NO:8868 | 60/218,950 | 07/14/2000 |
| SEQ ID NO:8869 | 60/218,950 | 07/14/2000 |
| SEQ ID NO:8870 | 60/218,950 | 07/14/2000 |
| SEQ ID NO:8871 | 60/218,950 | 07/14/2000 |
| SEQ ID NO:8872 | 60/218,950 | 07/14/2000 |
| SEQ ID NO:8873 | 60/218,950 | 07/14/2000 |
| SEQ ID NO:8874 | 60/218,950 | 07/14/2000 |
| SEQ ID NO:8875 | 60/218,950 | 07/14/2000 |
| SEQ ID NO:8876 | 60/218,950 | 07/14/2000 |
| SEQ ID NO:8877 | 60/218,950 | 07/14/2000 |
| SEQ ID NO:8878 | 60/218,950 | 07/14/2000 |
| SEQ ID NO:8879 | 60/218,950 | 07/14/2000 |
| SEQ ID NO:8880 | 60/218,950 | 07/14/2000 |
| SEQ ID NO:8881 | 60/218,950 | 07/14/2000 |
| SEQ ID NO:8882 | 60/218,950 | 07/14/2000 |
| SEQ ID NO:8883 | 60/218,950 | 07/14/2000 |
| SEQ ID NO:8884 | 60/218,950 | 07/14/2000 |
| SEQ ID NO:8885 | 60/218,950 | 07/14/2000 |
| SEQ ID NO:8886 | 60/218,950 | 07/14/2000 |
| SEQ ID NO:8887 | 60/218,950 | 07/14/2000 |
| SEQ ID NO:8888 | 60/218,950 | 07/14/2000 |
| SEQ ID NO:8889 | 60/218,950 | 07/14/2000 |
| SEQ ID NO:8890 | 60/218,950 | 07/14/2000 |
| SEQ ID NO:8891 | 60/218,950 | 07/14/2000 |
| SEQ ID NO:8892 | 60/218,950 | 07/14/2000 |
| SEQ ID NO:8893 | 60/218,950 | 07/14/2000 |
| SEQ ID NO:8894 | 60/218,950 | 07/14/2000 |
| SEQ ID NO:8895 | 60/218,950 | 07/14/2000 |
| SEQ ID NO:8896 | 60/218,950 | 07/14/2000 |
| SEQ ID NO:8897 | 60/218,950 | 07/14/2000 |
| SEQ ID NO:8898 | 60/218,950 | 07/14/2000 |
| SEQ ID NO:8899 | 60/218,950 | 07/14/2000 |
| SEQ ID NO:8900 | 60/218,950 | 07/14/2000 |
| SEQ ID NO:8901 | 60/218,950 | 07/14/2000 |
| SEQ ID NO:8902 | 60/218,950 | 07/14/2000 |
| SEQ ID NO:8903 | 60/218,950 | 07/14/2000 |
| SEQ ID NO:8904 | 60/218,950 | 07/14/2000 |
| SEQ ID NO:8905 | 60/218,950 | 07/14/2000 |
| SEQ ID NO:8906 | 60/218,950 | 07/14/2000 |
| SEQ ID NO:8907 | 60/218,950 | 07/14/2000 |
| SEQ ID NO:8908 | 60/218,950 | 07/14/2000 |
| SEQ ID NO:8909 | 60/218,950 | 07/14/2000 |
| SEQ ID NO:8910 | 60/218,950 | 07/14/2000 |
| SEQ ID NO:8911 | 60/218,950 | 07/14/2000 |
| SEQ ID NO:8912 | 60/218,950 | 07/14/2000 |
| SEQ ID NO:8913 | 60/218,950 | 07/14/2000 |
| SEQ ID NO:8914 | 60/218,950 | 07/14/2000 |
| SEQ ID NO:8915 | 60/218,950 | 07/14/2000 |
| SEQ ID NO:8916 | 60/218,950 | 07/14/2000 |
| SEQ ID NO:8917 | 60/218,950 | 07/14/2000 |
| SEQ ID NO:8918 | 60/218,950 | 07/14/2000 |
| SEQ ID NO:8919 | 60/218,950 | 07/14/2000 |
| SEQ ID NO:8920 | 60/218,950 | 07/14/2000 |
| SEQ ID NO:8921 | 60/218,950 | 07/14/2000 |
| SEQ ID NO:8922 | 60/218,950 | 07/14/2000 |
| SEQ ID NO:8923 | 60/218,950 | 07/14/2000 |
| SEQ ID NO:8924 | 60/218,950 | 07/14/2000 |
| SEQ ID NO:8925 | 60/218,950 | 07/14/2000 |
| SEQ ID NO:8926 | 60/218,950 | 07/14/2000 |
| SEQ ID NO:8927 | 60/218,950 | 07/14/2000 |
| SEQ ID NO:8928 | 60/218,950 | 07/14/2000 |
| SEQ ID NO:8929 | 60/218,950 | 07/14/2000 |
| SEQ ID NO:8930 | 60/218,950 | 07/14/2000 |
| SEQ ID NO:8931 | 60/218,950 | 07/14/2000 |
| SEQ ID NO:8932 | 60/218,950 | 07/14/2000 |
| SEQ ID NO:8933 | 60/218,950 | 07/14/2000 |
| SEQ ID NO:8934 | 60/218,950 | 07/14/2000 |
| SEQ ID NO:8935 | 60/218,950 | 07/14/2000 |
| SEQ ID NO:8936 | 60/218,950 | 07/14/2000 |
| SEQ ID NO:8937 | 60/218,950 | 07/14/2000 |
| SEQ ID NO:8938 | 60/218,950 | 07/14/2000 |
| SEQ ID NO:8939 | 60/218,950 | 07/14/2000 |
| SEQ ID NO:8940 | 60/218,950 | 07/14/2000 |
| SEQ ID NO:8941 | 60/218,950 | 07/14/2000 |
| SEQ ID NO:8942 | 60/218,950 | 07/14/2000 |
| SEQ ID NO:8943 | 60/218,950 | 07/14/2000 |
| SEQ ID NO:8944 | 60/218,950 | 07/14/2000 |
| SEQ ID NO:8945 | 60/218,950 | 07/14/2000 |
| SEQ ID NO:8946 | 60/218,950 | 07/14/2000 |
| SEQ ID NO:8947 | 60/218,950 | 07/14/2000 |
| SEQ ID NO:8948 | 60/218,950 | 07/14/2000 |
| SEQ ID NO:8949 | 60/218,950 | 07/14/2000 |
| SEQ ID NO:8950 | 60/218,950 | 07/14/2000 |
| SEQ ID NO:8951 | 60/218,950 | 07/14/2000 |
| SEQ ID NO:8952 | 60/218,950 | 07/14/2000 |
| SEQ ID NO:8953 | 60/218,950 | 07/14/2000 |
| SEQ ID NO:8954 | 60/218,950 | 07/14/2000 |
| SEQ ID NO:8955 | 60/218,950 | 07/14/2000 |
| SEQ ID NO:8956 | 60/218,950 | 07/14/2000 |
| SEQ ID NO:8957 | 60/218,950 | 07/14/2000 |
| SEQ ID NO:8958 | 60/218,950 | 07/14/2000 |
| SEQ ID NO:8959 | 60/218,950 | 07/14/2000 |
| SEQ ID NO:8960 | 60/218,950 | 07/14/2000 |
| SEQ ID NO:8961 | 60/218,950 | 07/14/2000 |
| SEQ ID NO:8962 | 60/218,950 | 07/14/2000 |
| SEQ ID NO:8963 | 60/218,950 | 07/14/2000 |
| SEQ ID NO:8964 | 60/218,950 | 07/14/2000 |
| SEQ ID NO:8965 | 60/218,950 | 07/14/2000 |
| SEQ ID NO:8966 | 60/218,950 | 07/14/2000 |
| SEQ ID NO:8967 | 60/218,950 | 07/14/2000 |
| SEQ ID NO:8968 | 60/218,950 | 07/14/2000 |
| SEQ ID NO:8969 | 60/218,950 | 07/14/2000 |
| SEQ ID NO:8970 | 60/218,950 | 07/14/2000 |
| SEQ ID NO:8971 | 60/218,950 | 07/14/2000 |
| SEQ ID NO:8972 | 60/218,950 | 07/14/2000 |
| SEQ ID NO:8973 | 60/218,950 | 07/14/2000 |
| SEQ ID NO:8974 | 60/218,950 | 07/14/2000 |
| SEQ ID NO:8975 | 60/218,950 | 07/14/2000 |
| SEQ ID NO:8976 | 60/218,950 | 07/14/2000 |
| SEQ ID NO:8977 | 60/218,950 | 07/14/2000 |
| SEQ ID NO:8978 | 60/218,950 | 07/14/2000 |
| SEQ ID NO:8979 | 60/218,950 | 07/14/2000 |
| SEQ ID NO:8980 | 60/218,950 | 07/14/2000 |
| SEQ ID NO:8981 | 60/218,950 | 07/14/2000 |
| SEQ ID NO:8982 | 60/218,950 | 07/14/2000 |
| SEQ ID NO:8983 | 60/218,950 | 07/14/2000 |
| SEQ ID NO:8984 | 60/218,950 | 07/14/2000 |
| SEQ ID NO:8985 | 60/218,950 | 07/14/2000 |
| SEQ ID NO:8986 | 60/218,950 | 07/14/2000 |
| SEQ ID NO:8987 | 60/218,950 | 07/14/2000 |
| SEQ ID NO:8988 | 60/218,950 | 07/14/2000 |
| SEQ ID NO:8989 | 60/218,950 | 07/14/2000 |
| SEQ ID NO:8990 | 60/218,950 | 07/14/2000 |
| SEQ ID NO:8991 | 60/218,950 | 07/14/2000 |
| SEQ ID NO:8992 | 60/218,950 | 07/14/2000 |
| SEQ ID NO:8993 | 60/218,950 | 07/14/2000 |
| SEQ ID NO:8994 | 60/218,950 | 07/14/2000 |
| SEQ ID NO:8995 | 60/218,950 | 07/14/2000 |
| SEQ ID NO:8996 | 60/218,950 | 07/14/2000 |
| SEQ ID NO:8997 | 60/218,950 | 07/14/2000 |
| SEQ ID NO:8998 | 60/218,950 | 07/14/2000 |
| SEQ ID NO:8999 | 60/218,950 | 07/14/2000 |
| SEQ ID NO:9000 | 60/218,950 | 07/14/2000 |
| SEQ ID NO:9001 | 60/218,950 | 07/14/2000 |
| SEQ ID NO:9002 | 60/218,950 | 07/14/2000 |
| SEQ ID NO:9003 | 60/218,950 | 07/14/2000 |
| SEQ ID NO:9004 | 60/218,950 | 07/14/2000 |
| SEQ ID NO:9005 | 60/218,950 | 07/14/2000 |
| SEQ ID NO:9006 | 60/218,950 | 07/14/2000 |
| SEQ ID NO:9007 | 60/218,950 | 07/14/2000 |
| SEQ ID NO:9008 | 60/218,950 | 07/14/2000 |
| SEQ ID NO:9009 | 60/218,950 | 07/14/2000 |
| SEQ ID NO:9010 | 60/218,950 | 07/14/2000 |
| SEQ ID NO:9011 | 60/218,950 | 07/14/2000 |
| SEQ ID NO:9012 | 60/218,950 | 07/14/2000 |
| SEQ ID NO:9013 | 60/218,950 | 07/14/2000 |
| SEQ ID NO:9014 | 60/218,950 | 07/14/2000 |
| SEQ ID NO:9015 | 60/218,950 | 07/14/2000 |
| SEQ ID NO:9016 | 60/218,950 | 07/14/2000 |
| SEQ ID NO:9017 | 60/218,950 | 07/14/2000 |
| SEQ ID NO:9018 | 60/218,950 | 07/14/2000 |
| SEQ ID NO:9019 | 60/218,950 | 07/14/2000 |
| SEQ ID NO:9020 | 60/218,950 | 07/14/2000 |
| SEQ ID NO:9021 | 60/218,950 | 07/14/2000 |
| SEQ ID NO:9022 | 60/218,950 | 07/14/2000 |
| SEQ ID NO:9023 | 60/218,950 | 07/14/2000 |
| SEQ ID NO:9024 | 60/218,950 | 07/14/2000 |
| SEQ ID NO:9025 | 60/218,950 | 07/14/2000 |
| SEQ ID NO:9026 | 60/218,950 | 07/14/2000 |
| SEQ ID NO:9027 | 60/218,950 | 07/14/2000 |
| SEQ ID NO:9028 | 60/218,950 | 07/14/2000 |
| SEQ ID NO:9029 | 60/218,950 | 07/14/2000 |
| SEQ ID NO:9030 | 60/218,950 | 07/14/2000 |
| SEQ ID NO:9031 | 60/218,950 | 07/14/2000 |
| SEQ ID NO:9032 | 60/218,950 | 07/14/2000 |
| SEQ ID NO:9033 | 60/218,950 | 07/14/2000 |
| SEQ ID NO:9034 | 60/218,950 | 07/14/2000 |
| SEQ ID NO:9035 | 60/218,950 | 07/14/2000 |
| SEQ ID NO:9036 | 60/218,950 | 07/14/2000 |
| SEQ ID NO:9037 | 60/218,950 | 07/14/2000 |
| SEQ ID NO:9038 | 60/218,950 | 07/14/2000 |
| SEQ ID NO:9039 | 60/218,950 | 07/14/2000 |
| SEQ ID NO:9040 | 60/218,950 | 07/14/2000 |
| SEQ ID NO:9041 | 60/218,950 | 07/14/2000 |
| SEQ ID NO:9042 | 60/218,950 | 07/14/2000 |
| SEQ ID NO:9043 | 60/218,950 | 07/14/2000 |
| SEQ ID NO:9044 | 60/218,950 | 07/14/2000 |
| SEQ ID NO:9045 | 60/218,950 | 07/14/2000 |
| SEQ ID NO:9046 | 60/218,950 | 07/14/2000 |
| SEQ ID NO:9047 | 60/218,950 | 07/14/2000 |
| SEQ ID NO:9048 | 60/218,950 | 07/14/2000 |
| SEQ ID NO:9049 | 60/218,950 | 07/14/2000 |
| SEQ ID NO:9050 | 60/218,950 | 07/14/2000 |
| SEQ ID NO:9051 | 60/218,950 | 07/14/2000 |
| SEQ ID NO:9052 | 60/223,378 | 08/07/2000 |
| SEQ ID NO:9053 | 60/223,378 | 08/07/2000 |
| SEQ ID NO:9054 | 60/223,378 | 08/07/2000 |
| SEQ ID NO:9055 | 60/223,378 | 08/07/2000 |
| SEQ ID NO:9056 | 60/223,378 | 08/07/2000 |
| SEQ ID NO:9057 | 60/223,378 | 08/07/2000 |
| SEQ ID NO:9058 | 60/223,378 | 08/07/2000 |
| SEQ ID NO:9059 | 60/223,378 | 08/07/2000 |
| SEQ ID NO:9060 | 60/223,378 | 08/07/2000 |
| SEQ ID NO:9061 | 60/223,378 | 08/07/2000 |
| SEQ ID NO:9062 | 60/223,378 | 08/07/2000 |
| SEQ ID NO:9063 | 60/223,378 | 08/07/2000 |
| SEQ ID NO:9064 | 60/223,378 | 08/07/2000 |
| SEQ ID NO:9065 | 60/223,378 | 08/07/2000 |
| SEQ ID NO:9066 | 60/223,378 | 08/07/2000 |
| SEQ ID NO:9067 | 60/223,378 | 08/07/2000 |
| SEQ ID NO:9068 | 60/223,378 | 08/07/2000 |
| SEQ ID NO:9069 | 60/223,378 | 08/07/2000 |
| SEQ ID NO:9070 | 60/223,378 | 08/07/2000 |
| SEQ ID NO:9071 | 60/223,378 | 08/07/2000 |
| SEQ ID NO:9072 | 60/223,378 | 08/07/2000 |
| SEQ ID NO:9073 | 60/223,378 | 08/07/2000 |
| SEQ ID NO:9074 | 60/223,378 | 08/07/2000 |
| SEQ ID NO:9075 | 60/223,378 | 08/07/2000 |
| SEQ ID NO:9076 | 60/223,378 | 08/07/2000 |
| SEQ ID NO:9077 | 60/223,378 | 08/07/2000 |
| SEQ ID NO:9078 | 60/223,378 | 08/07/2000 |
| SEQ ID NO:9079 | 60/223,378 | 08/07/2000 |
| SEQ ID NO:9080 | 60/223,378 | 08/07/2000 |
| SEQ ID NO:9081 | 60/223,378 | 08/07/2000 |
| SEQ ID NO:9082 | 60/223,378 | 08/07/2000 |
| SEQ ID NO:9083 | 60/223,378 | 08/07/2000 |
| SEQ ID NO:9084 | 60/223,378 | 08/07/2000 |
| SEQ ID NO:9085 | 60/223,378 | 08/07/2000 |
| SEQ ID NO:9086 | 60/223,378 | 08/07/2000 |
| SEQ ID NO:9087 | 60/223,378 | 08/07/2000 |
| SEQ ID NO:9088 | 60/223,378 | 08/07/2000 |
| SEQ ID NO:9089 | 60/223,378 | 08/07/2000 |
| SEQ ID NO:9090 | 60/223,378 | 08/07/2000 |
| SEQ ID NO:9091 | 60/223,378 | 08/07/2000 |
| SEQ ID NO:9092 | 60/223,378 | 08/07/2000 |
| SEQ ID NO:9093 | 60/223,378 | 08/07/2000 |
| SEQ ID NO:9094 | 60/223,378 | 08/07/2000 |
| SEQ ID NO:9095 | 60/223,378 | 08/07/2000 |
| SEQ ID NO:9096 | 60/223,378 | 08/07/2000 |
| SEQ ID NO:9097 | 60/223,378 | 08/07/2000 |
| SEQ ID NO:9098 | 60/223,378 | 08/07/2000 |
| SEQ ID NO:9099 | 60/223,378 | 08/07/2000 |
| SEQ ID NO:9100 | 60/223,378 | 08/07/2000 |
| SEQ ID NO:9101 | 60/223,378 | 08/07/2000 |
| SEQ ID NO:9102 | 60/223,378 | 08/07/2000 |
| SEQ ID NO:9103 | 60/223,378 | 08/07/2000 |
| SEQ ID NO:9104 | 60/223,378 | 08/07/2000 |
| SEQ ID NO:9105 | 60/223,378 | 08/07/2000 |
| SEQ ID NO:9106 | 60/223,378 | 08/07/2000 |
| SEQ ID NO:9107 | 60/223,378 | 08/07/2000 |
| SEQ ID NO:9108 | 60/223,378 | 08/07/2000 |
| SEQ ID NO:9109 | 60/223,378 | 08/07/2000 |
| SEQ ID NO:9110 | 60/223,378 | 08/07/2000 |
| SEQ ID NO:9111 | 60/223,378 | 08/07/2000 |
| SEQ ID NO:9112 | 60/223,378 | 08/07/2000 |
| SEQ ID NO:9113 | 60/223,378 | 08/07/2000 |
| SEQ ID NO:9114 | 60/223,378 | 08/07/2000 |
| SEQ ID NO:9115 | 60/223,378 | 08/07/2000 |
| SEQ ID NO:9116 | 60/223,378 | 08/07/2000 |
| SEQ ID NO:9117 | 60/223,378 | 08/07/2000 |
| SEQ ID NO:9118 | 60/223,378 | 08/07/2000 |
| SEQ ID NO:9119 | 60/223,378 | 08/07/2000 |
| SEQ ID NO:9120 | 60/223,378 | 08/07/2000 |
| SEQ ID NO:9121 | 60/223,378 | 08/07/2000 |
| SEQ ID NO:9122 | 60/223,378 | 08/07/2000 |
| SEQ ID NO:9123 | 60/223,378 | 08/07/2000 |
| SEQ ID NO:9124 | 60/223,378 | 08/07/2000 |
| SEQ ID NO:9125 | 60/223,378 | 08/07/2000 |
| SEQ ID NO:9126 | 60/223,378 | 08/07/2000 |
| SEQ ID NO:9127 | 60/223,378 | 08/07/2000 |
| SEQ ID NO:9128 | 60/223,378 | 08/07/2000 |
| SEQ ID NO:9129 | 60/223,378 | 08/07/2000 |
| SEQ ID NO:9130 | 60/223,378 | 08/07/2000 |
| SEQ ID NO:9131 | 60/223,378 | 08/07/2000 |
| SEQ ID NO:9132 | 60/223,378 | 08/07/2000 |
| SEQ ID NO:9133 | 60/223,378 | 08/07/2000 |
| SEQ ID NO:9134 | 60/223,378 | 08/07/2000 |
| SEQ ID NO:9135 | 60/223,378 | 08/07/2000 |
| SEQ ID NO:9136 | 60/223,378 | 08/07/2000 |
| SEQ ID NO:9137 | 60/223,378 | 08/07/2000 |
| SEQ ID NO:9138 | 60/223,378 | 08/07/2000 |
| SEQ ID NO:9139 | 60/223,378 | 08/07/2000 |
| SEQ ID NO:9140 | 60/223,378 | 08/07/2000 |
| SEQ ID NO:9141 | 60/223,378 | 08/07/2000 |
| SEQ ID NO:9142 | 60/223,378 | 08/07/2000 |
| SEQ ID NO:9143 | 60/223,378 | 08/07/2000 |
| SEQ ID NO:9144 | 60/223,378 | 08/07/2000 |
| SEQ ID NO:9145 | 60/223,378 | 08/07/2000 |
| SEQ ID NO:9146 | 60/223,378 | 08/07/2000 |
| SEQ ID NO:9147 | 60/223,378 | 08/07/2000 |
| SEQ ID NO:9148 | 60/223,378 | 08/07/2000 |
| SEQ ID NO:9149 | 60/223,378 | 08/07/2000 |
| SEQ ID NO:9150 | 60/223,378 | 08/07/2000 |
| SEQ ID NO:9151 | 60/223,378 | 08/07/2000 |
| SEQ ID NO:9152 | 60/223,378 | 08/07/2000 |
| SEQ ID NO:9153 | 60/223,378 | 08/07/2000 |
| SEQ ID NO:9154 | 60/223,378 | 08/07/2000 |
| SEQ ID NO:9155 | 60/223,378 | 08/07/2000 |
| SEQ ID NO:9156 | 60/223,378 | 08/07/2000 |
| SEQ ID NO:9157 | 60/223,378 | 08/07/2000 |
| SEQ ID NO:9158 | 60/223,378 | 08/07/2000 |
| SEQ ID NO:9159 | 60/223,378 | 08/07/2000 |
| SEQ ID NO:9160 | 60/223,378 | 08/07/2000 |
| SEQ ID NO:9161 | 60/223,378 | 08/07/2000 |
| SEQ ID NO:9162 | 60/223,378 | 08/07/2000 |
| SEQ ID NO:9163 | 60/223,378 | 08/07/2000 |
| SEQ ID NO:9164 | 60/223,378 | 08/07/2000 |
| SEQ ID NO:9165 | 60/223,378 | 08/07/2000 |
| SEQ ID NO:9166 | 60/223,378 | 08/07/2000 |
| SEQ ID NO:9167 | 60/223,378 | 08/07/2000 |
| SEQ ID NO:9168 | 60/223,378 | 08/07/2000 |
| SEQ ID NO:9169 | 60/223,378 | 08/07/2000 |
| SEQ ID NO:9170 | 60/223,378 | 08/07/2000 |
| SEQ ID NO:9171 | 60/223,378 | 08/07/2000 |
| SEQ ID NO:9172 | 60/223,378 | 08/07/2000 |
| SEQ ID NO:9173 | 60/223,378 | 08/07/2000 |
| SEQ ID NO:9174 | 60/223,378 | 08/07/2000 |
| SEQ ID NO:9175 | 60/223,378 | 08/07/2000 |
| SEQ ID NO:9176 | 60/223,378 | 08/07/2000 |
| SEQ ID NO:9177 | 60/223,378 | 08/07/2000 |
| SEQ ID NO:9178 | 60/223,378 | 08/07/2000 |
| SEQ ID NO:9179 | 60/223,378 | 08/07/2000 |
| SEQ ID NO:9180 | 60/223,378 | 08/07/2000 |
| SEQ ID NO:9181 | 60/223,378 | 08/07/2000 |
| SEQ ID NO:9182 | 60/223,378 | 08/07/2000 |
| SEQ ID NO:9183 | 60/223,378 | 08/07/2000 |
| SEQ ID NO:9184 | 60/223,378 | 08/07/2000 |
| SEQ ID NO:9185 | 60/223,378 | 08/07/2000 |
| SEQ ID NO:9186 | 60/223,378 | 08/07/2000 |
| SEQ ID NO:9187 | 60/223,378 | 08/07/2000 |
| SEQ ID NO:9188 | 60/223,378 | 08/07/2000 |
| SEQ ID NO:9189 | 60/223,378 | 08/07/2000 |
| SEQ ID NO:9190 | 60/223,378 | 08/07/2000 |
| SEQ ID NO:9191 | 60/223,378 | 08/07/2000 |
| SEQ ID NO:9192 | 60/223,378 | 08/07/2000 |
| SEQ ID NO:9193 | 60/223,378 | 08/07/2000 |
| SEQ ID NO:9194 | 60/223,378 | 08/07/2000 |
| SEQ ID NO:9195 | 60/223,378 | 08/07/2000 |
| SEQ ID NO:9196 | 60/223,378 | 08/07/2000 |
| SEQ ID NO:9197 | 60/223,378 | 08/07/2000 |
| SEQ ID NO:9198 | 60/222,903 | 08/03/2000 |
| SEQ ID NO:9199 | 60/222,903 | 08/03/2000 |
| SEQ ID NO:9200 | 60/222,903 | 08/03/2000 |
| SEQ ID NO:9201 | 60/222,903 | 08/03/2000 |
| SEQ ID NO:9202 | 60/222,903 | 08/03/2000 |
| SEQ ID NO:9203 | 60/222,903 | 08/03/2000 |
| SEQ ID NO:9204 | 60/222,903 | 08/03/2000 |
| SEQ ID NO:9205 | 60/222,903 | 08/03/2000 |
| SEQ ID NO:9206 | 60/222,903 | 08/03/2000 |
| SEQ ID NO:9207 | 60/222,903 | 08/03/2000 |
| SEQ ID NO:9208 | 60/222,903 | 08/03/2000 |
| SEQ ID NO:9209 | 60/222,903 | 08/03/2000 |
| SEQ ID NO:9210 | 60/222,903 | 08/03/2000 |
| SEQ ID NO:9211 | 60/222,903 | 08/03/2000 |
| SEQ ID NO:9212 | 60/222,903 | 08/03/2000 |
| SEQ ID NO:9213 | 60/222,903 | 08/03/2000 |
| SEQ ID NO:9214 | 60/222,903 | 08/03/2000 |
| SEQ ID NO:9215 | 60/222,903 | 08/03/2000 |
| SEQ ID NO:9216 | 60/222,903 | 08/03/2000 |
| SEQ ID NO:9217 | 60/222,903 | 08/03/2000 |
| SEQ ID NO:9218 | 60/222,903 | 08/03/2000 |
| SEQ ID NO:9219 | 60/222,903 | 08/03/2000 |
| SEQ ID NO:9220 | 60/222,903 | 08/03/2000 |
| SEQ ID NO:9221 | 60/222,903 | 08/03/2000 |
| SEQ ID NO:9222 | 60/222,903 | 08/03/2000 |
| SEQ ID NO:9223 | 60/222,903 | 08/03/2000 |
| SEQ ID NO:9224 | 60/222,903 | 08/03/2000 |
| SEQ ID NO:9225 | 60/222,903 | 08/03/2000 |
| SEQ ID NO:9226 | 60/222,903 | 08/03/2000 |
| SEQ ID NO:9227 | 60/222,903 | 08/03/2000 |
| SEQ ID NO:9228 | 60/222,903 | 08/03/2000 |
| SEQ ID NO:9229 | 60/222,903 | 08/03/2000 |
| SEQ ID NO:9230 | 60/222,903 | 08/03/2000 |
| SEQ ID NO:9231 | 60/222,903 | 08/03/2000 |
| SEQ ID NO:9232 | 60/222,903 | 08/03/2000 |
| SEQ ID NO:9233 | 60/222,903 | 08/03/2000 |
| SEQ ID NO:9234 | 60/222,903 | 08/03/2000 |
| SEQ ID NO:9235 | 60/222,903 | 08/03/2000 |
| SEQ ID NO:9236 | 60/222,903 | 08/03/2000 |
| SEQ ID NO:9237 | 60/222,903 | 08/03/2000 |
| SEQ ID NO:9238 | 60/222,903 | 08/03/2000 |
| SEQ ID NO:9239 | 60/222,903 | 08/03/2000 |
| SEQ ID NO:9240 | 60/222,903 | 08/03/2000 |
| SEQ ID NO:9241 | 60/222,903 | 08/03/2000 |
| SEQ ID NO:9242 | 60/222,903 | 08/03/2000 |
| SEQ ID NO:9243 | 60/222,903 | 08/03/2000 |
| SEQ ID NO:9244 | 60/222,903 | 08/03/2000 |
| SEQ ID NO:9245 | 60/222,903 | 08/03/2000 |
| SEQ ID NO:9246 | 60/222,903 | 08/03/2000 |
| SEQ ID NO:9247 | 60/222,903 | 08/03/2000 |
| SEQ ID NO:9248 | 60/222,903 | 08/03/2000 |
| SEQ ID NO:9249 | 60/222,903 | 08/03/2000 |
| SEQ ID NO:9250 | 60/222,903 | 08/03/2000 |
| SEQ ID NO:9251 | 60/222,903 | 08/03/2000 |
| SEQ ID NO:9252 | 60/222,903 | 08/03/2000 |
| SEQ ID NO:9253 | 60/222,903 | 08/03/2000 |
| SEQ ID NO:9254 | 60/222,903 | 08/03/2000 |
| SEQ ID NO:9255 | 60/222,903 | 08/03/2000 |
| SEQ ID NO:9256 | 60/222,903 | 08/03/2000 |
| SEQ ID NO:9257 | 60/222,903 | 08/03/2000 |
| SEQ ID NO:9258 | 60/222,903 | 08/03/2000 |
| SEQ ID NO:9259 | 60/222,903 | 08/03/2000 |
| SEQ ID NO:9260 | 60/222,903 | 08/03/2000 |
| SEQ ID NO:9261 | 60/222,903 | 08/03/2000 |
| SEQ ID NO:9262 | 60/222,903 | 08/03/2000 |
| SEQ ID NO:9263 | 60/222,903 | 08/03/2000 |
| SEQ ID NO:9264 | 60/222,903 | 08/03/2000 |
| SEQ ID NO:9265 | 60/222,903 | 08/03/2000 |
| SEQ ID NO:9266 | 60/222,903 | 08/03/2000 |
| SEQ ID NO:9267 | 60/222,903 | 08/03/2000 |
| SEQ ID NO:9268 | 60/222,903 | 08/03/2000 |
| SEQ ID NO:9269 | 60/222,903 | 08/03/2000 |
| SEQ ID NO:9270 | 60/222,903 | 08/03/2000 |
| SEQ ID NO:9271 | 60/222,903 | 08/03/2000 |
| SEQ ID NO:9272 | 60/222,903 | 08/03/2000 |
| SEQ ID NO:9273 | 60/222,903 | 08/03/2000 |
| SEQ ID NO:9274 | 60/222,903 | 08/03/2000 |
| SEQ ID NO:9275 | 60/222,903 | 08/03/2000 |
| SEQ ID NO:9276 | 60/222,903 | 08/03/2000 |
| SEQ ID NO:9277 | 60/222,903 | 08/03/2000 |
| SEQ ID NO:9278 | 60/222,903 | 08/03/2000 |
| SEQ ID NO:9279 | 60/222,903 | 08/03/2000 |
| SEQ ID NO:9280 | 60/222,903 | 08/03/2000 |
| SEQ ID NO:9281 | 60/222,903 | 08/03/2000 |
| SEQ ID NO:9282 | 60/222,903 | 08/03/2000 |
| SEQ ID NO:9283 | 60/222,903 | 08/03/2000 |
| SEQ ID NO:9284 | 60/222,903 | 08/03/2000 |
| SEQ ID NO:9285 | 60/222,903 | 08/03/2000 |
| SEQ ID NO:9286 | 60/222,903 | 08/03/2000 |
| SEQ ID NO:9287 | 60/222,903 | 08/03/2000 |
| SEQ ID NO:9288 | 60/222,903 | 08/03/2000 |
| SEQ ID NO:9289 | 60/222,903 | 08/03/2000 |
| SEQ ID NO:9290 | 60/222,903 | 08/03/2000 |
| SEQ ID NO:9291 | 60/222,903 | 08/03/2000 |
| SEQ ID NO:9292 | 60/222,903 | 08/03/2000 |
| SEQ ID NO:9293 | 60/222,903 | 08/03/2000 |
| SEQ ID NO:9294 | 60/222,903 | 08/03/2000 |
| SEQ ID NO:9295 | 60/222,903 | 08/03/2000 |
| SEQ ID NO:9296 | 60/222,903 | 08/03/2000 |
| SEQ ID NO:9297 | 60/222,903 | 08/03/2000 |
| SEQ ID NO:9298 | 60/222,903 | 08/03/2000 |
| SEQ ID NO:9299 | 60/222,903 | 08/03/2000 |
| SEQ ID NO:9300 | 60/222,903 | 08/03/2000 |
| SEQ ID NO:9301 | 60/222,903 | 08/03/2000 |
| SEQ ID NO:9302 | 60/222,903 | 08/03/2000 |
| SEQ ID NO:9303 | 60/222,903 | 08/03/2000 |
| SEQ ID NO:9304 | 60/222,903 | 08/03/2000 |
| SEQ ID NO:9305 | 60/222,903 | 08/03/2000 |
| SEQ ID NO:9306 | 60/222,903 | 08/03/2000 |
| SEQ ID NO:9307 | 60/222,903 | 08/03/2000 |
| SEQ ID NO:9308 | 60/222,903 | 08/03/2000 |
| SEQ ID NO:9309 | 60/222,903 | 08/03/2000 |
| SEQ ID NO:9310 | 60/222,903 | 08/03/2000 |
| SEQ ID NO:9311 | 60/222,903 | 08/03/2000 |
| SEQ ID NO:9312 | 60/222,903 | 08/03/2000 |
| SEQ ID NO:9313 | 60/222,903 | 08/03/2000 |
| SEQ ID NO:9314 | 60/222,903 | 08/03/2000 |
| SEQ ID NO:9315 | 60/222,903 | 08/03/2000 |
| SEQ ID NO:9316 | 60/222,903 | 08/03/2000 |
| SEQ ID NO:9317 | 60/222,903 | 08/03/2000 |
| SEQ ID NO:9318 | 60/222,903 | 08/03/2000 |
| SEQ ID NO:9319 | 60/222,903 | 08/03/2000 |
| SEQ ID NO:9320 | 60/222,903 | 08/03/2000 |
| SEQ ID NO:9321 | 60/222,903 | 08/03/2000 |
| SEQ ID NO:9322 | 60/222,903 | 08/03/2000 |
| SEQ ID NO:9323 | 60/222,903 | 08/03/2000 |
| SEQ ID NO:9324 | 60/222,903 | 08/03/2000 |
| SEQ ID NO:9325 | 60/222,903 | 08/03/2000 |
| SEQ ID NO:9326 | 60/222,903 | 08/03/2000 |
| SEQ ID NO:9327 | 60/222,903 | 08/03/2000 |
| SEQ ID NO:9328 | 60/222,903 | 08/03/2000 |
| SEQ ID NO:9329 | 60/222,903 | 08/03/2000 |
| SEQ ID NO:9330 | 60/222,903 | 08/03/2000 |
| SEQ ID NO:9331 | 60/222,903 | 08/03/2000 |
| SEQ ID NO:9332 | 60/222,903 | 08/03/2000 |
| SEQ ID NO:9333 | 60/222,903 | 08/03/2000 |
| SEQ ID NO:9334 | 60/222,903 | 08/03/2000 |
| SEQ ID NO:9335 | 60/222,903 | 08/03/2000 |
| SEQ ID NO:9336 | 60/222,903 | 08/03/2000 |
| SEQ ID NO:9337 | 60/222,903 | 08/03/2000 |
| SEQ ID NO:9338 | 60/222,903 | 08/03/2000 |
| SEQ ID NO:9339 | 60/222,903 | 08/03/2000 |
| SEQ ID NO:9340 | 60/222,903 | 08/03/2000 |
| SEQ ID NO:9341 | 60/222,903 | 08/03/2000 |
| SEQ ID NO:9342 | 60/222,903 | 08/03/2000 |
| SEQ ID NO:9343 | 60/222,903 | 08/03/2000 |
| SEQ ID NO:9344 | 60/222,903 | 08/03/2000 |
| SEQ ID NO:9345 | 60/222,903 | 08/03/2000 |
| SEQ ID NO:9346 | 60/222,903 | 08/03/2000 |
| SEQ ID NO:9347 | 60/222,903 | 08/03/2000 |
| SEQ ID NO:9348 | 60/222,903 | 08/03/2000 |
| SEQ ID NO:9349 | 60/222,903 | 08/03/2000 |
| SEQ ID NO:9350 | 60/222,903 | 08/03/2000 |
| SEQ ID NO:9351 | 60/222,903 | 08/03/2000 |
| SEQ ID NO:9352 | 60/222,903 | 08/03/2000 |
| SEQ ID NO:9353 | 60/222,903 | 08/03/2000 |
| SEQ ID NO:9354 | 60/222,903 | 08/03/2000 |
| SEQ ID NO:9355 | 60/222,903 | 08/03/2000 |
| SEQ ID NO:9356 | 60/222,903 | 08/03/2000 |
| SEQ ID NO:9357 | 60/222,903 | 08/03/2000 |
| SEQ ID NO:9358 | 60/222,903 | 08/03/2000 |
| SEQ ID NO:9359 | 60/222,903 | 08/03/2000 |
| SEQ ID NO:9360 | 60/222,903 | 08/03/2000 |
| SEQ ID NO:9361 | 60/222,903 | 08/03/2000 |
| SEQ ID NO:9362 | 60/222,903 | 08/03/2000 |
| SEQ ID NO:9363 | 60/222,903 | 08/03/2000 |
| SEQ ID NO:9364 | 60/222,903 | 08/03/2000 |
| SEQ ID NO:9365 | 60/222,903 | 08/03/2000 |
| SEQ ID NO:9366 | 60/222,903 | 08/03/2000 |
| SEQ ID NO:9367 | 60/222,903 | 08/03/2000 |
| SEQ ID NO:9368 | 60/222,903 | 08/03/2000 |
| SEQ ID NO:9369 | 60/222,903 | 08/03/2000 |
| SEQ ID NO:9370 | 60/222,903 | 08/03/2000 |
| SEQ ID NO:9371 | 60/222,903 | 08/03/2000 |
| SEQ ID NO:9372 | 60/222,903 | 08/03/2000 |
| SEQ ID NO:9373 | 60/222,903 | 08/03/2000 |
| SEQ ID NO:9374 | 60/222,903 | 08/03/2000 |
| SEQ ID NO:9375 | 60/222,903 | 08/03/2000 |
| SEQ ID NO:9376 | 60/222,903 | 08/03/2000 |
| SEQ ID NO:9377 | 60/222,903 | 08/03/2000 |
| SEQ ID NO:9378 | 60/222,903 | 08/03/2000 |
| SEQ ID NO:9379 | 60/222,903 | 08/03/2000 |
| SEQ ID NO:9380 | 60/222,903 | 08/03/2000 |
| SEQ ID NO:9381 | 60/222,903 | 08/03/2000 |
| SEQ ID NO:9382 | 60/222,903 | 08/03/2000 |
| SEQ ID NO:9383 | 60/222,903 | 08/03/2000 |
| SEQ ID NO:9384 | 60/222,903 | 08/03/2000 |
| SEQ ID NO:9385 | 60/222,903 | 08/03/2000 |
| SEQ ID NO:9386 | 60/222,903 | 08/03/2000 |
| SEQ ID NO:9387 | 60/222,903 | 08/03/2000 |
| SEQ ID NO:9388 | 60/222,903 | 08/03/2000 |
| SEQ ID NO:9389 | 60/222,903 | 08/03/2000 |
| SEQ ID NO:9390 | 60/222,903 | 08/03/2000 |
| SEQ ID NO:9391 | 60/222,903 | 08/03/2000 |
| SEQ ID NO:9392 | 60/222,903 | 08/03/2000 |
| SEQ ID NO:9393 | 60/222,903 | 08/03/2000 |
| SEQ ID NO:9394 | 60/222,903 | 08/03/2000 |
| SEQ ID NO:9395 | 60/222,903 | 08/03/2000 |
| SEQ ID NO:9396 | 60/222,903 | 08/03/2000 |
| SEQ ID NO:9397 | 60/222,903 | 08/03/2000 |
| SEQ ID NO:9398 | 60/222,903 | 08/03/2000 |
| SEQ ID NO:9399 | 60/222,903 | 08/03/2000 |
| SEQ ID NO:9400 | 60/222,903 | 08/03/2000 |
| SEQ ID NO:9401 | 60/222,903 | 08/03/2000 |
| SEQ ID NO:9402 | 60/222,903 | 08/03/2000 |
| SEQ ID NO:9403 | 60/222,903 | 08/03/2000 |
| SEQ ID NO:9404 | 60/222,903 | 08/03/2000 |
| SEQ ID NO:9405 | 60/222,903 | 08/03/2000 |
| SEQ ID NO:9406 | 60/222,903 | 08/03/2000 |
| SEQ ID NO:9407 | 60/222,903 | 08/03/2000 |
| SEQ ID NO:9408 | 60/222,903 | 08/03/2000 |
| SEQ ID NO:9409 | 60/222,903 | 08/03/2000 |
| SEQ ID NO:9410 | 60/222,903 | 08/03/2000 |
| SEQ ID NO:9411 | 60/222,903 | 08/03/2000 |
| SEQ ID NO:9412 | 60/222,903 | 08/03/2000 |
| SEQ ID NO:9413 | 60/222,903 | 08/03/2000 |
| SEQ ID NO:9414 | 60/222,903 | 08/03/2000 |
| SEQ ID NO:9415 | 60/222,903 | 08/03/2000 |
| SEQ ID NO:9416 | 60/222,903 | 08/03/2000 |
| SEQ ID NO:9417 | 60/222,903 | 08/03/2000 |
| SEQ ID NO:9418 | 60/222,903 | 08/03/2000 |
| SEQ ID NO:9419 | 60/222,903 | 08/03/2000 |
| SEQ ID NO:9420 | 60/222,903 | 08/03/2000 |
| SEQ ID NO:9421 | 60/222,903 | 08/03/2000 |
| SEQ ID NO:9422 | 60/222,903 | 08/03/2000 |
| SEQ ID NO:9423 | 60/222,903 | 08/03/2000 |
| SEQ ID NO:9424 | 60/222,903 | 08/03/2000 |
| SEQ ID NO:9425 | 60/222,903 | 08/03/2000 |
| SEQ ID NO:9426 | 60/222,903 | 08/03/2000 |
| SEQ ID NO:9427 | 60/222,903 | 08/03/2000 |
| SEQ ID NO:9428 | 60/222,903 | 08/03/2000 |
| SEQ ID NO:9429 | 60/222,903 | 08/03/2000 |
| SEQ ID NO:9430 | 60/222,903 | 08/03/2000 |
| SEQ ID NO:9431 | 60/222,903 | 08/03/2000 |
| SEQ ID NO:9432 | 60/222,903 | 08/03/2000 |
| SEQ ID NO:9433 | 60/222,903 | 08/03/2000 |
| SEQ ID NO:9434 | 60/222,903 | 08/03/2000 |
| SEQ ID NO:9435 | 60/222,903 | 08/03/2000 |
| SEQ ID NO:9436 | 60/222,903 | 08/03/2000 |
| SEQ ID NO:9437 | 60/222,903 | 08/03/2000 |
| SEQ ID NO:9438 | 60/222,903 | 08/03/2000 |
| SEQ ID NO:9439 | 60/222,903 | 08/03/2000 |
| SEQ ID NO:9440 | 60/222,903 | 08/03/2000 |
| SEQ ID NO:9441 | 60/222,903 | 08/03/2000 |
| SEQ ID NO:9442 | 60/222,903 | 08/03/2000 |
| SEQ ID NO:9443 | 60/222,903 | 08/03/2000 |
| SEQ ID NO:9444 | 60/222,903 | 08/03/2000 |
| SEQ ID NO:9445 | 60/222,903 | 08/03/2000 |
| SEQ ID NO:9446 | 60/222,903 | 08/03/2000 |
| SEQ ID NO:9447 | 60/222,903 | 08/03/2000 |
| SEQ ID NO:9448 | 60/222,903 | 08/03/2000 |
| SEQ ID NO:9449 | 60/222,903 | 08/03/2000 |
| SEQ ID NO:9450 | 60/222,903 | 08/03/2000 |
| SEQ ID NO:9451 | 60/222,903 | 08/03/2000 |
| SEQ ID NO:9452 | 60/222,903 | 08/03/2000 |
| SEQ ID NO:9453 | 60/222,903 | 08/03/2000 |
| SEQ ID NO:9454 | 60/222,903 | 08/03/2000 |
| SEQ ID NO:9455 | 60/222,903 | 08/03/2000 |
| SEQ ID NO:9456 | 60/222,903 | 08/03/2000 |
| SEQ ID NO:9457 | 60/222,903 | 08/03/2000 |
| SEQ ID NO:9458 | 60/222,903 | 08/03/2000 |
| SEQ ID NO:9459 | 60/222,903 | 08/03/2000 |
| SEQ ID NO:9460 | 60/222,903 | 08/03/2000 |
| SEQ ID NO:9461 | 60/222,903 | 08/03/2000 |
| SEQ ID NO:9462 | 60/222,903 | 08/03/2000 |
| SEQ ID NO:9463 | 60/222,903 | 08/03/2000 |
| SEQ ID NO:9464 | 60/222,903 | 08/03/2000 |
| SEQ ID NO:9465 | 60/222,903 | 08/03/2000 |
| SEQ ID NO:9466 | 60/222,903 | 08/03/2000 |
| SEQ ID NO:9467 | 60/222,903 | 08/03/2000 |
| SEQ ID NO:9468 | 60/222,903 | 08/03/2000 |
| SEQ ID NO:9469 | 60/222,903 | 08/03/2000 |
| SEQ ID NO:9470 | 60/222,903 | 08/03/2000 |
| SEQ ID NO:9471 | 60/222,903 | 08/03/2000 |
| SEQ ID NO:9472 | 60/222,903 | 08/03/2000 |
| SEQ ID NO:9473 | 60/222,903 | 08/03/2000 |
| SEQ ID NO:9474 | 60/222,903 | 08/03/2000 |
| SEQ ID NO:9475 | 60/222,903 | 08/03/2000 |
| SEQ ID NO:9476 | 60/222,903 | 08/03/2000 |
| SEQ ID NO:9477 | 60/222,903 | 08/03/2000 |
| SEQ ID NO:9478 | 60/222,903 | 08/03/2000 |
| SEQ ID NO:9479 | 60/222,903 | 08/03/2000 |
| SEQ ID NO:9480 | 60/222,903 | 08/03/2000 |
| SEQ ID NO:9481 | 60/222,903 | 08/03/2000 |
| SEQ ID NO:9482 | 60/222,903 | 08/03/2000 |
| SEQ ID NO:9483 | 60/222,903 | 08/03/2000 |
| SEQ ID NO:9484 | 60/222,903 | 08/03/2000 |
| SEQ ID NO:9485 | 60/222,903 | 08/03/2000 |
| SEQ ID NO:9486 | 60/222,903 | 08/03/2000 |
| SEQ ID NO:9487 | 60/222,903 | 08/03/2000 |
| SEQ ID NO:9488 | 60/222,903 | 08/03/2000 |
| SEQ ID NO:9489 | 60/222,903 | 08/03/2000 |
| SEQ ID NO:9490 | 60/222,903 | 08/03/2000 |
| SEQ ID NO:9491 | 60/222,903 | 08/03/2000 |
| SEQ ID NO:9492 | 60/222,903 | 08/03/2000 |
| SEQ ID NO:9493 | 60/222,903 | 08/03/2000 |
| SEQ ID NO:9494 | 60/222,903 | 08/03/2000 |
| SEQ ID NO:9495 | 60/222,903 | 08/03/2000 |
| SEQ ID NO:9496 | 60/222,903 | 08/03/2000 |
| SEQ ID NO:9497 | 60/222,903 | 08/03/2000 |
| SEQ ID NO:9498 | 60/222,903 | 08/03/2000 |
| SEQ ID NO:9499 | 60/222,903 | 08/03/2000 |
| SEQ ID NO:9500 | 60/222,903 | 08/03/2000 |
| SEQ ID NO:9501 | 60/222,903 | 08/03/2000 |
| SEQ ID NO:9502 | 60/222,903 | 08/03/2000 |
| SEQ ID NO:9503 | 60/222,903 | 08/03/2000 |
| SEQ ID NO:9504 | 60/222,903 | 08/03/2000 |
| SEQ ID NO:9505 | 60/222,903 | 08/03/2000 |
| SEQ ID NO:9506 | 60/222,903 | 08/03/2000 |
| SEQ ID NO:9507 | 60/222,903 | 08/03/2000 |
| SEQ ID NO:9508 | 60/222,903 | 08/03/2000 |
| SEQ ID NO:9509 | 60/222,903 | 08/03/2000 |
| SEQ ID NO:9510 | 60/222,903 | 08/03/2000 |
| SEQ ID NO:9511 | 60/222,903 | 08/03/2000 |
| SEQ ID NO:9512 | 60/222,903 | 08/03/2000 |
| SEQ ID NO:9513 | 60/222,903 | 08/03/2000 |
| SEQ ID NO:9514 | 60/222,903 | 08/03/2000 |
| SEQ ID NO:9515 | 60/222,903 | 08/03/2000 |
| SEQ ID NO:9516 | 60/222,903 | 08/03/2000 |
| SEQ ID NO:9517 | 60/222,903 | 08/03/2000 |
| SEQ ID NO:9518 | 60/222,903 | 08/03/2000 |
| SEQ ID NO:9519 | 60/222,903 | 08/03/2000 |
| SEQ ID NO:9520 | 60/222,903 | 08/03/2000 |
| SEQ ID NO:9521 | 60/222,903 | 08/03/2000 |
| SEQ ID NO:9522 | 60/222,903 | 08/03/2000 |
| SEQ ID NO:9523 | 60/222,903 | 08/03/2000 |
| SEQ ID NO:9524 | 60/222,903 | 08/03/2000 |
| SEQ ID NO:9525 | 60/222,903 | 08/03/2000 |
| SEQ ID NO:9526 | 60/222,903 | 08/03/2000 |
| SEQ ID NO:9527 | 60/222,903 | 08/03/2000 |
| SEQ ID NO:9528 | 60/222,903 | 08/03/2000 |
| SEQ ID NO:9529 | 60/222,903 | 08/03/2000 |
| SEQ ID NO:9530 | 60/222,903 | 08/03/2000 |
| SEQ ID NO:9531 | 60/222,903 | 08/03/2000 |
| SEQ ID NO:9532 | 60/222,903 | 08/03/2000 |
| SEQ ID NO:9533 | 60/222,903 | 08/03/2000 |
| SEQ ID NO:9534 | 60/222,903 | 08/03/2000 |
| SEQ ID NO:9535 | 60/222,903 | 08/03/2000 |
| SEQ ID NO:9536 | 60/222,903 | 08/03/2000 |
| SEQ ID NO:9537 | 60/222,903 | 08/03/2000 |
| SEQ ID NO:9538 | 60/222,903 | 08/03/2000 |
| SEQ ID NO:9539 | 60/222,903 | 08/03/2000 |
| SEQ ID NO:9540 | 60/222,903 | 08/03/2000 |
| SEQ ID NO:9541 | 60/222,903 | 08/03/2000 |
| SEQ ID NO:9542 | 60/222,903 | 08/03/2000 |
| SEQ ID NO:9543 | 60/222,903 | 08/03/2000 |
| SEQ ID NO:9544 | 60/222,903 | 08/03/2000 |
| SEQ ID NO:9545 | 60/222,903 | 08/03/2000 |
| SEQ ID NO:9546 | 60/222,903 | 08/03/2000 |
| SEQ ID NO:9547 | 60/222,903 | 08/03/2000 |
| SEQ ID NO:9548 | 60/222,903 | 08/03/2000 |
| SEQ ID NO:9549 | 60/222,903 | 08/03/2000 |
| SEQ ID NO:9550 | 60/222,903 | 08/03/2000 |
| SEQ ID NO:9551 | 60/222,903 | 08/03/2000 |
| SEQ ID NO:9552 | 60/222,903 | 08/03/2000 |
| SEQ ID NO:9553 | 60/222,903 | 08/03/2000 |
| SEQ ID NO:9554 | 60/222,903 | 08/03/2000 |
| SEQ ID NO:9555 | 60/222,903 | 08/03/2000 |
| SEQ ID NO:9556 | 60/222,903 | 08/03/2000 |
| SEQ ID NO:9557 | 60/222,903 | 08/03/2000 |
| SEQ ID NO:9558 | 60/222,903 | 08/03/2000 |
| SEQ ID NO:9559 | 60/222,903 | 08/03/2000 |
| SEQ ID NO:9560 | 60/222,903 | 08/03/2000 |
| SEQ ID NO:9561 | 60/222,903 | 08/03/2000 |
| SEQ ID NO:9562 | 60/222,903 | 08/03/2000 |
| SEQ ID NO:9563 | 60/222,903 | 08/03/2000 |
| SEQ ID NO:9564 | 60/222,903 | 08/03/2000 |
| SEQ ID NO:9565 | 60/222,903 | 08/03/2000 |
| SEQ ID NO:9566 | 60/222,903 | 08/03/2000 |
| SEQ ID NO:9567 | 60/222,903 | 08/03/2000 |
| SEQ ID NO:9568 | 60/222,903 | 08/03/2000 |
| SEQ ID NO:9569 | 60/222,903 | 08/03/2000 |
| SEQ ID NO:9570 | 60/222,903 | 08/03/2000 |
| SEQ ID NO:9571 | 60/222,903 | 08/03/2000 |
| SEQ ID NO:9572 | 60/222,903 | 08/03/2000 |
| SEQ ID NO:9573 | 60/222,903 | 08/03/2000 |
| SEQ ID NO:9574 | 60/222,903 | 08/03/2000 |
| SEQ ID NO:9575 | 60/222,903 | 08/03/2000 |
| SEQ ID NO:9576 | 60/222,903 | 08/03/2000 |
| SEQ ID NO:9577 | 60/222,903 | 08/03/2000 |
| SEQ ID NO:9578 | 60/222,903 | 08/03/2000 |
| SEQ ID NO:9579 | 60/222,903 | 08/03/2000 |
| SEQ ID NO:9580 | 60/222,903 | 08/03/2000 |
| SEQ ID NO:9581 | 60/222,903 | 08/03/2000 |
| SEQ ID NO:9582 | 60/222,903 | 08/03/2000 |
| SEQ ID NO:9583 | 60/222,903 | 08/03/2000 |
| SEQ ID NO:9584 | 60/222,903 | 08/03/2000 |
| SEQ ID NO:9585 | 60/222,903 | 08/03/2000 |
| SEQ ID NO:9586 | 60/222,903 | 08/03/2000 |
| SEQ ID NO:9587 | 60/222,903 | 08/03/2000 |
| SEQ ID NO:9588 | 60/222,903 | 08/03/2000 |
| SEQ ID NO:9589 | 60/222,903 | 08/03/2000 |
| SEQ ID NO:9590 | 60/222,903 | 08/03/2000 |
| SEQ ID NO:9591 | 60/222,903 | 08/03/2000 |
| SEQ ID NO:9592 | 60/222,903 | 08/03/2000 |
| SEQ ID NO:9593 | 60/222,903 | 08/03/2000 |
| SEQ ID NO:9594 | 60/222,903 | 08/03/2000 |
| SEQ ID NO:9595 | 60/222,903 | 08/03/2000 |
| SEQ ID NO:9596 | 60/222,903 | 08/03/2000 |
| SEQ ID NO:9597 | 60/222,903 | 08/03/2000 |

### References

[0538] The following references, to the extent that they provide exemplary procedural or other details supplementary to those set forth herein, are specifically incorporated herein by reference.

[0539] U.S. Pat. No. 3,817,827.

[0540] U.S. Pat. No. 3,850,752.

[0541] U.S. Pat. No. 3,901,654.

[0542] U.S. Pat. No. 3,935,074.

[0543] U.S. Pat. No. 3,984,533.

[0544] U.S. Pat. No. 3,996,345.

[0545] U.S. Pat. No. 4,034,074.

[0546] U.S. Pat. No. 4,098,876.

[0547] U.S. Pat. No. 4,235,877.

[0548] U.S. Pat. No. 4,376,110.

[0549] U.S. Pat. No. 4,429,008.

[0550] U.S. Pat. No. 4,436,727.

[0551] U.S. Pat. No. 4,452,901.

[0552] U.S. Pat. No. 4,489,710.

[0553] U.S. Pat. No. 4,507,234.

[0554] U.S. Pat. No. 4,554,101.

[0555] U.S. Pat. No. 4,569,789.

[0556] U.S. Pat. No. 4,603,112.

[0557] U.S. Pat. No. 4,625,014.

[0558] U.S. Pat. No. 4,638,045.

[0559] U.S. Pat. No. 4,671,958.

[0560] U.S. Pat. No. 4,673,562.

[0561] U.S. Pat. No. 4,683,195.

[0562] U.S. Pat. No. 4,699,784.

[0563] U.S. Pat. No. 4,735,792.

[0564] U.S. Pat. No. 4,751,180.

[0565] U.S. Pat. No. 4,769,330.

[0566] U.S. Pat. No. 4,777,127.

[0567] U.S. Pat. No. 4,866,034.

[0568] U.S. Pat. No. 4,873,088.

[0569] U.S. Pat. No. 4,877,611.

[0570] U.S. Pat. No. 4,897,268.

[0571] U.S. Pat. No. 4,912,094.

[0572] U.S. Pat. No. 4,935,233.

[0573] U.S. Pat. No. 5,017,487.

[0574] U.S. Pat. No. 5,075,109.

[0575] U.S. Pat. No. 5,145,684.

[0576] U.S. Pat. No. 5,151,254.

[0577] U.S. Pat. No. 5,215,926.

[0578] U.S. Pat. No. 5,240,856.

[0579] U.S. Pat. No. 5,350,840.

[0580] U.S. Pat. No. 5,359,681.

[0581] U.S. Pat. No. 5,399,346.

[0582] U.S. Pat. No. 5,399,363.

[0583] U.S. Pat. No. 5,466,468.

[0584] U.S. Pat. No. 5,472,869.

[0585] U.S. Pat. No. 5,543,158.

[0586] U.S. Pat. No. 5,552,157.

[0587] U.S. Pat. No. 5,565,213.

[0588] U.S. Pat. No. 5,567,434.

[0589] U.S. Pat. No. 5,633,234.

[0590] U.S. Pat. No. 5,641,515.

[0591] U.S. Pat. No. 5,738,868.

[0592] U.S. Pat. No. 5,741,516.

[0593] U.S. Pat. No. 5,795,587.

[0594] U.S. Pat. No. 5,811,128.

[0595] U.S. Pat. No. 5,814,344.

[0596] U.S. Pat. No. 5,820,883.

[0597] U.S. Pat. No. 5,853,763.

[0598] U.S. Pat. No. 5,874,265.

[0599] U.S. Pat. No. 5,928,647.

[0600] U.S. Pat. No. 5,942,252.

[0601] U.S. Pat. No. 6,110,702.

[0602] European Patent No. EP 0,345,242.

[0603] Great Britain Patent No. GB 2,200,651.

[0604] Intl. Pat. Appl. Publ. No. WO 89/01973.

[0605] Intl. Pat. Appl. Publ. No. WO 89/06280.

[0606] Intl. Pat. Appl. Publ. No. WO 91/02805.

[0607] Intl. Pat. Appl. Publ. No. WO 91/16116.

[0608] Intl. Pat. Appl. Publ. No. WO 92/07243.

[0609] Intl. Pat. Appl. Publ. No. WO 94/00153.

[0610] Intl. Pat. Appl. Publ. No. WO 94/20078.

[0611] Intl. Pat. Appl. Publ. No. WO/94/23701.

[0612] Intl. Pat. Appl. Publ. No. WO 95/17210.

[0613] Intl. Pat. Appl. Publ. No. WO 96/02555.

[0614] Intl. Pat. Appl. Publ. No. WO 96/06638.

[0615] Intl. Pat. Appl. Publ. No. WO 96/30516.

[0616] Intl. Pat. Appl. Publ. No. WO 96/33739.

[0617] Intl. Pat. Appl. Publ. No. WO 97/24447.

[0618] Intl. Pat. Appl. Publ. No. WO 99/33488.

[0619] Aaroston and Todaro, J. Cell. Physiol., 72:141-48, 1968.

[0620] Adelman et al., DNA, 2:183, 1983.

[0621] Amin et al., Am. J. Pathol., 146:344-56, 1995.

[0622] Akaza et al., “Expression of antitumor response. Role of attachment and viability of bacillus Calmette-Guerin to bladder cancer cells,” Cancer, 72:558-63, 1993.

[0623] American Type Culture Collection, Catalogue of Cell Lines and Hybridomas, 7th ed., 1992.

[0624] Avrameas, “Natural autoantibodies: Self-recognition and physiological autoimmunity,” In: Natural autoantibodies: Their Physiological Role and Regulatory Significance, Shoenfeld and Isenberg (eds.), CRC Press, Boca Raton, Fla., pp. 1-14, 1993.

[0625] Azuma et al., “Correlation Between Augmented Resistance to Influenza Virus Infection and Histological Changes in Lung of Mice Treated with Trehalose-6,6′-dimycolate,” Journal of Biological Response Modifiers, 7:473-82, 1988.

[0626] Bajorin et al., Proc. Annu. Meet. Am. Soc. Clin. Oncol., 7:A967, 1988.

[0627] Baker et al., “Ability of Monophosphoryl Lipid A To Augment the Antibody Response of Young Mice,” Infection and Immunity, 56:3064-66, 1988a.

[0628] Baker et al., “Enrichment of Suppressor T Cells by Means of Binding to Monophosphoryl Lipid A,” Infection and Immunity, 58:726-31, 1990.

[0629] Baker et al., “Inactivation of Suppressor T-Cell Activity by Nontoxic Monophosphoryl Lipid A,” Infection and Immunity, 56:1076-83, 1988b.

[0630] Baker et al., “Molecular structures that influence the immunomodulatory properties of the lipid A and inner core region oligosaccharides of bacterial lipopolysaccharides,” Infection Immunity, 62:2257-69, 1994.

[0631] Baker et al., “Structural Features That Influence the Ability of Lipid A and Its Analogs To Abolish Expression of Suppressor T Cell Activity,” Infection and Immunity, 60:2694-701, 1992.

[0632] Bakker et al., “Melanocyte lineage-specific antigen gp100 is recognized by melanoma-derived tumor-infiltrating lymphocytes,” J. Exp. Med., 179:1005, 1994.

[0633] Banchereau and Steinman, Nature, 392:245-51, 1998.

[0634] Banerji et al., “Membrane lipid composition modulates the binding specificity of a monoclonal antibody against liposomes,” Biochim. Biophys. Acta., 689:319-26, 1982.

[0635] Barnd et al., “Specific tumor histocompatibility complex-unrestricted recognition of tumor-associated mucins by human cytotoxic T cells,” Proc. Natl. Acad. Sci. USA, 86:7159, 1989.

[0636] Barnoud et al., Am. J. Surg. Pathol., 24:830-36, 2000).

[0637] Bartlett and Zbar, J. Natl. Cancer Inst., 48:1709, 1972.

[0638] Bast et al., “BCG and Cancer,” N. Engl. J. Med., 290:1413-20, 1974.

[0639] Bennett et al., “Endogenous Production of Cytotoxic Factors in Serum of BCG-Primed Mice by Monophosphoryl Lipid A, a Detoxified Form of Endotoxin,” Journal of Biological Response Modifiers, 7:65-76, 1988.

[0640] Berkner, Biotechniques, 6:616-27, 1988.

[0641] Berra et al., Int. J. Cancer, 36:363-66, 1985.

[0642] Berra et al., J. Neurochem., 40:777-82, 1983.

[0643] Bogoch, “Demonstration of serum precipitin to brain gangliosides,” Nature, 183:392-93, 1960.

[0644] Bouchon et al., Biochem. Internatl., 10:531-38, 1985.

[0645] Bowen-Pope et al., Proc. Nat'l Acad. Sci. USA, 81:2396-400, 1984.

[0646] Bowness et al., “Clostridium perfringens enterotoxin is a superantigen reactive with human T cell receptors V beta 6.9 and V beta 22,” J. Exp. Med., 176:893-96, 1992.

[0647] Brade et al., “An Artificial Glycoconjugate Containing the Bisphosphorylated Glucosamine Disaccharide Backbone of Lipid A Binds Lipid A Monoclonal Antibodies,” Infection and Immunity, 61:4514-17, 1993.

[0648] Brichard et al., “The tyrosinase gene codes for an antigen recognized by autologous cytolytic T lymphocytes on HLA-A2 melanomas,” J. Exp. Med., 178:489, 1993.

[0649] Brodin et al., “Mouse monoclonal antibodies with specificity for the melanoma-associated ganglioside disialyllactosyl ceramide (GD3) also react with the structural analogue disialylparagloboside,” Biochim. Biophys. Acta., 837:349-53, 1985.

[0650] Brooks et al., Clin. Exp. Immunol., 39: 477, 1980.

[0651] Brown et al., J. Biol. Chem., 255:4980-83, 1980.

[0652] Burchell et al., J. Immunol., 131:508-13, 1983.

[0653] Bystryn et al., Cancer, 61:1065, 1988.

[0654] Cahan et al., “Identification of a human neuroectodermal tumor antigen (OFA-I-2) as ganglioside GD2,” Proc. Natl. Acad. Sci. USA, 79:7629-33, 1982.

[0655] Campbell et al., “Intercellular adhesion molecule-1 expression by bladder cancer cells: functional effects,” J. Urol., 151:1385-90, 1994.

[0656] Campbell, in Monoclonal Antibody Technology, Laboratory Techniques in Biochemistry and Molecular Biology, Vol. 13, Burden and Von Knippenberg (eds.), Amsterdam, Elseview, pp. 75-83, 1984.

[0657] Campbell et al., Int. J. Cancer, 78:182-88, 1998.

[0658] Carr and Morrison, “A two-step mechanism for the interaction of Re lipopolysaccharide with erythrocyte membranes,” Rev. Infect. Dis. 6:497-508, 1984.

[0659] Carubia et al., Biochem. Biophys. Res. Commun., 120:500-04, 1984.

[0660] Chang et al., Crit. Rev. Oncol. Hematol., 22:213, 1996.

[0661] Chase et al., “Effect of Monophosphoryl Lipid A on Host Resistance to Bacterial Infection,” Infection and Immunity, 53(3):711-12, 1986.

[0662] Chen et al., “Activation of Macrophages From Aging Mice by Detoxified Lipid A,” Journal of Leukocyte Biology, 49:416-22, 1991.

[0663] Chen et al., Cancer Res., 54:1065-70, 1994.

[0664] Cheng et al., “Bacillus Calmette-Gerin interacts with the carboxyl-terminal heparin bindings domain of fibronectin: implications for BCG-mediated antitumor activity,” J. Urol., 152:1275-80, 1994.

[0665] Cheresh and Klier, “Disialoganglioside GD3 distributes preferentially into substrate associated microprocesses on human melanoma cells during their attachment to fibronectin,” J. Cell. Biol., 102:1887-97, 1986.

[0666] Cheresh et al., “A monoclonal antibody recognizes an O-acetyl sialic acid in a human melanoma-associated ganglioside,” J. Biol. Chem., 259:7453-59, 1984.

[0667] Cheresh et al., “Disialoganglioside GD3 on human melanoma serves as a relevant target antigen for monoclonal antibody-mediated tumor cytolysis,” Proc. Natl. Acad. Sci. USA, 82:5155-59, 1985.

[0668] Cheresh et al., “Disialogangliosides GD2 and GD3 are involved in the attachment of human melanoma and neuroblastoma cells to extracellular matrix proteins,” J. Cell. Biol., 102:688-96,1986.

[0669] Cheresh et al., “Localization of gangliosides GD2 and GD3 in adhesion plaques and on the surface of human melanoma cells,” Proc. Natl. Acad. Sci. USA, 81:5767-71, 1984.

[0670] Cheung et al., “Detection of neuroblastoma cells in bone marrow using GD2 specific monoclonal antibodies,” J. Clin. Oncol., 4:363-69, 1986.

[0671] Chu and Sharom, “Gangliosides inhibit T-lymphocyte proliferation by preventing the interaction of interleukin-2 with its cell surface receptors,” Immunology, 79:10-16, 1993.

[0672] Cohen, Science, 259:1691-92, 1993.

[0673] Colcher et al., Proc. Natl. Acad. Sci. USA, 78:3199, 1987.

[0674] Coligan et al., in Current Protocols in Immunology, Vol. 1, Wiley Interscience. Greene (ed.), 1998.

[0675] Coombes et al., Vaccine, 14:1429-38, 1996.

[0676] Coulie et al., “A new gene coding for a differentiation antigen recognized by autologous cytologic T lymphocytes on HLA-A2 melanomas,” J. Exp. Med., 180:35, 1994.

[0677] Deavin et al., Mol. Immunol., 33:145-55, 1996.

[0678] DeBruijn et al., Eur. J. Immunol., 21:2963-70, 1991.

[0679] Dippold et al., “Immunohistochemical localization of ganglioside GD3 in human malignant melanoma, epithelial tumors and normal tissues,” Cancer Res., 45:3699-705, 1985.

[0680] Dippold et al., “Inflammatory response at the tumor site after systemic application of monoclonal anti-GD3-ganglioside antibody to patients with malignant melanoma,” Am. Assoc. Cancer Res., 978:247, 1984.

[0681] Dippold et al., Proc. Natl. Acad. Sci. USA, 77:6115, 1980.

[0682] Dresser and Phillips, in Immunopotentiation, CIBA Foundation Symposium 18, Elsevier, Amsterdam, p.3, 1973.

[0683] Dwivedi et al., “Plasma lipid-bound sialic acid alterations in neoplastic diseases,” Experientia, 46:91-94, 1990.

[0684] Elder, “Skin Cancer,” Cancer, 75:245-56, 1995.

[0685] Elliott et al., “The D-Galactosamine Loaded Mouse and Its Enhanced Sensitivity to Lipopolysaccharide and Monophosphoryl Lipid A: A Role for Superoxide,” J. Immunol., 10:69-74, 1991.

[0686] Euhus et al., Cancer Immunol Immunother., 29:247-54, 1989.

[0687] Fawwaz et al., Statutory Invention Registration Patent No. H819, application no. 6-6-5,439, 1990.

[0688] Fischer, Handb. Lipid Res., 6:123-234, 1990.

[0689] Fisher-Hoch et al., Proc. Nat'l Acad. Sci. USA, 86:317-21, 1989.

[0690] Fitzgerald, “Syphilis vaccine: up-regulation of immunogenicity by cyclophosphamide, Ribi adjuvant, and indomethacin confers significant protection against challenge infection in rabbits,” Vaccine, 9:265-72, 1991.

[0691] Fleischmann, Park and Hassan, “Fibronectin expression on surgical specimens correlated with the response to intravesical bacillus Calmette-Guerin therapy,” J. Urol., 149:268-71, 1993.

[0692] Flexner et al., Ann. N.Y. Acad. Sci., 569:86-103, 1989.

[0693] Flexner et al., Vaccine, 8:17-21, 1990.

[0694] Foster et al., Cancer Res., 57:3325-30, 1997.

[0695] Fraizer et al., Blood, 86:4704-06, 1995.

[0696] Fredman et al., Neurol. Res., 8:123-26, 1986.

[0697] Freimer et al., “Gangliosides elicit a T-cell independent antibody response,” J. Autoimmun., 6:281-89, 1993.

[0698] Freudenberg et al., “ELISA for antibodies to Lipid A, Lipopolyasscharides and other hydrophobic antigens,” Infection, 17:322-24, 1989.

[0699] Gaiger et al., Blood, 96:1334, 2000

[0700] Garg and Subbarao, “Immune Responses of Systemic and Mucosal Lymphoid Organs to Pnu-Immune Vaccine as a Function of Age and the Efficacy of Monophosphoryl Lipid A as an Adjuvant,” Infection and Immunity, 60:2329-36, 1992.

[0701] Gaugler et al., “Human gene MAGE-3 codes for an antigen recognized on a human melanoma by autologous cytolytic T lymphocytes,” J. Exp. Med., 179:921, 1994.

[0702] Gefter et al., Somatic Cell Genet., 3:231-36, 1977.

[0703] Gennaro et al., Am. J. Ind. Med., 37:275-82, 2000.

[0704] Gillard et al., “Antibodies against ganglioside GT₃ in the sera of patients with type I Diabetes mellitus,” J. Immunol., 142:3826-32, 1989.

[0705] Gillis, Nature, 268:154-56, 1977.

[0706] Glynn, McCoy and Fefer, Cancer Res., 28:434-39, 1968.

[0707] Goding, in Monoclonal Antibodies: Principles and Practice, 2d ed., Orlando, Fla., Academic Press, pp. 60-61, 65-66, 71-74, 1986.

[0708] Goff et al., Eur. J. Biochem., 130:553-57, 1983.

[0709] Grabarek et al., “Endotoxic Lipid A Interaction with Human Platelets,” The Journal of Biological Chemistry, 265:8117-21, 1990.

[0710] Graus et al., “Distribution of the ganglioside GD3 in the human nervous system detected by R24 mouse monoclonal antibody,” Brain Res., 324:190-94, 1984.

[0711] Guzman et al., Circulation, 88:2838-48, 1993a.

[0712] Guzman et al., Cir. Res., 73:1202-07, 1993b.

[0713] Hachida et al., Transplant Proc., 22:1663-70, 1990.

[0714] Hachida et al., Transplantation, 56:479-82, 1993.

[0715] Harada et al., Mol. Urol., 3:357-364, 1999.

[0716] Hardings et al., “Effects of pH and polysaccharides on peptide binding to class II major histocompatibility complex molecules,” Proc. Natl. Acad. Sci. USA, 88:2740-44, 1991.

[0717] Harel et al., Cancer Res., 50:6311, 1990.

[0718] Harlow and Lane, Antibodies: A Laboratory Manual, Cold Spring Harbor Laboratory, 1988.

[0719] Helling et al., “Construction of Immunogenic GD₃-conjugate vaccines,” Ann. N. Y. Acad. Sci., 690:396-97, 1993.

[0720] Hellstrom et al., “Strong anti-tumor activities of IgG 3 antibodies to a human melanoma-associated ganglioside,” Proc. Natl. Acad. Sci. USA, 82:1499-1502, 1985.

[0721] Hirabayashi et al., “Syngeneic monoclonal antibody against melanoma antigen with interspecies cross-reactivity recognize GM₃, a prominent ganglioside of B16 melanoma,” Biol. Chem., 260:13328-33, 1985.

[0722] Hirabayashi et al., “Reactivity of mouse monoclonal antibody M2590 against B16 melanoma cells with chemically synthesized GM3 ganglioside,” Biochim. Biophys. Acta, 875:126-28, 1986.

[0723] Hirabayashi et al., Jpn. J. Cancer Res., 78:614-20, 1987.

[0724] Hoon et al., “Gangliosides from melanoma immunomodulate response of T-cells to interleukin-2,” Cell Immunol., 4:1111-19, 1988.

[0725] Horibata and Harris, Exp. Cell. Res., 60:61, 1970.

[0726] Horgan, “Total and lipid-bound sialic acid levels in sera from patients with Cancer,” Clin. Chim. Acta., 118:327-31, 1982.

[0727] Houghten et al., “Mouse monoclonal IgG3 antibody detecting GD3 ganglioside: A phase I trial in patients with malignant melanoma,” Proc. Natl. Acad. Sci. USA, 82:1242-46, 1985.

[0728] Houghton, “Cancer Antigens: Immune Recognition of Self and Altered Self,” J. Exp. Med., 180:1-4, 1994.

[0729] Hraba et al., “The Influence of Monophosphoryl Lipid A (MPL™) on Erythrocyte Autoantibody Formation,” Immunobiol., 189:448-56, 1993.

[0730] Hunter et al., Vaccine, 9:250: 1991.

[0731] Inoue et al., Blood, 88:2267-78, 1996.

[0732] Irie and Morton, “Regression of cutaneous metastatic melanoma by intralesional injection with human monoclonal antibody to ganglioside GD2,” Proc. Natl. Acad. Sci. USA, 83:8694-98, 1986.

[0733] Irie and Ravindranath, “Gangliosides as targets for monoclonal antibody therapy of cancer,” in Therapeutic monoclonal antibodies, Borrebaeck and Larrick (eds.), Stockton Press, New York, p. 75-94, 1990.

[0734] Irie et al., “Human antibody to OFA-I, a tumor antigen, produced in vitro by Epstein-Barr virus transformed human B-lymphoid cell lines,” Proc. Natl. Acad. Sci. USA, 79:5666-70, 1982.

[0735] Irie et al., “Melanoma gangliosides and human monoclonal antibody,” in Human Tumor Antigens and Specific Tumor Therapy, Metzgar and Mitchell (eds.), Alan R. Liss, Inc., New York, pp. 115-126, 1989.

[0736] Ishioka et al., “MHC interaction and T cell recognition of carbohydrates and glycopeptides,” J. Immunol., 148:2446-51, 1992.

[0737] Jackson et al., “Induction of ICAM 1 expression on bladder tumours by BCG immunotherapy,” J. Clin. Pathol., 47:309-12, 1994.

[0738] Johnson and Tomai, “A Study of the Cellular and Molecular Mediators of the Adjuvant Action of a Nontoxic Monophosphoryl Lipid A,” Adv. Exp. Med. Biol., 133:567-79, 1988.

[0739] Johnson et al., “Characterization of a nontoxic monophosphoryl lipid A,” Rev. Infect. Dis., 9:512-16, 1987.

[0740] Johnson et al., “Structural Characterization of Monophosphoryl Lipid A Homologs Obtained from Salmonella minnesota Re595 Lipopolysaccharide,” J. Biol. Chem., 265:8108-16, 1990.

[0741] Johnston and Bystryn, “Effect of Cell Wall Skeleton and Monophosphoryl Lipid A Adjuvant on the Immunogenicity of a Murine B16 Melanoma Vaccine,” Journal of the National Cancer Institute, 83:1240-45, 1991.

[0742] Jones et al., J Natl Cancer Inst, 66:249-54, 1981.

[0743] Kabat et al., “Sequences of Proteins of Immunological Interest,” 5th ed., Public Health Service, National Institutes of Health, Bethesda, Md., pp 647-669, 1991.

[0744] Kass-Eisler et al., Proc. Nat'l Acad. Sci. USA, 90:11498-502, 1993.

[0745] Katopodis et al., “Lipid-associated sialic acid test for the detection of human cancer,” Cancer Res., 42:5270-75, 1982.

[0746] Kawaguchi et al., “Characteristic mode of action of gangliosides in selective modulation of CD4 on human T lymphocytes,” Biochem. Biophys. Res. Commun., 158:1050-55, 1989.

[0747] Kawakami et al., “Cloning of the gene coding for a shared human melanoma antigen recognized by autologous T cells infiltrating into tumor,” Proc. Natl. Acad. Sci. USA, 91:3515, 1994.

[0748] Kawakami, Eliyahu, Sakaguchi, Robbins, Rivoltini, Yannelli, Appella and Rosenberg, “Identification of the immunodominant peptides of the Mart-1 human melanoma antigen recognized by the majority of HLA-A2 restricted tumor infiltrating lymphocytes,” J. Exp. Med., 180:347-52, 1994.

[0749] Kensil et al., J. Am. Vet. Med. Assoc., 199:1423, 1991.

[0750] Kloppel et al., “Glycolipid-bound sialic acid in serum: Increased levels in mice and humans bearing mammary carcinomas,” Proc. Natl. Acad. Sci. USA, 74:3011-13, 1977.

[0751] Kohler and Milstein, Nature, 256:495-97, 1975.

[0752] Kohler and Milstein, Eur. J. Immunol., 6:511-19, 1976.

[0753] Kolls et al., Proc. Nat'l Acad. Sci. USA, 91:215-19, 1994.

[0754] Koscielak et al., “Glycolipid antigen and its antibody,” Immunochemistry, 5:441-55, 1968.

[0755] Kovach et al., “Lipid IV_{A} Inhibits Synthesis and Release of Tumor Necrosis Factor Induced by Lipopolysaccharide in Human Whole Blood Ex Vivo,” J. Exp. Med., 172:77-84, 1990.

[0756] Kwok and Higuchi, Nature, 339:237-38, 1989.

[0757] Kyogashima et al., Jpn. J. Cancer Res., 78:1229-32, 1987.

[0758] Ladisch et al., “Shedding of GD2 ganglioside by human neuroblastoma,” Int. J. Cancer, 39:73-76, 1987.

[0759] Lamm et al., “A randomized trial of intravesical doxorubicin and immunotherapy with bacille Calmette-Guérin for transitional-cell carcinoma of the bladder,” N. Engl. J. Med., 325:1205, 1991.

[0760] Lengle et al., “Inhibition of the lectin-induced mitogenic response of thymocytes by glycolipids,” Cancer Res., 39:817-922, 1979.

[0761] Liepkalns et al., J. Neurochem., 36:1959-65, 1981.

[0762] Livingston et al., “The Serologic Response to Meth A Sarcoma Vaccines After Cyclophosphamide Treatment is Additionally Increased by Various Adjuvants,” The Journal of Immunology, 135(2):1505-09, 1985.

[0763] Livingston et al., “Approaches to augmenting immunogenicity of the ganglioside GM₂ in mice: purified GM₂ is superior to whole cells,” J. Immunol., 138:1524-29, 1987a.

[0764] Livingston et al., “Vaccines containing purified GM₂ gangliosides elicit GM₂ antibodies in melanoma patients,” Proc. Natl. Acad. Sci. USA, 84:2911-15, 1987b.

[0765] Ljunggren et al., Nature, 346:476-80, 1990.

[0766] Lozzio and Lozzio, Blood, 45:321-34, 1975.

[0767] Madonna and Vogel, “Induction of Early-Phase Endotoxin Tolerance in Athymic (Nude) Mice, B-Cell-Deficient (xid) Mice, and Splenectomized Mice,” Infection and Immunity, 53:707-10, 1986.

[0768] Mahvi et al., Immunology and cell Biology, 75:456-60, 1997.

[0769] Maratea et al., Gene, 40:39-46, 1985.

[0770] Masihi et al., “Effects of Nontoxic Lipid A and Endotoxin on Resistance of Mice to Toxoplasma gondii,” Journal of Biological Response Modifiers, 7:535-39, 1988.

[0771] Melling et al., J. Immunol., 117:1267-74, 1976.

[0772] Menssen et al., J. Cancer Res. Clin. Oncol., 126:226-32, 2000.

[0773] Merrifield, J. Am. Chem. Soc., 85:2149-46, 1963.

[0774] Miller and Esselman, “Modulation of immune response by antigen reactive lymphocytes after cultivation with gangliosides,” J. Immunol., 115:839-43, 1975.

[0775] Minden, “Shared Antigens Between Animal and Human Tumors and Microorganisms,” in BCG in Cancer Immunotherapy, Lamoureux, Turcotte and Portelance (eds.); pp. 73-81, 1976.

[0776] Miotti et al., Cancer Res., 65:826, 1985.

[0777] Mitchell et al., “Active specific Immunotherapy of melanoma with allogeneic cell lysates: Rationale, results and possible mechanisms of action,” Ann. N.Y. Acad. Sci., 690:153-66, 1993.

[0778] Mitchell et al., “Active specific immunotherapy of melanoma: Phase I trial of allogeneic lysates and a novel adjuvant,” Cancer Res., 48:5883-93, 1988.

[0779] Mitchell et al., “Active-Specific Immunotherapy for Melanoma,” Journal of Clinical Oncology, 8:856-59, 1990.

[0780] Miyake et al., Cancer Res., 48:6154-60, 1988.

[0781] Mooney et al., “Bacterial superantigen signaling via HLA class II on human B lymphocytes,” Mol. Immunol., 31:675-81, 1994.

[0782] Morrison et al., “Specific ganglioside binding to receptor sites on T lymphocytes that couple to ganglioside-induced decrease of CD4 expression,” Life Sci., 45:1219-24, 1989.

[0783] Morton and Ravindranath, in Cancer Medicine, 3rd ed., Holland et al. (eds.), Lea and Febiger, Philadelphia, p.967, 1993.

[0784] Morton et al., “Polyvalent Melanoma Vaccine Improves Survival of Patients with Metastatic Melanoma,” John Wayne Cancer Institute at Saint John's Hospital and Health Center, Santa Monica, Calif., reprinted from Specific Immunotherapy of Cancer with Vaccines, Volume 690 of the Annals of the New York Academy of Sciences, 1993.

[0785] Morton et al., Ann. Surg., 216:463, 1992.

[0786] Morton et al., in Biological Function of Gangliosides, Progress in Brain Research, Vol. 101, pp 251-275, 1994.

[0787] Mosmann and Coffman, Ann. Rev. Immunol., 7:145-73, 1989.

[0788] Munjal et al., “Combined measurement and significance of lipid-bound sialic acid and carcinoembryonic antigen in detection of human cancer,” Diagn. Immunol., 2:36-43, 1984.

[0789] Murphy et al., Proc. Natl. Acad. Sci. USA,83:8258-62, 1986.

[0790] Myers et al., “Monophosphoryl Lipid A Behaves as a T-Cell-Independent Type 1 Carrier for Hapten-Specific Antibody Responses in Mice,” Infection and Immunity, 63:168-74, 1995.

[0791] Naiki et al., “Properties of antisera to ganglioside GM₁ and AsialoGM₁”, J. Immunol., 113:84-93, 1974.

[0792] Nair et al., Nature Biotechnol., 16:364-69, 1998.

[0793] Natoli et al., “A murine monoclonal antibody detecting the ganglioside GM2: Characterization of cell surface reactivity,” Cancer Res., 46:4116-20, 1986.

[0794] Nonomura et al., Hinyokika Kiyo, 45:593-97, 1999.

[0795] Nudelman et al., “Characterization of a human melanoma-associated ganglioside antigen defined by a monoclonal antibody 4.2,” J. Biol. Chem., 257:12752-56, 1982.

[0796] Odean et al., “Involvement of Gamma Interferon in Antibody Enhancement by Adjuvants,” Infection and Immunity, 58:427-32, 1990.

[0797] Oji et al., Jpn. J. Cancer Res., 90:194-204, 1999.

[0798] Old et al., Ann. N. Y. Acad. Sci., 101:80-106, 1962.

[0799] Pan et al., Leukemia, 14:1634, 2000.

[0800] Parker et al., J. Immunol., 152:163, 1994.

[0801] Pascal et al., “Immunochemical studies on normal and Tay-Sachs' brain gangliosides,” Proc. Soc. Exp. Biol. Med., 121:739-43, 1966.

[0802] Patek, Collins and Cohn, “Transformed cell lines susceptible or resistant to in vivo surveillance against tumorigenesis,” Nature, 276:510-11, 1978.

[0803] Patmasiriwat et al., Leukemia, 13:891-900, 1999.

[0804] Paul, Fundamental Immunology, 3rd ed., Raven Press, pp. 243-47, 1993.

[0805] Portoukalian et al., “Humoral immune response in disease-free advanced melanoma patients after vaccination with melanoma-associated gangliosides,” Int. J. Cancer, 49:893-99, 1991.

[0806] Portoukalian, “Alteration of gangliosides in plasma and red cells of human bearing melanoma tumors,” Biochem. Biophys. Res. Commun., 85:916-20, 1978.

[0807] Portoukalian, “Immunoregulatory activity of gangliosides shed by melanoma tumors,” in Gangliosides and Cancer, Oettgen (ed.), New York, VCH Publishers, pp. 207-16, 1989.

[0808] Powell and Newman (eds.), “Vaccine Design (the subunit and adjuvant approach),” Plenum Press, NY, 1995.

[0809] Prokazova et al., “Sialylated lactosylceramides. Possible inducers of non-specific immunosuppression and atherosclerotic lesions,” Eur.J.Biochem., 171:1-10, 1988.

[0810] Pukel et al., “GD3, a prominent ganglioside of human melanoma: Detection and characterization of mouse monoclonal antibody,” J. Exp. Med., 155:1133-47, 1982.

[0811] Qureshi et al., “Purification and structural determination of nontoxic lipid A obtained from the Lipopolysaccharide of Salmonella typhimurium,” J. Biol. Chem., 257:11808-15, 1985.

[0812] Rabinovich et al., “Vaccine Technologies: View to the Future,” Science, 265:1401-02, 1994.

[0813] Raines and Ross, J. Biol. Chem., 257:5154-60, 1982.

[0814] Rapport and Graf, “Immunochemical Reactions of Lipids,” Prog. Allergy, 13:273-331, 1969.

[0815] Ravindranath and Irie, in Malignant Melanoma: Biology, Diagnosis, and Therapy, Nathanson (ed.), Kluwer Acad., Boston, p. 17, 1988.

[0816] Ravindranath and Morton, “Role of gangliosides in active immunotherapy with melanoma vaccine,” Int. Rev. Immunol., 7:303, 1991.

[0817] Ravindranath et al., “Human melanoma antigen-acetylated Ganglioside GD₃ is recognized by Cancer antennarius lectin,” J. Biol. Chem., 263:2079-86, 1988.

[0818] Ravindranath et al., “An epitope common to gangliosides O-acetyl GD3 and GD3 recognized by antibodies in melanoma patients after active specific immunotherapy,” Cancer Res., 49:3891-97, 1989.

[0819] Ravindranath et al., “Ganglioside GM₃:GD₃ Ratio as an Index for the Management of Melanoma,” Cancer, 67:3029-35, 1991.

[0820] Ravindranath et al., “Efficacy of tumor cell vaccine after incorporating monophosphoryl lipid A (MPL) in tumor cell membranes containing tumor-associated ganglioside,” Experientia, 50:648-653, 1994a.

[0821] Ravindranath et al., “Attachment of Monophosphoryl Lipid A (MPL) to Cells and Liposomes Augments Antibody Response to membrane-bound Gangliosides,” Journal of Autoimmunity, 7:803-16, 1994b.

[0822] Ravindranath et al., “Factors affecting the fine specificity and sensitivity of serum antiganglioside antibodies in ELISA,” J. Immunol. Methods, 169:257-72, 1994c.

[0823] Real et al., “Class I (unique) tumor antigens of human melanoma. Identification of a 90,000 dalton cell surface glycoprotein by autologous antibody,” J. Exp. Med., 160:1219, 1984.

[0824] Reeves et al., Cancer Res., 56:5672-77, 1996.

[0825] Reisfeld et al., Melanoma Antigens and Antibodies, p. 317, 1982.

[0826] Ribi, “Beneficial modification of the endotoxin molecule,” J. Biol. Resp. Mod., 3:1-9, 1984.

[0827] Ribi et al., “Lipid A and immunotherapy,” Rev. Infect. Dis., 6:567-72, 1984.

[0828] Ribi et al., “Modulation of humoral and cell mediated immune responses by a structurally established nontoxic lipid A,” in Immunobiology and Immunopharmacology of Bacterial Endotoxins, Szentivanji and Friedman (eds.), Plenum Press, New York, pp. 407-420, 1986.

[0829] Rickman et al., Lancet 337:998, 1991.

[0830] Rolland, Crit. Rev. Therap. Drug Carrier Systems, 15:143-98, 1998.

[0831] Rosenberg et al., Ann. Surg., 210:474, 1989.

[0832] Rosenberg et al., N. Engl. J. Med., 319:1676, 1988.

[0833] Rosenfeld et al., Science, 252:431-34, 1991.

[0834] Rothbard and Taylor, EMBO J., 7:93-100, 1988.

[0835] Rott et al., “Protection from experimental allergic encephalomyelitis by application of a bacterial superantigen,” Int. Immunol., 4:347-53, 1992.

[0836] Sato et al., “Cytoplasmic membrane-associated protein (CAP) isolated from Streptococcus pyrogenes: as a new bacterial superantigen,” Microbiol. Immunol., 38:139-47, 1994.

[0837] Sato et al., Science, 273:352, 1996.

[0838] Satoh et al., Pathol. Int., 50:458-71, 2000.

[0839] Schuster et al., “Production of antibodies against phosphocholine, phosphatidylcholine, sphingomyelin, and lipid A by injection of liposomes containing lipid A,” J. Immunol., 122:900-05, 1979.

[0840] Schwab et al., “Superantigen can reactivate bacterial cell wall-induced arthritis,” J. Immunol., 150:4151-59, 1993.

[0841] Shafer and Spitznagel, “Sensitivity of Salmonella typhimurium to polymorphonuclear granulocyte extracts: Role of lipid A,” Rev. Infect. Dis., 6:577-81, 1984.

[0842] Shepard et al., J. Clin. Immunol., 11:117-27, 1991.

[0843] Sherwin et al., “The production of antisera to gangliosides from human nervous tissue,” Canad. J. Biochem., 42:1640-48, 1964.

[0844] Shimizu et al., Int. J. Gynecol. Pathol., 19:158-63,2000.

[0845] Shy et al., “Antibodies to GM₁ and GD_{1b} in patients with motor neuron disease with plasma cell dyscrasia,” Ann. Neurol., 25:511-18, 1989.

[0846] Siddiqui et al., Cancer Res., 44:5262-65, 1984.

[0847] Sidell et al., Cancer Immunol Immunother, 7:151-55, 1979.

[0848] Sigma Cell Culture, Volume 9, Number 2, 1993.

[0849] Skeiky et al., Infection and Immun., 67:3998-4007, 1999.

[0850] Slavin and Strober, Nature, 272:624-26, 1977.

[0851] Spinsanti et al., Leuk. Lymphoma, 38:611-19, 2000.

[0852] Stiess and Krüger, “Mammalian Cell Culture Media—Overview and Applications,” The Source (Sigma Cell Culture Technical and Product News), 9:1-8, 1993.

[0853] Stoute et al. New Engl. J. Med., 336:86-91, 1997.

[0854] Svennerholm et al., “Tumor gangliosides as targets for active specific immunotherapy of melanoma in man,” in Biological Function of Gangliosides, Progress in Brain Research, Vol. 101, 1994.

[0855] Tai et al., “Ganglioside GM2 as a human tumor antigen (OFA-I-1),” Proc. Natl. Acad. Sci., 80:5392-96, 1983.

[0856] Takada et al., “Molecular and Structural Requirements of a Lipoteichoic Acid from Enterococcus hirae ATCC 9790 for Cytokine-Inducing, Antitumor, and Antigenic Activities,” Infection and Immunity, 63:57-65, 1995.

[0857] Takahashi et al, J. Immunol., 140:3244, 1988.

[0858] Tamaki et al., Leukemia, 13:393-99, 1999.

[0859] Tamauchi et al., Immunology, 50:605, 1983.

[0860] Tanamoto, “Dissociation of Endotoxic Activities in a Chemically Synthesized Lipid A Precursor after Acetylation,” Infection and Immunity, 63:690-92, 1995.

[0861] Tanamoto, “Free Hydroxyl Groups Are Not Required for Endotoxic Activity of Lipid A,” Infection and Immunity, 62:1705-09, 1994a.

[0862] Tanamoto, FEBS Lett., 351:325-29, 1994b.

[0863] Tautu et al., “Improved procedure for determination of serum lipid-associated sialic acid: Application for early diagnosis of colorectal cancer,” J. Natl. Cancer Inst., 80:1333-37, 1988.

[0864] Thor et al., Cancer Res., 46:3118, 1986.

[0865] Thurin et al., “Proton NMR and fast-atom bombardment mass spectrometry analysis of the melanoma-associated ganglioside 9-O-acetyl GD3,” J. Biol. Chem., 260:14556-563, 1985.

[0866] Timmerman and Levy, Ann. Rev. Med., 50:507-29, 1999.

[0867] Tomai and Johnson, “T Cell and Interferon-γ Involvement in the Adjuvant Action of a Detoxified Endotoxin,” Journal of Biological Response Modifiers, 8:625-43, 1989.

[0868] Tomai et al., “The Adjuvant Properties of a Nontoxic Monophosphoryl Lipid A in Hyporesponsive and Aging Mice,” Journal of Biological Response Modifiers, 6:99-107, 1987.

[0869] Tsuchida et al., J. Dermatol., 11: 129-38, 1984.

[0870] Tsuchida et al., “Gangliosides of Human Melanoma: Altered Expression in Vivo and in Vitro,” Cancer Research, 47:1278-81, 1987.

[0871] Tsuchida et al., “Gangliosides as tumor markers of human melanoma: bio-chemical and immunologic assays,” in New Horizons of Tumor Immunotherapy, Torisu and Yoshida (eds.), pp. 315-325, 1989.

[0872] Tuting et al., J. Immunol., 160:1139-47, 1998.

[0873] Ulmer et al., Science, 259:1745-49, 1993.

[0874] Vadhan-Raj et al., J. Clin. Oncol., 6:1636, 1988.

[0875] van der Bruggen et al., “A gene encoding an antigen recognized by cytolytic T lymphocytes on a human melanoma,” Science, 264:716, 1991.

[0876] Verma et al., “Adjuvant Effects of Liposomes Containing Lipid A: Enhancement of Liposomal Antigen Presentation and Recruitment of Macrophages,” Infection and Immunity, 60:2438-44, 1992.

[0877] Vijayasaradhi et al., “The melanoma antigen gp75 is the human homologue of the mouse b (brown) locus gene product,” J. Exp. Med., 171:1375, 1990.

[0878] Von Bultzingslowen, Pneumologie, 53:266-75, 1999.

[0879] Vosika et al., Cancer Immunol. Immunother., 18:107, 1984.

[0880] Watson, Ralph, Sarkar and Cohn, “Leukemia viruses associated with mouse myeloma cells,” Proc. Natl. Acad. Sci. USA, 66:344, 1970.

[0881] Westrick et al., Biochim. Biophys. Acta, 750:141-48, 1983a.

[0882] Westrick et al., Cancer Res., 43:5890-94, 1983b.

[0883] Whisler and Yates, “Regulation of lymphocyte responses by human gangliosides. I.

[0884] Characteristics of inhibitory effects and the induction of impaired activation,” J. Immuunol., 125:2106-12, 1980.

[0885] Wide et al., in Radioimmunoassay Methods, Kirkham and Hunter (eds.), E. and S. Livingstone, Edinburgh, 1970.

[0886] Wilschut, “Preparation and properties of phospholipid vesicles,” in Methodologie des liposomes appliquee a la pharmacologie et a la biologies cellulaire, Leserman and Barbet (eds.), INSERM, Paris, pp. 1-10, 1982.

[0887] Yamaguchi et al., “Cell-surface antigens of melanoma recognized by human monoclonal antibodies,” Proc. Natl. Acad. Sci. USA, 84:2416-20, 1987.

[0888] Yamamoto et al., “In vitro Augmentation of Natural Killer Cell Activity and Production of Interferon-a/β and -γ with Deoxyribonucleic Acid Fraction from Mycobacterium bovis BCG,” Jpn. J. Cancer Res., 79:866-73, 1988.

[0889] Yeh et al., “A cell-surface antigen which is present in the ganglioside fraction and shared by human melanomas,” Int. J. Cancer, 29:269-75, 1982.

[0890] Yin et al., “Effect of Various Adjuvants on the Antibody Response of Mice to Pneumococcal Polysaccharides,” J. Biol. Resp. Modifiers, 8:190-205, 1989.

[0891] Yokoyama et al., “Immunochemical studies with gangliosides,” J. Immunol., 90:372-80, 1963.

[0892] Zapata et al., Protein Eng., 8:1057-62, 1995.

[0893] Zitvogel et al., Nat. Med., 4:594-600, 1998.

[0894] All of the compositions and methods disclosed and claimed herein can be made and executed without undue experimentation in light of the present disclosure. While the compositions and methods of this invention have been described in terms of preferred embodiments, it will be apparent to those of skill in the art that variations may be applied to the composition, methods and in the steps or in the sequence of steps of the method described herein without departing from the concept, spirit and scope of the invention. More specifically, it will be apparent that certain agents which are both chemically and physiologically related may be substituted for the agents described herein while the same or similar results would be achieved. All such similar substitutes and modifications apparent to those skilled in the art are deemed to be within the spirit, scope and concept of the invention as defined by the appended claims. Accordingly, the exclusive rights sought to be patented are as described in the claims below:

What is claimed is:

1. An isolated peptide or polypeptide, comprising at least a first coding region that comprises an amino acid sequence that is at least about 90% identical to the amino acid sequence of any one of SEQ ID NO:669 to SEQ ID NO:2532.

2. The isolated peptide or polypeptide of claim 1, wherein said amino acid sequence is at least about 92% identical to the amino acid sequence of any one of SEQ ID NO:669 to SEQ ID NO:2532.

3. The isolated peptide or polypeptide of claim 2, wherein said amino acid sequence is at least about 94% identical to the amino acid sequence of any one of SEQ ID NO:669 to SEQ ID NO:2532.

4. The isolated peptide or polypeptide of claim 3, wherein said amino acid sequence is at least about 96% identical to the amino acid sequence of any one of SEQ ID NO:669 to SEQ ID NO:2532.

5. The isolated peptide or polypeptide of claim 4, wherein said amino acid sequence is at least about 98% identical to the amino acid sequence of any one of SEQ ID NO:669 to SEQ ID NO:2532.

6. The isolated peptide or polypeptide of claim 4, wherein said amino acid sequence is at least about 99% identical to the amino acid sequence of any one of SEQ ID NO:669 to SEQ ID NO:2532.

7. The isolated peptide or polypeptide of claim 1, wherein said at least a first isolated coding region comprises an at least about 50 contiguous amino acid sequence from any one of SEQ ID NO:669 to SEQ ID NO:2532.

8. The isolated peptide or polypeptide of claim 7, wherein said at least a first isolated coding region comprises an at least about 75 contiguous amino acid sequence from any one of SEQ ID NO:669 to SEQ ID NO:2532.

9. The isolated polypeptide of claim 8, wherein said at least a first isolated coding region comprises an at least about 100 contiguous amino acid sequence from any one of SEQ ID NO:669 to SEQ ID NO:2532.

10. The isolated polypeptide of claim 9, wherein said at least a first isolated coding region comprises an at least about 125 contiguous amino acid sequence from any one of SEQ ID NO:669 to SEQ ID NO:2532.

11. The isolated peptide or polypeptide of claim 1, wherein said at least a first isolated coding region comprises the amino acid sequence of any one of SEQ ID NO:669 to SEQ ID NO:2532.

12. The isolated peptide or polypeptide of claim 1, wherein said at least a first isolated coding region comprises an amino acid sequence that is at least about 93% identical to the amino acid sequence of any one of SEQ ID NO:669 to SEQ ID NO:1380.

13. The isolated peptide or polypeptide of claim 12, wherein said at least a first isolated coding region comprises an amino acid sequence that is at least about 96% identical to the amino acid sequence of any one of SEQ ID NO:669 to SEQ ID NO:1380.

14. The isolated peptide or polypeptide of claim 13, wherein said at least a first isolated coding region comprises an amino acid sequence that is at least about 99% identical to the amino acid sequence of any one of SEQ ID NO:669 to SEQ ID NO:1380.

15. The isolated peptide or polypeptide of claim 1, wherein said at least a first isolated coding region comprises an amino acid sequence that is at least about 93% identical to the amino acid sequence of any one of SEQ ID NO:1381 to SEQ ID NO:1859.

16. The isolated peptide or polypeptide of claim 15, wherein said at least a first isolated coding region comprises an amino acid sequence that is at least about 96% identical to the amino acid sequence of any one of SEQ ID NO:1381 to SEQ ID NO:1859.

17. The isolated peptide or polypeptide of claim 16, wherein said at least a first isolated coding region comprises an amino acid sequence that is at least about 99% identical to the amino acid sequence of any one of SEQ ID NO:1381 to SEQ ID NO:1859.

18. The isolated peptide or polypeptide of claim 1, wherein said at least a first isolated coding region comprises an amino acid sequence that is at least about 93% identical to the amino acid sequence of any one of SEQ ID NO:1860 to SEQ ID NO:2105.

19. The isolated peptide or polypeptide of claim 18, wherein said at least a first isolated coding region comprises an amino acid sequence that is at least about 96% identical to the amino acid sequence of any one of SEQ ID NO:1860 to SEQ ID NO:2105.

20. The isolated peptide or polypeptide of claim 19, wherein said at least a first isolated coding region comprises an amino acid sequence that is at least about 99% identical to the amino acid sequence of any one of SEQ ID NO:1860 to SEQ ID NO:2105.

21. The isolated peptide or polypeptide of claim 1, wherein said at least a first isolated coding region comprises an amino acid sequence that is at least about 93% identical to the amino acid sequence of any one of SEQ ID NO:2106 to SEQ ID NO:2375.

22. The isolated peptide or polypeptide of claim 21, wherein said at least a first isolated coding region comprises an amino acid sequence that is at least about 96% identical to the amino acid sequence of any one of SEQ ID NO:2106 to SEQ ID NO:2375.

23. The isolated peptide or polypeptide of claim 22, wherein said at least a first isolated coding region comprises an amino acid sequence that is at least about 99% identical to the amino acid sequence of any one of SEQ ID NO:2106 to SEQ ID NO:2375.

24. The isolated peptide or polypeptide of claim 1, wherein said at least a first isolated coding region comprises an amino acid sequence that is at least about 93% identical to the amino acid sequence of any one of SEQ ID NO:2376 to SEQ ID NO:2532.

25. The isolated peptide or polypeptide of claim 24, wherein said at least a first isolated coding region comprises an amino acid sequence that is at least about 96% identical to the amino acid sequence of any one of SEQ ID NO:2376 to SEQ ID NO:2532.

26. The isolated peptide or polypeptide of claim 25, wherein said at least a first isolated coding region comprises an amino acid sequence that is at least about 99% identical to the amino acid sequence of any one of SEQ ID NO:2376 to SEQ ID NO:2532.

27. The isolated peptide or polypeptide of claim 1, wherein said at least a first isolated coding region comprises an amino acid sequence selected from the group consisting of SEQ ID NO:669, SEQ ID NO:670, SEQ ID NO:671, SEQ ID NO:672, SEQ ID NO:673, SEQ ID NO:674, SEQ ID NO:675, SEQ ID NO:676, SEQ ID NO:677, SEQ ID NO:678, SEQ ID NO:679, SEQ ID NO:680, SEQ ID NO:681, SEQ ID NO:682, SEQ ID NO:683, SEQ ID NO:684, SEQ ID NO:685, SEQ ID NO:686, SEQ ID NO:687, SEQ ID NO:688, SEQ ID NO:689, SEQ ID NO:690, SEQ ID NO:691, SEQ ID NO:692, SEQ ID NO:693, SEQ ID NO:694, SEQ ID NO:695, SEQ ID NO:696, SEQ ID NO:697, SEQ ID NO:698, SEQ ID NO:699, SEQ ID NO:700, SEQ ID NO:701, SEQ ID NO:702, SEQ ID NO:703, SEQ ID NO:704, SEQ ID NO:705, SEQ ID NO:706, SEQ ID NO:707, SEQ ID NO:708, SEQ ID NO:709, SEQ ID NO:710, SEQ ID NO:711, SEQ ID NO:712, SEQ ID NO:713, SEQ ID NO:714, SEQ ID NO:715, SEQ ID NO:716, SEQ ID NO:717, SEQ ID NO:718, SEQ ID NO:719, SEQ ID NO:720, SEQ ID NO:721, SEQ ID NO:722, SEQ ID NO:723, SEQ ID NO:724, SEQ ID NO:725, SEQ ID NO:726, SEQ ID NO:727, SEQ ID NO:728, SEQ ID NO:729, SEQ ID NO:730, SEQ ID NO:731, SEQ ID NO:732, SEQ ID NO:733, SEQ ID NO:734, SEQ ID NO:735, SEQ ID NO:736, SEQ ID NO:737, SEQ ID NO:738, SEQ ID NO:739, SEQ ID NO:740, SEQ ID NO:741, SEQ ID NO:742, SEQ ID NO:743, SEQ ID NO:744, SEQ ID NO:745, SEQ ID NO:746, SEQ ID NO:747, SEQ ID NO:748, SEQ ID NO:749, SEQ ID NO:750, SEQ ID NO:751, SEQ ID NO:752, SEQ ID NO:753, SEQ ID NO:754, SEQ ID NO:755, SEQ ID NO:756, SEQ ID NO:757, SEQ ID NO:758, SEQ ID NO:759, SEQ ID NO:760, SEQ ID NO:761, SEQ ID NO:762, SEQ ID NO:763, SEQ ID NO:764, SEQ ID NO:765, SEQ ID NO:766, SEQ ID NO:767, SEQ ID NO:768, SEQ ID NO:769, SEQ ID NO:770, SEQ ID NO:771, SEQ ID NO:772, SEQ ID NO:773, SEQ ID NO:774, SEQ ID NO:775, SEQ ID NO:776, SEQ ID NO:777, SEQ ID NO:778, SEQ ID NO:779, SEQ ID NO:780, SEQ ID NO:781, SEQ ID NO:782, SEQ ID NO:783, SEQ ID NO:784, SEQ ID NO:785, SEQ ID NO:786, SEQ ID NO:787, SEQ ID NO:788, SEQ ID NO:789, SEQ ID NO:790, SEQ ID NO:791, SEQ ID NO:792, SEQ ID NO:793, SEQ ID NO:794, SEQ ID NO:795, SEQ ID NO:796, SEQ ID NO:797, SEQ ID NO:798, SEQ ID NO:799, SEQ ID NO:800, SEQ ID NO:801, SEQ ID NO:802, SEQ ID NO:803, SEQ ID NO:804, SEQ ID NO:805, SEQ ID NO:806, SEQ ID NO:807, SEQ ID NO:808, SEQ ID NO:809, SEQ ID NO:810, SEQ ID NO:811, SEQ ID NO:812, SEQ ID NO:813, SEQ ID NO:814, SEQ ID NO:815, SEQ ID NO:816, SEQ ID NO:817, SEQ ID NO:818, SEQ ID NO:819, SEQ ID NO:820, SEQ ID NO:821, SEQ ID NO:822, SEQ ID NO:823, SEQ ID NO:824, SEQ ID NO:825, SEQ ID NO:826, SEQ ID NO:827, SEQ ID NO:828, SEQ ID NO:829, SEQ ID NO:830, SEQ ID NO:831, SEQ ID NO:832, SEQ ID NO:833, SEQ ID NO:834, SEQ ID NO:835, SEQ ID NO:836, SEQ ID NO:837, SEQ ID NO:838, SEQ ID NO:839, SEQ ID NO:840, SEQ ID NO:841, SEQ ID NO:842, SEQ ID NO:843, SEQ ID NO:844, SEQ ID NO:845, SEQ ID NO:846, SEQ ID NO:847, SEQ ID NO:848, SEQ ID NO:849, SEQ ID NO:850, SEQ ID NO:851, SEQ ID NO:852, SEQ ID NO:853, SEQ ID NO:854, SEQ ID NO:855, SEQ ID NO:856, SEQ ID NO:857, SEQ ID NO:858, SEQ ID NO:859, SEQ ID NO:860, SEQ ID NO:861, SEQ ID NO:862, SEQ ID NO:863, SEQ ID NO:864, SEQ ID NO:865, SEQ ID NO:866, SEQ ID NO:867, SEQ ID NO:868, SEQ ID NO:869, SEQ ID NO:870, SEQ ID NO:871, SEQ ID NO:872, SEQ ID NO:873, SEQ ID NO:874, SEQ ID NO:875, SEQ ID NO:876, SEQ ID NO:877, SEQ ID NO:878, SEQ ID NO:879, SEQ ID NO:880, SEQ ID NO:881, SEQ ID NO:882, SEQ ID NO:883, SEQ ID NO:884, SEQ ID NO:885, SEQ ID NO:886, SEQ ID NO:887, SEQ ID NO:888, SEQ ID NO:889, SEQ ID NO:890, SEQ ID NO:891, SEQ ID NO:892, SEQ ID NO:893, SEQ ID NO:894, SEQ ID NO:895, SEQ ID NO:896, SEQ ID NO:897, SEQ ID NO:898, SEQ ID NO:899, SEQ ID NO:900, SEQ ID NO:901, SEQ ID NO:902, SEQ ID NO:903, SEQ ID NO:904, SEQ ID NO:905, SEQ ID NO:906, SEQ ID NO:907, SEQ ID NO:908, SEQ ID NO:909, SEQ ID NO:910, SEQ ID NO:911, SEQ ID NO:912, SEQ ID NO:913, SEQ ID NO:914, SEQ ID NO:915, SEQ ID NO:916, SEQ ID NO:917, SEQ ID NO:918, SEQ ID NO:919, SEQ ID NO:920, SEQ ID NO:921, SEQ ID NO:922, SEQ ID NO:923, SEQ ID NO:924, SEQ ID NO:925, SEQ ID NO:926, SEQ ID NO:927, SEQ ID NO:928, SEQ ID NO:929, SEQ ID NO:930, SEQ ID NO:931, SEQ ID NO:932, SEQ ID NO:933, SEQ ID NO:934, SEQ ID NO:935, SEQ ID NO:936, SEQ ID NO:937, SEQ ID NO:938, SEQ ID NO:939, SEQ ID NO:940, SEQ ID NO:941, SEQ ID NO:942, SEQ ID NO:943, SEQ ID NO:944, SEQ ID NO:945, SEQ ID NO:946, SEQ ID NO:947, SEQ ID NO:948, SEQ ID NO:949, SEQ ID NO:950, SEQ ID NO:951, SEQ ID NO:952, SEQ ID NO:953, SEQ ID NO:954, SEQ ID NO:955, SEQ ID NO:956, SEQ ID NO:957, SEQ ID NO:958, SEQ ID NO:959, SEQ ID NO:960, SEQ ID NO:961, SEQ ID NO:962, SEQ ID NO:963, SEQ ID NO:964, SEQ ID NO:965, SEQ ID NO:966, SEQ ID NO:967, SEQ ID NO:968, SEQ ID NO:969, SEQ ID NO:970, SEQ ID NO:971, SEQ ID NO:972, SEQ ID NO:973, SEQ ID NO:974, SEQ ID NO:975, SEQ ID NO:976, SEQ ID NO:977, SEQ ID NO:978, SEQ ID NO:979, SEQ ID NO:980, SEQ ID NO:981, SEQ ID NO:982, SEQ ID NO:983, SEQ ID NO:984, SEQ ID NO:985, SEQ ID NO:986, SEQ ID NO:987, SEQ ID NO:988, SEQ ID NO:989, SEQ ID NO:990, SEQ ID NO:991, SEQ ID NO:992, SEQ ID NO:993, SEQ ID NO:994, SEQ ID NO:995, SEQ ID NO:996, SEQ ID NO:997, SEQ ID NO:998, SEQ ID NO:999, SEQ ID NO:1000, SEQ ID NO:1001, SEQ ID NO:1002, SEQ ID NO:1003, SEQ ID NO:1004, SEQ ID NO:1005, SEQ ID NO:1006, SEQ ID NO:1007, SEQ ID NO:1008, SEQ ID NO:1009, SEQ ID NO:1010, SEQ ID NO:1011, SEQ ID NO:1012, SEQ ID NO:1013, SEQ ID NO:1014, SEQ ID NO:1015, SEQ ID NO:1016, SEQ ID NO:1017, SEQ ID NO:1018, SEQ ID NO:1019, SEQ ID NO:1020, SEQ ID NO:1021, SEQ ID NO:1022, SEQ ID NO:1023, SEQ ID NO:1024, SEQ ID NO:1025, SEQ ID NO:1026, SEQ ID NO:1027, SEQ ID NO:1028, SEQ ID NO:1029, SEQ ID NO:1030, SEQ ID NO:1031, SEQ ID NO:1032, SEQ ID NO:1033, SEQ ID NO:1034, SEQ ID NO:1035, SEQ ID NO:1036, SEQ ID NO:1037, SEQ ID NO:1038, SEQ ID NO:1039, SEQ ID NO:1040, SEQ ID NO:1041, SEQ ID NO:1042, SEQ ID NO:1043, SEQ ID NO:1044, SEQ ID NO:1045, SEQ ID NO:1046, SEQ ID NO:1047, SEQ ID NO:1048, SEQ ID NO:1049, SEQ ID NO:1050, SEQ ID NO:1051, SEQ ID NO:1052, SEQ ID NO:1053, SEQ ID NO:1054, SEQ ID NO:1055, SEQ ID NO:1056, SEQ ID NO:1057, SEQ ID NO:1058, SEQ ID NO:1059, SEQ ID NO:1060, SEQ ID NO:1061, SEQ ID NO:1062, SEQ ID NO:1063, SEQ ID NO:1064, SEQ ID NO:1065, SEQ ID NO:1066, SEQ ID NO:1067, SEQ ID NO:1068, SEQ ID NO:1069, SEQ ID NO:1070, SEQ ID NO:1071, SEQ ID NO:1072, SEQ ID NO:1073, SEQ ID NO:1074, SEQ ID NO:1075, SEQ ID NO:1076, SEQ ID NO:1077, SEQ ID NO:1078, SEQ ID NO:1079, SEQ ID NO:1080, SEQ ID NO:1081, SEQ ID NO:1082, SEQ ID NO:1083, SEQ ID NO:1084, SEQ ID NO:1085, SEQ ID NO:1086, SEQ ID NO:1087, SEQ ID NO:1088, SEQ ID NO:1089, SEQ ID NO:1090, SEQ ID NO:1091, SEQ ID NO:1092, SEQ ID NO:1093, SEQ ID NO:1094, SEQ ID NO:1095, SEQ ID NO:1096, SEQ ID NO:1097, SEQ ID NO:1098, SEQ ID NO:1099, SEQ ID NO:1100, SEQ ID NO:1101, SEQ ID NO:1102, SEQ ID NO:1103, SEQ ID NO:1104, SEQ ID NO:1105, SEQ ID NO:1106, SEQ ID NO:1107, SEQ ID NO:1108, SEQ ID NO:1109, SEQ ID NO:1110, SEQ ID NO:1111, SEQ ID NO:1112, SEQ ID NO:1113, SEQ ID NO:1114, SEQ ID NO:1115, SEQ ID NO:1116, SEQ ID NO:1117, SEQ ID NO:1118, SEQ ID NO:1119, SEQ ID NO:1120, SEQ ID NO:1121, SEQ ID NO:1122, SEQ ID NO:1123, SEQ ID NO:1124, SEQ ID NO:1125, SEQ ID NO:1126, SEQ ID NO:1127, SEQ ID NO:1128, SEQ ID NO:1129, SEQ ID NO:1130,SEQ ID NO:1131,SEQ ID NO:1132, SEQ ID NO:1133, SEQ ID NO:1134, SEQ ID NO:1135, SEQ ID NO:1136, SEQ ID NO:1137, SEQ ID NO:1138, SEQ ID NO:1139, SEQ ID NO:1140, SEQ ID NO:1141, SEQ ID NO:1142, SEQ ID NO:1143, SEQ ID NO:1144, SEQ ID NO:1145, SEQ ID NO:1146, SEQ ID NO:1147, SEQ ID NO:1148, SEQ ID NO:1149, SEQ ID NO:1150, SEQ ID NO:1151, SEQ ID NO:1152, SEQ ID NO:1153, SEQ ID NO:1154, SEQ ID NO:1155, SEQ ID NO:1156, SEQ ID NO:1157, SEQ ID NO:1158, SEQ ID NO:1159, SEQ ID NO:1160, SEQ ID NO:1161, SEQ ID NO:1162, SEQ ID NO:1163, SEQ ID NO:1164, SEQ ID NO:1165, SEQ ID NO:1166, SEQ ID NO:1167, SEQ ID NO:1168, SEQ ID NO:1169, SEQ ID NO:1170, SEQ ID NO:1171, SEQ ID NO:1172, SEQ ID NO:1173, SEQ ID NO:1174, SEQ ID NO:1175, SEQ ID NO:1176, SEQ ID NO:1177, SEQ ID NO:11711, SEQ ID NO:1179, SEQ ID NO:1180, SEQ ID NO:1181, SEQ ID NO:1182, SEQ ID NO:1183, SEQ ID NO:1184, SEQ ID NO:1185, SEQ ID NO:1186, SEQ ID NO:1187, SEQ ID NO:1188, SEQ ID NO:1189, SEQ ID NO:1190, SEQ ID NO:1191, SEQ ID NO:1192, SEQ ID NO:1193, SEQ ID NO:1194, SEQ ID NO:1195, SEQ ID NO:1196, SEQ ID NO:1197, SEQ ID NO:1198, SEQ ID NO:1199, SEQ ID NO:1200, SEQ ID NO:1201, SEQ ID NO:1202, SEQ ID NO:1203, SEQ ID NO:1204, SEQ ID NO:1205, SEQ ID NO:1206, SEQ ID NO:1207, SEQ ID NO:1208, SEQ ID NO:1209, SEQ ID NO:1210, SEQ ID NO:1211, SEQ ID NO:1212, SEQ ID NO:1213, SEQ ID NO:1214, SEQ ID NO:1215, SEQ ID NO:1216, SEQ ID NO:1217, SEQ ID NO:1218, SEQ ID NO:1219, SEQ ID NO:1220, SEQ ID NO:1221, SEQ ID NO:1222, SEQ ID NO:1223, SEQ ID NO:1224, SEQ ID NO:1225, SEQ ID NO:1226, SEQ ID NO:1227, SEQ ID NO:1228, SEQ ID NO:1229, SEQ ID NO:1230, SEQ ID NO:1231, SEQ ID NO:1232, SEQ ID NO:1233, SEQ ID NO:1234, SEQ ID NO:1235, SEQ ID NO:1236, SEQ ID NO:1237, SEQ ID NO:1238, SEQ ID NO:1239, SEQ ID NO:1240, SEQ ID NO:1241, SEQ ID NO:1242, SEQ ID NO:1243, SEQ ID NO:1244, SEQ ID NO:1245, SEQ ID NO:1246, SEQ ID NO:1247, SEQ ID NO:1248, SEQ ID NO:1249, SEQ ID NO:1250, SEQ ID NO:1251, SEQ ID NO:1252, SEQ ID NO:1253, SEQ ID NO:1254, SEQ ID NO:1255, SEQ ID NO:1256, SEQ ID NO:1257, SEQ ID NO:1258, SEQ ID NO:1259, SEQ ID NO:1260, SEQ ID NO:1261, SEQ ID NO:1262, SEQ ID NO:1263, SEQ ID NO:1264, SEQ ID NO:1265, SEQ ID NO:1266, SEQ ID NO:1267, SEQ ID NO:1268, SEQ ID NO:1269, SEQ ID NO:1270, SEQ ID NO:1271, SEQ ID NO:1272, SEQ ID NO:1273, SEQ ID NO:1274, SEQ ID NO:1275, SEQ ID NO:1276, SEQ ID NO:1277, SEQ ID NO:1278, SEQ ID NO:1279, SEQ ID NO:1280, SEQ ID NO:1281, SEQ ID NO:1282, SEQ ID NO:1283, SEQ ID NO:1284, SEQ ID NO:1285, SEQ ID NO:1286, SEQ ID NO:1287, SEQ ID NO:1288, SEQ ID NO:1289, SEQ ID NO:1290, SEQ ID NO:1291, SEQ ID NO:1292, SEQ ID NO:1293, SEQ ID NO:1294, SEQ ID NO:1295, SEQ ID NO:1296, SEQ ID NO:1297, SEQ ID NO:1298, SEQ ID NO:1299, SEQ ID NO:1300, SEQ ID NO:1301, SEQ ID NO:1302, SEQ ID NO:1303, SEQ ID NO:1304, SEQ ID NO:1305, SEQ ID NO:1306, SEQ ID NO:1307, SEQ ID NO:1308, SEQ ID NO:1309, SEQ ID NO:1310, SEQ ID NO:1311, SEQ ID NO:1312, SEQ ID NO:1313, SEQ ID NO:1314, SEQ ID NO:1315, SEQ ID NO:1316, SEQ ID NO:1317, SEQ ID NO:1318, SEQ ID NO:1319, SEQ ID NO:1320, SEQ ID NO:1321, SEQ ID NO:1322, SEQ ID NO:1323, SEQ ID NO:1324, SEQ ID NO:1325, SEQ ID NO:1326, SEQ ID NO:1327, SEQ ID NO:1328, SEQ ID NO:1329, SEQ ID NO:1330, SEQ ID NO:1331, SEQ ID NO:1332, SEQ ID NO:1333, SEQ ID NO:1334, SEQ ID NO:1335, SEQ ID NO:1336, SEQ ID NO:1337, SEQ ID NO:1338, SEQ ID NO:1339, SEQ ID NO:1340, SEQ ID NO:1341, SEQ ID NO:1342, SEQ ID NO:1343, SEQ ID NO:1344, SEQ ID NO:1345, SEQ ID NO:1346, SEQ ID NO:1347, SEQ ID NO:1348, SEQ ID NO:1349, SEQ ID NO:1350, SEQ ID NO:1351, SEQ ID NO:1352, SEQ ID NO:1353, SEQ ID NO:1354, SEQ ID NO:1355, SEQ ID NO:1356, SEQ ID NO:1357, SEQ ID NO:1358, SEQ ID NO:1359, SEQ ID NO:1360, SEQ ID NO:1361, SEQ ID NO:1362, SEQ ID NO:1363, SEQ ID NO:1364, SEQ ID NO:1365, SEQ ID NO:1366, SEQ ID NO:1367, SEQ ID NO:1368, SEQ ID NO:1369, SEQ ID NO:1370, SEQ ID NO:1371, SEQ ID NO:1372, SEQ ID NO:1373, SEQ ID NO:1374, SEQ ID NO:1375, SEQ ID NO:1376, SEQ ID NO:1377, SEQ ID NO:1378, SEQ ID NO:1379, and SEQ ID NO:1380.

28. The isolated peptide or polypeptide of claim 1, wherein said at least a first isolated coding region comprises an amino acid sequence selected from the group consisting of SEQ ID NO:1381, SEQ ID NO:1382, SEQ ID NO:1383, SEQ ID NO:1384, SEQ ID NO:1385, SEQ ID NO:1386, SEQ ID NO:1387, SEQ ID NO:1388, SEQ ID NO:1389, SEQ ID NO:1390, SEQ ID NO:1391, SEQ ID NO:1392, SEQ ID NO:1393, SEQ ID NO:1394, SEQ ID NO:1395, SEQ ID NO:1396, SEQ ID NO:1397, SEQ ID NO:1398, SEQ ID NO:1399, SEQ ID NO:1400, SEQ ID NO:1401, SEQ ID NO:1402, SEQ ID NO:1403, SEQ ID NO:1404, SEQ ID NO:1405, SEQ ID NO:1406, SEQ ID NO:1407, SEQ ID NO:1408, SEQ ID NO:1409, SEQ ID NO:1410, SEQ ID NO:1411, SEQ ID NO:1412, SEQ ID NO:1413, SEQ ID NO:1414, SEQ ID NO:1415, SEQ ID NO:1416, SEQ ID NO:1417, SEQ ID NO:1418, SEQ ID NO:1419, SEQ ID NO:1420, SEQ ID NO:1421, SEQ ID NO:1422, SEQ ID NO:1423, SEQ ID NO:1424, SEQ ID NO:1425, SEQ ID NO:1426, SEQ ID NO:1427, SEQ ID NO:1428, SEQ ID NO:1429, SEQ ID NO:1430, SEQ ID NO:1431, SEQ ID NO:1432, SEQ ID NO:1433, SEQ ID NO:1434, SEQ ID NO:1435, SEQ ID NO:1436, SEQ ID NO:1437, SEQ ID NO:1438, SEQ ID NO:1439, SEQ ID NO:1440, SEQ ID NO:1441, SEQ ID NO:1442, SEQ ID NO:1443, SEQ ID NO:1444, SEQ ID NO:1445, SEQ ID NO:1446, SEQ ID NO:1447, SEQ ID NO:1448, SEQ ID NO:1449, SEQ ID NO:1450, SEQ ID NO:1451, SEQ ID NO:1452, SEQ ID NO:1453, SEQ ID NO:1454, SEQ ID NO:1455, SEQ ID NO:1456, SEQ ID NO:1457, SEQ ID NO:1458, SEQ ID NO:1459, SEQ ID NO:1460, SEQ ID NO:1461, SEQ ID NO:1462, SEQ ID NO:1463, SEQ ID NO:1464, SEQ ID NO:1465, SEQ ID NO:1466, SEQ ID NO:1467, SEQ ID NO:1468, SEQ ID NO:1469, SEQ ID NO:1470, SEQ ID NO:1471, SEQ ID NO:1472, SEQ ID NO:1473, SEQ ID NO:1474, SEQ ID NO:1475, SEQ ID NO:1476, SEQ ID NO:1477, SEQ ID NO:1478, SEQ ID NO:1479, SEQ ID NO:1480, SEQ ID NO:1481, SEQ ID NO:1482, SEQ ID NO:1483, SEQ ID NO:1484, SEQ ID NO:1485, SEQ ID NO:1486, SEQ ID NO:1487, SEQ ID NO:1488, SEQ ID NO:1489, SEQ ID NO:1490, SEQ ID NO:1491, SEQ ID NO:1492, SEQ ID NO:1493, SEQ ID NO:1494, SEQ ID NO:1495, SEQ ID NO:1496, SEQ ID NO:1497, SEQ ID NO:1498, SEQ ID NO:1499, SEQ ID NO:1500, SEQ ID NO:1501, SEQ ID NO:1502, SEQ ID NO:1503, SEQ ID NO:1504, SEQ ID NO:1505, SEQ ID NO:1506, SEQ ID NO:1507, SEQ ID NO:1508, SEQ ID NO:1509, SEQ ID NO:1510, SEQ ID NO:1511, SEQ ID NO:1512, SEQ ID NO:1513, SEQ ID NO:1514, SEQ ID NO:1515, SEQ ID NO:1516, SEQ ID NO:1517, SEQ ID NO:1518, SEQ ID NO:1519, SEQ ID NO:1520, SEQ ID NO:1521, SEQ ID NO:1522, SEQ ID NO:1523, SEQ ID NO:1524, SEQ ID NO:1525, SEQ ID NO:1526, SEQ ID NO:1527, SEQ ID NO:1528, SEQ ID NO:1529, SEQ ID NO:1530, SEQ ID NO:1531, SEQ ID NO:1532, SEQ ID NO:1533, SEQ ID NO:1534, SEQ ID NO:1535, SEQ ID NO:1536, SEQ ID NO:1537, SEQ ID NO: NO:1538, SEQ ID NO:1539, SEQ ID NO:1540, SEQ ID NO:1541, SEQ ID NO:1542, SEQ ID NO:1543, SEQ ID NO:1544, SEQ ID NO:1545, SEQ ID NO:1546, SEQ ID NO:1547, SEQ ID NO:1548, SEQ ID NO:1549, SEQ ID NO:1550, SEQ ID NO:1551, SEQ ID NO:1552, SEQ ID NO:1553, SEQ ID NO:1554, SEQ ID NO:1555, SEQ ID NO:1556, SEQ ID NO:1557, SEQ ID NO:1558, SEQ ID NO:1559, SEQ ID NO:1560, SEQ ID NO:1561, SEQ ID NO:1562, SEQ ID NO:1563, SEQ ID NO:1564, SEQ ID NO:1565, SEQ ID NO:1566, SEQ ID NO:1567, SEQ ID NO:1568, SEQ ID NO:1569, SEQ ID NO:1570, SEQ ID NO:1571, SEQ ID NO:1572, SEQ ID NO:1573, SEQ ID NO:1574, SEQ ID NO:1575, SEQ ID NO:1576, SEQ ID NO:1577, SEQ ID NO:1578, SEQ ID NO:1579, SEQ ID NO:1580, SEQ ID NO:1581, SEQ ID NO:1582, SEQ ID NO:1583, SEQ ID NO:1584, SEQ ID NO:1585, SEQ ID NO:1586, SEQ ID NO:1587, SEQ ID NO:1588, SEQ ID NO:1589, SEQ ID NO:1590, SEQ ID NO:1591, SEQ ID NO:1592, SEQ ID NO:1593, SEQ ID NO:1594, SEQ ID NO:1595, SEQ ID NO:1596, SEQ ID NO:1597, SEQ ID NO:1598, SEQ ID NO:1599, SEQ ID NO:1600, SEQ ID NO:1601, SEQ ID NO:1602, SEQ ID NO:1603, SEQ ID NO:1604, SEQ ID NO:1605, SEQ ID NO:1606, SEQ ID NO:1607, SEQ ID NO:1608, SEQ ID NO:1609, SEQ ID NO:1610, SEQ ID NO:1611, SEQ ID NO:1612, SEQ ID NO:1613, SEQ ID NO:1614, SEQ ID NO:1615, SEQ ID NO:1616, SEQ ID NO:1617, SEQ ID NO:1618, SEQ ID NO:1619, SEQ ID NO:1620, SEQ ID NO:1621, SEQ ID NO:1622, SEQ ID NO:1623, SEQ ID NO:1624, SEQ ID NO:1625, SEQ ID NO:1626, SEQ ID NO:1627, SEQ ID NO:1628, SEQ ID NO:1629, SEQ ID NO:1630, SEQ ID NO:1631, SEQ ID NO:1632, SEQ ID NO:1633, SEQ ID NO:1634, SEQ ID NO:1635, SEQ ID NO:1636, SEQ ID NO:1637, SEQ ID NO:1638, SEQ ID NO:1639, SEQ ID NO:1640, SEQ ID NO:1641, SEQ ID NO:1642, SEQ ID NO:1643, SEQ ID NO:1644, SEQ ID NO:1645, SEQ ID NO:1646, SEQ ID NO:1647, SEQ ID NO:1648, SEQ ID NO:1649, SEQ ID NO:1650, SEQ ID NO:1651, SEQ ID NO:1652, SEQ ID NO:1653, SEQ ID NO:1654, SEQ ID NO:1655, SEQ ID NO:1656, SEQ ID NO:1657, SEQ ID NO:1658, SEQ ID NO:1659, SEQ ID NO:1660, SEQ ID NO:1661, SEQ ID NO:1662, SEQ ID NO:1663, SEQ ID NO:1664, SEQ ID NO:1665, SEQ ID NO:1666, SEQ ID NO:1667, SEQ ID NO:1668, SEQ ID NO:1669, SEQ ID NO:1670, SEQ ID NO:1671, SEQ ID NO:1672, SEQ ID NO:1673, SEQ ID NO:1674, SEQ ID NO:1675, SEQ ID NO:1676, SEQ ID NO:1677, SEQ ID NO:1678, SEQ ID NO:1679, SEQ ID NO:1680, SEQ ID NO:1681, SEQ ID NO:1682, SEQ ID NO:1683, SEQ ID NO:1684, SEQ ID NO:1685, SEQ ID NO:1686, SEQ ID NO:1687, SEQ ID NO:1688, SEQ ID NO:1689, SEQ ID NO:1690, SEQ ID NO:1691, SEQ ID NO:1692, SEQ ID NO:1693, SEQ ID NO:1694, SEQ ID NO:1695, SEQ ID NO:1696, SEQ ID NO:1697, SEQ ID NO:1698, SEQ ID NO:1699, SEQ ID NO:1700, SEQ ID NO:1701, SEQ ID NO:1702, SEQ ID NO:1703, SEQ ID NO:1704, SEQ ID NO:1705, SEQ ID NO:1706, SEQ ID NO:1707, SEQ ID NO:1708, SEQ ID NO:1709, SEQ ID NO:1710, SEQ ID NO:1711, SEQ ID NO:1712, SEQ ID NO:1713, SEQ ID NO:1714, SEQ ID NO:1715, SEQ ID NO:1716, SEQ ID NO:1717, SEQ ID NO:1718, SEQ ID NO:1719, SEQ ID NO:1720, SEQ ID NO:1721, SEQ ID NO:1722, SEQ ID NO:1723, SEQ ID NO:1724, SEQ ID NO:1725, SEQ ID NO:1726, SEQ ID NO:1727, SEQ ID NO:1728, SEQ ID NO:1729, SEQ ID NO:1730, SEQ ID NO:1731, SEQ ID NO:1732, SEQ ID NO:1733, SEQ ID NO:1734, SEQ ID NO:1735, SEQ ID NO:1736, SEQ ID NO:1737, SEQ ID NO:1738, SEQ ID NO:1739, SEQ ID NO:1740, SEQ ID NO:1741, SEQ ID NO:1742, SEQ ID NO:1743, SEQ ID NO:1744, SEQ ID NO:1745, SEQ ID NO:1746, SEQ ID NO:1747, SEQ ID NO:1748, SEQ ID NO:1749, SEQ ID NO:1750, SEQ ID NO:1751, SEQ ID NO:1752, SEQ ID NO:1753, SEQ ID NO:1754, SEQ ID NO:1755, SEQ ID NO:1756, SEQ ID NO:1757, SEQ ID NO:1758, SEQ ID NO:1759, SEQ ID NO:1760, SEQ ID NO:1761, SEQ ID NO:1762, SEQ ID NO:1763, SEQ ID NO:1764, SEQ ID NO:1765, SEQ ID NO:1766, SEQ ID NO:1767, SEQ ID NO:1768, SEQ ID NO:1769, SEQ ID NO:1770, SEQ ID NO:1771, SEQ ID NO:1772, SEQ ID NO:1773, SEQ ID NO:1774, SEQ ID NO:1775, SEQ ID NO:1776, SEQ ID NO:1777, SEQ ID NO:1778, SEQ ID NO:1779, SEQ ID NO:1780, SEQ ID NO:1781, SEQ ID NO:1782, SEQ ID NO:1783, SEQ ID NO:1784, SEQ ID NO:1785, SEQ ID NO:1786, SEQ ID NO:1787, SEQ ID NO:1788, SEQ ID NO:1789, SEQ ID NO:1790, SEQ ID NO:1791, SEQ ID NO:1792, SEQ ID NO:1793, SEQ ID NO:1794, SEQ ID NO:1795, SEQ ID NO:1796, SEQ ID NO:1797, SEQ ID NO:1798, SEQ ID NO:1799, SEQ ID NO:1800, SEQ ID NO:1801, SEQ ID NO:1802, SEQ ID NO:1803, SEQ ID NO:1804, SEQ ID NO:1805, SEQ ID NO:1806, SEQ ID NO:1807, SEQ ID NO:1808, SEQ ID NO:1809, SEQ ID NO:1810, SEQ ID NO:1811, SEQ ID NO:1812, SEQ ID NO:1813, SEQ ID NO:1814, SEQ ID NO:1815, SEQ ID NO:1816, SEQ ID NO:1817, SEQ ID NO:1818, SEQ ID NO:1819, SEQ ID NO:1820, SEQ ID NO:1821, SEQ ID NO:1822, SEQ ID NO:1823, SEQ ID NO:1824, SEQ ID NO:1825, SEQ ID NO:1826, SEQ ID NO:1827, SEQ ID NO:1828, SEQ ID NO:1829, SEQ ID NO:1830, SEQ ID NO:1831, SEQ ID NO:1832, SEQ ID NO:1833, SEQ ID NO:1834, SEQ ID NO:1835, SEQ ID NO:1836, SEQ ID NO:1837, SEQ ID NO:1838, SEQ ID NO:1839, SEQ ID NO:1840, SEQ ID NO:1841, SEQ ID NO:1842, SEQ ID NO:1843, SEQ ID NO:1844, SEQ ID NO:1845, SEQ ID NO:1846, SEQ ID NO:1847, SEQ ID NO:1848, SEQ ID NO:1849, SEQ ID NO:1850, SEQ ID NO:1851, SEQ ID NO:1852, SEQ ID NO:1853, SEQ ID NO:1854, SEQ ID NO:1855, SEQ ID NO:1856, SEQ ID NO:1857, SEQ ID NO:1858, and SEQ ID NO:1859.

29. The isolated peptide or polypeptide of claim 1, wherein said at least a first isolated coding region comprises an amino acid sequence selected from the group consisting of SEQ ID NO:1860, SEQ ID NO:1861, SEQ ID NO:1862, SEQ ID NO:1863, SEQ ID NO:1864, SEQ ID NO:1865, SEQ ID NO:1866, SEQ ID NO:1867, SEQ ID NO:1868, SEQ ID NO:1869, SEQ ID NO:1870, SEQ ID NO:1871, SEQ ID NO:1872, SEQ ID NO:1873, SEQ ID NO:1874, SEQ ID NO:1875, SEQ ID NO:1876, SEQ ID NO:1877, SEQ ID NO:1878, SEQ ID NO:1879, SEQ ID NO:1880, SEQ ID NO:1881, SEQ ID NO:1882, SEQ ID NO:1883, SEQ ID NO:1884, SEQ ID NO:1885, SEQ ID NO:1886, SEQ ID NO:1887, SEQ ID NO:1888, SEQ ID NO:1889, SEQ ID NO:1890, SEQ ID NO:1891, SEQ ID NO:1892, SEQ ID NO:1893, SEQ ID NO:1894, SEQ ID NO:1895, SEQ ID NO:1896, SEQ ID NO:1897, SEQ ID NO:1898, SEQ ID NO:1899, SEQ ID NO:1900, SEQ ID NO:1901, SEQ ID NO:1902, SEQ ID NO:1903, SEQ ID NO:1904, SEQ ID NO:1905, SEQ ID NO:1906, SEQ ID NO:1907, SEQ ID NO:1908, SEQ ID NO:1909, SEQ ID NO:1910, SEQ ID NO:1911, SEQ ID NO:1912, SEQ ID NO:1913, SEQ ID NO:1914, SEQ ID NO:1915, SEQ ID NO:1916, SEQ ID NO:1917, SEQ ID NO:1918, SEQ ID NO:1919, SEQ ID NO:1920, SEQ ID NO:1921, SEQ ID NO:1922, SEQ ID NO:1923, SEQ ID NO:1924, SEQ ID NO:1925, SEQ ID NO:1926, SEQ ID NO:1927, SEQ ID NO:1928, SEQ ID NO:1929, SEQ ID NO:1930, SEQ ID NO:1931, SEQ ID NO:1932, SEQ ID NO:1933, SEQ ID NO:1934, SEQ ID NO:1935, SEQ ID NO:1936, SEQ ID NO:1937, SEQ ID NO:1938, SEQ ID NO:1939, SEQ ID NO:1940, SEQ ID NO:1941, SEQ ID NO:1942, SEQ ID NO:1943, SEQ ID NO:1944, SEQ ID NO:1945, SEQ ID NO:1946, SEQ ID NO:1947, SEQ ID NO:1948, SEQ ID NO:1949, SEQ ID NO:1950, SEQ ID NO:1951, SEQ ID NO:1952, SEQ ID NO:1953, SEQ ID NO:1954, SEQ ID NO:1955, SEQ ID NO:1956, SEQ ID NO:1957, SEQ ID NO:1958, SEQ ID NO:1959, SEQ ID NO:1960, SEQ ID NO:1961, SEQ ID NO:1962, SEQ ID NO:1963, SEQ ID NO:1964, SEQ ID NO:1965, SEQ ID NO:1966, SEQ ID NO:1967, SEQ ID NO:1968, SEQ ID NO:1969, SEQ ID NO:1970, SEQ ID NO:1971, SEQ ID NO:1972, SEQ ID NO:1973, SEQ ID NO:1974, SEQ ID NO:1975, SEQ ID NO:1976, SEQ ID NO:1977, SEQ ID NO:1978, SEQ ID NO:1979, SEQ ID NO:1980, SEQ ID NO:1981, SEQ ID NO:1982, SEQ ID NO:1983, SEQ ID NO:1984, SEQ ID NO:1985, SEQ ID NO:1986, SEQ ID NO:1987, SEQ ID NO:1988, SEQ ID NO:1989, SEQ ID NO:1990, SEQ ID NO:1991, SEQ ID NO:1992, SEQ ID NO:1993, SEQ ID NO:1994, SEQ ID NO:1995, SEQ ID NO:1996, SEQ ID NO:1997, SEQ ID NO:1998, SEQ ID NO:1999, SEQ ID NO:2000, SEQ ID NO:2001, SEQ ID NO:2002, SEQ ID NO:2003, SEQ ID NO:2004, SEQ ID NO:2005, SEQ ID NO:2006, SEQ ID NO:2007, SEQ ID NO:2008, SEQ ID NO:2009, SEQ ID NO:2010, SEQ ID NO:2011, SEQ ID NO:2012, SEQ ID NO:2013, SEQ ID NO:2014, SEQ ID NO:2015, SEQ ID NO:2016, SEQ ID NO:2017, SEQ ID NO:2018, SEQ ID NO:2019, SEQ ID NO:2020, SEQ ID NO:2021, SEQ ID NO:2022, SEQ ID NO:2023, SEQ ID NO:2024, SEQ ID NO:2025, SEQ ID NO:2026, SEQ ID NO:2027, SEQ ID NO:2028, SEQ ID NO:2029, SEQ ID NO:2030, SEQ ID NO:2031, SEQ ID NO:2032, SEQ ID NO:2033, SEQ ID NO:2034, SEQ ID NO:2035, SEQ ID NO:2036, SEQ ID NO:2037, SEQ ID NO:2038, SEQ ID NO:2039, SEQ ID NO:2040, SEQ ID NO:2041, SEQ ID NO:2042, SEQ ID NO:2043, SEQ ID NO:2044, SEQ ID NO:2045, SEQ ID NO:2046, SEQ ID NO:2047, SEQ ID NO:2048, SEQ ID NO:2049, SEQ ID NO:2050, SEQ ID NO:2051, SEQ ID NO:2052, SEQ ID NO:2053, SEQ ID NO:2054, SEQ ID NO:2055, SEQ ID NO:2056, SEQ ID NO:2057, SEQ ID NO:2058, SEQ ID NO:2059, SEQ ID NO:2060, SEQ ID NO:2061, SEQ ID NO:2062, SEQ ID NO:2063, SEQ ID NO:2064, SEQ ID NO:2065, SEQ ID NO:2066, SEQ ID NO:2067, SEQ ID NO:2068, SEQ ID NO:2069, SEQ ID NO:2070, SEQ ID NO:2071, SEQ ID NO:2072, SEQ ID NO:2073, SEQ ID NO:2074, SEQ ID NO:2075, SEQ ID NO:2076, SEQ ID NO:2077, SEQ ID NO:2078, SEQ ID NO:2079, SEQ ID NO:2080, SEQ ID NO:2081, SEQ ID NO:2082, SEQ ID NO:2083, SEQ ID NO:2084, SEQ ID NO:2085, SEQ ID NO:2086, SEQ ID NO:2087, SEQ ID NO:2088, SEQ ID NO:2089, SEQ ID NO:2090, SEQ ID NO:2091, SEQ ID NO:2092, SEQ ID NO:2093, SEQ ID NO:2094, SEQ ID NO:2095, SEQ ID NO:2096, SEQ ID NO:2097, SEQ ID NO:2098, SEQ ID NO:2099, SEQ ID NO:2100, SEQ ID NO:2101, SEQ ID NO:2102, SEQ ID NO:2103, SEQ ID NO:2104, and SEQ ID NO:2105.

30. The isolated peptide or polypeptide of claim 1, wherein said at least a first isolated coding region comprises an amino acid sequence selected from the group consisting of SEQ SEQ ID NO:2106, SEQ ID NO:2107, SEQ ID NO:2108, SEQ ID NO:2109, SEQ ID NO:2110, SEQ ID NO:2111, SEQ ID NO:2112, SEQ ID NO:2113, SEQ ID NO:2114, SEQ ID NO:2115, SEQ ID NO:2116, SEQ ID NO:2117, SEQ ID NO:2118, SEQ ID NO:2119, SEQ ID NO:2120, SEQ ID NO:2121, SEQ ID NO:2122, SEQ ID NO:2123, SEQ ID NO:2124, SEQ ID NO:2125, SEQ ID NO:2126, SEQ ID NO:2127, SEQ ID NO:2128, SEQ ID NO:2129, SEQ ID NO:2130, SEQ ID NO:2131, SEQ ID NO:2132, SEQ ID NO:2133, SEQ ID NO:2134, SEQ ID NO:2135, SEQ ID NO:2136, SEQ ID NO:2137, SEQ ID NO:2138, SEQ ID NO:2139, SEQ ID NO:2140, SEQ ID NO:2141, SEQ ID NO:2142, SEQ ID NO:2143, SEQ ID NO:2144, SEQ ID NO:2145, SEQ ID NO:2146, SEQ ID NO:2147, SEQ ID NO:2148, SEQ ID NO:2149, SEQ ID NO:2150, SEQ ID NO:2151, SEQ ID NO:2152, SEQ ID NO:2153, SEQ ID NO:2154, SEQ ID NO:2155, SEQ ID NO:2156, SEQ ID NO:2157, SEQ ID NO:2158, SEQ ID NO:2159, SEQ ID NO:2160, SEQ ID NO:2161, SEQ ID NO:2162, SEQ ID NO:2163, SEQ ID NO:2164, SEQ ID NO:2165, SEQ ID NO:2166, SEQ ID NO:2167, SEQ ID NO:2168, SEQ ID NO:2169, SEQ ID NO:2170, SEQ ID NO:2171, SEQ ID NO:2172, SEQ ID NO:2173, SEQ ID NO:2174, SEQ ID NO:2175, SEQ ID NO:2176, SEQ ID NO:2177, SEQ ID NO:2178, SEQ ID NO:2179, SEQ ID NO:2180, SEQ ID NO:2181, SEQ ID NO:2182, SEQ ID NO:2183, SEQ ID NO:2184, SEQ ID NO:2185, SEQ ID NO:2186, SEQ ID NO:2187, SEQ ID NO:2188, SEQ ID NO:2189, SEQ ID NO:2190, SEQ ID NO:2191, SEQ ID NO:2192, SEQ ID NO:2193, SEQ ID NO:2194, SEQ ID NO:2195, SEQ ID NO:2196, SEQ ID NO:2197, SEQ ID NO:2198, SEQ ID NO:2199, SEQ ID NO:2200, SEQ ID NO:2201, SEQ ID NO:2202, SEQ ID NO:2203, SEQ ID NO:2204, SEQ ID NO:2205, SEQ ID NO:2206, SEQ ID NO:2207, SEQ ID NO:2208, SEQ ID NO:2209, SEQ ID NO:2210, SEQ ID NO:2211, SEQ ID NO:2212, SEQ ID NO:2213, SEQ ID NO:2214, SEQ ID NO:2215, SEQ ID NO:2216, SEQ ID NO:2217, SEQ ID NO:2218, SEQ ID NO:2219, SEQ ID NO:2220, SEQ ID NO:2221, SEQ ID NO:2222, SEQ ID NO:2223, SEQ ID NO:2224, SEQ ID NO:2225, SEQ ID NO:2226, SEQ ID NO:2227, SEQ ID NO:2228, SEQ ID NO:2229, SEQ ID NO:2230, SEQ ID NO:2231, SEQ ID NO:2232, SEQ ID NO:2233, SEQ ID NO:2234, SEQ ID NO:2235, SEQ ID NO:2236, SEQ ID NO:2237, SEQ ID NO:2238, SEQ ID NO:2239, SEQ ID NO:2240, SEQ ID NO:2241, SEQ ID NO:2242, SEQ ID NO:2243, SEQ ID NO:2244, SEQ ID NO:2245, SEQ ID NO:2246, SEQ ID NO:2247, SEQ ID NO:2248, SEQ ID NO:2249, SEQ ID NO:2250, SEQ ID NO:2251, SEQ ID NO:2252, SEQ ID NO:2253, SEQ ID NO:2254, SEQ ID NO:2255, SEQ ID NO:2256, SEQ ID NO:2257, SEQ ID NO:2258, SEQ ID NO:2259, SEQ ID NO:2260, SEQ ID NO:2261, SEQ ID NO:2262, SEQ ID NO:2263, SEQ ID NO:2264, SEQ ID NO:2265, SEQ ID NO:2266, SEQ ID NO:2267, SEQ ID NO:2268, SEQ ID NO:2269, SEQ ID NO:2270, SEQ ID NO:2271, SEQ ID NO:2272, SEQ ID NO:2273, SEQ ID NO:2274, SEQ ID NO:2275, SEQ ID NO:2276, SEQ ID NO:2277, SEQ ID NO:2278, SEQ ID NO:2279, SEQ ID NO:2280, SEQ ID NO:2281, SEQ ID NO:2282, SEQ ID NO:2283, SEQ ID NO:2284, SEQ ID NO:2285, SEQ ID NO:2286, SEQ ID NO:2287, SEQ ID NO:2288, SEQ ID NO:2289, SEQ ID NO:2290, SEQ ID NO:2291, SEQ ID NO:2292, SEQ ID NO:2293, SEQ ID NO:2294, SEQ ID NO:2295, SEQ ID NO:2296, SEQ ID NO:2297, SEQ ID NO:2298, SEQ ID NO:2299, SEQ ID NO:2300, SEQ ID NO:2301, SEQ ID NO:2302, SEQ ID NO:2303, SEQ ID NO:2304, SEQ ID NO:2305, SEQ ID NO:2306, SEQ ID NO:2307, SEQ ID NO:2308, SEQ ID NO:2309, SEQ ID NO:2310, SEQ ID NO:2311, SEQ ID NO:2312, SEQ ID NO:2313, SEQ ID NO:2314, SEQ ID NO:2315, SEQ ID NO:2316, SEQ ID NO:2317, SEQ ID NO:2318, SEQ ID NO:2319, SEQ ID NO:2320, SEQ ID NO:2321, SEQ ID NO:2322, SEQ ID NO:2323, SEQ ID NO:2324, SEQ ID NO:2325, SEQ ID NO:2326, SEQ ID NO:2327, SEQ ID NO:2328, SEQ ID NO:2329, SEQ ID NO:2330, SEQ ID NO:2331, SEQ ID NO:2332, SEQ ID NO:2333, SEQ ID NO:2334, SEQ ID NO:2335, SEQ ID NO:2336, SEQ ID NO:2337, SEQ ID NO:2338, SEQ ID NO:2339, SEQ ID NO:2340, SEQ ID NO:2341, SEQ ID NO:2342, SEQ ID NO:2343, SEQ ID NO:2344, SEQ ID NO:2345, SEQ ID NO:2346, SEQ ID NO:2347, SEQ ID NO:2348, SEQ ID NO:2349, SEQ ID NO:2350, SEQ ID NO:2351, SEQ ID NO:2352, SEQ ID NO:2353, SEQ ID NO:2354, SEQ ID NO:2355, SEQ ID NO:2356, SEQ ID NO:2357, SEQ ID NO:2358, SEQ ID NO:2359, SEQ ID NO:2360, SEQ ID NO:2361, SEQ ID NO:2362, SEQ ID NO:2363, SEQ ID NO:2364, SEQ ID NO:2365, SEQ ID NO:2366, SEQ ID NO:2367, SEQ ID NO:2368, SEQ ID NO:2369, SEQ ID NO:2370, SEQ ID NO:2371, SEQ ID NO:2372, SEQ ID NO:2373, SEQ ID NO:2374, and SEQ ID NO:2375.

31. The isolated peptide or polypeptide of claim 1, wherein said at least a first isolated coding region comprises an amino acid sequence selected from the group consisting of SEQ ID NO:2376, SEQ ID NO:2377, SEQ ID NO:2378, SEQ ID NO:2379, SEQ ID NO:2380, SEQ ID NO:2381, SEQ ID NO:2382, SEQ ID NO:2383, SEQ ID NO:2384, SEQ ID NO:2385, SEQ ID NO:2386, SEQ ID NO:2387, SEQ ID NO:2388, SEQ ID NO:2389, SEQ ID NO:2390, SEQ ID NO:2391, SEQ ID NO:2392, SEQ ID NO:2393, SEQ ID NO:2394, SEQ ID NO:2395, SEQ ID NO:2396, SEQ ID NO:2397, SEQ ID NO:2398, SEQ ID NO:2399, SEQ ID NO:2400, SEQ ID NO:2401, SEQ ID NO:2402, SEQ ID NO:2403, SEQ ID NO:2404, SEQ ID NO:2405, SEQ ID NO:2406, SEQ ID NO:2407, SEQ ID NO:2408, SEQ ID NO:2409, SEQ ID NO:2410, SEQ ID NO:2411, SEQ ID NO:2412, SEQ ID NO:2413, SEQ ID NO:2414, SEQ ID NO:2415, SEQ ID NO:2416, SEQ ID NO:2417, SEQ ID NO:2418, SEQ ID NO:2419, SEQ ID NO:2420, SEQ ID NO:2421, SEQ ID NO:2422, SEQ ID NO:2423, SEQ ID NO:2424, SEQ ID NO:2425, SEQ ID NO:2426, SEQ ID NO:2427, SEQ ID NO:2428, SEQ ID NO:2429, SEQ ID NO:2430, SEQ ID NO:2431, SEQ ID NO:2432, SEQ ID NO:2433, SEQ ID NO:2434, SEQ ID NO:2435, SEQ ID NO:2436, SEQ ID NO:2437, SEQ ID NO:2438, SEQ ID NO:2439, SEQ ID NO:2440, SEQ ID NO:2441, SEQ ID NO:2442, SEQ ID NO:2443, SEQ ID NO:2444, SEQ ID NO:2445, SEQ ID NO:2446, SEQ ID NO:2447, SEQ ID NO:2448, SEQ ID NO:2449, SEQ ID NO:2450, SEQ ID NO:2451, SEQ ID NO:2452, SEQ ID NO:2453, SEQ ID NO:2454, SEQ ID NO:2455, SEQ ID NO:2456, SEQ ID NO:2457, SEQ ID NO:2458, SEQ ID NO:2459, SEQ ID NO:2460, SEQ ID NO:2461, SEQ ID NO:2462, SEQ ID NO:2463, SEQ ID NO:2464, SEQ ID NO:2465, SEQ ID NO:2466, SEQ ID NO:2467, SEQ ID NO:2468, SEQ ID NO:2469, SEQ ID NO:2470, SEQ ID NO:2471, SEQ ID NO:2472, SEQ ID NO:2473, SEQ ID NO:2474, SEQ ID NO:2475, SEQ ID NO:2476, SEQ ID NO:2477, SEQ ID NO:2478, SEQ ID NO:2479, SEQ ID NO:2480, SEQ ID NO:2481, SEQ ID NO:2482, SEQ ID NO:2483, SEQ ID NO:2484, SEQ ID NO:2485, SEQ ID NO:2486, SEQ ID NO:2487, SEQ ID NO:2488, SEQ ID NO:2489, SEQ ID NO:2490, SEQ ID NO:2491, SEQ ID NO:2492, SEQ ID NO:2493, SEQ ID NO:2494, SEQ ID NO:2495, SEQ ID NO:2496, SEQ ID NO:2497, SEQ ID NO:2498, SEQ ID NO:2499, SEQ ID NO:2500, SEQ ID NO:2501, SEQ ID NO:2502, SEQ ID NO:2503, SEQ ID NO:2504, SEQ ID NO:2505, SEQ ID NO:2506, SEQ ID NO:2507, SEQ ID NO:2508, SEQ ID NO:2509, SEQ ID NO:2510, SEQ ID NO:2511, SEQ ID NO:2512, SEQ ID NO:2513, SEQ ID NO:2514, SEQ ID NO:2515, SEQ ID NO:2516, SEQ ID NO:2517, SEQ ID NO:2518 SEQ ID NO:2519, SEQ ID NO:2520, SEQ ID NO:2521, SEQ ID NO:2522, SEQ ID NO:2523, SEQ ID NO:2524, SEQ ID NO:2525, SEQ ID NO:2526, SEQ ID NO:2527, SEQ ID NO:2528, SEQ ID NO:2529, SEQ ID NO:2530, SEQ ID NO:2531, and SEQ ID NO:2532.

32. The isolated peptide or polypeptide of claim 1, wherein said amino acid sequence consists essentially of the sequence of any one of SEQ ID NO:669 to SEQ ID NO:2532.

33. The isolated peptide or polypeptide of claim 32, wherein said amino acid sequence consists of the sequence of any one of SEQ ID NO:669 to SEQ ID NO:2532.

34. The isolated peptide or polypeptide of claim 1, wherein said at least a first coding region comprises an amino acid sequence that is encoded by an at least 100 contiguous nucleotide sequence from any one of SEQ ID NO:1 to SEQ ID NO:668.

35. The isolated peptide or polypeptide of claim 34, wherein said at least a first coding region comprises an amino acid sequence that is encoded by an at least 200 contiguous nucleotide sequence from any one of SEQ ID NO:1 to SEQ ID NO:668.

36. The isolated peptide or polypeptide of claim 35, wherein said at least a first coding region comprises an amino acid sequence that is encoded by a nucleic acid segment comprising the nucleotide sequence of any one of SEQ ID NO:1 to SEQ ID NO:668.

37. The isolated peptide or polypeptide of claim 36, wherein said at least a first coding region comprises an amino acid sequence that is encoded by a nucleic acid segment that consists essentially of the nucleotide sequence of any one of SEQ ID NO:1 to SEQ ID NO:668.

38. The isolated peptide or polypeptide of claim 37, wherein said at least a first coding region comprises an amino acid sequence that is encoded by a nucleic acid segment that consists of the nucleotide sequence of any one of SEQ ID NO:1 to SEQ ID NO:668.

39. A composition comprising the isolated peptide or polypeptide of claim 1.

40. The composition according to claim 39, further comprising a pharmaceutically-acceptable diluent.

41. An isolated polynucleotide, comprising at least a first nucleic acid segment that (a) encodes the isolated peptide or polypeptide of claim 1; or (b) comprises an at least 100 contiguous nucleotide sequence from any one of SEQ ID NO:1 to SEQ ID NO:668.

42. The isolated polynucleotide of claim 41, comprising at least a first nucleic acid segment that encodes the isolated peptide or polypeptide of claim 1.

43. The isolated polynucleotide of claim 41, comprising at least a first nucleic acid segment that comprises an at least 25 contiguous nucleotide sequence from any one of SEQ ID NO:1 to SEQ ID NO:668.

44. The isolated polynucleotide of claim 43, comprising at least a first nucleic acid segment that comprises an at least 50 contiguous nucleotide sequence from any one of SEQ ID NO:1 to SEQ ID NO:668.

45. The isolated polynucleotide of claim 44, comprising at least a first nucleic acid segment that comprises an at least 75 contiguous nucleotide sequence from any one of SEQ ID NO:1 to SEQ ID NO:668.

46. The isolated polynucleotide of claim 45, comprising at least a first nucleic acid segment that comprises an at least 100 contiguous nucleotide sequence from any one of SEQ ID NO:1 to SEQ ID NO:668.

47. The isolated polynucleotide of claim 46, wherein said at least a first nucleic acid segment comprises a nucleotide sequence selected from the group consisting of SEQ ID NO:1, SEQ ID NO:2, SEQ ID NO:3, SEQ ID NO:4, SEQ ID NO:5, SEQ ID NO:6, SEQ ID NO:7, SEQ ID NO:8, SEQ ID NO:9, SEQ ID NO:10, SEQ ID NO:11, SEQ ID NO:12, SEQ ID NO:13, SEQ ID NO:14, SEQ ID NO:15, SEQ ID NO:16, SEQ ID NO:17, SEQ ID NO:18, SEQ ID NO:19, SEQ ID NO:20, SEQ ID NO:21, SEQ ID NO:22, SEQ ID NO:23, SEQ ID NO:24, SEQ ID NO:25, SEQ ID NO:26, SEQ ID NO:27, SEQ ID NO:28, SEQ ID NO:29, SEQ ID NO:30, SEQ ID NO:31, SEQ ID NO:32, SEQ ID NO:33, SEQ ID NO:34, SEQ ID NO:35, SEQ ID NO:36, SEQ ID NO:37, SEQ ID NO:38, SEQ ID NO:39, SEQ ID NO:40, SEQ ID NO:41, SEQ ID NO:42, SEQ ID NO:43, SEQ ID NO:44, SEQ ID NO:45, SEQ ID NO:46, SEQ ID NO:47, SEQ ID NO:48, SEQ ID NO:49, SEQ ID NO:50, SEQ ID NO:51, SEQ ID NO:52, SEQ ID NO:53, SEQ ID NO:54, SEQ ID NO:55, SEQ ID NO:56, SEQ ID NO:57, SEQ ID NO:58, SEQ ID NO:59, SEQ ID NO:60, SEQ ID NO:61, SEQ ID NO:62, SEQ ID NO:63, SEQ ID NO:64, SEQ ID NO:65, SEQ ID NO:66, SEQ ID NO:67, SEQ ID NO:68, SEQ ID NO:69, SEQ ID NO:70, SEQ ID NO:71, SEQ ID NO:72, SEQ ID NO:73, SEQ ID NO:74, SEQ ID NO:75, SEQ ID NO:76, SEQ ID NO:77, SEQ ID NO:78, SEQ ID NO:79, SEQ ID NO:80, SEQ ID NO:81, SEQ ID NO:82, SEQ ID NO:83, SEQ ID NO:84, SEQ ID NO:85, SEQ ID NO:86, SEQ ID NO:87, SEQ ID NO:88, SEQ ID NO:89, SEQ ID NO:90, SEQ ID NO:91, SEQ ID NO:92, SEQ ID NO:93, SEQ ID NO:94, SEQ ID NO:95, SEQ ID NO:96, SEQ ID NO:97, SEQ ID NO:98, SEQ ID NO:99, SEQ ID NO:100, SEQ ID NO:101, SEQ ID NO:102, SEQ ID NO:103, SEQ ID NO:104, SEQ ID NO:105, SEQ ID NO:106, SEQ ID NO:107, SEQ ID NO:108, SEQ ID NO:109, SEQ ID NO:110 , SEQ ID NO:111, SEQ ID NO:112, SEQ ID NO:113, SEQ ID NO:114, SEQ ID NO:115, SEQ ID NO:116, SEQ ID NO:117, SEQ ID NO:118, SEQ ID NO:119, SEQ ID NO:120, SEQ ID NO:121, SEQ ID NO:122, SEQ ID NO:123, SEQ ID NO:124, SEQ ID NO:125, SEQ ID NO:126, SEQ ID NO:127, SEQ ID NO:128, SEQ ID NO:129, SEQ ID NO:130, SEQ ID NO:131, SEQ ID NO:132, SEQ ID NO:133, SEQ ID NO:134, SEQ ID NO:135, SEQ ID NO:136, SEQ ID NO:137, SEQ ID NO:138, SEQ ID NO:139, SEQ ID NO:140, SEQ ID NO:141, SEQ ID NO:142, SEQ ID NO:143, SEQ ID NO:144, SEQ ID NO:145, SEQ ID NO:146, SEQ ID NO:147, SEQ ID NO:148, SEQ ID NO:149, SEQ ID NO:150, SEQ ID NO:151, SEQ ID NO:152, SEQ ID NO:153, SEQ ID NO:154, SEQ ID NO:155, SEQ ID NO:156, SEQ ID NO:157, SEQ ID NO:158, SEQ ID NO:159, SEQ ID NO:160, SEQ ID NO:161, SEQ ID NO:162, SEQ ID NO:163, SEQ ID NO:164, SEQ ID NO:165, SEQ ID NO:166, SEQ ID NO:167, SEQ ID NO:168, SEQ ID NO:169, SEQ ID NO:170, SEQ ID NO:171, SEQ ID NO:172, SEQ ID NO:173, SEQ ID NO:174, SEQ ID NO:175, SEQ ID NO:176, SEQ ID NO:177, SEQ ID NO:178, SEQ ID NO:179, SEQ ID NO:180, SEQ ID NO:181, SEQ ID NO:182, SEQ ID NO:183, SEQ ID NO:184, SEQ ID NO:185, SEQ ID NO:186, SEQ ID NO:187, SEQ ID NO:188, SEQ ID NO:189, SEQ ID NO:190, SEQ ID NO:191, SEQ ID NO:192 SEQ ID NO:193, SEQ ID NO:194, SEQ ID NO:195, SEQ ID NO:196, SEQ ID NO:197, SEQ ID NO:198, SEQ ID NO:199, SEQ ID NO:200, SEQ ID NO:201, SEQ ID NO:202, SEQ ID NO:203, SEQ ID NO:204, SEQ ID NO:205, SEQ ID NO:206, SEQ ID NO:207, SEQ ID NO:208, SEQ ID NO:209, SEQ ID NO:210, SEQ ID NO:211, SEQ ID NO:212, SEQ ID NO:213, SEQ ID NO:214, SEQ ID NO:215, SEQ ID NO:216, SEQ ID NO:217, SEQ ID NO:218, SEQ ID NO:219, SEQ ID NO:220, SEQ ID NO:221, SEQ ID NO:222, SEQ ID NO:223, SEQ ID NO:224, SEQ ID NO:225, SEQ ID NO:226, SEQ ID NO:227, SEQ ID NO:228, SEQ ID NO:229, SEQ ID NO:230, SEQ ID NO:231, SEQ ID NO:232, SEQ ID NO:233, SEQ ID NO:234, SEQ ID NO:235, SEQ ID NO:236, SEQ ID NO:237, SEQ ID NO:238, SEQ ID NO:239, SEQ ID NO:240, SEQ ID NO:241, SEQ ID NO:242, SEQ ID NO:243, SEQ ID NO:244, SEQ ID NO:245, SEQ ID NO:246, SEQ ID NO:247, SEQ ID NO:248, SEQ ID NO:249, SEQ ID NO:250, SEQ ID NO:251, SEQ ID NO:252, SEQ ID NO:253, SEQ ID NO:254, SEQ ID NO:255, SEQ ID NO:256, SEQ ID NO:257, SEQ ID NO:258, SEQ ID NO:259, SEQ ID NO:260, SEQ ID NO:261, SEQ ID NO:262, SEQ ID NO:263, SEQ ID NO:264, SEQ ID NO:265, SEQ ID NO:266, SEQ ID NO:267, SEQ ID NO:268, SEQ ID NO:269, SEQ ID NO:270, SEQ ID NO:271, SEQ ID NO:272, SEQ ID NO:273, SEQ ID NO:274, SEQ ID NO:275, SEQ ID NO:276, SEQ ID NO:277, and SEQ ID NO:278.

48. The isolated polynucleotide of claim 46, wherein said at least a first nucleic acid segment comprises a nucleotide sequence selected from the group consisting of SEQ ID NO:279, SEQ ID NO:280, SEQ ID NO:281, SEQ ID NO:282, SEQ ID NO:283, SEQ ID NO:284, SEQ ID NO:285, SEQ ID NO:286, SEQ ID NO:287, SEQ ID NO:288, SEQ ID NO:289, SEQ ID NO:290, SEQ ID NO:291, SEQ ID NO:292, SEQ ID NO:293, SEQ ID NO:294, SEQ ID NO:295, SEQ ID NO:296, SEQ ID NO:297, SEQ ID NO:298, SEQ ID NO:299, SEQ ID NO:300, SEQ ID NO:301, SEQ ID NO:302, SEQ ID NO:303, SEQ ID NO:304, SEQ ID NO:305, SEQ ID NO:306, SEQ ID NO:307, SEQ ID NO:308, SEQ ID NO:309, SEQ ID NO:310, SEQ ID NO:311, SEQ ID NO:312, SEQ ID NO:313, SEQ ID NO:314, SEQ ID NO:315, SEQ ID NO:316, SEQ ID NO:317, SEQ ID NO:318, SEQ ID NO:319, SEQ ID NO:320, SEQ ID NO:321, SEQ ID NO:322, SEQ ID NO:323, SEQ ID NO:324, SEQ ID NO:325, SEQ ID NO:326, SEQ ID NO:327, SEQ ID NO:328, SEQ ID NO:329, SEQ ID NO:330, SEQ ID NO:331, SEQ ID NO:332, SEQ ID NO:333, SEQ ID NO:334, SEQ ID NO:335, SEQ ID NO:336, SEQ ID NO:337, SEQ ID NO:338, SEQ ID NO:339, SEQ ID NO:340, SEQ ID NO:341, SEQ ID NO:342 , SEQ ID NO:343, SEQ ID NO:344, SEQ ID NO:345, SEQ ID NO:346, SEQ ID NO:347, SEQ ID NO:348, SEQ ID NO:349, SEQ ID NO:350, SEQ ID NO:351, SEQ ID NO:352, SEQ ID NO:353, SEQ ID NO:354, SEQ ID NO:355, SEQ ID NO:356, SEQ ID NO:357, SEQ ID NO:358, SEQ ID NO:359, SEQ ID NO:360, SEQ ID NO:361, SEQ ID NO:362, SEQ ID NO:363, SEQ ID NO:364, SEQ ID NO:365, SEQ ID NO:366, SEQ ID NO:367, SEQ ID NO:368, SEQ ID NO:369, SEQ ID NO:370, SEQ ID NO:371, SEQ ID NO:372, SEQ ID NO:373, SEQ ID NO:374, SEQ ID NO:375, SEQ ID NO:376, SEQ ID NO:377, SEQ ID NO:378, SEQ ID NO:379, SEQ ID NO:380, SEQ ID NO:381, SEQ ID NO:382, SEQ ID NO:383, SEQ ID NO:384, SEQ ID NO:385, SEQ ID NO:386, SEQ ID NO:387, SEQ ID NO:388, SEQ ID NO:389, SEQ ID NO:390, SEQ ID NO:391, SEQ ID NO:392, SEQ ID NO:393, SEQ ID NO:394, SEQ ID NO:395, SEQ ID NO:396, SEQ ID NO:397, SEQ ID NO:398, SEQ ID NO:399, SEQ ID NO:400, SEQ ID NO:401, SEQ ID NO:402, SEQ ID NO:403, SEQ ID NO:404, SEQ ID NO:405, SEQ ID NO:406, SEQ ID NO:407, SEQ ID NO:4083, SEQ ID NO:409, SEQ ID NO:410, SEQ ID NO:411, SEQ ID NO:412, SEQ ID NO:413, SEQ ID NO:414, SEQ ID NO:415, SEQ ID NO:416, SEQ ID NO:417, SEQ ID NO:418, SEQ ID NO:419, SEQ ID NO:420, SEQ ID NO:421, SEQ ID NO:422, SEQ ID NO:423, SEQ ID NO:424, SEQ ID NO:425, SEQ ID NO:426, SEQ ID NO:427, SEQ ID NO:428, SEQ ID NO:429, SEQ ID NO:430, SEQ ID NO:431, SEQ ID NO:432, SEQ ID NO:433, SEQ ID NO:434, SEQ ID NO:435, and SEQ ID NO:436.

49. The isolated polynucleotide of claim 46, wherein said at least a first nucleic acid segment comprises a nucleotide sequence selected from the group consisting of SEQ ID NO:437, SEQ ID NO:438, SEQ ID NO:439, SEQ ID NO:440, SEQ ID NO:441, SEQ ID NO:442, SEQ ID NO:443, SEQ ID NO:444, SEQ ID NO:445, SEQ ID NO:446, SEQ ID NO:447, SEQ ID NO:448, SEQ ID NO:449, SEQ ID NO:450, SEQ ID NO:451, SEQ ID NO:452, SEQ ID NO:453, SEQ ID NO:454, SEQ ID NO:455, SEQ ID NO:456, SEQ ID NO:457, SEQ ID NO:458, SEQ ID NO:459, SEQ ID NO:460, SEQ ID NO:461, SEQ ID NO:462, SEQ ID NO:463, SEQ ID NO:464, SEQ ID NO:465, SEQ ID NO:466, SEQ ID NO:467, SEQ ID NO:468, SEQ ID NO:469, SEQ ID NO:470, SEQ ID NO:471, SEQ ID NO:472, SEQ ID NO:473, SEQ ID NO:474, SEQ ID NO:475, SEQ ID NO:476, SEQ ID NO:477, SEQ ID NO:478, SEQ ID NO:479, SEQ ID NO:480, SEQ ID NO:481, SEQ ID NO:482, SEQ ID NO:483, SEQ ID NO:484, SEQ ID NO:485, SEQ ID NO:486, SEQ ID NO:487, SEQ ID NO:488, SEQ ID NO:489, SEQ ID NO:490, SEQ ID NO:491, SEQ ID NO:492, SEQ ID NO:493, SEQ ID NO:494, SEQ ID NO:495, SEQ ID NO:496, SEQ ID NO:497, SEQ ID NO:498, SEQ ID NO:499, SEQ ID NO:500, SEQ ID NO:501, SEQ ID NO:502, SEQ ID NO:503, SEQ ID NO:504, SEQ ID NO:505, SEQ ID NO:506, SEQ ID NO:507, SEQ ID NO:508, SEQ ID NO:509, SEQ ID NO:510, SEQ ID NO:511, SEQ ID NO:512, SEQ ID NO:513, SEQ ID NO:514, SEQ ID NO:515, SEQ ID NO:516, SEQ ID NO:517, SEQ ID NO:518, SEQ ID NO:519, SEQ ID NO:520, SEQ ID NO:521, SEQ ID NO:522, SEQ ID NO:523, SEQ ID NO:524, SEQ ID NO:525, SEQ ID NO:526, SEQ ID NO:527, and SEQ ID NO:528.

50. The isolated polynucleotide of claim 46, wherein said at least a first nucleic acid segment comprises a nucleotide sequence selected from the group consisting of SEQ ID NO:529, SEQ ID NO:530, SEQ ID NO:531, SEQ ID NO:532, SEQ ID NO:533, SEQ ID NO:534, SEQ ID NO:535, SEQ ID NO:536, SEQ ID NO:537, SEQ ID NO:538, SEQ ID NO:539, SEQ ID NO:540, SEQ ID NO:541, SEQ ID NO:542, SEQ ID NO:543, SEQ ID NO:544, SEQ ID NO:545, SEQ ID NO:546, SEQ ID NO:547, SEQ ID NO:548, SEQ ID NO:549, SEQ ID NO:550, SEQ ID NO:551, SEQ ID NO:552, SEQ ID NO:553, SEQ ID NO:554, SEQ ID NO:555, SEQ ID NO:556, SEQ ID NO:557, SEQ ID NO:558, SEQ ID NO:559, SEQ ID NO:560, SEQ ID NO:561, SEQ ID NO:562, SEQ ID NO:563, SEQ ID NO:564, SEQ ID NO:565, SEQ ID NO:566, SEQ ID NO:567, SEQ ID NO:568, SEQ ID NO:569, SEQ ID NO:570, SEQ ID NO:571, SEQ ID NO:572, SEQ ID NO:573, SEQ ID NO:574, SEQ ID NO:575, SEQ ID NO:576, SEQ ID NO:577, SEQ ID NO:578, SEQ ID NO:579, SEQ ID NO:580, SEQ ID NO:581, SEQ ID NO:582, SEQ ID NO:583, SEQ ID NO:584, SEQ ID NO:585, SEQ ID NO:586, SEQ ID NO:587, SEQ ID NO:588, SEQ ID NO:589, SEQ ID NO:590, SEQ ID NO:591, SEQ ID NO:592, SEQ ID NO:593, SEQ ID NO:594, SEQ ID NO:595, SEQ ID NO:596, SEQ ID NO:597, SEQ ID NO:598, SEQ ID NO:599, SEQ ID NO:600, SEQ ID NO:601, SEQ ID NO:602, SEQ ID NO:603, SEQ ID NO:604, SEQ ID NO:605, SEQ ID NO:606, SEQ ID NO:607, SEQ ID NO:608, SEQ ID NO:609, and SEQ ID NO:610.

51. The isolated polynucleotide of claim 46, wherein said at least a first nucleic acid segment comprises a nucleotide sequence selected from the group consisting of SEQ ID NO:611, SEQ ID NO:612, SEQ ID NO:613, SEQ ID NO:614, SEQ ID NO:615, SEQ ID NO:616, SEQ ID NO:617, SEQ ID NO:618, SEQ ID NO:619, SEQ ID NO:620, SEQ ID NO:621, SEQ ID NO:622, SEQ ID NO:623, SEQ ID NO:624, SEQ ID NO:625, SEQ ID NO:626, SEQ ID NO:627, SEQ ID NO:628, SEQ ID NO:629, SEQ ID NO:630, SEQ ID NO:631, SEQ ID NO:632, SEQ ID NO:633, SEQ ID NO:634, SEQ ID NO:635, SEQ ID NO:636, SEQ ID NO:637, SEQ ID NO:638, SEQ ID NO:639, SEQ ID NO:640, SEQ ID NO:641, SEQ ID NO:642, SEQ ID NO:643, SEQ ID NO:644, SEQ ID NO:645, SEQ ID NO:646, SEQ ID NO:647, SEQ ID NO:648, SEQ ID NO:649, SEQ ID NO:650, SEQ ID NO:651, SEQ ID NO:652, SEQ ID NO:653, SEQ ID NO:654, SEQ ID NO:655, SEQ ID NO:656, SEQ ID NO:657, SEQ ID NO:658, SEQ ID NO:659, SEQ ID NO:660, SEQ ID NO:661, SEQ ID
NO:662, SEQ ID NO:663, and SEQ ID NO:664.

52. The isolated polynucleotide of claim 41, wherein said at least a first nucleic acid segment is operably positioned under the control of at least a first heterologous promoter.

53. The isolated polynucleotide of claim 41, further comprising at least a second nucleic acid segment that encodes at least a second isolated peptide or polypeptide.

54. The isolated polynucleotide of claim 53, wherein said polynucleotide comprises said at least a first isolated nucleic acid segment operably attached, in frame, to said at least a second isolated nucleic acid segment, said polynucleotide encoding a fusion protein in which said first isolated peptide or polypeptide is linked to said second isolated peptide or polypeptide.

55. The isolated polynucleotide of claim 54, wherein said at least a second isolated nucleic acid segment encodes: (a) an adjuvant peptide or polypeptide, (b) an immunostimulant peptide or polypeptide, or (c) at least a second distinct peptide or polypeptide that comprises an amino acid sequence that is at least about 90% identical to the amino acid sequence of any one of SEQ ID NO:669 to SEQ ID NO:2532.

56. The isolated polynucleotide of claim 41, wherein said at least a first nucleic acid segment is comprised within a vector.

57. The isolated polynucleotide of claim 41, wherein said polynucleotide is comprised within a host cell.

58. A vector comprising the isolated polynucleotide of claim 41.

59. The vector of claim 58, wherein said vector is a plasmid or viral vector.

60. An isolated host cell comprising the isolated polynucleotide of claim 41, or the vector of claim 58.

61. The isolated host cell of claim 60, wherein said host cell is an isolated human blood or bone marrow cell.

62. The isolated host cell of claim 61, wherein said human blood or bone marrow cell is isolated from a patient having, suspected of having, or at risk for developing a hematological malignancy selected from the group consisting of Hodgkin's lymphoma, follicular lymphoma, B cell-type non-Hodgkin's lymphoma, T cell-type non-Hodgkin's lymphoma, lymphoma, and chronic lymphocytic leukemia.

63. An isolated antigen-presenting cell that expresses the peptide or polypeptide of claim 1, wherein said cell is obtained from a patient having, suspected of having, or at risk for developing a hematological malignancy selected from the group consisting of leukemia and lymphoma.

64. A plurality of isolated T cells that specifically react with the peptide or polypeptide of claim 1, wherein said cells are obtained from a patient having, suspected of having, or at risk for developing a hematological malignancy selected from the group consisting of leukemia and lymphoma.

65. The plurality of isolated T cells of claim 64, wherein said cells are stimulated or expanded by contacting said cells with the peptide or polypeptide of claim 1.

66. The plurality of isolated T cells of claim 65, wherein said cells are cloned prior to expansion.

67. The plurality of isolated T cells of claim 64, wherein said cells are obtained from bone marrow, a bone marrow fraction, peripheral blood, or a peripheral blood fraction of a patient having, suspected of having, or at risk for developing a hematological malignancy selected from the group consisting of leukemia and lymphoma.

68. A composition comprising the isolated polynucleotide of claim 41, the vector of claim 58, the isolated host cell of claim 60, the isolated antigen-presenting cell of claim 63, or the plurality of isolated T cells of claim 64.

69. The composition of claim 68, further comprising a pharmaceutically-acceptable diluent.

70. The composition of claim 69, wherein said composition is formulated for parenteral, intravenous, intraarterial, intraosseus, intrathecal, intraperitoneal, subcutaneous, intranasal, transdermal, sublingual, or oral administration.

71. The composition of claim 71, further comprising at least a first immunostimulant or at least a first adjuvant.

72. The composition of claim 71, further comprising at least a first immunostimulant or at least a first adjuvant selected from the group consisting of Montanide ISA50, Seppic Montanide ISA720, a cytokine, a microsphere, a dimethyl dioctadecyl ammonium bromide adjuvant, AS-1, AS-2, Ribi Adjuvant, QS21, saponin, microfluidized Syntex adjuvant, MV, ddMV, an immune stimulating complex and an inactivated toxin.

73. The composition of claim 68, further comprising at least a first detection reagent.

74. The composition of claim 68, further comprising at least a first therapeutic agent.

75. The composition of claim 68, further comprising at least a first anti-cancer agent used in the treatment of Hodgkin's lymphoma, follicular lymphoma, B cell-type non-Hodgkin's lymphoma, T cell-type non-Hodgkin's lymphoma, lymphoma, or chronic lymphocytic leukemia.

76. A composition comprising: (a) at least a first isolated peptide or polypeptide comprising at least a first coding region that comprises an amino acid sequence that is at least about 90% identical to the amino acid sequence of any one of SEQ ID NO:669 to SEQ ID NO:2532; and (b) at least a second distinct isolated peptide or polypeptide comprising at least a first coding region that comprises an amino acid sequence that is at least about 90% identical to the amino acid sequence of any one of SEQ ID NO:669 to SEQ ID NO:2532.

77. The composition of claim 76, further comprising at least a third distinct isolated peptide or polypeptide comprising at least a first coding region that comprises an amino acid sequence that is at least about 90% identical to the amino acid sequence of any one of SEQ ID NO:669 to SEQ ID NO:2532.

78. A composition comprising: (a) at least a first isolated polynucleotide that encodes a first isolated peptide or polypeptide comprising at least a first coding region that comprises an amino acid sequence that is at least about 90% identical to the amino acid sequence of any one of SEQ ID NO:669 to SEQ ID NO:2532; and (b) at least a second distinct isolated polynucleotide that encodes a second distinct isolated peptide or polypeptide comprising at least a first coding region that comprises an amino acid sequence that is at least about 90% identical to the amino acid sequence of any one of SEQ ID NO:669 to SEQ ID NO:2532.

79. The composition of claim 78, further comprising at least a third distinct isolated polynucleotide that encodes a third distinct isolated peptide or polypeptide comprising at least a first coding region that comprises an amino acid sequence that is at least about 90% identical to the amino acid sequence of any one of SEQ ID NO:669 to SEQ ID NO:2532.

80. A composition comprising: (a) at least a first isolated polynucleotide that encodes a first isolated peptide or polypeptide comprising at least a first coding region that comprises an amino acid sequence that is at least about 90% identical to the amino acid sequence of any one of SEQ ID NO:669 to SEQ ID NO:2532; and (b) at least a second distinct isolated peptide or polypeptide comprising at least a first coding region that comprises an amino acid sequence that is at least about 90% identical to the amino acid sequence of any one of SEQ ID NO:669 to SEQ ID NO:2532.

81. A hybridoma cell line that produces a monoclonal antibody having immunospecificity for the peptide or polypeptide of claim 1.

82. An isolated antibody, or an antigen-binding fragment thereof, that has immunospecificity for a peptide or polypeptide consisting essentially of the sequence of any one of SEQ ID NO:669 to SEQ ID NO:2532.

83. The antibody of claim 82, wherein said antigen-binding fragment comprises a light chain variable region, a heavy-chain variable region, a Fab fragment, a F(ab)₂ fragment, an Fv fragment, an scFv fragment, or an antigen-binding fragment of said antibody.

84. A kit comprising: (a) the peptide or polypeptide of claim 1, the polynucleotide of claim 41, the vector of claim 58, the host cell of claim 60, the antigen presenting cell of claim 63, the plurality of T cells of claim 64, the composition of claim 76, the composition of claim 78, the composition of claim 80, the hybridoma cell line of claim 81, or the antibody or antigen binding fragment of claim 82; and (b) instructions for using said kit in the diagnosis, detection, or treatment of at least a first hematological malignancy selected from the group consisting of Hodgkin's lymphoma, follicular lymphoma, B cell-type non-Hodgkin's lymphoma, T cell-type non-Hodgkin's lymphoma, lymphoma, and chronic lymphocytic leukemia.

85. The kit of claim 84, wherein said kit further comprises a therapeutically effective amount of at least a second anti-cancer agent.

86. A method of generating an immune response in an animal, comprising providing to said animal an effective amount of the peptide or polypeptide of claim 1, the polynucleotide of claim 41, the vector of claim 58, the host cell of claim 60, the antigen presenting cell of claim 63, or the plurality of T cells of claim 64.

87. A method of generating a T-cell response in an animal, comprising providing to said animal an effective amount of the peptide or polypeptide of claim 1, the polynucleotide of claim 41, the vector of claim 58, the host cell of claim 60, or the antigen presenting cell of claim 63.

88. The method of claim 86 or 87, wherein said animal is a human having, suspected of having, or at risk for developing a hematological malignancy selected from the group consisting of Hodgkin's lymphoma, follicular lymphoma, B cell-type non-Hodgkin's lymphoma, T cell-type non-Hodgkin's lymphoma, lymphoma, and chronic lymphocytic leukemia.

89. A method of assessing the risk of a human patient in developing a hematological malignancy selected from the group consisting of Hodgkin's lymphoma, follicular lymphoma, B cell-type non-Hodgkin's lymphoma, T cell-type non-Hodgkin's lymphoma, and lymphoma; said method comprising detecting the presence of the peptide or polypeptide of claim 1, the polynucleotide of claim 41, or the antibody of claim 82, in a clinical sample obtained from said patient, wherein an increased level of said peptide, polypeptide, polynucleotide, or antibody relative to an unaffected human is indicative of an increased risk for developing said hematological malignancy.

90. A method of detecting a Hodgkin's lymphoma hematological malignancy-related polypeptide, polynucleotide, antibody, or an antigen binding fragment thereof, or in a biological sample or an animal cell said method comprising, contacting a sample or a cell suspected of containing a Hodgkin's lymphoma hematological malignancy with: (a) a labeled peptide or polypeptide according to claim 12 or 27, (b) a labeled antibody, or a labeled antigen binding fragment thereof, that is immunospecific for the peptide or polypeptide of claim 12 or 27, (c) a labeled polynucleotide according to claim 47, or (d) a labeled polynucleotide that comprises the sequence of any of one SEQ ID NO:665 to SEQ ID NO:668, or SEQ ID NO:2533 through SEQ ID NO:9597, under conditions effective and for a time sufficient to allow immunocomplexes or specific hybridization complexes to form, wherein the presence of labeled immunocomplexes or labeled hybridization complexes is indicative of the presence of said Hodgkin's lymphoma hematological malignancy-related polypeptide, polynucleotide, antibody, or antigen binding fragment in said sample or said cell.

91. A method of detecting a follicular lymphoma hematological malignancy-related polypeptide, polynucleotide, antibody, or an antigen binding fragment thereof, or in a biological sample or an animal cell said method comprising, contacting a sample or a cell suspected of containing a follicular lymphoma hematological malignancy with: (a) a labeled peptide or polypeptide according to claim 15 or 28, (b) a labeled antibody, or a labeled antigen binding fragment thereof, that is immunospecific for the peptide or polypeptide of claim 15 or 28, (c) a labeled polynucleotide according to claim 48, or (d) a labeled polynucleotide that comprises the sequence of any of one SEQ ID NO:665 to SEQ ID NO:668, or SEQ ID NO:2533 through SEQ ID NO:9597, under conditions effective and for a time sufficient to allow immunocomplexes or specific hybridization complexes to form, wherein the presence of labeled immunocomplexes or labeled hybridization complexes is indicative of the presence of said follicular lymphoma hematological malignancy-related polypeptide, polynucleotide, antibody, or antigen binding fragment in said sample or said cell.

92. A method of detecting a B cell non-Hodgkin's lymphoma hematological malignancy-related polypeptide, polynucleotide, antibody, or an antigen binding fragment thereof, or in a biological sample or an animal cell said method comprising, contacting a sample or a cell suspected of containing a B cell non-Hodgkin's lymphoma hematological malignancy with: (a) a labeled peptide or polypeptide according to claim 18 or 29, (b) a labeled antibody, or a labeled antigen binding fragment thereof, that is immunospecific for the peptide or polypeptide of claim 18 or 29, (c) a labeled polynucleotide according to claim 49, or (d) a labeled polynucleotide that comprises the sequence of any of one SEQ ID NO:665 to SEQ ID NO:668, or SEQ ID NO:2533 through SEQ ID NO:9597, under conditions effective and for a time sufficient to allow immunocomplexes or specific hybridization complexes to form, wherein the presence of labeled immunocomplexes or labeled hybridization complexes is indicative of the presence of said B cell non-Hodgkin's lymphoma hematological malignancy-related polypeptide, polynucleotide, antibody, or antigen binding fragment in said sample or said cell.

93. A method of detecting a T cell non-Hodgkin's lymphoma hematological malignancy-related polypeptide, polynucleotide, antibody, or an antigen binding fragment thereof, or in a biological sample or an animal cell said method comprising, contacting a sample or a cell suspected of containing a T cell non-Hodgkin's lymphoma hematological malignancy with: (a) a labeled peptide or polypeptide according to claim 21 or 30, (b) a labeled antibody, or a labeled antigen binding fragment thereof, that is immunospecific for the peptide or polypeptide of claim 21 or 30, (c) a labeled polynucleotide according to claim 50, or (d) a labeled polynucleotide that comprises the sequence of any of one SEQ ID NO:665 to SEQ ID NO:668, or SEQ ID NO:2533 through SEQ ID NO:9597, under conditions effective and for a time sufficient to allow immunocomplexes or specific hybridization complexes to form, wherein the presence of labeled immunocomplexes or labeled hybridization complexes is indicative of the presence of said T cell non-Hodgkin's lymphoma hematological malignancy-related polypeptide, polynucleotide, antibody, or antigen binding fragment in said sample or said cell.

94. A method of detecting a lymphoma-related malignancy polypeptide, polynucleotide, antibody, or an antigen binding fragment thereof, or in a biological sample or an animal cell said method comprising, contacting a sample or a cell suspected of containing a lymphoma-related malignancy with: (a) a labeled peptide or polypeptide according to claim 24 or 31, (b) a labeled antibody, or a labeled antigen binding fragment thereof, that is immunospecific for the peptide or polypeptide of claim 24 or 31, (c) a labeled polynucleotide according to claim 51, or (d) a labeled polynucleotide that comprises the sequence of any of one SEQ ID NO:665 to SEQ ID NO:668, or SEQ ID NO:2533 through SEQ ID NO:9597, under conditions effective and for a time sufficient to allow immunocomplexes or specific hybridization complexes to form, wherein the presence of labeled immunocomplexes or labeled hybridization complexes is indicative of the presence of said lymphoma-related malignancy-related polypeptide, polynucleotide, antibody, or antigen binding fragment in said sample or said cell.

95. A method for detecting antibodies specific for a hematological malignancy-related peptide or polypeptide in a biological sample, said method comprising the steps of:
(a) contacting a first biological sample suspected of containing said antibodies with the peptide or polypeptide of claim 1;
(b) incubating said sample under conditions effective and for a time sufficient to allow immunocomplexes to form; and
(c) detecting immunocomplexes formed between said peptide or polypeptide and antibodies in said sample that are specific for said peptide or polypeptide, wherein the presence of said immunocomplexes is indicative of the presence of said antibodies in said sample.

96. A method for detecting antibodies specific for a Hodgkin's lymphoma-specific hematological malignancy-related peptide or polypeptide in a biological sample, said method comprising the steps of:
(a) contacting a first biological sample suspected of containing said antibodies with the peptide or polypeptide of claim 12 or 27;
(b) incubating said sample under conditions effective and for a time sufficient to allow immunocomplexes to form; and
(c) detecting immunocomplexes formed between said peptide or polypeptide and antibodies in said sample that are specific for said peptide or polypeptide, wherein the presence of said immunocomplexes is indicative of the presence of said antibodies in said sample.

97. A method for detecting antibodies specific for a follicular lymphoma-specific hematological malignancy-related peptide or polypeptide in a biological sample, said method comprising the steps of:
(a) contacting a first biological sample suspected of containing said antibodies with the peptide or polypeptide of claim 15 or 28;
(b) incubating said sample under conditions effective and for a time sufficient to allow immunocomplexes to form; and
(c) detecting immunocomplexes formed between said peptide or polypeptide and antibodies in said sample that are specific for said peptide or polypeptide, wherein the presence of said immunocomplexes is indicative of the presence of said antibodies in said sample.

98. A method for detecting antibodies specific for a B cell non-Hodgkin's lymphoma-specific hematological malignancy-related peptide or polypeptide in a biological sample, said method comprising the steps of:
(a) contacting a first biological sample suspected of containing said antibodies with the peptide or polypeptide of claim 18 or 29;
(b) incubating said sample under conditions effective and for a time sufficient to allow immunocomplexes to form; and
(c) detecting immunocomplexes formed between said peptide or polypeptide and antibodies in said sample that are specific for said peptide or polypeptide, wherein the presence of said immunocomplexes is indicative of the presence of said antibodies in said sample.

99. A method for detecting antibodies specific for a T cell non-Hodgkin's lymphoma-specific hematological malignancy-related peptide or polypeptide in a biological sample, said method comprising the steps of:
(a) contacting a first biological sample suspected of containing said antibodies with the peptide or polypeptide of claim 21 or 30;
(b) incubating said sample under conditions effective and for a time sufficient to allow immunocomplexes to form; and
(c) detecting immunocomplexes formed between said peptide or polypeptide and antibodies in said sample that are specific for said peptide or polypeptide, wherein the presence of said immunocomplexes is indicative of the presence of said antibodies in said sample.

100. A method for detecting antibodies specific for a lymphoma-specific hematological malignancy-related peptide or polypeptide in a biological sample, said method comprising the steps of:
(a) contacting a first biological sample suspected of containing said antibodies with the peptide or polypeptide of claim 24 or 31;
(b) incubating said sample under conditions effective and for a time sufficient to allow immunocomplexes to form; and
(c) detecting immunocomplexes formed between said peptide or polypeptide and antibodies in said sample that are specific for said peptide or polypeptide, wherein the presence of said immunocomplexes is indicative of the presence of said antibodies in said sample.

The application's sequence listing, which the Patent Office published only in electronic form, follows.

SEQUENCE LISTING (9597 sequences)

SEQ ID NO: 1 - DNA, 406 bp, Homo sapiens
ggaaaacaccctgacccctctgcctggcatagaccttcagacacagagcccctgaacaagggcaccccaacacctcatcatatactgaggtcaggggctccccaggtggacaccaggactctgaccccctgcccctcatccaccccgcaggtcagcccaaggctgccccctcggtcactctgttcccgccctcctctgaggagcttcaagccaacaaggccacactggtgtgtctcataagtgacttctacccgggagccgtgacagtggcctggaaggcagatagcagccccgtcaaggcgggagtggagaccaccacaccctccaaacaaagcaacaacaagtacgcggccagcagctacctgagcctgacgcctgagcagtggaagtcccacaaaagctacag

SEQ ID NO: 2 - DNA, 330 bp, Homo sapiens
ccacacagcccctgtgctagacatcgcctggtgcccgcacaatgacaacgtcattgccagtggctccgaggactgcacagtcatggtgtgggagatcccggatgggggcctgatgctgcccctgcgggagcccgtcgtcaccctggagggccacaccaagcgtgtgggcattgtggcctggcacaccacagcccagaacgtgctgctcagtgcaggttgtgacaacgtgatcatggtgtgggacgtgggcactggggcggccatgctgacactgggcccagaggtgcacccagacacgatctacagtgtggactggagccgagatggagg

SEQ ID NO: 3 - DNA, 113 bp, Homo sapiens
  misc_feature (1)...(113): n = A,T,C or G
ggncgaggtctgtggctgctgtgggacttccactgctcaggcgtcaggctcanatagctgctggccgnntacttgttgttgctttgtttggagggtgtggtggtctccactcc

SEQ ID NO: 4 - DNA, 269 bp, Homo sapiens
ccacaggcttctaccccgaccacgtggagctgagctggtgggtgaatgggaaggaggtgcacagtggggtcagcacagacccgcagcccctcaaggagcagcccgccctcaatgactccagatactgcctgagcagccgcctgagggtctcggccaccttctggcagaacccccgcaaccacttccgctgtcaagtccagttctacgggctctcggagaatgacgagtggacccaggatagggccaaacctgtcacccagatcgtcagc

SEQ ID NO: 5 - DNA, 372 bp, Homo sapiens
  misc_feature (1)...(372): n = A,T,C or G
ccacgntgnccatcaacagggncgaagccggcgatgaggccgactattactgtcaagtgtgggatcgtaataatgaccatgtcgtcttcggcggagggaccaaactggccgtcctaggtcagcccaaggctgccccctcggtcactctgttcccgccctcctctgaggagcttcaagccaacaaggccacactggtgtgtctcataagtgacttctacccgggagccgtgacagtggcctggaaggcanatagcagccccgtcaaggcgggagtggagaccaccacaccctccaaacaaagcaacaacaagtacgcggccagcagctatctgagcctgacgcctgagcagtggaagtcccacanaactacag

SEQ ID NO: 6 - DNA, 373 bp, Homo sapiens
ctgtagcttctgtgggacttccactgctcaggcgtcaggctcagatagctgctggccgcgtacttgttgttgctttgtttggagggtgtggtggtctccactcccgccttgacggggctgctatctgccttccaggccactgtcacggctcccgggtagaagtcacttatgagacacaccagtgtggccttgttggcttgaagctcctcagaggagggcgggaacagagtgaccgagggggcagccttgggctgacctaggacggccagtttggtccctccgccgaagacgacatggtcattattacgatcccacacttgacagtaatagtcggcctcatcgccggcttcgaccctgttgatggtcagggtgg

SEQ ID NO: 7 - DNA, 484 bp, Homo sapiens
  misc_feature (1)...(484): n = A,T,C or G
ccttgcctcagatccaaggtcactcggaagaggccatgtctaccctcaatgacactcatggaggaaatgctgagagaagcattcagatgcatgacacaagagccaatgaaaggccctattgctatgcaatctggtccaaaaccactcttcaggaggatgtcttcactggtgggccccacgcaaagcttcttcatgagggaatctaagactttgggggctgtccagattatgaatgggctcttccacattgccctggggggtcttctgatgatcccagcagggatctatgcacccatctgtgtgactggggtggtaccctctctggggaggcattatgtatattatttccggatcactcctggcagcaaccggaaaaaaaactccaggaagtgtttggtcaaaggaaaaaatgataatgaattcattggnccctctttgcttgccttttctggaaagaattcttttcaaatcatgggaccatact

SEQ ID NO: 8 - DNA, 457 bp, Homo sapiens
  misc_feature (1)...(457): n = A,T,C or G
cctgggggtcagcacggaggggactggagctggagagtgactgtagagcctcaggactcaggtacttctgccctccctttggtctccctgttcttctatgtggtgacagatggcaaggaagtcctactaccagaggttggggccaaggggcagttgaagtttatcagtgggcacaccagtgaacttggtaacttccgctttacacttttgccaccaaccagtccaggggatacagcccccaagtatggcagctacaatgtcttctggacctccaacccaggactgcccctgctgacagagatggtaaagagtcgcctaaatagctggtttcagcatcggcccccaggggcctcccctgaacgctacctcggcttgccaggatccctgaagtgggaggacagangtccaagtgggcaagggcanggggcagttcttgatacagcaggtgacccttgaa

SEQ ID NO: 9 - DNA, 364 bp, Homo sapiens
  misc_feature (1)...(364): n = A,T,C or G
ggcatcatactcctatngtnatgagaagccctctgccatccagcagcgagccattctaccttgtatcaagggttatgatgtgattgctcaagcccaatctgggactgggaaaacggccacatttgccatatcgattctgcancagattgaattagatctaaaagccacccaggccttggtcctagcacccactcgagaattggctcagcagatacagaaggtggtcatggcactaggagactacatgggcgcctcctgtcacgcctgtatccggggcaccaacgtgcngtgctgacgtgcataaactgcanatggaactccccacatcatcgtgggtacccctggccgngtgtnttgaaatgcn

SEQ ID NO: 10 - DNA, 382 bp, Homo sapiens
  misc_feature (1)...(382): n = A,T,C or G
tcaggacacagcatggacatgagggtccccgctcagctcctggggctcctgctgctctggctcccaggtgccaaatgtgacatccagatgacccaatctccttccaccctgtctgcatctgtcggagatacaagttacaataagttgtcgggcctctcagaatatagatcggtggttggcctggcatcaacagaaaccaggcaaagcccctaatgtcctaatttatgcgacttccagtttagaagaaggggtctcattaagatttactggcagtggatctgggacacaattcaatttaaccatcaccagtctgcagcctgacgattcagcaacttattattgncaacattattctgcatctcttcgcagtttttggacctcg

SEQ ID NO: 11 - DNA, 292 bp, Homo sapiens
  misc_feature (1)...(292): n = A,T,C or G
ctgtggctgctgtgggacttccactgctcaggcgtcaggctcagatagctgctggccgcgtacttgttgttgctttgtttggagggtgtggtggnctccactcccgccttgacggggcttgctatctgccttccaggccactgtcacngctcccgggtagaagtcacttatgagacacaccagngtggccttgttggcttgaagctcctcanaggagggcgggaaacagaatgaccgagggggcagncttgggctgacctangacggccagtttgggtccctcccccaagac

SEQ ID NO: 12 - DNA, 465 bp, Homo sapiens
  misc_feature (1)...(465): n = A,T,C or G
ccaccctgaccatcaacagggtcgaagccggcgatgaggccgactattactgtcaagtgtgggatcgtaataatgaccatgtcgtcttcggcggagggaccaaactggccgtcctaggtcagcccaaggctgccccctcggtcactctgttcccgccctcctctgaggagcttcaagccaacaaggccacactggtgtgtctcataagtgacttctacccgggagccgtgacagtggcctggaaggcagatagcagccccgtcaaggcgggagtggagaccaccacaccctccaaacaaagcaacaacaagtacgcggccagcagctatctgagcctgacgcctgagcagtggaagtcccacagaagctacagacctgcccgggcggccaagggcgaattccagcacacttggcgccgttactatggatccnactcggtaccaacttggcgtaatcatggncata

SEQ ID NO: 13 - DNA, 206 bp, Homo sapiens
ccatggatatggctaggttaggtattcatatccaaatatctgaactctaacctaatgtggatatgattctgtagcattatattaaaagctatgatgatgcaatgcaggaaataacctttcattctcccccctagaggatcacgacaggtgcttcaatgcctgccttatctatgggacagtagtgtgattctcagtgagagtgaagg

SEQ ID NO: 14 - DNA, 378 bp, Homo sapiens
  misc_feature (1)...(378): n = A,T,C or G
ccaccctgaccatcaacagggtcgaagccggcgatgaggccgactattactgtcaagtgtgggatcgtaataatgaccatgtcgtcttcggcggagggaccaaactggccgtcctaggtcagcccaaggctgccccctcggtcactctgttcccgccctcctctgaggagcttcaagccaacaaggccacactggtgtgtctcataagtgacttctacccgggagccgtgacagtggcctggaaggcagatagcagccccgtcaaggcgggagtggagaccaccacaccctccaaacaaagcaacaacaagtacgcggcncagcagctatctgaagccttgacccctgagcaggtggaaagtcccacagaagctacag

SEQ ID NO: 15 - DNA, 170 bp, Homo sapiens
ccgccgcgggtccgtgcgcccagcgtcccagggcccaggccgagcagacaaagatcattccactcagcctgggacgatggggaggaaaaaaatccagatctcccgcatcctggaccaaaggaatcggcaggtgacgttcaccaagcggaagttcgggctgatgaagaagg

SEQ ID NO: 16 - DNA, 462 bp, Homo sapiens
  misc_feature (1)...(462): n = A,T,C or G
ccagtacacccatgaatttgatggagatgagcagttctacgtggacctggggaggaaggagactgtctggtgtttgcctgttctcagacaatttagatttgacccgcaatttgcactgacaaatatcgctgcctaaaacataacttgaacagtctgattaaacgctccaactctaccgctgctaccaatgaggntcctgaggtcacagtgttttccaagtctcccgtgacactgggtcagcccaacatcctcatctgtcttgtggacaacatctttcctcctgtggncaacatcacatggctgagcaatgggcactcagtcacagaangtgtttctgagaccagcttcctctccaagagtgatcattccttcttcaagatcagtacctcaccctcctcccttctggntgaggagagttatgactgcaaggnggancactggggactgggacaagcctcttct

SEQ ID NO: 17 - DNA, 207 bp, Homo sapiens
  misc_feature (1)...(207): n = A,T,C or G
ggcaagtcctgggctggcttacctgggcaccgtgggcatgggggaggtgtgtcacaagatttgggctctgcagagagaagattgggagttacggggatctgggatggaggtggatgcgtcagcaccctgctggggcctgtccctggactcgggccactctagggctcttgtcccgccttgagctggagggcgaggacctcngccgcn

SEQ ID NO: 18 - DNA, 294 bp, Homo sapiens
ccatgtccccagaattgaagccagagaatcgctcagatatccctgagggccggtcgttatcaaaagagatgattaggacaggggcctggcctggcttctggtaataccagtgtacattgttactcccaatattgtttcccccacaggtaatcttggccgtctttcctggggccactgacactgagggtgtctgagtcaacacataggaggtcacagagtctgtgcagtgagagaggaggccgaggaggagaacggtccaggccatggctgaggcaccaccagtgctgcttcctt

SEQ ID NO: 19 - DNA, 197 bp, Homo sapiens
  misc_feature (1)...(197): n = A,T,C or G
caagccngcgatgaggccgactattactgtcaagngtgggatcgtaataatgaccatgtcgtcttcggcggagggaccaaactggccntcctangtcancccaacgctgccccctcagncactctgttcccgccctcctctgaggagcttcaagccaacaangccacactngtgtgtctcataantgacttctaccc

SEQ ID NO: 20 - DNA, 387 bp, Homo sapiens
aaatttctcaaataactaagtcttcactaaggcagcagttcaaaactgttccaggaattaaaatatattcccatttgaggagtcttccttcacaccttcacctcctcagccttaagtatatacacacacacccaacaccctcaatacttgactagcaacaggctttaccatctttacctgacaatgaccccagggcggagatcgaaattcttcttcacaatctctaatagctctctctcactcttctgagaggtaccataatggaaaatggagatagataatggatgagaaactccaatagcataagagacctgaacaagaaccctccggcacagacctcctttaacaagggattttgccacccaacgagcagcataagcagacctg

SEQ ID NO: 21 - DNA, 290 bp, Homo sapiens
  misc_feature (1)...(290): n = A,T,C or G
aagcagcactggtggtgcctcagccatggcctggaccgttctcctcctcggcctcctctctcactgcacagactctgtgacctcctatgtgttgactcagacaccctcagtgtcagtggccccangaaagacggccaagattacctgtgggggaaacaatattgggagttacagtgtacactggtattaccaaaagccaggccaggcccctgtcctaatcatctcttttgatgacnaccggccctcanggatatctgagcgattctctgggcttcaattctgggggacat

SEQ ID NO: 22 - DNA, 148 bp, Homo sapiens
  misc_feature (1)...(148): n = A,T,C or G
ctgtagcttctgtgggacttccactgctcaggcgtcaggctcaganagctgctggccgcgtacttgttgttgctttgtttggagggtgtggtggtctccactcccgccttgacggggctgctatctgccttncangccactgtcacgg

SEQ ID NO: 23 - DNA, 265 bp, Homo sapiens
  misc_feature (1)...(265): n = A,T,C or G
ctgtagcttctgtgggacttccactgctcaggcgtcaggctcagatagctgctggccgcgtacttgttgttgctttgtttggagggtgtggnggtctccactcccgccttgacggggctgctatctgccttccaggccactgtcacggctcccgggtagaagtcacttatgagacacaccagtgtggccttgttggcttgaagctcctcacaggagggcgggaacagagtgaccgagggggcagccttgggctgacctaggacgg

SEQ ID NO: 24 - DNA, 377 bp, Homo sapiens
aggtccaccctgaccatcaacagggtcgaagccggcgatgaggccgactattactgtcaagtgtgggatcgtaataatgaccatgtcgtcttcggcggagggaccaaactggccgtcctaagtcagcccaaggctgccccctcggtcactctgttcccgccctcctctgaggagcttcaagccaacaaggccacactggtgtgtctcataagtgacttctacccgggagccgtgacagtggcctggaaggcagatagcagccccgtcaaggcgggagtggagaccaccacaccctccaaacaaagcaacaacaagtacgcggccagcagctatctgagcctgacccctgagcattggaagtcccacaaaagctacag

SEQ ID NO: 25 - DNA, 323 bp, Homo sapiens
cctgggaggaacctgctcagtctgggcctaaggaagcagcactggtggtgcctcagccatggcctggaccgttctcctcctcggcctcctctctcactgcacagactctgtgacctcctatgtgttgactcagacaccctcagtgtcagtggccccaggaaagacggccaagattacctgtgggggaaacaatattgggagtaacaatgtacactggtattaccagaagccaggccaggcccctgtcctaatcatctcttttgataacgaccggccctcagggatatctgagcgattctctggcttcaattctggggacatgg

SEQ ID NO: 26 - DNA, 433 bp, Homo sapiens
  misc_feature (1)...(433): n = A,T,C or G
ccaccctgaccatcaacagggtcgaagccggcgatgaggccgactattactgtcaagtgtgggatcgtaataatgaccatgtcgtcttcggcggagggaccaaactggccgtcctaggtcagcccaaggctgccccctcggtcactctgttcccgccctcctctgaggagcttcaagccaacaaggccacactggtgtgtctcataagtgacttctacccgggagccgtgacagtggcctggaaggcagatagcagccccgtcaaggcgggagtggagaccaccacaccctccaaacaaagcaacaacaagtacgcggccagcagctatctgannctgacgcctgagcagtggaagtcccacagaagctacagcctgggcttggcttaccttgggcacccgtggggcaatgggggaangtgtgtcacaaaaat

SEQ ID NO: 27 - DNA, 419 bp, Homo sapiens
  misc_feature (1)...(419): n = A,T,C or G
ngcggccnaggtccagaacacacatttggctggaacagcctgagggaccaaaaggccccagtatcccacagagctgaggagccaggccagaaaagtaaccccagagttcgctgtgcaggggagacacagagctctctttatctgtcaggatggcaggaggggacagggtcagggcgctgagggtcanatgtcggtgttgggggccaaggccccgagagatctcaggacaggtggtcaggtgtctaaggtaaaacagctccccgtgcagatcagggcatagtggaaaacaccctgacccctctgcctggcatagaccttcagacacagagcccctgaacaanggcaccccaacacctcatcatatactgagggcaggggctccccaggtggacaccaggactctgacccccttgcccctc

SEQ ID NO: 28 - DNA, 201 bp, Homo sapiens
  misc_feature (1)...(201): n = A,T,C or G
gctgccccctcggtcactctgttcccgccctcctctgaggagcttcaagccaacaaggccacactggtgtgtctcataagtgacttctacccgggagccgtgacagtggcctggaangcagatagcacccccntcaaggcgggagtggagaccaccacaccctncaaacaaagcaacaacaagtacccggccagcagctat

SEQ ID NO: 29 - DNA, 292 bp, Homo sapiens
ccatgtccccagaattgaagccagagaatcgctcagatatccctgagggccggtcgttatcaaaagagatgattaggacaggggcctggcctggcttctggtaataccagtgtacattgttactcccaatattgtttcccccacaggtaatcttggccgtctttcctggggccactgacactgagggtgtctgagtcaacacataggaggtcacagagtctgtgcagtgagagaggaggccgaggaggagaacggtccaggccatggctgaggcaccaccagtgctgcttcc

SEQ ID NO: 30 - DNA, 417 bp, Homo sapiens
  misc_feature (1)...(417): n = A,T,C or G
ngtccttgnctnagatccaaggtcactcggaagaggccatgtctaccctcaatgacactcatggaggaaatgctgagagaagcattcagatgcatgacacaaggtaagactgccaaaaaatcttgttcttgctctcctcattttgttatttgttttatttttangagttttgagagcaaaatgacaacacccagaaattcagtaaatgggactttcccggcagagccaatgaaaggncctattgctatgcaatctggtccaaaaccactcttcaggaggatgtcttcactggtgggccccacgcaaagcttcttcatgagggaatctaagactttgggggctgtccagattatgaatgggctcttccacattgccctggggggncttctgatgatcccancagggatntatgccccc

SEQ ID NO: 31 - DNA, 454 bp, Homo sapiens
  misc_feature (1)...(454): n = A,T,C or G
ctgtagcttttgtgggacttccactgctcaggcgtcaggctcaggtagctgctggccgcgtacttgttgttgctttgtttggagggtgtggtggtctccactcccgccttgacggggctgctatctgccttccaggccactgtcacggctcccgggtagaagtcacttatgagacacaccagtgtggccttgttggcttgaagctcctcanaggagggcgggaacagagtgaccgagggggcagccttgggctgacctgcggggtggatgaggggcagggggtcaaagtcctggtgtccacctggggagcccctgacctcagtatatgatgaggtgttggggtgcccttgttcaggggctctgtgtctgaaggtctatgccaggcagaggggtnanggtgttttcactatgccctgatttgcccgggagctgcttaccttagaccctgacancn

SEQ ID NO: 32 - DNA, 482 bp, Homo sapiens
aaatcacagcttttacctatttgttaggctatagtgttttgtaaacttctgtttctattcacatcttctccacttgagagagacaccaaaatccagtcagtatctaatctggcttttgttaacttccctcaggagcagacattcatataggtgatactgtatttcagtcctttcttttgaccccagaagccctagactgagaagataaaatggtcaggttgttggggaaaaaaaagtgccaggctctctagagaaaaatgtgaagagatgctccaggccaatgagaagaattagacaagaaatacacagatgtgccagacttctgagaagcacctgccagcaacagcttccttctttgagcttaggtgagcaggattctggggtttgggatttctagtgatgggctatggaaagggtgactgtgcctggggacaaagcgaggtcccaaggggacagcctgaactccctgctcatagtagtgg

SEQ ID NO: 33 - DNA, 383 bp, Homo sapiens
  misc_feature (1)...(383): n = A,T,C or G
ngtccaccctgaccatcaacagggncgaagccggcgatgaggccgactattactgtcaagtgtgggatcgtaataatgaccatgtcgtcttcggcggagggaccaaactggccgtcctaggtcagccccaaggctgccccctcggtcactctgttcccgccctcctctgaggagcttcaagccaacaaggccacactggtgtgtctcataagtgacttctacccgggagccgtgacagtggcctggaaggcagatagcagccccgtcaaggcgggagtggagaccaccacaccctccaaacaaancaacaacaagtacncggccagcagctatctgagcctgacgcctgagcagtggaagtnccacataagctacanacctcn

SEQ ID NO: 34 - DNA, 246 bp, Homo sapiens
aaatctttagagataccataaatcaacatttaatctttgtaacacatctgaaggaatattcttgaaatagcgtgatgatggtctttaaggattctagaaagggagtgatgagtcagaatttgccagaatgtcccagcatagtcaggagaaagagaacctctctggtcgatgtacatgttctaatcccatggagattagggcaccagactatgagatttggtaacatttgctatcaagatgaaccag

SEQ ID NO: 35 - DNA, 309 bp, Homo sapiens
  misc_feature (1)...(309): n = A,T,C or G
gcgcggtcgangtggctctccgatccccccaggcccttgccccatacacgggctccagaacacacatttggctggaacagcctgagggaccaaaaggccccagtatcccacagagctgaggagccaggccagaaaagtaaccccagagttcgctgtgcaggagagacacagagctctctttatctgtcaggatggcaggaggggacagggtcagggcactgagggtcanatgtcggtgtggggggccaaggccccgagagatctcaggacangtggncatgtgtctaangtaaaanagcttccccgtgc

SEQ ID NO: 36 - DNA, 363 bp, Homo sapiens
  misc_feature (1)...(363): n = A,T,C or G
atggacatgagggtccccgctcagctcctggggctcctgctgctctggctcccaggtgccaaatgtgacatccagatgacccaatctccttccaccctgtctgcatctgtcggagatacagttacaataagttgtcgggcctctcagaatatagatcggtggttggcctggcatcaacagaaaccaggcaaagcccctaatgtcctaatttatgcgacttccagtttagaagaaggggtctcattaagatttactggcagtggatctgggacacaattcaatttaaccatnaccaggtctgcagcctgacgattcancaacttattattgtnaacattattctgcatctnttnncagttttgg

SEQ ID NO: 37 - DNA, 416 bp, Homo sapiens
  misc_feature (1)...(416): n = A,T,C or G
ccagtacacccatgaatttgatggagatgagcagttctacgtggacctggggaggaaggagactgcctggtgtttgcctgttctcagacaatttagatttgacccgcaatttgcactgacaaacatcgctgtcctaaaacataacttgaacagtctgattaaacgctccaactctaccgctgctaccaatgaggttcctgaggtcacagtgttttccaagtctcccgtgacactgggtcagcccaacatcctcatctgtcttgtggacaacatctttcctcctgtggncaacatcacatggctgagcaatgggcactcagtcacanaangtgtttctgagaccagcttcctctccaagagtgatcattncttcttcaanatcagntaccccaccctcctcccttcttctgaggaga

SEQ ID NO: 38 - DNA, 253 bp, Homo sapiens
  misc_feature (1)...(253): n = A,T,C or G
gtctgtagcttctgtgggacttccactgctcaggcgtcaggctcagatagctgctggccgcgtacttgttgttgctttgtttggagggtgtggtggnctccactcccgccttgacggggntgctatctgncttccaggccactgtcacggctcccgggtagaagtcacttatgagacacaccagtgtggccttgttggcttgaanctcctcatangagggcgggaacagagtgaccganggggcagccttggg

SEQ ID NO: 39 - DNA, 178 bp, Homo sapiens
  misc_feature (1)...(178): n = A,T,C or G
gcccnggnaggtccaaatgtctgagacaccttcaaatgggcccagtgccagccaactgggctcctcactggcaccacgtcccagatgcccttctctgcccacaccctgcaggctgaggccagaggaggncacccctccggagatggggnatgtgngtgtgtgtgngtatgttctgcgn

SEQ ID NO: 40 - DNA, 156 bp, Homo sapiens
  misc_feature (1)...(156): n = A,T,C or G
ccaaaagaagtaagacagcttgctgaagatttcctgaaagactatattcatataaacattggtgcacttgaactgantgcaaaccacaacattcttcanantgtggatgtgtgtcatgacntanaaaaggatgaaaaacttattcgtctaatggaa

SEQ ID NO: 41 - DNA, 287 bp, Homo sapiens
  misc_feature (1)...(287): n = A,T,C or G
ccatgtccccagaattgaagccagagaatcgctcagatatccctgagggccggtcgttatcaaaagagatgattaggacaggggcctggcctggcttctggtaataccagngtacattgttactcccaatattgtttcccccacaggtaatcttggccgcctttcctggggccactgacactgagggtgtctgagtcaacacataggaggncacagagtntgtgcagtgagagaggaggccgaagaggagaacggcccangccatggctgangcnccaccagtgctg

SEQ ID NO: 42 - DNA, 272 bp, Homo sapiens
gtgctcacagtcatcaattatagaccccacaacatgcgccctgaagacagaatgttccatatcagagctgtgatcttgagagccctctccttggctttcctgctgagtctccgaggagctggggccatcaaggcggaccatgtgtcaacttatgccgcgtttgtacagacgcatagaccaacaggggagtttatgtttgaatttgatgaagatgagatgttctatgtggatctggacaagaaggagaccgtctggcatctggaggagtttgg

SEQ ID NO: 43 - DNA, 533 bp, Homo sapiens
  misc_feature (1)...(533): n = A,T,C or G
cttgcctgctgctctggcccctggtcctgtcctgttctccagcatggtgtgtctgaggctccctggaggctcctgcatggcagttctgacagtgacactgatggtgctgagctccccactggctttggctggggacaccagaccacgtttcttggagtactctacgtctgagtgtcatttcttcaatgggacggagcgggtgcggttcctggacagatacttctataaccaagaggagtacgtgcgcttcgacagcgacgtgggggagttccgggcggtgacggagctggggcggcctgatgaggagtactggaacagccagaaggacttcctggaagacaggcgggccgcggtggacacctactgcagacacaactacggggttggtgagagcttcacagtgcagcggcgagtccatcctaaggtgactgtgtatccttcaaagacccacccctgcagcaccacaacctcctggtctgttctgngagtggtttctatccaggcagcattgaatcangtggttccggaatggn

SEQ ID NO: 44 - DNA, 332 bp, Homo sapiens
tcgccctgaacgaggacctgcgctcttggaccgcggcggacatggcggctcagatcaccaagcgcaagtgggaggcggcccatgaggcggagcagttgagagcctacctggatggcacgtgcgtggagtggctccgcagatacctggagaacgggaaggagacgctgcagcgcacggacccccccaagacacatatgacccaccaccccatctctgaccatgaggccaccctgaggtgctgggccctgggcttctaccctgcggagatcacactgacctggcagcgggatggggaggaccagacccaggacacggagctcgtggagaccagg

SEQ ID NO: 45 - DNA, 391 bp, Homo sapiens
  misc_feature (1)...(391): n = A,T,C or G
ctgtngctnctgtgggacttccactgctcaggcgtcaggctcanatagctgctggccgcgtacttgttgttgctttgtttggagggtgtggtggtctccactcccgccttgacggggctgctatctgccttccaggccactgtcacggctcccgggtagaagtcacttatgagacacaccagtgtggccttgttggcttgaagctcctcagaggagggcgggaacagagtgaccgagggggcagncttgggctgacttaggacggccagtatggtccctccgccgaagacgacatggttattattacnatcccncacttgacagtaatagtcngccttcatcgccggcttctgacccttttgatggtncagggngggacctttggcccgcn

SEQ ID NO: 46 - DNA, 478 bp, Homo sapiens
  misc_feature (1)...(478): n = A,T,C or G
ccaccctgaccatcaacagggtcgaagccggcgatgaggccgactattactgtcaagtgtgggatcttaataatgaccatgtcgtcttcggcggaggaaccaaactggccgtcctaggtcagcccaaggctgccccctcggtcactctgttcccgccctcctctgaggagcttcaagccaacaaggccacactggtgtgtctcataagtgacttctacccgggagccgtgacagtggcctggaaggcagatagcagccccgtcaaggngggagtggagaccaccacaccctncaaacaaagcaacaacaagtacgcggccagcagctatctnagcctgacgcctgagcagtggaagtcccacagaanctacagacctgcccgggcggncaanggcgaattccagcacactggggggcgttactagtggatncgagctcggtaccaagcttggcgnaatcatggncatagctggtttcc

SEQ ID NO: 47 - DNA, 244 bp, Homo sapiens
  misc_feature (1)...(244): n = A,T,C or G
ccacggtnnccntcaacaggggcgaagccggcgatgaggccgactattactgtcaagtgtgggatcttaataatgaccatgtcgtcttcggcggagggaccaaactggncgtcctaggtcagcccaaggctgccccctcggtcactctgttcccgccctcctctgaggagcttcaagccaacaaggccacactggtgtgtctcataagtgacttntacccgngagccgtgacagtggcctggaa

SEQ ID NO: 48 - DNA, 343 bp, Homo sapiens
  misc_feature (1)...(343): n = A,T,C or G
cccggcaggnaaatgccactgctgnggacaaaaaactgaatgaantctattagaagcttctgaaaaatgttaaatgttaaatcctgctatggtctgatnagaanaactcaagacttagaattagatattttcttccttcgaattatgtattagattatctccctacatattttctcccagccataagtaactgagttatgctggaaaaaaaaacacanaaatcttaagatctctttttctactggtgaaattgggggtttgataataatttttagagaaaaatctanaattctctgtgtatagctggtcaacncataaaccangtaaattttgattttcttgg

SEQ ID NO: 49 - DNA, 373 bp, Homo sapiens
  misc_feature (1)...(373): n = A,T,C or G
ccaccctgaccatcaacagggtcgaagccggcgatgaggccgactattactgtcaagtgtgggatcgtaataatgaccatgtcgtcttcggcggagggaccaaactggccgtcctaggtcagcccaaggctgccccctcggtcactctgttcccgccctcctctgaggagcttcaagccaacaaggccacactggtgtgtctcataagtgacttntacccgggagccgtgacagtggcctggaaggcagatagcagccccgtcaaggcgggagtggagaccaccacaccctccaaacaaagcaacaacaagtacgcggccagcagctatctgagcctgacgcctgagcagtggaagtcccacagaagctacag

SEQ ID NO: 50 - DNA, 375 bp, Homo sapiens
ccaaaactgcgaagagatgcagaataatgttgacaataataagttgctgaatcgtcaggctgcagactggtgatggttaaattgaattgtgtcccagatccactgccagtaaatcttaatgagaccccttcttctaaactggaagtcgcataaattaggacattaggggctttgcctggtttctgttgatgccaggccaaccaccgatctatattctgagaggcccgacaacttattgtaactgtatctccgacagatgcagacagggtggaaggagattgggtcatctggatgtcacatttggcacctgggagccagagcagcaggagccccaggagctgagcggggaccctcatgtccatgctgtgtcctgac

SEQ ID NO: 51 - DNA, 347 bp, Homo sapiens
  misc_feature (1)...(347): n = A,T,C or G
ccaccctgaccatcaatagggtcgaagccggcgatgaggccgactattactgtcaagtgtgggatcgtaataatgaccatgtcgtcttcggcggagggaccaaactggccgtcctaggtcagcccaaggctgccccctcggtcactctgttcccgccctcctctgaggagcttcaagccaacaaggccacactggtgtgtctcataagtgacttctacccgggagccgtgacagtggcctggaaggnagatagcagccccgtcaaggcgggagtggagaccaccacaccctccaaacaaagcaacaacaagtaccgcgggcagcagctatctgagcctgacgcctga

SEQ ID NO: 52 - DNA, 449 bp, Homo sapiens
  misc_feature (1)...(449): n = A,T,C or G
aaaattgatcacaacnagggaaaacaaaataaaattagggggcaaagggtaggagtatggggggaggggagagcaaacctatcgaatatatcttagaattttgctcagaaatcactgctgcctctcaagtgttgcattgtccctgcctaaaccaagaaggctaaacaaagcccctcctgtttgaattcttaaggtaagaaatttctaagctaagaaaacactattgcctaaaaccaatgatagtggagctcatttacaaataggcatgcctcacacacacagtccaaaggcaagacactggctttgaaattaggctcatgatgtgattcctattatatgtacctgatttttttaggccccaggtatgtggaccagagttaatgtcatgactcttcaaagatatgatgaaaagttgccctagaaatctagagatgcatgtttatttaatt

SEQ ID NO: 53 - DNA, 199 bp, Homo sapiens
  misc_feature (1)...(199): n = A,T,C or G
ccaccctgaccatcaacagggtcgaagccggcgatggggccgactattattgtcaagtgtgggatcgtaataatgaccatgtcgtcttcggcggagggaccaaactggccgtcctaagtcagcccaaggctgccccctcggncactctgttcccgccctnctctgangagcttnaagccaacaaggncacactggtgtg

SEQ ID NO: 54 - DNA, 79 bp, Homo sapiens
  misc_feature (1)...(79): n = A,T,C or G
ctgtagcttctgtncgacttccactgctcaggcgtcaggctcanatagctgctggccgcgtacttgttgttgctttgtt

SEQ ID NO: 55 - DNA, 93 bp, Homo sapiens
  misc_feature (1)...(93): n = A,T,C or G
ctgtagcttttgtnggncttccactgctcaggcgtcaggctcaggtagctgctggccgnntacttgttgntnctttgnttggagggtgtggtg

SEQ ID NO: 56 - DNA, 426 bp, Homo sapiens
  misc_feature (1)...(426): n = A,T,C or G
gtgaaccanctaatccctctgagaaaaactccccatctacccaatactgttacagcatacaatctctgttcttgggcattttgtcagtgatgctgatctttgccttcttccaggaacttgtaatagctggcatcgttgagaatgaatggaaaagnncgtgctccanacccaaatctaacatagttctcctgtcagnagaagaaaaaaaagaacagactattgaaataaaagaagaagtggttgggctaactgaaacatcttcccaaccaaagaatgaagaagacattgaaattattccaatccaagaagaggaagaagaagaaacagagacgaactttncagaacctccccaagatcaggaatcctcaccaatagaaaatgacagctctcctnaagtgatttcttctgntttctgnntcctttttt

SEQ ID NO: 57 - DNA, 232 bp, Homo sapiens
gctaaaccaaaagaagcctccagacagccctgagatcacctaaaaagctgctaccaagacagccacgaagatcctaccaaaatgaagcgcttcctcttcctcctactcaccatcagcctcctggttatggtacagatacaaactggactctcaggacaaaacgacaccagccaaaccagcagcccctcagcatccagcagcatgagcggaggcattttccttttcttcgtgg

SEQ ID NO: 58 - DNA, 191 bp, Homo sapiens
  misc_feature (1)...(191): n = A,T,C or G
ccttgcctcagatccaanntcactcgnaagaggccatgtctaccctnaatgacactcatggaggaaatgctgagagaagcattcanatgcatgacacaaggtaagactgccaaaaatcttgttcttgctctcctcattttgttatttgttttatttttaggagttttgagagcaaaatgacaacacccaga

SEQ ID NO: 59 - DNA, 259 bp, Homo sapiens
  misc_feature (1)...(259): n = A,T,C or G
ctgtagcttctgtgggacttccactgctcaggcgtcaggctcagatagctgctggccgcgtacttgttgttgctttgtttggagggtgtggtggtctccactcccgccttgacggggctgctatctgccttncaggccactgtcacggntnccgggtagaagtcacttatgagacacaccagtgtggncttgttggcttgaagctcntnanaggagggcgggaacanagtgaccgagggggcagccttgggctgaccta

SEQ ID NO: 60 - DNA, 410 bp, Homo sapiens
cctggtcaaatgtcacctccactgggaagccctccttgatctcccaggctgttaggggcctgccccaggttcctgcagactccctgcttctctccatcacaaacctgagcagtgtggggctgtcattatcatgtgtgaggttttagtaccaggaagtggggtactaccatagcaaatacccaaaaatggggaaatggcttggggaatggaaagaattggacaatgagcacttgatagaaaaagcctagattgccctgaagaggtggtcagtagaaatatggatgttaaaggtgcccctgctgaggtcctaggaggaaatgagggacatgacattggacgtgaagatggaggtggggactgcagtgatgcatccacagatctgggagaccaggatgctgcagccatcacag

SEQ ID NO: 61 - DNA, 361 bp, Homo sapiens
  misc_feature (1)...(361): n = A,T,C or G
cttctgtgnnacttccactgctcacgcgtnaggctcagatagctgctggccgcgtacttgttgttgctttgnttggagggtgtggtggtctccacccccgccttgacggggctgctatctgccttccaggccactgtcacggctcccgggtagaagtcacttatgagacacaccagtgtggccttgttggcttgaagctcctcanaggagggcgggaacagagtgaccgagggggcagccttgggctgacctaggacggccagtttggtccctccgccgaanacgacatggtcattattacgatcccacacttgacagtaatagtcggcctcatcgccggcttcgaccctgttgatggtca

SEQ ID NO: 62 - DNA, 368 bp, Homo sapiens
  misc_feature (1)...(368): n = A,T,C or G
ctgtagcttctgtgggacttccactgctcaggcgtcaggctcagatagctgctggccgcgtacttgttgttgctttgtttggagggtgtggtggtctccactcccgccttgacggggctgctatctgccttccaggccactgtcacggctcccgggtagaagtcacttatgagacacaccagtgtggccttgttggcttgaagctcctcanaggagggcgggaacagagtgaccgagggggcanccttgggctgacctaggacggccagtttggtccctccgccgaagacgacatggtcattattacgatcccacacttnacagttnatagtcngcctcatngccggnttcgaccctgttgatggtca

SEQ ID NO: 63 - DNA, 383 bp, Homo sapiens
  misc_feature (1)...(383): n = A,T,C or G
ctgtagcttctgtgggacttccactgctcaggcgtcaggctcagatagctgctggccgcgtacttgttgttgctttgtttggagggtgtggtggtctccactcccgccttgacggggctgctatctgccttccaggccactgtcacggctcccgggtagaagtcacttatgagacacaccagtgtggccttgttggcttgaagctcctcagaggagggcgggaacagagtgaccgagggggcagccttgggctgacctangacggccagtttggtccctccgccgaagacgacatggtcattattacgatcccacacttgacagtaatagtcggcctcatcgccggcttcgaccctgttgatggtcagggtggacctcggccg

SEQ ID NO: 64 - DNA, 373 bp, Homo sapiens; identical to SEQ ID NO: 6

SEQ ID NO: 65 - DNA, 334 bp, Homo sapiens
  misc_feature (1)...(334): n = A,T,C or G
ctgtagcttctgtgggacttccactgctcgggcgtcaggctcaggtagctgctggccgcgtacttgttgttgctctgtttggagggtttggtggtctccactcccgccttgacggggctgccatctgccttccaggccactgtcacagctcccgggtagaagtcacttatgagacacaccagngtggccttnntggcttgaanctcctcanaggagggcgggaacanngtgaccnagggggcanncttgggctgacctaggacggccagtttggtccctccgccgaagacgacatggtcattattacgatccnacacttgacagtaatagtcgg

SEQ ID NO: 66 - DNA, 377 bp, Homo sapiens
  misc_feature (1)...(377): n = A,T,C or G
ctgtagcttctgtgggacttccactgctcaggcgtcaggctcagatagctgctggccgcgtacttgttgttgctttgtttggagggtgtggtggtctccactcccgccttgacggggctgctatctgccttccaggccactgtcacggctcccgggtagaagtcacttatgagacacaccagtgtggccttgttggcttgaagctcctcagaggagggcgggaacagagtgaccgagggggcagccttgggctgacctaggacggccagtttggtccctccgccgaagacgacatggtcattattacgatcccacacttgacagtaatagtcggnctcatcgtcggcttcgaccctgttgatggtcagggtggacct

SEQ ID NO: 67 - DNA, 392 bp, Homo sapiens
  misc_feature (1)...(392): n = A,T,C or G
ngtcttgcctgctgctctggcccctggtcctgtcctgttctccagcatggtgtgtctgaggctccctggaggctcctgcatggcagttctgacagtgacactgatggtgctgagctccccacttgctttgggctggggacaccagaccacgtttcttggagtactctacgtctgagtgtcatttcttcaatgggacggagcgggtgcggttcctggacagatacttctataaccaagaggagtacgtgcgcttcgacagcgacgtgggggagttccgggcggtgacngagctggggcgggctgatgaggagtactggaacagccannaaggacttcctggaanacaggcgggncgcggtggacacctactgcanacacaactacggggttgg

SEQ ID NO: 68 - DNA, 446 bp, Homo sapiens
  misc_feature (1)...(446): n = A,T,C or G
naaaaatggagagtctgaattttattagagctcacacaccatatattaacatatacaactgtgaaccacctaatccctctgagaaaaactccccatctacccaatactgntacagcatacaatctctgttcttgggcattttgtcagtgatgctgatctttgccttcttccaggaacttgtaatanctggcatcgttgacaatgaatggaaaagaacgtgctccagacccaaatctaacatagttctcctgtcagcagaagaaaaaaaagaacanactattgaaataaaagaagaagtggttgggctaactgaaacatcttcccaaccaaagaatgaagaanacattgaaattattccaatncaagaagaggaagaagaaagaaacnggagacgaactttccagaacctnccaagatcaggaatcctcaccaatagaaaatgacag

SEQ ID NO: 69 - DNA, 180 bp, Homo sapiens
  misc_feature (1)...(180): n = A,T,C or G
ctgctgccacagccagtattgccggggctccaacccagtacccacctggccgtgggggtcctcccccacctatgggccgaagaacaccccctccaggcatgatgggcccacctcccnggtttganacctcctatgggtgcccccaatgggggatcccccntggaagangactccaatggg

SEQ ID NO: 70 - DNA, 113 bp, Homo sapiens
  misc_feature (1)...(113): n = A,T,C or G
nccatgtccccagaattgaagccagagaatcgctcanatatccctgagggccggtcgttatcaaaagagatgattaggacaggggcctggcctggcttctggtaataccaacg

SEQ ID NO: 71 - DNA, 117 bp, Homo sapiens
  misc_feature (1)...(117): n = A,T,C or G
ngtaaattcctgtaataaaagggaaattgagggcagagcaatcaggctggagttgcaaggacccaggggatcacctaatgccagaagccagccatccaaaactctgtttgtcaaagg

SEQ ID NO: 72 - DNA, 247 bp, Homo sapiens
ccactgcaacagtgagtcaaactctcctcgcatgaccacaaagtatagggacaggtgtgaccccctccctgacccatccccattcaggtatgctctagcacagagccggtagccacagcgggttggtgtagaaggactggctgaagatggacactgtgtgcccatccaccgcctctctcttcttcatcttgtaatctgtcaccttccaaatgagccttccattatagcaagtaccctccagcagttt

SEQ ID NO: 73 - DNA, 373 bp, Homo sapiens; identical to SEQ ID NO: 6

SEQ ID NO: 74 - DNA, 371 bp, Homo sapiens
ggacacagcatggacatgagggtccccgctcagctcctggggctcctgctgctctggctcccaggtgccaaatgtgacatccagatgacccaatctccttccaccctgtctgcatctgccggaaatacagttacaataagttgtcgggcctctcagaatatagatcggtggttggcctggcatcaacagaaaccaggcaaagcccctaatgtcctaatttatgcgacttccagtttagaagaaggggtctcattaagatttactggcagtggatctgggacacaattcaatttaaccatcaccagtctgcagcctgacgattcagcaacttattattgtcaacattattctgcatctcttcgcagttttgg

SEQ ID NO: 75 - DNA, 293 bp, Homo sapiens
ggaagcagcactggtggtgcctcagccatggcctggaccgttctcctcctcggcctcctctctcactgcacagactctgtgacctcctatgtgttgactcagacaccctcagtgtcagtggccccaggaaaagacggccaagattacctgtgggggaaacaatattgggagtaacaatgtacactggtattaccagaagccaggccaggcccctgtcctaatcatctcttttgataacgaccggccctcagggatatctgagcgattctctggcttcaattctggggacatgg

SEQ ID NO: 76 - DNA, 209 bp, Homo sapiens
aagcagcactggtggtgcctcagccatggcctggaccgttctcctcctcggcctcctctctcactgcacaggtgatccccccagggtctcaccaacctgcccagcccaaggcttctgggtccagcgtgtccttaattctgagctcaggagggcccttcctgtggtgggcaggatgctcatgaccctggtgcaaggtgggaaggttgggg

SEQ ID NO: 77 - DNA, 396 bp, Homo sapiens
  misc_feature (1)...(396): n = A,T,C or G
ctgtagcttctgtgggacttccactgctcaggcgtcaggctcagatagctgctggccgcgtacttgttgttgctttgtttggagggtgtggtggtctccactcccgccttgacggggctgctatctgccttccaggccactgtcacggctcccgggtagaagtcacttatgagacacaccagcgtggccttgttggcttgaaactcctcanangaaggcgggaaacagaangaccgaggggcanccttgggctgactaggacggcagtttggtcctccgccaaacacatggcattattacgatccacacttgacagtaatagtcngctcatcgncggcttcaccctgtgatggtcagggtggactcggccccgacacctaagggcgaatccancac

SEQ ID NO: 78 - DNA, 202 bp, Homo sapiens
  misc_feature (1)...(202): n = A,T,C or G
cctcggatgatgaagacagtgcccaccacaatgcccacgaggcccacagacaaccccagggcgcagaccacagtctctgtgagctctgacataggggctggaatctcaggctcccagtgtttcagaagaggcttgtccagtccccagtgctccaccttgcagtcatanctctcctcanctgaagggaggagggtgaggnaac

SEQ ID NO: 79 - DNA, 356 bp, Homo sapiens
  misc_feature (1)...(356): n = A,T,C or G
ccaaaactgcgaagagatgcagaataatgttgacaataataagttgctgaatcgtcaggctgcagactggtgatggttaaattgaattgtgtcccagatccactgccagtaaatcttaatgagaccccttcttctaaactggaagtcgcataaattaggacattaggggctttgcctggtttctgttgatgccaggccaaccaccgatctatattctgagaggccccgacaacttattgtaactggtatctccgacagatgcagacagggtggaaggagattgggtcatctggatgtcacatttggcacctgggagccagagcagcaggagccccangagctgagcggggaccctc

SEQ ID NO: 80 - DNA, 149 bp, Homo sapiens
  misc_feature (1)...(149): n = A,T,C or G
ccagnacncccatgaanttgatgganatgagcacttntacgtggacctggggaggaaggagactgtctggtgtttgcctgttctcatacaatttagatttgacccgcaatttgncctgacaaacactggctgttctaaaacataacttg

SEQ ID NO: 81 - DNA, 292 bp, Homo sapiens
  misc_feature (1)...(292): n = A,T,C or G
ggaagcagcactggtggtgcctcagccatggcctggaccgttctcctcctcggcctcctctctcactgcacagattctgtgacttcctatgtgttgactcagacaccctcagtgtcagtggccccaggaaagacggccaagattacctgtgggggaaacaatattgggagtcacaatgtacactggtattaccagaagccaggccaggcccctgtcctaatcatctcttttgataacgaccggncctcanggatatctgagcgattctctggcttcaattctggggacatgg

SEQ ID NO: 82 - DNA, 284 bp, Homo sapiens
  misc_feature (1)...(284): n = A,T,C or G
aatgaaaaggccctattgctatgcaatctggtccaaaaccactcttcaggaaggatgtcttcactggtgggccccacgcaaagcttcttcatgagggaatctaagactttgggggctgtccagattatgaatgggctcttccacattgccctggggggtcttctgatgatcccagcagggatctatgcacccatctgtgtgactgtgtggtaccctctctggggaggcattatgtatattatttccggatcactcctgcancaacggaaaaaactccaggaagt

SEQ ID NO: 83 - DNA, 374 bp, Homo sapiens
cctaggcatgacaatcggaggactcgagggggatggaggactagtgatcggctggctgcttccagtcgattagagaggtgaaaaagctgaacgtgtgccagtaatcttcaaaaggcagaacatatcacctctgccccgtaaactgttctctccgagggaaaaaatggaagttatcctcacagttcactgccgtggtatttcttcttgtcccatcttttgcatgacttgccatggtacagccttgtttcaaactgttcactgtgatctgtgggtctttgagtttcagtgagtttgctgaaatgtcgaagaagtagttccaaacttcaatgttcaatgaaatttttgttcaagtttgaaatggagagagcagcttt

SEQ ID NO: 84 - DNA, 357 bp, Homo sapiens
catgagggtccccgctcagctcctggggctcctgctgctctggctcccaggtgccaaatgtgacatccagatgacccaatctccttccaccctgtctgcatctgtcggagatacagttacaataagttgtcgggcctctcagaatatagatcggtggttggcctggcatcaacagaaaccaggcaaagcccctaatgtcctaatttatgcgacttccagtttagaagaaggggtctcattaagatttactggcagtggatctgggacacaattcaatttaaccatcaccagtctgcagcctgacgattcagcaacttattattgtcaacattattctgcatctcttcgcagttttgg

SEQ ID NO: 85 - DNA, 372 bp, Homo sapiens
ccaccctgaccatcaacaggatcgaagccggcgatgaggccgactattactgtcaagtgtgggatcttaataatgaccatgtcgtcttcggcggaggaaccaaactggccgtcctaggtcagcccaaggctgccccctcggtcactctgttcccgccctcctctgaggagcttcaagccaacaaggccacactggtgtgtctcataagtgacttctacccgggagccgtgacagtggcctggaaggcagatagcagccccgtcaaggcgggagtggagaccaccacaccctccaaacaaagcaacaacaagtacgcggcagcagctatctgagcctgacgcctgagcagtggaagtcccacagaagctacag

SEQ ID NO: 86 - DNA, 111 bp, Homo sapiens
  misc_feature (1)...(111): n = A,T,C or G
cgaagtcctgggaggaacctgctcantctgggcctaangaancagcactggtggtgcctnanccatngactggaccgttctnactcctcngncttctctttcactncacan

SEQ ID NO: 87 - DNA, 357 bp, Homo sapiens
  misc_feature (1)...(357): n = A,T,C or G
ccaccctgaccatcaacagggtcgaagccggcgatgaggccgactattactgtcaagtgtgggatcttaataatgaccatgtcgtcttcggcggaggaaccaaactggccgtcctaggtcagcccaaggctgccccctcggtcactctgttcccgccctcctctgaggagcttcaagccaacaaggccacactggtgtgtctcataagtgacttctacccgggagccgtnacagtggcctggaaggcagatagcagccccgtcaaggcgggagtggagaccaccacaccctncaaacaaagcaacaacaagtacgcggccagcagctatctgagcctgacgcctgagcagtggaagt

SEQ ID NO: 88 - DNA, 308 bp, Homo sapiens
ctcagtctgggcctaaggaagcagcactggtggtgcctcagccatggcctggaccgttctcctcctcggcctcctctctcactgcacagactctgtgacctcctatgtgttgactcagacaccctcagtgtcagtggccccaggaaagacggccaagattacctgtgggggaaacaatattgggagtaacaatgtacactggtattaccagaagccaggccaggcccctgtcctaatcatctcttttgataacgaccggccctcagggatatctgagcgattctctggcttcaattctggggacatgg

SEQ ID NO: 89 - DNA, 206 bp, Homo sapiens
  misc_feature (1)...(206): n = A,T,C or G
ccaccctgaccatcaacagggtcgaagccggcgatgaggccgactattactgtcaagtgtgggatcgtaataatgaccatgtcgtcttcggcggagggaccaaactggccgtcctaggtcagcccaaggctgccccctcggnnactctgttcccgccctcctctgaggagcttcaagccaacaaggccacactggtgtgtctcata

SEQ ID NO: 90 - DNA, 373 bp, Homo sapiens
ctgtagcttctgtgggacttccactgctcaggcgtcaggctcagatagctgctggccgcgtacttgttgttgctttgtttggagggtgtggtggtctccactcccgccttgacggggctgctatctgccttccaggccactgtcacggctcccgggtagaagtcacttatgagacacaccagtgtggccttgttggcttgaagctcctcagaggagggcgggaacagagtgaccgagggggcagccttgggctgacctaggacggccagtttggtccctccgccgaagacgacatggtcattattatgatcccacacttgacagtaatagtcggcctcatccccggcttcgaccctgttgatggtcagggtgg

SEQ ID NO: 91 - DNA, 347 bp, Homo sapiens
cccgctcagctcctggggctcctgctgctctggctcccaggtgccaaatgtgacatccagatgacccaatctccttccaccctgtctgcatctgtcggagatacagttacaataagttgtcgggcctctcagaatatagatcggtggttggcctggcatcaacagaaacctggcaaagcccctaatgtcctaatttatgcgacttccagtttagaagaaggggtctcattaagatttactggcagtggatctgggacacaattcaatttaaccatcaccagtctgcagcctgacgattcagcaacttattattgtcaacattattctgcatctcttcgcagttttgg

SEQ ID NO: 92 - DNA, 421 bp, Homo sapiens
ctgtagcttctgtgggacttccactgctcaggcgtcaggctcagatagctgctggccgcgtacttgttgttgctttgtttggagggtgtggtggtctccactcccgccttgacggggctgctatctgccttccaggccactgtcacggctcccgggtagaagtcacttatgagacacaccagtgtggccttgttggcttgaagctcctcagaggagggcgggaacagagtgaccgagggggcagccttgggctgacctaggacggccagtttggtccctccgccgaagacgacatggtcattattacgatcccacacttgacagtaatagtcggcctcatcgccggcttcgaccctgttgatggtcagggtggccatgtccccagaattgaagccaggccaggcccctgtcctaatcatct

SEQ ID NO: 93 - DNA, 324 bp, Homo sapiens
  misc_feature (1)...(324): n = A,T,C or G
ctgtagcttctgtggnacttccactgctcaggcgtcaggctcagatagctgctggccgcgtacttgttgttgctttgtttggagggtgtggtggtctccactcccgccttgacggggctgctatctgccttccaggccactgtcacggctcccgggtagaagtcacttatgagacacaccanngnggccttgntggcttgaagctcctnagaggagggcgggaacagagtgaccgagggggcagccttgggctgacctaggacggccagtttggtccctncgccnaanacgacntggtcattattacngatcccacacttgaca

SEQ ID NO: 94 - DNA, 150 bp, Homo sapiens
  misc_feature (1)...(150): n = A,T,C or G
ctgtagcttctgtggnncttccactgctcangcgtcaggctcagatagctgctggccgcgtacttgttgttgctttgtttgnagggtgtgnnggtctccactcccgnnttgacggggctgctatctgccttccaggccactgtcacggct

SEQ ID NO: 95 - DNA, 167 bp, Homo sapiens
  misc_feature (1)...(167): n = A,T,C or G
ctgtagcttctgcnggacttccactgctcaggcgtcaggctcagatagctgctggccgcgtacttgttgntgctttgtttggagggtgtggtggnctccactcccgncttgacggggctgnnatctgccttccaggccactgtcacggntcccggntagaagtcact

SEQ ID NO: 96 - DNA, 307 bp, Homo sapiens
  misc_feature (1)...(307): n = A,T,C or G
ctgtagcttctgtgggncttccactgctcaggcgtcaggctcagatagctgctggccgcgtacttgttgttgctttgtttggagggtgtggtggtctccactcccgccttgacggggctgctatctgccttccangccactgtcacggctcccgggtagaagtcacttatgagacacaccagtgtggccttgttggcttgaagctcctcanagganggcggnaacagagtgaccganggggcanccttgggctgacctangacggccagttnggtccctccgccgaanacgacatggtcattattac

SEQ ID NO: 97 - DNA, 571 bp, Homo sapiens
  misc_feature (1)...(571): n = A,T,C or G
ctgtagcttctgtgggacttccactgctcaggcgtcaggctcagatagctgctggccgcgtacttgttgttgctttgtttggagggtgtggtggtctccactcccgccttgacggggctgctatctgccttccaggccactgtcacggctcccgggtagaagtcacttatgagacacaccagtgtggccttgttggcttgaagctcctcagaggagggcgggaacagagtgaccgagggggcagccttgggctgacctcaatctgggtctggatcctggctctgggtcccagctctgtgattcccgagcatcagccccgagggcactgggtccttctaaagtctcccangaggtgcctccctcagaccccttgttcccaattccccaggagatggaacccacgtaacccaagggtaaacctgttccgacaagaacccagactgagggggccagaacagaacaaggcttanagacccagtctgcgcctgtcagacacacaaagagacaaacagagagagagagacagacagacagacngacagacgaggctcagtaggtcattctatctagt

SEQ ID NO: 98 - DNA, 337 bp, Homo sapiens
  misc_feature (1)...(337): n = A,T,C or G
ctgtagcttctgtgggncttccactgctcaggcgtcaggctcagatagctgctggccgcgtacttgttgttgctttgtttggagggtgtggtggtctccactcccgccttgacggggctgctatctgccttccaggccactgtcacggctcccgggtagaagtcacttatgagacacaccagtgtggccttgttggcttgaagctcctcagaggagggcgggaacagagtgaccgagggggcagccttgggctgacctaggacggccagtttggtccctccgccgaagacgacatggtcattattacnatcccacacttnacagtaatagtcggcct

SEQ ID NO: 99 - DNA, 342 bp, Homo sapiens
  misc_feature (1)...(342): n = A,T,C or G
ccaccctgaccatcaacagggtcgaagccggcgatgaggccgactattactgtcaagtgtgggatcgtaataatgaccatgtcgtcttcggcggannaaccaaactggccgnnctaggtcagcccaannctgccccctnggtnactcatgntcnngccctcctctgaggagcttcaagccaacaaggccacactggtgtgtctcataantgacttctacccgggagccgtgacagtggcctggaaggcanatagcanccccgtcaaggcggnagtgganaccacnacancctccaaacaaagcaacaacaagtacgcggncagnagctatctgagtcctgac

SEQ ID NO: 100 - DNA, 366 bp, Homo sapiens
  misc_feature (1)...(366): n = A,T,C or G
ctgtagcttctgtgggacttccactgctcaggcgtcaggctcagatagctgctggccgcgtacttgttgttgctttgtttggagggtgtggtggtctccactcccgccttgacggggctgctatctgccttccaggccactgtcacggctcccgggtagaagtcacttatgagacacaccagtgtggccttgttggcttgaagctcctcagaggagggcgggaacagagtgaccgagggggcagccttgggctgacctaggacggccagttttggtccctccgtcgaagacnacatggtcattattacgatcccacacttgacagtaatagncggnctcatcgccggcttcnaccctgttgatggt

SEQ ID NO: 101 - DNA, 131 bp, Homo sapiens
  misc_feature (1)...(131): n = A,T,C or G
ctgtagcttctgtgggncttccactgctcangcgtcaggctcagatagctgctggccgcgtacttgttgttgctttgtttggagggtgtggnggtctccactcccgccttgacggggctgctatctgcctt

SEQ ID NO: 102 - DNA, 330 bp, Homo sapiens
  misc_feature (1)...(330): n = A,T,C or G
ctgtagcttctgtggnacttccactgctcaggcgtnaggctcagatagctgctggccgcgtacttgttgttgctttgtttggagggtgtggtggtctccactcccgccttgacggggctgctatctgccttccaggccactgtcacggctcccgggtagaagtcacttatgagacacaccagtgtggccttgttggcttgaagctcctcagaggagggcgggaacanagtgaccgagggggcanncttgngctgacctangacggccagtttggtccctccgccgaagacgacatggtcattattacgatcccacacttgacagtaatag

SEQ ID NO: 103 - DNA, 369 bp, Homo sapiens
  misc_feature (1)...(369): n = A,T,C or G
cttctgtgggacttccactgctcaggcgtnaggctcanatagctgctggccgcgtacttgttgttgctttnnttggagggtgtggtggtcnncactcccgccttgacggggctgctatctgccttccaggccactgtcacggctcccgggtagaagtcacttatgagacacaccantgtggccttgttggcttgaagctcctcanaggagggcgggaacagagtgaccgagggggcagccttgggctgacctaggacggccagtttggtccctccgccgaagacgacatggtcattattacgatcccacacttgacagtaatagtcggcctcatcgccggcttcgaccctgttgatggtcagggtggcc

SEQ ID NO: 104 - DNA, 254 bp, Homo sapiens
  misc_feature (1)...(254): n = A,T,C or G
ccaccctgaccatcaacagggtcgaagccggcgatgaggccgactattactgtcaagtgtgggatcgtaataatgaccatgtcntcttcngnggagggaccaaactggccgtcctaggtcagcccaaggctgccccctcggtcactctgttcccgccctcctctgaggagcttcaagccaacaaggccacactggtgtgtctcataagtgacttctacccgggagccgtgacagtggcctggaaggcagatagc

SEQ ID NO: 105 - DNA, 366 bp, Homo sapiens
  misc_feature (1)...(366): n = A,T,C or G
caggacacagcatggacatgagggtccccgctcagctcctggggctcctgctgctctggctcccaggtgccaaatgtgacatccagatgacccaatctccttccaccctgtctgcatctgtcggagatacagttacaataagttgncgggcctctcanaatatagatcggtggttggcctggcatcaacagaaaccaggcaaagcccctaatgtcctaatttatgcgacttccagtttagaagaaggggtctcattaagatttactggcagtggatctgggacacaattcaatttaaccatcaccagtctgcagcctgacgattcagcaacttattattgtcaacattattntgcatctcttngca

SEQ ID NO: 106 - DNA, 485 bp, Homo sapiens
  misc_feature (1)...(485): n = A,T,C or G
aaaaatggagagtctgaattttattagagctcacacaccatatattaacatatacaactgtgaaccagctaatccctctgagaaaaactccccatctacccaatactgttacagcatacaatctctgttcttgggcattttgtcagtgatgctgatctttgccttcttccaggaacttgtaatagctggcatcgttgagaatgaatggaaaagaacgtgctccagacccaaatctaacatagttctcctgtcggcagaagaaaaaaaagaacagactattgaaataaaagaagaagtggttgggctaactgaaacatcttcccaaccaaagaatgaagaagacattgaaattattccaatccaagaagaggaagaagaagaaacagagacgaactttccagaacctccccaagatcaggaatcctcaccaatagaaaatgacagctctccttaagtgatttcttctgttttctgnttcctttttt

SEQ ID NO: 107 - DNA, 373 bp, Homo sapiens
ccaccctgaccatcaacagggtcgaagccggcgatgaggccgactattactgtcaagtgtgggatcgtaattatgaccatgtcgtcttcggcggagggaccaaactggccgtcctaggtcagcccaaggctgccccctcggtcactctgttcccgccctcctctgaggagcttcaagccaacaaggccacactggtgtgtctcataagtgacttctacccgggagccgtgacagtggcctggaaggcagatagcagccccgtcaaggcgggagtggagaccaccacaccctccaaacaaagcaacaacaagtacgcggccagcagctatctgagcctgacgcctgagcagtggaagtcccacagaagctacag

SEQ ID NO: 108 - DNA, 75 bp, Homo sapiens
  misc_feature (1)...(75): n = A,T,C or G
ctgtagcttctgtgggacttccactgctcaggcgtcaggctcanatanctgctggccgcgtacttgttgttgctt

SEQ ID NO: 109 - DNA, 485 bp, Homo sapiens
  misc_feature (1)...(485): n = A,T,C or G
aaaaatggagagtctgaattttattagagctcacacaccatatattaacatatacaactgtgaaccagctaatccctctgagaaaaactccccatctacccaatactgttacagcatacaatctctgttcttgggcattttgtcagtgatgctgatctttgccttcttccaggaacttgtaatagctggcatcgttgagaatgaatggaaaagaacgtgctccagacccaaatctaacatagttctcctgtcagcagaagaaaaaaaagaacagactattgaaataaaagaagaagtggttgggctaactgaaacatcttcccaaccaaagaatgaagaagacattgaaattattccaatccaagaagaggaagaagaagaaacagagacgaactttccagaacctccccaagatcaggaatcctcaccaatagaaaatgacagctctccttaagtgatttcttctgttttctgnttcctttttt

SEQ ID NO: 110 - DNA, 561 bp, Homo sapiens
  misc_feature (1)...(561): n = A,T,C or G
aaggaagcagcactggtggtgcctcagccatggcctggaccgttctcctcctcggcctcctctctcactgcacaggtgatccccccagggtctcaccaacctgcccagcccaaggcttctgggtccagcgtgtccttaattctgagctcaggagggcccttcctgtggtgggcaggatgctcatgaccctggtgcagggtgggaggctggtggggctgaattccccccaaactgtgctcaaggacttgtgagaacctgagggactgcacctgccaagagaaagtagtgagttttcagttcgaagtctccatacaacaggacatttgtgggccactggggctacggctgattgcaggggataccctgagggtttacagactctctggattttgtctgggacagcaggacaagggatttcaaaaggaatacctttcacttggaaggcaacctctctgncatttattcttttgnttatttatttatttttttatttattcttatctttgcagactctgtgacctcctatgtgttgactcagacaccctcagtgtcagtggcccc

SEQ ID NO: 111 - DNA, 255 bp, Homo sapiens
  misc_feature (1)...(255): n = A,T,C or G
ccaccctgaccatcaacagggtcgaagccggcgatgaggccgactattactgtcaagtgtgggatcgtaataatgaccatgtcgtcttcggcggagggaccaaactggccgtcctaggtcagcccaaggctgccccctcggtcactctgttcccgccctcctctgaggagcttcaagccaacaaggccacactggtgtgtctcataagtgacttctacccggnagccgtgacagtggcctggaaggcanatagca

SEQ ID NO: 112 - DNA, 365 bp, Homo sapiens
  misc_feature (1)...(365): n = A,T,C or G
ctgtagcttctgtgggacttccactgctcangcgtcangctcagatagctgctggccgcgtacttgttgttgctttgtttggagggtgtggtggtctccactcccgccttgacggggctgctatctgccttccaggccactgtcacggctcccgggtagaagtcacttatgagacacaccagtgtggccttgttggcttgaagctcctcataggagggcggnaacagantgaccganggggcagccttgngctgacctaggacggccagtttggtccctccgccgaagacgacatggtcattattacgatcccacacttgacagtaatagtcggcctcatngccggcttcgaccctgttgatggt

SEQ ID NO: 113 - DNA, 66 bp, Homo sapiens
  misc_feature (1)...(66): n = A,T,C or G
ctgtagcttccnccggacttccactgctcangcgtcaggctcagatagctgctggccgcgtacttg

SEQ ID NO: 114 - DNA, 94 bp, Homo sapiens
  misc_feature (1)...(94): n = A,T,C or G
ctgtagcttctgtnggacttccactgctcaggcgtcaggctcagatagctgctggccgcgtacttgttattgctttgnttggagggngtggtgg

SEQ ID NO: 115 - DNA, 386 bp, Homo sapiens
  misc_feature (1)...(386): n = A,T,C or G
ctgtagcttctgtgggacttccactgctcaggcgtcaggctcagatagctgctggccgcgtacttgttgttgctttgtttggagggtgtggtggtctccactcccgccttgacggggctgctatctgccttccaggccactgtcacggctcccgggtagaagtcacttatgagacacaccagtgtggccttgttggcttgaagctcctcagaggagggcgggaacagagtgaccgagggggcagccttgggctgacctannacggccagtttggtccctccgccnaagacgacatggttcattattacgatcccacacttgacagtaatagtcggcctcatcgccggcttcnaccctgttgatggtcagggtggctgttcatgctt

SEQ ID NO: 116 - DNA, 188 bp, Homo sapiens
  misc_feature (1)...(188): n = A,T,C or G
ccaccctgaccatcaacagggtcgaagccggcgatgaggccgactattactgtcaagtgtgggatcgtaataatgaccatgtcgtcttcngcggagggaccaaactggccgtcctaggtcancccaaggctgccccctcggtcactctgttcccgccctcctctgangagcttcaanccaacaaggcc

SEQ ID NO: 117 - DNA, 308 bp, Homo sapiens
  misc_feature (1)...(308): n = A,T,C or G
ctgtagcttctgtgggncttccactgctcanncgtcaggctcagatagctgctggccgcgtacttgttgttgctttgtttggagggtgtggtggtctccactcccgccttgacggggctgctatctgccttccaggccactgtcacggctcccgggtagaagtcacttatgagacacaccantgtggccttgttggcttgaagctcctcagaggagggcgggaacanantgaccganggggcagccttgggctgacctangacggccagtttggttcctccgccnaanacgacatggtcaattattaa

SEQ ID NO: 118 - DNA, 203 bp, Homo sapiens
  misc_feature (1)...(203): n = A,T,C or G
ctgtagcttctgtgnnncttccactgctcaggcgtcaggctcagatagctgctggccgcgtacttgttgttgctttgtttggagggtgtggtggtctccactcccgccttgacggggctgctatctgccttccaggccactgtcacggctcccgggtagaagtcacttatgagacacaccagtgtggccttgntggcttgaag

SEQ ID NO: 119 - DNA, 293 bp, Homo sapiens
  misc_feature (1)...(293): n = A,T,C or G
ccaccctgaccatcaacagggtcgaagccggcgatgaggccgactattactgtcaagtgtgggatcgtaataatgaccatgtcgtcttcggcggagggaccaaactggccgtcctaggtcagcccaaggctgccccctcggtcactctgttcccgccctcctctgaggagcttcaagccaacaaggccacactggtgtgtctcataagtgactttctacccgggagccgtgacantggcctgnaaggcanatagcangnnccgtcaaggcggnagtggagaccaccacaccct

SEQ ID NO: 120 - DNA, 266 bp, Homo sapiens
  misc_feature (1)...(266): n = A,T,C or G
ctaaggaagcagcactggtggtgcctcagccatggcctggaccgttctcctcctcggcctcctctctcactgcacagactctgtgacctcctatgtgttgactcagacaccctcagtgtcagtggccccangaaagacggccaagattacctgtgggggaaacaatattgggagtaacaatgtacactggtattaccagaagccnggccangcccctgttcctaatcatctcttttgataacgaccggnnctcagggatatctgag

SEQ ID NO: 121 - DNA, 210 bp, Homo sapiens
  misc_feature (1)...(210): n = A,T,C or G
ctgtagcttctgtnggacttccactgctcaggcgtcaggctcagatagctgctggccgcgtacttgttgttactttgtttggagggtgtggtggtctccactcccgccttgacggggctgctatctgccttccaggccactgtcacggctcccgggtagaagtcacttatgagacacaccantgtggccttgttggcttgaagctcctca

SEQ ID NO: 122 - DNA, 292 bp, Homo sapiens
ccatgtccccagaattgaagccagagaatcgctcagatatccctgagggccggtcgttatcaaaagagatgattaggacaggggcctggcctggcttctggtaataccagtgtacattgttactcccaatattgtttcccccacaggtaatcttggccgtctttcctggggccactgacactgagggtgtctgagtcaacacataggaggtcacagagtctgtgcagtgagagaggaggccgaggaggagaacggtccaggccatggccgaggcaccaccagtgctgcttcc

SEQ ID NO: 123 - DNA, 474 bp, Homo sapiens
  misc_feature (1)...(474): n = A,T,C or G
ggaagcagcactggtggtgcctcagccatggcctggaccgttctcctccccggcctcctctctcactgcacagactctgtgacctcctatgtgttgactcagacaccctcagtgtcagtggccccaggaaagacggccaagattacctgtgggggaaacaatattgggagttacagtgtacactggtattaccaaaagccaggccaggcccctgtcctaatcatctcttttgataacgaccggccgcccgggcaggtccaatgaagatactccacagttgtatgtggcctgtggtaggggaccccgatcatctctgagagtcctaagacatggacttgaggtgtcagaaatggctgtttctgagctacctggtnaccccaaacgctgtctggacagtgcgtcgacacattgaagatgagtttgatgcctacatcattgtgtctttcgtgaatgccaccctagtgttgtccattg

SEQ ID NO: 124 - DNA, 200 bp, Homo sapiens
  misc_feature (1)...(200): n = A,T,C or G
ccaccctgaccatcaacagggtcgaagccggcgatgaggccgactattactgtcaagtgtgggatcgtaataatgaccatgtcgtcttcggcgganngaccaaactggccgtcctaggtcagcccaaggctgccccctcggtcactctgttcccgccctcctctgaggagcttcaagccaacaaggccacactggtgtgt

SEQ ID NO: 125 - DNA, 155 bp, Homo sapiens
  misc_feature (1)...(155): n = A,T,C or G
ctgtagcttcngccggacttccactgctcaggcgtcaggctcagatagctgctggccgcgtacttgttgttgctttgtttggagggtgtggtggtctccactcccgccttgacggggctgctatctgccttccaggccactgtcacggctcccgg

SEQ ID NO: 126 - DNA, 160 bp, Homo sapiens
  misc_feature (1)...(160): n = A,T,C or G
ccaccctgaccatcaacagggtcgaagccggcgatgaggccgactattactgtcaagtgtgggatcttaatgatgaccatgtcgtcttcggcggangaaccaaactggccgtcctaggtcagcccaaggctgccccctcggtcactctgtnnccgccctc

SEQ ID NO: 127 - DNA, 201 bp, Homo sapiens
  misc_feature (1)...(201): n = A,T,C or G
ccaccctgaccatcaacagggtcgaagccggcgatgaggccgactattactgtcaagtgtgggatcgtaataatgaccatgtcgtcttcggcgganngaccaaactggccgtcctaggtcagnccaaggctgncccctcggtcactctgttcccgccctcctntgangagcttcaagccaacaaggccacactggtgtgtc

SEQ ID NO: 128 - DNA, 198 bp, Homo sapiens
  misc_feature (1)...(198): n = A,T,C or G
ctgtagcttctgnnggncttccactgctcaggcgtcaggctcanatagctgctggccgcgtacttgttgttgctttgtttggagggtgtggtggtctccactcccgccttgacggggctgctatctgccttccaggccactgtcacggctcccgggtagaagtcactttatganacacaccantgtggccttgttggc

SEQ ID NO: 129 - DNA, 485 bp, Homo sapiens
  misc_feature (1)...(485): n = A,T,C or G
aaaaaaggaaacanaaaacagaagaaatcacttaaggagagctgtcattttctattggtgaggattcctgatcttggggaggttctggaaagttcgtctctgtttcttcttcttcctcttcttggattggaataatttcaatgtcttcttcattctttggttgggaagatgtttcagttagcccaaccacttcttcttttatttcaatagtctgttcttttttttcttctgctgacaggagaactatgttagatttgggtctggagcacgttcttttccattcattctcaacgatgccagctattacaagttcctggaagaaggcaaagatcagcatcactgacaaaatgcccaagaacagagattgtatgctgtaacagtattgggtagatggggagtttttctcagagggattagctggttcacagttgtatatgttaatatatggtgtgtgagctctaataaaattcagactctccattttt

SEQ ID NO: 130 - DNA, 77 bp, Homo sapiens
  misc_feature (1)...(77): n = A,T,C or G
ctgtagcttctgtnggacttccactgctcaggcgtcaggctcagatagctgctggccgcgtacttgttgttgctttg

SEQ ID NO: 131 - DNA, 161 bp, Homo sapiens
  misc_feature (1)...(161): n = A,T,C or G
ctgtagcttctgtnggacttccactgctcaggcgtcaggctcagatagctgctggccgcgtacttgttgttgctttgtttggagggtgtggtggtctccactcccgccttgacggggctgctatctgccttccaggccactgtcacggctcccgggtagaa

SEQ ID NO: 132 - DNA, 294 bp, Homo sapiens
  misc_feature (1)...(294): n = A,T,C or G
ccaccctgaccatcaacagggtcgaagccggcgatgaggccgactattactgtcaagtgtgggatcataataatgaccatgtcgtcttcggcggagggaccaaactggccgtcctaggtcagcccaaggctgccccctcggtcactctgttcccgccctcctctgaggagcttcaagccaacaaggccacactggtgtgtctcataagtgacttctacccgggagccgtgacantnncctggaaggcanatancagccccgtcaangcgggagtgganaccaccacaccctcca

SEQ ID NO: 133 - DNA, 298 bp, Homo sapiens
  misc_feature (1)...(298): n = A,T,C or G
ccaccctgaccatcaacagggtcnaagccggcgatgaggccgactattactgtcaagtgtgggatcgtaataatgaccatgtcgtcttcggcggagggaccaaactggccgtcctaggtcagcccaaggctgccccctcggtcactctgntcccgncctcctntgangagcttcaagccaacaaggccacactggtgtgtctcataagtgacttctacccgggagccgtgacagtggcctggaaggcantatagcagccccgtcaaggcgggagtggagaccaccacaccctccaaac

SEQ ID NO: 134 - DNA, 373 bp, Homo sapiens
  misc_feature (1)...(373): n = A,T,C or G
ctgtagcttctgtgggacttccactgttcaggcgtcaggctcagatagctgctggccgcgtacttgttgttgctttgtttggagggtgtggtggtctccactcccgccttgacggggctgctatctgccttccaggccactgtcacggctcccgggtagaagtcacttatgagacacaccagtgtggccttgttggcttgaagctcctcagaggagggcgggaacagagtgaccgagggggcagccttgggctgacctangacggccagtttggtccctccaccgaagacgacatggtcattattacgatcccacacttgacagtaatagtcggcctcatcgccggcttcgaccctgttgatggtcagggtgg

SEQ ID NO: 135 - DNA, 487 bp, Homo sapiens
  misc_feature (1)...(487): n = A,T,C or G
aaaaatggagagtctgaattttattagagctcacacaccatatattaacatatacaactgtgaaccagctaatccctctgagaaaaactccccatctacccaatactgttacagcatacaatctctgttcttgggcattttgtcagtgatgctgatctttgccttcttccaggaacttgtaatagctggcatcgttgagaatgaatggaaaagaacgtgctccagacccaaatctaacatagttctcctgtcagcagaagaaaaaaaagaacagactattgaaataaaagaagaagtggttgggctaactgaaacatcttcccaaccaaagaatgaagaagacattgaaattattccaatccaagaagaggaagaagaagaaacagagacgaactttccagaacctccccaagatcaggaatcctcacnaatagaaaatgacagctctccttaagtgatttcttctgttttctgtttttcctttttt

SEQ ID NO: 136 - DNA, 368 bp, Homo sapiens
acagcatggacatgagggtccccgctcagctcctggggctcctgctgctctggctcccaggtgccaaatgtgacatccagatgacccaatctccttccaccctgtctgcatctgtcggagatacagttacaataagttgtcgggcctctcagaatatagatcggtggttggcctggcatcaacagaaaccaggcaaagcccctaatgtcctaatttatgcgacttccagtttagaagaaggggtctcattaagatttactggcagtggatctgggacacaattcaatttaaccatcaccagtctgcagcctgacgattcagcaacttattattgtgcaacattattctgcatctcttcgcagttttgg

SEQ ID NO: 137 - DNA, 59 bp, Homo sapiens
  misc_feature (1)...(59): n = A,T,C or G
ctgtagcttctgtgggncttccactgctcgggcgtcaggctcaggtagctgctggccgc

SEQ ID NO: 138 - DNA, 357 bp, Homo sapiens
  misc_feature (1)...(357): n = A,T,C or G
ccaccctgaccatcaacagggtcgaagccggcgatgaggccgactattactgtcaagtgtgggatcgtaataatgaccatgtcgtcttcggcggagggaccaaactggccgtcctaggtcagcccaaggctgccccctcggtcactctgttcccgccctcctctgannagcttnaagccaacaaggccacactggtgtgtctcataagtgacttctacccgggagccgtgacagtggcctggaaggcagatagcagccccgtcaaggcgggagtggagaccaccacaccctccaaacaaagcaacaacaagtacncggccagcanctatctgagcctgacgcctgagcagtggaagt

SEQ ID NO: 139 - DNA, 79 bp, Homo sapiens
ctgtagcttctgtgggacttccactgctcaggcgtcaggctcagatagctgctggccgcgtacttgttgttgctttgtt

SEQ ID NO: 140 - DNA, 239 bp, Homo sapiens
  misc_feature (1)...(239): n = A,T,C or G
ctgtagcttctgtgggacttccactgctcaggcgtcaggctcagatagctgctggccgcgtacttgttgttgctttgttnngagggtgtggnngtctccactcccgccttganngggctgctatcnnccttccagagccacnntcacggctcccgggtagaagtcacttatgagacacaccantgtggccttgttngcttnaagctcctcagaggagggcgggaacagagtgaccgagg

SEQ ID NO: 141 - DNA, 373 bp, Homo sapiens
ccaccctgaccatcaacagggtcgaagccggcgatgaggccaactattactgtcaagtgtgggatcgtaataatgaccatgtcgtcttcggcggagggaccaaactggccgtcctaggtcagcccaaggctgccccctcggtcactctgttcccgccctcctctgaggagcttcaagccaacaaggccacactggtgtgcctcataagtgacttctacccgggagccgtgacagtggcctggaaggcagatagcagccccgtcaaggcgggagtggagaccaccacaccctccaaacaaagcaacaacaagtacgcggccagcagctatctgagcctgacgcctgagcagtggaagtcccacagaagctacag

SEQ ID NO: 142 - DNA, 373 bp, Homo sapiens
ccaccctgaccatcaacagggtcgaagccggcgatgaggccgactattactgtcaagtgtgggatcgtaataatgaccatgtcgtcttcggcggagggaccaaactggccgtcctaggtcagcccaaggctgccccctcggtcactctgttcccgccctcctctgaggagcttcaagccaacaaggccacactggtgtgtctcataagtgacttctacccgggagccgtgacagtggcctggaaggcagatagcagccccgtcaaggcgggagtggagaccaccacaccctccaaacaaagcaacaacaagtacgcggccagcagctatctgagcctgacgcctgagcagtggaagtcccacagaagctacag

SEQ ID NO: 143 - DNA, 267 bp, Homo sapiens
cacagtcatcaattatagaccccacaacatgcgccctgaagacagaatgttccatatcagagctgtgatcttgagagccctctccttggctttcctgctgagtctccgaggagctggggccatcaaggcggaccatgtgtcaacttatgccgcgtttgtacagacgcatagaccaacaggggagtttatgtttgaatttgatgaagatgagatgttctatgtggatctggacaagaaggagaccgtctggcatctggaggagtttgg

SEQ ID NO: 144 - DNA, 367 bp, Homo sapiens
cttctgtgggacttccactgctcaggcgtcaggctcagatagctgctggccgcgtacttgttgttgctttgtttggagggtgtggtggtctccactcccgccttgacggggctgctatctgccttccaggccactgtcacggctcccgggtagaagtcacttatgagacacaccagtgtggccttgttggcttgaagctcctcagaggagggcgggaacagagtgaccgagggggcagccttgggctgacctaggacggccagtttggttcctccgccgaagacgacatggtcattattaagatcccacacttgacagtaatagtcggccttatcgccggcttcgaccctgttgatggtcagggtgg

SEQ ID NO: 145 - DNA, 90 bp, Homo sapiens
  misc_feature (1)...(90): n = A,T,C or G
ccaccctnaccatcaacagggtcgaagccggggatgaggccgactattactgnnaagtgtgggatcataataatgaccatgtcgnnttcg

SEQ ID NO: 146 - DNA, 291 bp, Homo sapiens
ccatgtccccagaattgaagccagagaatcgctcagatatccctgagggccggtcgttatcaaaagagatgattaggacaggggcctggcctggcttctggtaataccagtgtacattgttactcccaatattgtttcccccacaggtaatcttggccgtctttcctggggccactgacactgagggtgtctgagtcaacacataggaggtcacagagtctgtgcagtgagagaggaggccgaggaggagaacggtccaggccatggctgaggcaccaccagtgctgcttc

SEQ ID NO: 147 - DNA, 244 bp, Homo sapiens
ccatgtccccagaattgaagccagagaatcgctcagatatccctgagggccagtcgttatcaaaagagatgattaggacaggggcccggcctggcttctggtaataccagtgtacattgttactcccaatattgtttcccccacaggtaatcttggccgtctttcctggggccactgacactgagggtgtctgagtcaacacataggaggtcacagagtctgtgcagtgagagaggaggccgag

SEQ ID NO: 148 - DNA, 513 bp, Homo sapiens
ccaagccttttcctttgaggctcagggcgggctggctaacattgctatattgaacaacaacttgaataccttgatccagcgttccaaccacactcaggccaccaacgatccccctgaggtgaccgtgtttcccaaggagcctgtggagctgggccagcccaacaccctcatctgccacattgacaagttcttcccaccagtgctcaacgtcacgtggctgtgcaacggggagctggtcactgagggtgtcgctgagagcctcttcctgcccagaacagattacagcttccacaagttccattacctgacctttgtgccctcagcagaggacttctatgactgcagggtggaacactggggcttggaccagccgctcctcaagcactgggaggcccaagagccaatccagatgcctgagacaacggagactgtgctctgtgccctgggcctggtgctgggcctagtcggcatcatcgtgggcaccgtcctcatcataaagtctctgcgttctgg

SEQ ID NO: 149 - DNA, 181 bp, Homo sapiens
cttctgtgggacttccactgctcaggcgtcaggctcagatagctgctggccgcgtacttgttgttgctttgtttggagggtgtggtggtctccactcccgccttgacggggctgctatctgccttccaggccactgtcacggctcccgggtagaagtcacttatgagacacaccagtgtgg

SEQ ID NO: 150 - DNA, 373 bp, Homo sapiens; identical to SEQ ID NO: 6

SEQ ID NO: 151 - DNA, 252 bp, Homo sapiens
cttctgtgggacttccactgctcaggcgtcaggctcagatagctgctggccgcgtacttgttgttgctttgtttggagggtgtggtggtctccactcccgccttgacggggctgctatctgccttccaggccactgtcacggctcccgggtagaagtcacttatgagacacaccagtgtggccttgttggcttgaagctcctcagaggagggcgggaacagagtgaccgagggggcagccttgggctgacct

SEQ ID NO: 152 - DNA, 499 bp, Homo sapiens
  misc_feature (1)...(499): n = A,T,C or G
cctcggatgatgaagacagtgcccaccacaatgcccacgaggcccacagacaaccccagggcgcagaccacagtctctgtgagctctgacataggggctggaatctcaggctcccagtgtttcagaagaggcttgtccagtccccagtgctccaccttgcagtcataactctcctcagcagaagggaggagggtgaggtaactgatcttgaagaaggaatgatcactcttggagaggaagctggtctcanaaacaccttctgtgactgagtgcccattgctcanccatgtgatgttgaccacaggaggaaagatgttgtccacaagacagatgaggatgttgggctgacccagtgtcacgggagacttggaaaacactgtgacctcaggaacctcattggtagcagcggtagagttggagcgtttaatcagactgttcaagttatgttttangacagcgatgtttgtcagtgcaaattgcgggtcaaatctaaattgtc

SEQ ID NO: 153 - DNA, 373 bp, Homo sapiens; identical to SEQ ID NO: 90

SEQ ID NO: 154 - DNA, 243 bp, Homo sapiens
  misc_feature (1)...(243): n = A,T,C or G
ctgtagcttctgngggacttccactgctcaggcgtcaggctcagatagctgctggccgcgtacttgttgttgctttgtttggagggtgtggnggtctccactcccgccttgacggggctgctatctgccttccaggccactgtcacngctcccgggtanaagtcacttnngagacacaccantgtggccttgntggcttgaanctcctcataggagggcgggaacagantgaccgagggggca

SEQ ID NO: 155 - DNA, 307 bp, Homo sapiens
  misc_feature (1)...(307): n = A,T,C or G
ccaccctgaccatcaacagggtcgaagccggcgatgaggccgactattactgtcaagtgtgggatcgtaataatgaccatgtcgtcttcggcggagggaccaaactggccgtcctaggtcagcccaaggctgccccctcggtcactctgttcccgccctcctctgaggagcttcaagccaacaaggccacactggtgtgtctcataagtgacttctacccgggagccgtgacagtggcctggaaggcagatagcanccccgtcaaggcgggagtggagaccaccacaccctccaaacaaagnaacaa

SEQ ID NO: 156 - DNA, 502 bp, Homo sapiens
ccatgtccccagaattgaagccagagaatcgctcagatatccctgagggccggtcgttatcaaaagagatgattaggacaggggcctggcctggcttctggtaataccagtgtacattgttactcccaatattgtttcccccacaggtaatcttggccgtctttcctggggccactgacactgagggtgtctgagtcaacacataggaggtcacagagttactttctcttggcaggtgcagtccctcaggttctcacaagtccttgagcacagtttggggggaattcagccccaccagcctcccaccctgcaccagggtcatgagcatcctgcccaccacaggaagggccctcctgagctcagaattaaggacacgctggacccagaagccttgggctgggcaggttggtgagaccctggggggatcacctgtgcagtgagagaggaggccgaggaggagaacggtccaggccatggctgaggcaccaccagtgctgcttcc

SEQ ID NO: 157 - DNA, 538 bp, Homo sapiens
  misc_feature (1)...(538): n = A,T,C or G
ctgtcccaaacgggccagccctggggctttggggctgggcctccgtgaggagaggtcagtcggtcagcggcccggggtggctgccctgagccccagggctggtcctggggtctgtcagtccttccccaggctttccaggtccagaaggctttgtggggtctggggctgtgtcagggtaaggaaagctgccttggtggaggaagagaagtcagagaggtcacacatgtggccttagaacctgctaagtccaacgtcagcatgtgacaggaggggaagtgaggcaagacggcagaacccaggggaaaaggtggcagggagtctgagagtgaggttgggaggaccagcatcttttaggccctgagcaagaaggaggtgaccggagtcttccaggtatccctccctcctagcttctggaagtgggagtcggggagggggctccagtcagtcangtgtaagctccatgccatggggactctgcaggacaggcaggcttgaggagccactgtgcctggacaggttctgcaggctcccccacttg

SEQ ID NO: 158 - DNA, 373 bp, Homo sapiens; identical to SEQ ID NO: 6

SEQ ID NO: 159 - DNA, 290 bp, Homo sapiens
  misc_feature (1)...(290): n = A,T,C or G
ctgtagcttctgtgggacttccactgctcaggcgtcaggctcagatagctgctggccgcgtacttgttgttgctttgtttggagggtgtggtggtctccactcccgccttgacggggctgctatctgccttccaggccactgtcacggctcccgggtagaagtcacttatgagacacaccagtgtggccttgttggcttgaagctcctcagaggagggcgggaacagagtgaccgagggggcagccttgggctgacctangacggccagtttgnnccctccgccgaagac

SEQ ID NO: 160 - DNA, 274 bp, Homo sapiens
  misc_feature (1)...(274): n = A,T,C or G
ctgtagcttctgtgggacttccactgctcaggcgtcaggctcagatagctgctggccgcgtacttgttgttgctttgtttggagggtgtggtggtctccactcccgccttgacggggctgctatctgccttccaggccactgtcacggctcccgggtagaagtcacttatgagacacaccantgtggccttgttggcttgaagctcctcanaggagggcgggaacagagtgaccgagggggcagccttgggctgacctaggacggccagtttgg

SEQ ID NO: 161 - DNA, 375 bp, Homo sapiens
gtcaggacacagcatggacatgagggtccccgctcagctcctggggctcctgctgctctggctcccaggtgccaaatgtgacatccagatgacccaatctccttccaccctgtctgcatctgtcggagatacagttacaataagctgtcgggcctctcagaatatagatcggtggttggcctggcatcaacagaaaccaggcaaagcccctaatgtcctaatttatgcgacttccagtttagaagaaggggtctcattaagatttactggcagtggatctgggacacaattcaatttaaccatcaccagtctgcagcctgacgattcagcaacttattattgtcaacattattctgcatctcttcgcagttttgg

SEQ ID NO: 162 - DNA, 288 bp, Homo sapiens
  misc_feature (1)...(288): n = A,T,C or G
ccaccctgaccatcaacagggtcgaagccggcgatgaggccgactattactgtcaagtgtgggatcgtaataatgaccatgtcgtcttcggcggagggaccaaactggccgtcctaggtcagcccaaggctgccccctcggtcactctgttcccgccctcctctgaggagcttcaagccaacaaggccacactggtgtgtctcataagtgacttctacccgggagccgtgacagtggcctggaaggcanatagcanccccgncaaggcgggagtggagaccaccacac

SEQ ID NO: 163 - DNA, 297 bp, Homo sapiens
ccaccctgaccatcaacagggtcgaagccggcgatgaggccgactattactgtcaagtgtgggatcgtaataatgaccatgtcgtcttcggcggagggaccaaactggccgtcctaggtcagcccaaggctgccccctcggtcactctgttcccgccctcctctgaggagcttcaagccaacaaggccacactggcgtgtctcataagtgacttctacccgggagccgtgacagtggcctggaaggcagatagcagccccgtcaaggcgggagtggagaccaccacaccctccaaac

SEQ ID NO: 164 - DNA, 395 bp, Homo sapiens
ccatgtccccagaattgaagccagagaatcgctcagatatccctgagggccggtcgttatcaaaagagatgattaggacaggggcctggcctggcttttggtaataccagtgtacactgtaactcccaatattgtttcccccacaggtaatcttggccgtctttcctggggccactgacactgagggtgtctgagtcaacacataggaggtcacagactctgtgcagtgagagaggaggccgaggaggagaacggtccaggccatggctgaggcaccaccagtgctgcttccttaggcaaagttatccctgtctgaaatggtatcttttgtgaggaggtctgacttgctgaggatttggactatgaaagagagaaccttgagtttcctgggaaag

SEQ ID NO: 165 - DNA, 292 bp, Homo sapiens; identical to SEQ ID NO: 29

SEQ ID NO: 166 - DNA, 193 bp, Homo sapiens
  misc_feature (1)...(193): n = A,T,C or G
gaaccgnacccgctccgtcccattgaagaaatgacactcagacgtagagtactccaagaaacgtggnctggtgtccccagccaaagccagtggggagctcancaccatcantgtcactgncagaactgncatgcaggaacctccagggagcctnagacacaccatgctgganaacaggacaggaccaggggcc

SEQ ID NO: 167 - DNA, 373 bp, Homo sapiens
  misc_feature (1)...(373): n = A,T,C or G
ctgtagcttctgtgggacttccactgctcaggcgtcaggctcagatagctgctggccgcgtacttgttgttgctttgtttggagggtgtggtggtctccactcccgccttgacggggctgctatctgccttccaggccactgtcacggctcccgggtagaagtcacttatgagacacaccagtgtggccttgttggcttgaagctcctcagaggagggcgggaacagagtgaccgagggggcagccttgggctgacctaggacggccagtttggtccctccgccgaagacgacatggtcattattacgatcccacacttgacagtaatagtcggcctcatngccggcttcgaccctgttgatggtcagggtgg

SEQ ID NO: 168 - DNA, 83 bp, Homo sapiens
  misc_feature (1)...(83): n = A,T,C or G
ccaccctgaccatcaacagggtcgaagccggngatgaggccgactattactgncaagtgtgggatcgtaataatgaccatgtc

SEQ ID NO: 169 - DNA, 466 bp, Homo sapiens
  misc_feature (1)...(466): n = A,T,C or G
ccttgcctcagatccaaggtcactcggaagaggccatgtctaccctcaatgacactcatggaggaaatgctgagagaagcattcagatgcatgacacaaggtaagactgccaaaaatcttgttcttgctctcctcattttgttatttgtttcatttttaggagttttgagagcaaaatgacaacacccagaaattcagtaaatgggactttcccggcagagccaatgaaaggccctattgctatgcaatctggtccaaaaccactcttcaggaggatgtcttcactggtgggccccacgcaaagcttcttcatgagggaatctaagactttgggggctgtccagattatgaatgggctcttccacattgccctggggggtcttctgatgatcccagcagggatctatgcacccatctgtgtgactgtgtggtaccctctctggggangaancggaagcataaagtg

SEQ ID NO: 170 - DNA, 429 bp, Homo sapiens
ccttgcctcagatccaaggtcactcggaagaggccatgtctaccctcaatgacactcatggaggaaatgctgagagaagcattcagatgcatgacacaaggtaagactgccaaaaatcttgttcttgctctcctcattttgttatttgttttatttttaggagttttgagagcaaaatgacaacacccagaaattcagtaaatgggactttcccggcagagccaatgaaaggccctattgctatgcaatctggtccaaaaccactcttcaggaggatgtcttcactggtgggccccacgcaaagcttcttcatgagggaatctaagactttgggggctgtccagattatgaatgggctcttccacattgccctggggggtcttctgatgatcccagcaggaatctatgcacccatctgtgtgactgtgt

SEQ ID NO: 171 - DNA, 553 bp, Homo sapiens
  misc_feature (1)...(553): n = A,T,C or G
ccttgcctcagatccaaggtcactcggaagaggccatgtctaccctcaatgacactcatggaggaaatgctgagagaagcattcagatgcatgacacaaggtaagactgccaaaaatcttgttcttgctctcctcattttgttatttgttttatttttaggagttttgagagcaaaatgacaacacccagaaattcagtaaatgggactttcccggcagagccaatgaaaggccctattgctatgcaatctggtccaaaaccactcttcaggaggatgtcttcactggtgggccccacgcaaggcttcttcatgagggaatctaagactttgggggctgtccagattatgaatgggctcttccacattgccctggggggtcttctgatgatcccagcagggatctatgcacccatctgtgtgactgtgtggtaccctctctggggaggcattatgtatattatttccggatcactcctggcagcaacggagaaaaactccaggaagtgtttggtcaaaggaaaaatgataatgaattcattnngcctctttgc

SEQ ID NO: 172 - DNA, 421 bp, Homo sapiens
  misc_feature (1)...(421): n = A,T,C or G
ccaatcatagagatatctgcaccagcctgcaaagcttccatgaacgctttggtcccagacttggcgatagtaccaaggttattgatcaagtcagccttggtcattccaattccagtatccacaatagtgagagttcgatcttgtttgttcggtataaggttaatatgcagctctttctcagagtctaatttactgggatctgtcaagctttcataccggattttgtccaatgcatctgatgaatttgaaatgagctctctcagaaagatctctttgttcgagtagaaagtattgatgatcaatgacatcaactgggcaatttctgcctgaaaggcgaacgtntnaacctcctnctcctccatcggttggtcttgggtctgggtttcctcangcatntggaacgacaccgcgccggtntacc

SEQ ID NO: 173 - DNA, 481 bp, Homo sapiens
  misc_feature (1)...(481): n = A,T,C or G
ccttgcctcanatccanggtcactcggaagaggccatgtctaccctcaatgacactcatggaggaaatgctganagaagcattcanatgcatgacacaaggtaagactgccaaaaatcttgntcttgctctcctcattttgttattngttttanttttaggagttntgagagcaaaatnacancacccagaaattcagtaaatgggactttcccggcaganccaatgaaaggccctattgctatgcaatctggtccaaaaccactcttcaggaggatgtnttcactggtgggccccacgcaaagcttcttcatgagggaatctaagactttgggggctgtccagattatgaatgggctcttccacattgccctggggggtcttctgatgatcccancagggatctatgcncccatctgtgtgactgtgtggtaccctctctggggaggcattatgtatattatttccggatcactcctggc

SEQ ID NO: 174 - DNA, 110 bp, Homo sapiens
  misc_feature (1)...(110): n = A,T,C or G
cccgggctggcttacctgggcaccgtgggcatgggggaggtgtgtcacaagatttgggctctgcagagagaanattgggagttacggggatctgggatngaggtggntgc

SEQ ID NO: 175 - DNA, 372 bp, Homo sapiens
aggacacagcatggacatgagggtccccgctcagctcctggggctcctgctgctctggctcccaggtgccaaatgtgacatccagatgacccaatctccttccaccctgtctgcatctgtcggagatacagttacaataagttgtcgggcctctcagaatatagatcggtggttggcctggcatcaacagaaaccaggcaaagcccctaatgtcctaatttatgcgacttccagtttagaagaaggggtctcattaagatttactggcagtggatctgggacacaattcaatttaaccatcaccagtctgcagcctgacgattcagcaacttattattgtcaacattattctgcatctcttcgcagttttgg

SEQ ID NO: 176 - DNA, 373 bp, Homo sapiens
  misc_feature (1)...(373): n = A,T,C or G
ctgtagcttctgtgggacttccactgctcaggcgtcaggctcagatagctgctggccgcgtacttgttgttgctttgtttggagggtgtggtggnctccactcccgccttgacggggctgctatctgccttccaggccactgtcacggctcccgggtagaagtcacttatgagacacaccagtgtggccttgttggcttgaagctcctcagaggagggcgggaacagagtgaccgagggggcagccttgggctgacctaggacggccagtttggtccctccgccgaagacgacatggtcattattacgatcccacacttgacagtaatagtcggcctcatcgccggcttcgaccctgttgatggtcagggtgg

SEQ ID NO: 177 - DNA, 373 bp, Homo sapiens
ctgtagcttctgtgggacttccactgctcaggcgtcaggctcagatagctgctggccgcgtactagttgttgctttgtttggagggtgtggtggtctccactcccgccttgacggggctgctatctgccttccaggccactgtcacggctcccgggtagaagtcacttatgagacacaccagtgtggccttgttggcttgaagctcctcagaggagggcgggaacagagtgaccgagggggcagccttgggctgacttaggacggccagtttggtccctccgccgaagacgacatggtcattattacgatcccacacttgacaataatagtcggcctcatcgccggcttcgaccctgttgatggtcagggtgg

SEQ ID NO: 178 - DNA, 136 bp, Homo sapiens
  misc_feature (1)...(136): n = A,T,C or G
cttctgtgggacttccactgctcaggcgtcaggctcagatagctgctggccgcgtacttgttgttgctttgtttggagggtgtggtggtctccactcccnccttgacggggctgctatctgccttccaggccactg

SEQ ID NO: 179 - DNA, 327 bp, Homo sapiens
  misc_feature (1)...(327): n = A,T,C or G
ctgtagcttctgtgggacttccactgctcaggcgtcaggctcagatagctgctggccgcgtacttgttgttgctttgtttggagggtgtggtggtctccactcccgccttgacggggctgctatctgccttccaggccactgtcacggctcccgggtagaagtcacttatgagacacaccagtgtggccttgttggcttgaagctcctcagaggagggcgggaacagagtgaccgagggggcagccttgggctgacctaggacggccagtttggtccctccgccgaagacgacatggtcataattacgatcccacacttgncagtaa

SEQ ID NO: 180 - DNA, 192 bp, Homo sapiens
  misc_feature (1)...(192): n = A,T,C or G
ctgtagcttctgtgggacttccactgctcangcgtcaggctcagatagctgctggccgcgtacttgttgttgctttgtttggagggtgtggtggtctccactcccnccttgacggggcnngctatctgccttccangccactgncacggctcccnggtagaagtcacttatgagacacaccantgtggcctt

SEQ ID NO: 181 - DNA, 171 bp, Homo sapiens
  misc_feature (1)...(171): n = A,T,C or G
ccaccctgaccatcaacagggtcgaagccggcgatgaggccgactattactgtcaagtgtgggatcgtaataatgaccatgtcgtnttcggcggagggaccaaactggccgtcctaggtnancccaaggctgccccctcggtcactctgttccnnccctnctctgangagc

SEQ ID NO: 182 - DNA, 373 bp, Homo sapiens
ctgtagcttctgtgggacttccactgctcaggcgtcaggctcagatagctgctggccgcgtacttgttgttgctttgtttggagggtgtggtggtctccactcccgccttgacggggctgctatctgccttccaggccactgtcacggctcccgggtagaagtcacttatgagacacaccagtgtggccttgttggcttgaagctcctcagaggagggcgggaacagagtgaccgagggggcagccttgggctgacctaggacggccagtttggtccctccgccgaagacgacatggtcattattaagatcccacacttgacagtaatagtcagcctcatcgccggcttcgaccctgttgatggtcagggtgg

SEQ ID NO: 183 - DNA, 585 bp, Homo sapiens
ccagtacacccatgaatttgatggagatgagcagttctacgtggacctggggaggaaggagactgtctggtgtttgcctgttctcagacaatttagatttgacccgcaatttgcactgacaaacatcgctgtcctaaaacataacttgaacagtctgattaaacgctccaactctaccgctgctaccaatgaggttcctgaggtcacagtgttttccaagtctcccgtgacactgggtcagcccaacatcctcatctgtcttgtggacaacatctttcctcctgtggtcaacatcacatggctgagcaatgggcactcagtcacagaaggtgtttctgagaccagcttcctctccaagagtgatcattccttcttcaagatcagttacctcaccctcctcccttctgctgaggagagttatgactgcaaggtggagcactggggactggacaagcctcttctgaaacactgggagcctgagattccagcccctatgtcagagctcacagagactgtggtctgcgccctggggttgtctgtgggcctcgtgggcattgtggtgggcactgtcttcatcatccgagg

SEQ ID NO: 184 - DNA, 155 bp, Homo sapiens
  misc_feature (1)...(155): n = A,T,C or G
aagcagcactggtggtgcctcagccatggcctggaccgttctcctnctcggnctcctctctcaccgnacagactctgtgacctcctatgtgttgactcagacaccctnagtgtnagnggccccaggananacggccaagattacctgtgggggaa

SEQ ID NO: 185 - DNA, 119 bp, Homo sapiens
  misc_feature (1)...(119): n = A,T,C or G
ggacacagcntggacatgagggtccccgctcagctcctggggctcctgctgctctggctnccaggtgccaaatgtganatccagatgacccaatctccttccaccctgtctgcatctgt

SEQ ID NO: 186 - DNA, 101 bp, Homo sapiens
  misc_feature (1)...(101): n = A,T,C or G
ccaccctgaccatnaacagggtngaagccggcgatnaggccgactatnactgtcaagtgtgggatcgtaatnatgaccatgtcntcttnngcggagggacc

SEQ ID NO: 187 - DNA, 239 bp, Homo sapiens
cccactgtcactctgttcccgccctcctctgaggagctccaagccaacaaggccacactagtgtgtctgatcagtgacttctacccgggagctgtgacagtggcctggaaggcagatggcagccccgtcaaggcgggagtggagaccaccaaaccctccaaacagagcaacaacaagtacgcggccagcagctacctgagcctgacgcccgagcagtggaagtcccacagaagctacag

SEQ ID NO: 188 - DNA, 84 bp, Homo sapiens
  misc_feature (1)...(84): n = A,T,C or G
ccaccctgaccatcaacagggtcgaagccggngatgaggccgactattactgncaagngtgggatcgtaataangaccatgtcg

SEQ ID NO: 189 - DNA, 139 bp, Homo sapiens
  misc_feature (1)...(139): n = A,T,C or G
ccaccctgaccatcaacagggtcnaantccggcgatgaggccgactattactgtcaagtgtgggatcgtaataatgaccatgtcgtcttcggcggagggaccaaactggccgncctaggtcagcccaaggctgccccct

SEQ ID NO: 190 - DNA, 283 bp, Homo sapiens
  misc_feature (1)...(283): n = A,T,C or G
ctgtagcttctgtgggacttccactgctcaggcgtcaggctcagatagctgctggccgcgtacttgttgttgctttgtttggagggtgtggtggtctccactcccgccttgacggggctgctatctgccttccaggccactgtcacggctcccgggtagaagtcacttatgagacacaccagtgtggccttgttggcttgaagctcctcanaggagggcgggaacagagtgaccgagggggcagccttgggctgacctaggacggccngtttggtccctncgc

SEQ ID NO: 191 - DNA, 179 bp, Homo sapiens
  misc_feature (1)...(179): n = A,T,C or G
aatgtttcattgnactcaacatgtgaagaaaactattggtnntgncccatgactgtttgcacttntctgntaacctgacaaattcctactccttccccatgagcattgtaaanccttgtgcacaatntgaaaacttatgagtgacctgagatnttatctatcccctanctttttaccta

SEQ ID NO: 192 - DNA, 90 bp, Homo sapiens
  misc_feature (1)...(90): n = A,T,C or G
ctgtagcttctgtgggacttccactgctcaggcgtcaggctcagatagctgctggccgcgtacttgttgttgctttgnttggagggtgtg

SEQ ID NO: 193 - DNA, 585 bp, Homo sapiens; identical to SEQ ID NO: 183

SEQ ID NO: 194 - DNA, 283 bp, Homo sapiens
actggtggtgcctcagccatggcctggaccgttctcctcctcggcctcctctctcactgcacagactctgtgacctcctatgtgttgactcagacaccctcagtgtcagtggccccaggaaagacggccaagattacctgtgggggaaacaatattgggagtaacaatgtacactggtattaccagaagccaggccaggcccctgtcctaatcatctcttttgataacgaccggccctcagggatatctgagcgattctctggcttcaattctggggacatgg

SEQ ID NO: 195 - DNA, 54 bp, Homo sapiens
  misc_feature (1)...(54): n = A,T,C or G
ctgtagcttctgtgggacttncactgctcaggcgtcaggctcanatagctgctg

SEQ ID NO: 196 - DNA, 375 bp, Homo sapiens; identical to SEQ ID NO: 50

SEQ ID NO: 197 - DNA, 130 bp, Homo sapiens
  misc_feature (1)...(130): n = A,T,C or G
atggacatgagggtccccgctcagctcctggggctcctgcnngctctggctcccaggtgccaaatgtgacatncagatgacccaatctcctnccacccngtctgcatctgncggagatacanntncaata

SEQ ID NO: 198 - DNA, 191 bp, Homo sapiens
  misc_feature (1)...(191): n = A,T,C or G
taataatgaccatgtcgtcttcggcggagggaccaaactggccgtcctaggtcagcccaaggctgccccctcggtcactctgttcccgccctnctntgagnagcttcaagccaacaaggccacactggtgtgtctcataagtgacttctacccgggagccgtgacagtggcctggaaggcanatagcagcc

SEQ ID NO: 199 - DNA, 282 bp, Homo sapiens
ctggtggtgcctcagccatggcctggaccgttctcctcctcggcctcctctctcaccgcacagattctgtgacttcctatgtgttgactcaaacaccctcagtgtcagtggccccaggaaagacggccaagattacctgtgggggaaacaatattgggagtcacaatgtacactagtattaccagaagccaggccaggcccctgtcctaatcatctcttttgataacgaccggccctcagggatatctgagcgattctctggcttcaattctggggacatgg

SEQ ID NO: 200 - DNA, 464 bp, Homo sapiens
  misc_feature (1)...(464): n = A,T,C or G
caggcagaggctctgggtcagtgcaggaagcagagtcacagccagcgccttggggtggggatgaaaggagatgacctggtggctgcgtgacagccactgtaggactctgatctcagggggacaggctgacacaggcagttgggaattctgggcagggacaagcaggcgttacagaaaagtgataaccaatcccagttaaaatagtctcaggagtcagtgcaggagccctttctgactcctgtgatggataataaggcccancccgaggaagatgagccccagcacgaagcctccaatgccactcagcatcttgctctgggcagattcagactgagcccgccactccacggtgatggggttctggaggctggggtgctccacgtggcaggtgtagacgtctccatgctggggagtcatttccagcatcaccaggatctggaaggnccagtcaccgnttcctaata

SEQ ID NO: 201 - DNA, 373 bp, Homo sapiens; identical to SEQ ID NO: 6

SEQ ID NO: 202 - DNA, 373 bp, Homo sapiens
  misc_feature (1)...(373): n = A,T,C or G
ccaccctgaccatcaacagggtcgaagccggcgatgaggccgactattactgtcaagtgtgggatcgtaataatgaccatgtcgtcttcggcggagggaccaaactggncgtnctaggtnagnccaaggctgccccctcggtcactctgttcccgccctcctctgaggagcttcaagccaacaaggccacactggtgtgtctcataagtgacttctacccgggagccgcgacagtggcctggaaggcagatagcagccccgtcaaggcgggagtggagaccaccacaccctccaaacaaagcaacaacaagtacgcggccagcagctatctgagcctgacgcctgagcagtggaagtcccacagaagctacag

SEQ ID NO: 203 - DNA, 373 bp, Homo sapiens; identical to SEQ ID NO: 6

SEQ ID NO: 204 - DNA, 565 bp, Homo sapiens
cagagctcaagtctgaactctacctccagacagaatgaagttcatctcgacatctctgcttcttatgctgctggtcagcagcctctctccagtccaaggtgttctggaggtctattacacaagcttgaggtgtagatgtgtccaagagagctcagtctttatccctagacgcttcattgatcgaattcaaatcttgccccgtgggaatggttgtccaagaaaagaaatcatagtctggaagaagaacaagtcaattgtgtgtgtggaccctcaagctgaatggatacaaagaatgatggaagtattgagaaaaagaagttcttcaactctaccagttccagtgtttaagagaaagattccctgatgctgatatttccactaagaacacctgcattcttcccttatccctgctctggattttagttttgtgcttagttaaatcttttccaggaaaaagaacttccccatacaaataagcatgagactatgtaaaaataaccttgcagaagctgatggggcaaactcaagcttcttcactcacagcaccctatatacacttggagtt

SEQ ID NO: 205 - DNA, 474 bp, Homo sapiens
  misc_feature (1)...(474): n = A,T,C or G
gtgcgaaggtccagctcagtggcacaagtgaaagcaatgatcgagactaagacgggtataatccctgagacccagattgtgacttgcaatggaaagagactggaagatgggaagatgatggcagattacggcatcagaaagggcaacttactcttcctggcatgttattgtattggagggtgaccaccctgggcatggggtgttggcagggatcaaaaagcttatttcttttaatctcttactcaacgaacacatcttctgatgatttcccaaaattaatgagaatgagatgagtagagtaagatttgggtgggatgggtaggatgaagtatattgcccaactctatgtttctttgattctaacacaattaattaagtgacatgatttttactaatgtattactgagactagtaaataaatttttaaggcaaaatagagcattccnaaaaaaaaaaaaaaaanaaaaaaaaagg

SEQ ID NO: 206 - DNA, 237 bp, Homo sapiens
ccagtattcctggaggatataacactgacatcagcagggttttcaatggcaacaattgcacgagctgccagcagaagcttctcccaggtcctcttgagatttatgatatagatgccatcacttttccttttatagatgtactgttccatctggaagtcaagattggtgccacctaagtgggttcctgctgcaaggaacttaaggacatcctcctccttcatttgcaggacatcaagg

SEQ ID NO: 207 - DNA, 585 bp, Homo sapiens
ctcagagctcaagtctgaactctatctccagacagaatgaagttcatctcgacatctctgcttctcatgctgctggtcagcagcctctctccagtccaaggtgttctggaggtctattacacaagcttgaggtgtagatgtgtccaagagagctcagtctttatccctagacgcttcattgatcgaattcaaatcttgccccgtgggaatggttgtccaagaaaagaaatcatagtctggaagaagaacaagtcaattgtgtgtgtggaccctcaagctgaatggatacaaagaatgatggaagtattgagaaaaagaagttcttcaactctaccagttccagtgtttaagagaaagattccctgatgctgatatttccactaagaacacctgcattcttcccttatccctgctctggattttagttttgtgcttagttaaatcttttccaggaaaaagaacttccccatacaaataagcatgaggctatgtaaaaataaccttgcagaagctgatggggcaaactcaagcttcttcactcacagcaccctatatacacttggagtttgcattcttattcatcag

SEQ ID NO: 208 - DNA, 436 bp, Homo sapiens
ctgagcagagggacctgcacacagagactccctcctgggctcctggcaccatggccccactgaagatgctggccctggttaccctcctcctgggggcttctctgcagcacatccacgcagctcgagggaccaatgtgggccgggagtgctgcctggagtacttcaagggagccattccccttagaaagctgaagacgtggtaccagacatctgaggactgctccagggatgccatcgtttttgtaactgtgcagggcagggccatctgttcggaccccaacaacaagagagtgaagaatgcagttaaatacctgcaaagccttgagaggtcttgaagcctcctcaccccagactcctgactgtctcccgggactacctgggacctccaccgtcggtgttcaccgcccccaccctgagcgcctgggtccaggggagg

SEQ ID NO: 209 - DNA, 524 bp, Homo sapiens
gctctggcccctggtcctgtcctgttctccagcatggtgtgtctgaggctccctggaggctcctgcatggcagttctgacagtgacactgatggtgctgagctccccactggctttggctggggacaccagaccacgtttcttggagtactctacgtctgagtgtcatttcttcaatgggacggagcgggtgcggttcctggacagatacttctataaccaagaggagtacgtgcgcttcgacagcgacgtgggggagttccgggcggtgacggagctggggcggcctgatgaggagtactggaacagccagaaggacttcctggaagacaggcgggccgcggtggacacctactgcagacacaactacggggttgtggagagcttcacagtgcagcggcgagtccatcctaaggtgactgtgtatccttcaaagacccagcccctgcagcaccacaacctcctggtctgttctgtgagtggtttctatccaggcagcattgaagtcaggtggttccggaatgg

SEQ ID NO: 210 - DNA, 579 bp, Homo sapiens
  misc_feature (1)...(579): n = A,T,C or G
aaagaatatgtagaatctaggtaagtggataaaaggtctgggggcaggggaaaggagagcatttcattgtgaatcaaggaatttctccacctgttttaactcttccatatgacatcaaagagatgtcacttgcagctagcatttcagtgatgttttcttgctaataatatcgtgataaaagaaacattgactataagaaataggaatgggtctcataaaaggaaacagcaaaacccccaaactaaaaaacagcgcaggctatttctctcttctctccttttgcttggcactcatgagatgctaggtgtggaagtcagccaactgaaaaagagaggtggctgaagaaggtggggaggctgaagccagttaaataggatggtccaattcacagacggcgaggctacagtgcaaataggactctttcaacttgagcaggaccccattacttcactggagttagaaagaaaggagagcgtagactttttgaactttctataagagtgtacctccncagtatacagaagacgacgtgaaatttgatctgcaagaaaactgagtccatattcacatatgtatcaa

SEQ ID NO: 211 - DNA, 556 bp, Homo sapiens
cagagctcaagtctgaactctacctccagacagaatgaagttcatctcgacatctctgcttctcatgctgctggtcagcagcctctctccagtccaaggtgttctggaggtctattacacaagcttgaggtgtagatgtgtccaagagagctcagtctttatccctagacgcttcattgatcgaattcaaatcttgccccgtgggaatggttgtccaagaaaagaaatcatagtctggaagaagaacaagtcaattgtgtgtgtggaccctcaagctgaatggatacaaagaatgatggaagtattgagaaaaagaagttcttcaactctaccagttccagtgtttaagagaaagattccctgatgctgatatttccactaagaacacctgcattcttcccttatccctgctctggattttagttttgtgcttagttaaatcttttccaggaaaaagaacttccccatacaaataagcatgagactatgtaaaaataaccttgcagaagctgatggggcaaactcaagcttcttcactcacaacaccctatataca

SEQ ID NO: 212 - DNA, 353 bp, Homo sapiens
cgcagccatggctcgtggtcccaagaagcatctgaagcgggtggcagctccaaagcattggatgctggataaattgaccggtgtgtttgctcctcgtccatccaccggtccccacaagttgagagagtgtctccccctcatcattttcctgaggaacagacttaagtatgccctgacaggagatgaagtaaagaagatttgcatgcagcggttcattaaaatcgatggcaaggtccgaactgatataacctaccctgctggattcatggatgtcatcagcattgacaagacgggagagaatttccgtctgatctatgacaccaagggtcgctttgctgtacatcgtattacac

SEQ ID NO: 213 - DNA, 513 bp, Homo sapiens
ctgctactcatttgcttctatgggtatgctagaagcgagaatccgtatactaaccaacaattctcagaccccaatcctaagccctcaggaggttgtgtcttgtagccagtatgctcaaggctgtgatggcggcttcccataccttattgcaggaaagtacgcccaagattttgggctggtggaagaagcttgcttcccctacacaggcactgattctccatgcaaaatgaaggaagactgctttcgttattactcctctgagtaccactatgtaggaggtttctatggaggctgcaatgaagccctgatgaagcttgagttggtccatcatgggcccatggcagttgcttttgaagtatatgatgacttcctccactacaaaaaggggatctaccaccacactggtctaagagaccctttcaacccctttgagctgactaatcatgctgttctgcttgtgggctatggcactgactcagcctctgggatggattactggattgttaaaaacag

SEQ ID NO: 214 - DNA, 538 bp, Homo sapiens
aaacattaaacaacaagtatataatcaaaataatcctgtattacttataactgaataactattttcaaagaaactttcctccctgatgaataagaatgcaaactccaagtgtatatagggtgctgtgagtgaagaagcttgagtttgccccatcagcttctacaaggttatttttacatagtctcatgcttatttgtatggggaagttctttttcctggaaaagatttaactaagcacaaaactaaaatccagagcagggataagggaagaatgcaggtgttcttagtggaaatatcagcatcagggaatctttctcttaaacactggaactggtagagttgaagaacttctttttctcaatacttccatcattctttgtatccattcagcttgagggcccacacacacaattgacttgttcttcttccagactatgatttcttttcttggacaaccactcccacggggcaagatttgaattcgatcaatgaagcgtctagggataaagactgagctctcttggacacatctacacct

SEQ ID NO: 215 - DNA, 588 bp, Homo sapiens
aaacattagtgttcatagcttccaagagacatgctgactttcatttcttgaggtactctgcacatacgcaccacatctctatctggcctttgcatggagtgaccatagctccttctctcttacattgaatgtagagaatgtagccattgtagcagcttgtgttgtcacgcttcttcttttgagcaactttcttacactgaagaaaggcagaatgagtgcttcagaatgtgatttcctactaacctgttccttggataggctttttagtatagtattttttttgtcattttctccatcaacaaccagggagactgcacctgatggaaaagatatatgactgcttcatgacattcctaaactatcttttttttattccacatctacgtttttggtggagtcccttttgcatcattgttttaaggatgataaaaaaaaataacaactagggacaatacagaacccattccatttatctttctacagggctgacattgtggcacattcttagagttaccacaccccatgagggaagctctaaatagccaacacccatctgttttttgtaaaaacagcatagcttatacatgg

SEQ ID NO: 216 - DNA, 580 bp, Homo sapiens
cagagctcaagtctgaactctacctccagacagaatgaagttcatctcgacatctctgcttctcatgctgctggtcagcagcctctctccagtccaaggtgttctggaggtctattacacaagcttgaggtgtagatgtgtccaagagagctcagtctttatccctagacgcttcattgatcgaattcaaatcttgccccgtgggaatggttgtccaagaaaagaaatcatagtctggaagaagaacaagtcaattgtgtgtgtggaccctcaagctgaatggatacaaagaatgatggaagtattgagaaaaagaagttcttcaactctaccagttccagtgtttaagagaaagattccctgatgctgatatttccactaagaacacctgcattcttcccttatccctgctctggattttagttttgtgcttagttaaatcttttccaggaaaaagaacttccccatacaaataagcatgagactatgtaaaaataacctcgcagaagctgatggggcaaactcaagcttcttcactcacagcaccctatatacacttggagtttgcattcttattcat

SEQ ID NO: 217 - DNA, 396 bp, Homo sapiens
  misc_feature (1)...(396): n = A,T,C or G
ctgttgactcagattcggcattttaattacattgtttccaagtatgatattctgagagtgtctatagcacttagtgtctgcttcatataaactaccagttattatatatttatgatgcaagtagttttccaaatgtggtgaaagtctgagtctttttatccccatgggtaaaatctgaatctggctctctgtgtctctcagtgcttgtttattgctggtcagagagtaaattcttgataaaagctgtntganttggctctcacagtttatgcagacattggagagacaatttggttatttcaaacatcacaggatttgagtaagaagacctggttatgaaacaaggctctcataattactagttatgactgttgacaaggttaccttttcttgttt

SEQ ID NO: 218 - DNA, 426 bp, Homo sapiens
  misc_feature (1)...(426): n = A,T,C or G
tggacagncctggaaggtgtcgaagtgcagacagactacgtgcccctgctgaactcgctggcggcctatggctggcagctcacctgtgtgctaccaactcccgtcgtcaagactaccagcgaggggagtgtatccaccaagcagattgtctttcttcagagaccttgtctacctcagaaaatcaagaagaaggaatcgaagtttcagtggcgattctccagagaagaaatgcacaacaggcagatgaggaaatcaaaaggtaaactcagtgccagagacaaacaacaagcagaagaaaatgagaagaacttagaagaccagtcttccaaagctggagacatgggaaactgtgtttcaggacagcagcaggagggtggagtctccgaggagatgaagggccctgtccaagaggacaagggagaacag

SEQ ID NO: 219 - DNA, 431 bp, Homo sapiens
  misc_feature (1)...(431): n = A,T,C or G
tcaagtctgaactctacctccagacagaatgaagttcatctcgacatctctgcttctcatgctgctggtcagcagcctctctccagtccaaggtgttctggaggtctattacacaagcttgaggtgtagatgtgtccaanagagctcagtctttatccctanacgcttcattgatcgaattcaaatcttgccccgtgggaatggttgtccaagaaaagaaatcatagtctggaagaagaacaagtcaattgtgtgtgtggaccctcaagctgaatggatacaaagaatgatggaagtattgagaaaaagaagttcttcaactctaccagttccagtgtttaagagaaagattccctgatgctgatatttccactaagaacacctgcattcttcccttatccctgctctggattttagttttgngcttagtt

SEQ ID NO: 220 - DNA, 286 bp, Homo sapiens
  misc_feature (1)...(286): n = A,T,C or G
ctgtctcacactttacaagctgtgagagacacatcagagccctgggcactgtcactgcttgcagcctgagtgtaactccctccttttctatctgagctcttcctcctccacatcacggcagcgaccacagctccagtgatcacagctccaaggagaaccaggccagcaatgatgcccacgatggggatggtgggctgggaagacagctcccatctcanggtgaggggcttgggcagaccctcatgctgcacatggcaggtgtatctctgctcctctccagaaggca

SEQ ID NO: 221 - DNA, 536 bp, Homo sapiens
  misc_feature (1)...(536): n = A,T,C or G
ctcaagtctgaactctacctccagacagaatgaagttcatctcgacatctctgcttctcatgctgctggtcagcagcctctctccagtccaaggtgttctggaggtctattacacaagcttgaggtgtagatgtgtccaagagagctcagtctttatccctagacgcttcattgatcgaattcaaatcttgccccgtgggaatggttgtccaagaaaagaaatcatagtctggaagaagaacaagtcaattgtgtgtgtggaccctcaagctgaatggatacaaagaatgatggaagtattgagaaaaagaagttcttcaactctaccagttccagtgtttaagagaaagattccctgatgctgatatttccactaagaacacctgcattcttcccttatccctgctctggattttagttttgngcttagttaaatcttttccaggaaaaagaacttccccatacaaataagcatgagactatgtaaaaataaccttgcagaagctgatggggcaaactcaagcttnttcactcac

SEQ ID NO: 222 - DNA, 565 bp, Homo sapiens
  misc_feature (1)...(565): n = A,T,C or G
ctcagagctcaagtctgaactctacctccagacagaatgaagttcatctcgacatctctgcttctcatgctgctggtcagcagcctctctccagtccaaggtgttctggaggtctattacacaagcttgaggtgtagatgtgtccaagagagctcagtctttatccctagacgcttcattgatcgaattcaaatcttgccccgtgggaatggttgtccaagaaaagaaatcatagtctggaagaagaacaagtcaattgtgtgtgtggaccctcaagctgaatggatacaaagaatgatggaagtattgagaaaaagaagttcttcaactctaccagttccagtgtttaagagaaagattccctgatgctgatatttccactaagaacacctgcattcttcccttatccctgctctggattttagttttgtgcttagttaaatcttttccaggaaaaagaacttccccatacaaataagcatgagactatgtaaaaataaccttgcngaagctgatggngcaaactcaagcttcttcactcacagcaccctatatacacttggag

SEQ ID NO: 223 - DNA, 529 bp, Homo sapiens
cgcggtgcgacgaaggagtaggtggtgggatctcaccgtgggtccgattagccttttctctgccttgcttgcttgagcttcagcggaattcgaaatggctggcggtaaggctggaaaggactccggaaaggccaagacaaaggcggtttcccgctcgcagagagccggcttgcagttcccagtgggccgtattcatcgacacctaaaatctaggacgaccagtcatggacgtgtgggcgcgactgccgctgtgtacagcgcagccatcctggagtacctcaccgcagaggtacttgaactggcaggaaatgcatcaaaagacttaaaggtaaagcgtattacccctcgtcacttgcaacttgctattcgtggagatgaagaattggattctctcatcaaggctacaattgctggtggtggtgtcattccacacatccacaaatctctgattgggaagaaaggacaacagaagactgtctaaaggatgcctggattccttgttatctcaggactctaaatactctaacag

SEQ ID NO: 224 - DNA, 297 bp, Homo sapiens
  misc_feature (1)...(297): n = A,T,C or G
cctcccctggacccaggcgctcagggtgggggcggtgaacaccaacggtggaggtcccaggtagtcccgggagacagtcaggagtctggggtgaggaggcttcaagacctctcaaggctttgcaggtatttaactgcattcttcactctcttgttgttggggtccgaacagatggccctgccctgcacagttacaaaaacgatggcntccctggagcagncctnagatgnctggnaccacgtcttcagctttctaangggaatggctcccttgaagtactccaggcangcactcccg

SEQ ID NO: 225 - DNA, 253 bp, Homo sapiens
cctcccctggacccaggcgctcagggtgggggcggtgaacaccaacggtggaggtcccaggtagtcccgggagacagtcaggagtctggggtgaggaggcttcaagacctctcaaggctttgcaggtatttaactgcattcttcactctcttgttgttggggtccgaacagatggccctgccctgcacagttacaaaaacgatggcatccctggagcagtcctcagatgtctggtaccacgtcttcagctttc

SEQ ID NO: 226 - DNA, 598 bp, Homo sapiens
ccatctgatctataaatgcggtggcatcgacaaaagaaccattgaaaaatttgggaaggaggctgctgagatgggaaagggctccttcaagtatgcctgggtcttggataaactgaaagctgagcgtgaacgtggtatcaccattgatatctccttgtggaaatttgagaccagcaagtactatgtgactatcattgatgccccaggacacagagactttatcaaaaacatgattacagggacatctcaggctgactgtgctgtcctgattgttgctgctggtgttggtgaatttgaagctggtatctccaagaatgggcagacccgagagcatgcccttctggcttacacactgggtgtgaaacaactaattgtcggtgttaacaaaatggattccactgagccaccctacagccagaagagatatgaggaaattgttaaggaagtcagcacttacattaagaaaattggctacaaccccgacacagtagcatttgtgccaatttctggttggaatggtgacaacatgctggagccaagtgctaacatgccttggttcaagggatggaaagtcacccgtaaggatggcaatgccagt

SEQ ID NO: 227 - DNA, 612 bp, Homo sapiens
  misc_feature (1)...(612): n = A,T,C or G
ctgttgactcagattcggcattttaattacattgtttccaagtatgatattctgagagtgtctatagcacttagtgtctgcttcatataaactaccagttattatatatttatgatgcaagtagttttccaaatgtggtgaaagtctgagtctttttatccccatgggtaaaatctgaatctggctctctgtgtctctcagtgcttgtttattgctggtcagagagtaaattcttgataaaagctgttgacttggctctcacagtttatgcagacattggagagacaatttggttatttcaaacatcacaggatttgagtaagaagacctggttatgaaacaaggctctcataattactagttatgactgttgacaagttaccttttcttgtttacaagttatttggcctctttgaattacttgtaaaatagagatagggattctttcttgatcatggaacatcaaatgaagttatttgatgaaatactttgtcatctggaaattataaatataactaaatgttaattattatttggaaatttngggcacctcatggnggcattttctatggtcattttttttcttttctcgcataatggctaaaagtaggt

SEQ ID NO: 228 - DNA, 288 bp, Homo sapiens
  misc_feature (1)...(288): n = A,T,C or G
agccattgnntgtagctttagctcagcgcaaagaagagcgccaggctcacctcactaaccagtatatgcagagaatggcaagtgtacgagctgttcccaaccctgtaatcaacccctaccagccagcacctccttcaggttacttcatggcagctatcccacagactcagaaccgngctgcatactatcctcctagccaaattgctcaactaagaccaagtcctcgctggactgctcagggtgccagacctcatccattccaaaatatgcccggtgctatccgcccag

SEQ ID NO: 229 - DNA, 594 bp, Homo sapiens
ctcagagctcaagtctgaactctacctccagacagaatgaagttcatctcgacatctctgcttctcatgctgctggtcagcagcctctctccagtccaaggtgttctggaggtctattacacaagcttggggtgtagatgtgtccaagagagctcagtctttatccctagacgcttcattgatcgaattcaaatcttgccccgtgggaatggttgtccaagaaaagaaatcatagtctggaagaagaacaagtcaattgtgtgtgtggaccctcaagctgaatggatacaaagaatgatggaagtattgagaaaaagaagtttttcaactctaccagttccagtgtttaagagaaagattccctgatgctgatatttccactaagaacacctgcattcttcccttatccctgctctggattttagttttgtgcttagttaaatcttttccaggaaaaagaacttccccatacaaataagcatgagactatgtaaaaataaccttgcagaagctgatggggcaaactcaagcttcttcactcacagcaccctatatacacttggagtttgcattcttattcatcagggaggaaag

SEQ ID NO: 230 - DNA, 571 bp, Homo sapiens
ctccttctctcttacattgaatgtagagaatgtagccattgtagcagcttgtgttgtcacgcttcttcttttgagcaactttcttacactgaagaaaggcagaatgagtgcttcagaatgtgatttcctactaacctgttccttggataggctttttagtatagtatttttttttgtcattttctccatcaacaaccagggagactgcacctgatggaaaagatatatgactgcttcatgacattcctaaactatcttttttttattccacatctacgtttttggtggagtcccttttgcatcattgttttaaggatgataaaaaaaataacaactagggacaatacagaacccattccatttatctttctacagggctgacattgtggcacattcttagagttaccacaccccatgagggaagctctaaatagccaacacccatctgttttttgtaaaaacagcatagcttatacatggacatgtctctgccttaacttttcctaactcccactctaggctattgtttgcatgtctacctacttttagccattatgcgagaaaagaaaaa

SEQ ID NO: 231 - DNA, 584 bp, Homo sapiens
  misc_feature (1)...(584): n = A,T,C or G
aaacattagtgttcatagcttccaagagacatgctgactttcatttcttgaggtactctgcacatacgcaccacatctctatctggcctttgcatggagtgaccatagctccttctctcttacattgaatgtagagaatgtagccattgtagcagcttgtgttgtcacgcttcttcttttgagcaactttcttacactgaagaaaggcagaatgagtgcttcagaatgtgatttcctactaacctgttccttggataggctttttagtatagtatttttttttgtcattttctccatcaacaaccagggagactgcacctgatggaaaagatatatgactgcttcatgacattcctaaactacctttttttattccacatctacgtttttggtggagtcccttttgcatcattgttttaaggatgataaaaaaaaataacaactagggacaatacagaacccattccatttatctttctacagggctgacattgtggcacattcttagagttaccacaccccatgagggaagctctaaatagccaacacccatctgttttttgtaaaaacagcatancttatac

SEQ ID NO: 232 - DNA, 457 bp, Homo sapiens
ccacggctgcttccagctcctccctggagaagagctacgagctgcctgacggccaggtcatcaccattggcaatgagcggttccgctgccctgaggcactcttccagccttccttcctgggcatggagtcctgtggcatccacgaaactaccttcaactccatcatgaagtgtgacgtggacatccgcaaagacctgtacgccaacacagtgctgtctggcggcaccaccatgtaccctggcattgccgacaggatgcaaaaggagatcactgccctggcacccagcacaatgaagatcaagatcattgctcctcctgagcgcaagtactccgtgtggatcggcggctccatcctggcctcgctgtccaccttccagcagatgtggatcagcaagcaggagtatgacgagtccggcccctccatcgtccaccgcaaatgcttctaggcggactatga

SEQ ID NO: 233 - DNA, 256 bp, Homo sapiens
  misc_feature (1)...(256): n = A,T,C or G
cctcccctggacccaggcgctcagggtgggggcggtgaacaccaacggtggaggtcccaggtagtcccgggagacagtcaggagtctggggtgaggaggcttcaagacctctcaaggctttgcaggtatttaactgcattcttcactctcttgttgntggggtccgaacagatggccctgccctgcncagttacaaaaacgatggcatccctggagcagtcctcagatgtctggtaccacgtcttcagctttctaa

SEQ ID NO: 234 - DNA, 571 bp, Homo sapiens
  misc_feature (1)...(571): n = A,T,C or G
cagagctcaagtctgaactctacctccagacagaatgaagttcatctcgacatctctgcttctcatgctgctggtcagcagcctctctccagtccaaggtgttctggaggtctattacacaagcttgaggtgtagatgtgtccaagagagctcagtctttatccctagacgcttcattgatcgaattcaaatcttgccccgtgggaatggttgtccaagaaaagaaatcatagtctggaagaagaacaagtcaattgtgtgtgtggaccctcaagctgaatggatacaaagaatgatggaagtattgagaaaaagaagttcttcaactctaccagttccagtgtttaagagaaagattccctgatgctgatatttccactaagaacacctgcattcttcccttatccctgctctggattttagttttgtgcttagttaaatcttttccaggaaaaagaacttccccatacaaataagcatganactatgtaaaaataacccttgcagaagctgatggggcaaactcaagcttcttcactcacagcaccctatatacacttggagtttgcat

SEQ ID NO: 235 - DNA, 489 bp, Homo sapiens
  misc_feature (1)...(489): n = A,T,C or G
ctgttgactcagattcggcattttaattacattgtttccaagtatgatattctgagagtgtctatagcacttagtgtctgcttcatataaactaccagttattatatatttatgatgcaagtagttttccaaatgtggtgaaagtctgagtctttttatccccatgggtaaaatctgaatctggctctctgtgtctntcagtgcttgtttattgctggtcagagagtaaattcttgataaaagctgttgacttggctctcacagtttatgcanacattggagagacaatttggttatttcaaacatcacaggatnngagtaagaanacctggttatgaaacaaggctctcataattactagttatgactgttgacaagttaccttntcttgnttacaagttatttggcctctttgaattacttgnaaaatagagatagggattctttcttgatcatggaacatcnaatgaagttattngatgaaatact

SEQ ID NO: 236 - DNA, 306 bp, Homo sapiens
ctgctgcacccagagctcctttgggtctgcacatagctctgcctgagagcgcttgcggggcaagaacaggatagctgggatggagcagcccaagcttggttcctgcttccggtagctgcggacaaccttggcgggaatcttcctttggctgtacttgaggcaacagtcctgagcccctccatcactgccttgggtcctggggatgccaaaggccagaaccaggataaggaggctcagagccagtgactgagccatgtctgtggtagagggtgagtaagaggccagagctgagggtgaggtgggcag

SEQ ID NO: 237 - DNA, 560 bp, Homo sapiens
  misc_feature (1)...(560): n = A,T,C or G
ctcagagctcaagtctgaactctacctccagacagaatgaagttcatctcgacatctctgcttctcatgctgctggtcagcagcctctctccagtccaaggtgttctggaggtctattacacaagcttgaggtgtagatgtgtccaagagagctcagtctttatccctagacgcttcattgatcgaattcaaatcttgccccgtgggaatggttgtccaagaaaagaaatcatagtctggaagaagaacaagtcaattgtgtgtgtggaccctcaagctgaatggatacaaagaatgatggaagtattgagaaaaagaagttcttcaactctaccagttccagtgtttaagagaaagattccctgatgctgatatttccactaagaacacctgcattcttcccttatccctgctctggattttagttttgtgcttagttaaatcttttccaggaaaaagancttccccatacaaataagcatgagactatgtaaaaataaccttgcagaagctgatggggcaaactcaagcttcttcactcacagcaccctatatacact

SEQ ID NO: 238 - DNA, 484 bp, Homo sapiens
  misc_feature (1)...(484): n = A,T,C or G
aaaaaaggaaacagaaaacagaagaaatcacttaaggagagctgtcattttctattggtgaggattcctgatcttggggaggttctggaaagttcgtctctgtttcttcttcttcctcttcttggattggaataatttcaatgtcttcttcattctttggttgggaagatgtttcagttagcccaaccacttcttcttttatttcaatagtctgttctttttttcttctgctgacaggagaactatgttagatttgggtctggagcacgttcttttccattcattctcaacgatgccagctattacaagttcctggaagaaggcaaagatcagcatcactgacaaaatgcccaagaacagagattgtatgctgtaacagtattgggtagatggggagtttttctcanagggattagctggttcatagttgnatatgttaatatatggtgtgtgagctctaataaaattcanactctccattttt

SEQ ID NO: 239 - DNA, 493 bp, Homo sapiens
ctgaacatgttgggagagaagcttcttggtcctaacgccagccccgatggtctcattccgtggacgaggttttgtaaggaaaatataaatgataaaaattttcccttctggctttggattgaaagcatcctagaactcattaaaaaacacctgctccctctctggaatgatgggtgcatcatgggcttcatcagcaaggagcgagagcgtgccctgttgaaggaccagcagccggggaccttcctgctgcggttcagtgagagctcccgggaaggggccatcacattcacatgggtggagcggtcccagaacggaggcgaacctgacttccatgcggttgaaccctacacgaagaaagaactttctgctgttactttccctgacatcattcgcaattacaaagtcatggctgctgagaatattcctgagaatcccctgaagtatctgtatccaaatattgacaaagaccatgcctttggaaagtattactcca

SEQ ID NO: 240 - DNA, 439 bp, Homo sapiens
  misc_feature (1)...(439): n = A,T,C or G
cagagctcaagtctgaactctacctccagacagaatgaagttcatctcgacatctctgcttctcatgctgctggtcagcagcctctctccagtccaaggtgttctggaggtctattacacaagcttgaggtgtagatgtgtccaagagagctcagtctttatccctagacgcttcattgatcgaattcaaatcttgccccgtgggaatggttgtccaagaaaagaaatcatagtctggaagaagaacaagtcaattgtgtgtgtggaccctcaagctgaatgaatacaaagaatgatggaagtattgagaaaaagaagttcttcaactctaccagttccagtgtttaaganaaagattccctgatgctgatatttccactaagaacacctgcattcttcccttatccctgctctggattttagttttgngcttagttaa

SEQ ID NO: 241 - DNA, 529 bp, Homo sapiens
  misc_feature (1)...(529): n = A,T,C or G
tgtgtccaagagagctcagtctttatccctagacgcttcattgatcgaattcaaatcttgccccgtgggaatggttgtccaagaaaagaaatcatagtctggaagaagaacaagtcaattgtgtgtgtggaccctcaagctgaatggatacaaagaatgatggaagtattgagaaaaagaagttcttcaactctaccagttccagtgtttaagagaaagattccctgatgctgatatttccactaagaacacctgcattcttcccttatccctgctctggattttagttttgtgcttagttaaatcttttccaggaaaaagaacttccccatacaaataagcatgagactatgtaaaaataaccttgcagaagctgatggggcaaactcaagcttcttcactcacagcaccctatatacacttggagtttgcattcttattcatcagggaggaaagtttctttgaaaatagttattcagttataagtaatacaggattattttgattatatacttgntgnttaatgttt

SEQ ID NO: 242 - DNA, 440 bp, Homo sapiens
ctccctgagcagagggacctgcacacagagactccctcctgggctcctggcaccatggccccactgaagatgctggccctggtcaccctcctcctgggggcttctctgcagcacatccacgcagctcgagggaccaatgtgggccgggagtgctgcctggagtacttcaagggagccattccccttagaaagctgaagacgtggtaccagacatctgaggactgctccagggatgccatcgtttttgtaactgtgcagggcagggccatctgttcggaccccaacaacaagagagtgaagaatgcagttaaatacctgcaaagccttgagaggtcttgaagcctcctcaccccagactcctgactgtctcccgggactacctgggacctccaccgttggtgttcaccgcccccaccctgagcgcctgggtccaggggagg

SEQ ID NO: 243 - DNA, 345 bp, Homo sapiens
  misc_feature (1)...(345): n = A,T,C or G
cctcccctggacccaggcgctcagggtgggggcggtgaacaccaacggtggaggtcccaggtagtcccgggagacagtcaggagtctggggtgaggaggcttcaagacctctcaaggctttgcaggtatttaactgcattcttcactctcttgntgttggggtccgaacagatggccctgccctgcacagttacaaaaacgatggcatccctggagcagtcctcagatgtctggtaccacgtcttcagctttctaaggggaatggctcccttgaagtactccaggcagcactcccggcccacattggtccctcgagctgcgtggatgtgctgcananaanccccc

SEQ ID NO: 244 - DNA, 368 bp, Homo sapiens
  misc_feature (1)...(368): n = A,T,C or G
caagcttttttttttttttttttttttttttttttatgantaatggtctatttatngatnccattctattttaacaaanaaaatntttcaaattacaaggtntacaantcaatactgntttgaanngaaaaatnatttgctttgaaagtgtntgcatgtatatatatatgataaatgattataacgtgtgtgtcanngacaanatgtantctttggttgttagttatatactgnctacctgtganangcaaggtaagngggtnacanactntnaaatttatnaaacacttanatttttcanggaagttacntgaaggaactagggagtttcatgantanataaaangttcgggngggatctccaccgg

SEQ ID NO: 245 - DNA, 573 bp, Homo sapiens
ccaaaagaagtaagacagcttgctgaagatttcctgaaagactatattcatataaacattggtgcacttgaactgagtgcaaaccacaacattcttcagattgtggatgtgtgtcatgacgtagaaaaggatgaaaaacttattcgtctaatggaagagatcatgagtgagaaggagaataaaaccattgtttttgtggaaaccaaaagaagatgtgatgagcttaccagaaaaatgaggagagatgggtggcctgccatgggtatccatggtgacaagagtcaacaagagcgtgactgggttctaaatgaattcaaacatggaaaagctcctattctgattgctacagatgtggcctccagagggctagatgtggaagatgtgaaatttgtcatcaattatgactaccctaactcctcagaggattatattcatcgaattggaagaactgctcgcagtaccaaaacaggcacagcatacactttctttacacctaataacataaagcaagtgagcgaccttatctctgtgcttcgtgaagctaatcaagcaattaatcccaagttgcttcag

SEQ ID NO: 246 - DNA, 425 bp, Homo sapiens
gacctgcacacagagactccctcctgggctcctggcaccatggccctactgaagatgctggccctggtcaccctcctcctgggggcttctctgcagcacatccacgcagctcgagggaccaatgtgggccgggagtgctgcctggagtacttcaagggagccattccccttagaaagctgaagacgtggtaccagacatctgaggactgctccagggatgccatcgtttttgtaactgtgcagggcagggccatctgttcggaccccaacaacaagagagtgaagaatgcagttaaatacctgcaaagccttgagaggtcttgaagcctcctcaccccagactcctgactgtctcccgggactacctgggacctccaccgttggtgttcaccgcccccaccctgagcgcctgggtccaggggagg

SEQ ID NO: 247 - DNA, 593 bp, Homo sapiens
atctcgacatctctgcttctcatgctgctggtcagcagcctctctccagtccaaggtgttctggaggtctattacacaagcttgaggtgtagatgtgtccaagagagctcagtctttatccctagacgcttcattgatcgaattcaaatcttgccccgtgggaatggttgtccaagaaaagaaatcatagtctggaagaagaacaagtcaattgtgtgtgtggaccctcaagctgaatggatacaaagaatgatggaagtattgagaaaaagaagttcttcaactctaccagttccagtgtttaagagaaagattccctgatgctgatatttccactaagaacacctgcattcttcccttatccctgctctggattttagttttgtgcttagttaaatcttttccaggaaaaagaacttccccatacaaataagcatgagactatgtaaaaataaccttgcagaagctgatggggcaaactcaagcttcttcactcacagcaccctatatacacttggagtttgcattcttattcatcggggaggaaagtttctttgaaaatagttattcagttataagtaatacaggattat

SEQ ID NO: 248 - DNA, 453 bp, Homo sapiens
  misc_feature (1)...(453): n = A,T,C or G
cagctcagtggcacaagtgaaagcaatgatcgagactaagacgggtataatccctgagacccagattgtgacttgcaatggaaagagactggaagatgggaagatgatggcagattacggcatcagaaagggcaacttactcttcctggcatcttattgtattggagggtgaccaccctgggcatggggtgttggcaggggtcaaaaagcttatttcttttaatctcttactcaacgaacacatcttctgatgatttcccaaaattaatgagaatgagatgagtagagtaagatttgggtgggatgggtaggatgaagtatattgcccaactctatgtttctttgattctaacacaattaattaagtgacatgatttttactaatgtattactgagactagtaaataaatttttaagacnaaaaaaaaaaaaaaaaaaaaaaaaaaaagcttg

SEQ ID NO: 249 - DNA, 608 bp, Homo sapiens
ctcagagctcaagtctgaactctacctccagacagaatgaagttcatctcgacatctctgcttctcatgctgctggtcagcagcctctctccagtccaaggtgttctggaggtctattacacaagcttgaggtgtagatgtgtccaagagagctcagtctttatccctagacgcttcattgatcgaattcaaatcttgccccgtgggaatggttgtccaagaaaagaaatcatagtctggaagaagaacaagtcaattgcgtgtgtggaccctcaagctgaatggatacaaagaatgatggaagtattgagaaaaagaagttcttcaactccaccagttccagtgtttaagagaaagattccctgatgctgatatttccactaagaacacctgcattcttcccttatccctgctctggattttagttttgtgcttagttaaatcttttccaggaaaaagaacttccccatacaaataagcatgagactatgtaaaaataaccttgcagaagctgatggggcaaactcaagcttctttactcacagcaccctatatacacttggagtttgcattcttattcatcagggaggaaagtttctttgaaaata

SEQ ID NO: 250 - DNA, 400 bp, Homo sapiens
ccaggtaccaatgggtgcgctgcaatccagacagtaattctgcaaactgccttgaagaaaaaggaccaatgttcgaactacttccaggtgaatccaacaagatcccccgtctgaggactgacctttttccaaagacgagaatccaggacttgaatcgtatcttcccactttctgaggactactctggatcaggcttcggctccggctccggctctggatcaggatctgggagtggcttcctaacggaaatggaacaggattaccaactagtagacgaaagtgatgctttccatgacaaccttaggtctcttgacaggaatctgccctcagacagccaggacttgggtcaacatggattagaagaggattttatgttataaaagaggattttcccaccttg

SEQ ID NO: 251 - DNA, 393 bp, Homo sapiens
ctgctcatcagatggcgggaagatgaagacagatggtgcagccacagttcgtttgatctctaccttggtccctcccccgaaagtgagcgaaggaggccacttggcacgaccgtgacagtaataaactgcaaaatcttcaggctctaggctgctgacggtgagagtgaagtctgtcccagatccactgccagtgaatctggcggggatgccagcggccctgtaggatgtatcataaatgatgatcctgggagcctggccaggtttctgttgggaccagcctaagtaggtggcaacactctgactggccctgcaggagagggtggctctctcccctggagacaaagacagggtggctggagactgtgacaacacaagttctccggtggagtctgg

SEQ ID NO: 252 - DNA, 425 bp, Homo sapiens
cctggtggaaagaaggctctagaacctgcttatagagccacaacagggtgcagacaactgtgatgtcaaccaatgtcactcgttcgcccaccagaaaagtcctcgtcttcaagtaagcatccagcagccccagaattcgcctcacttcctcctttgcattctcagtggcctgtttgttgtggtgcatgatgcccaaggtggggaacacccaggtactggctgggggcactatatcggaatcagcaaagctcacccactgcaccacctgggctgctgcctctggagtacttccccgcagctcctcattgctcacatagtaggcaatggcgttgctctcaaacacacagaatccatcatcaccctcaaatgctgggaccttgccggcaggaaatttgcggagaaattcaggggtgcggttggtttgg

SEQ ID NO: 253 - DNA, 603 bp, Homo sapiens
aaaaaaacttgtgcaaattgcaatcactgagtgattatggaaaggcaaagtatatacagtaatgtgagagaaactcaaaccaagtaagggtaaaaatgaaatgattaacaccaccagaggaggaagctactatcaaaataaaaccatacttcctaataaaggtaaggccatcataaccccagaaaatgcttcatactttagataattaaaaacacattataaccaaaagcagatagtaacattgagtatgctgatttcaaaaagaagatgggtctagataccaggacagctctttttagtgccttccttaaaaagggcaaaactttttagagccatgtaattgtttatagccatggcctggcttcaggcatctcataagtgaggcttcagaaagtccttgaagagtatatggcagtgaaactgggctcccatctttaccataaagatgttcttcttgagaataagtgcatataggaagtgatcgcttatgacatcatttcattgatcttgaggccatataaagagacttgctgatattagagcagtttctttctaatcaatattccgctgaattccaagcaatgaggcacacaccagtttgtc

SEQ ID NO: 254 - DNA, 485 bp, Homo sapiens
aaaaaaggaaacagaaaacagaagaaatcacttaaggagagctgtcattttctattggtgaggattcctgatcttggggaggttctggaaagttcgtctctgtttcttcttcttcctcttcttggattggaataatttcaatgtcttcttcattctttggttgggaagatgtttcagttagcccaaccacttcttcttttatttcaatagtctgttcttttttttcttctgctgacaggagaactatgttagatttgggtctggagcacgttcttttccattcattctcaacgatgccagctattacaagttcctggaagaaggcaaagatcagcatcactgacaaaatgcccaagaacagagattgtatgctgtaacagtattgggtagatggggagtttttctcagagggattagctggttcacagttgtatatgttaatatatggtgtgtgagctctaataaaattcagactctccattttt

SEQ ID NO: 255 - DNA, 568 bp, Homo sapiens
ctcagagctcaagtctgaactctacctccagacagaatgaagttcatctcgacatctctgcttctcatgctgctggtcagcagcctctctccagtccaaggtgttctggaggtctattacacaagcttgaggtgtagatgtgtccaagagagctcagtctttatccctagacgcttcattgatcgaattcaaatcttgccccgtgggaatggttgtccaagaaaagaaatcatagtctggaagaagaacaagtcaattgtgtgtgtggaccctcaagctgaatggatacaaagaatgatggaagtattgagaaaaagaagttcttcaactctaccagttccagtgtttaagagaaagattccctgatgctgatatttccactaagaacacctgcattcttcccttatccctgctctggattttagttttgtgcttagttaaatcttttccaggaaaaagaacttccccatacaaataagcatgagactatgtaaaaataaccttgcagaagctgatggggcaaactcaagcttcttcactcacagcaccctatatacacttggagttt

SEQ ID NO: 256 - DNA, 518 bp, Homo sapiens
cctcccgcttacgcagcttgtcatactggcgacaggttctctcgaagagcgaggagatgctggtgtggttggaaaaaaggaaacagaaaacagaagaaatcacttaaggagagctgtcattttctattggtgaggattcctgatcttggggaggttctggaaagttcgtctctgtttcttcttcttcctcttcttggattggaataatttcaatgtcttcttcattctttggttgggaagatgtttcagttagcccaaccacttcttcttttatttcaatagtctgttcttttttttcttctgctgacaggagaactatgttagatttgggtctggagcacgttcttttccattcattctcaacgatgccagctattacaagttcctggaagaaggcaaagatcagcatcactgacaaaatgcccaagaacagagattgtatgctgtaacagtattgggtagatggggagtttttctcagagggattagctggttcacagttgtatatgttaatatat

SEQ ID NO: 257 - DNA, 231 bp, Homo sapiens
aaacttgatccaacctctttgcatcttacaaggttaaacagctaaaagaagtaaaataagaaggcaatgcttgtggaatgtacagtgcatattggcggcgcacgcctcattacgattcgcctgcttgcttctcctgttcaatcgtttctttggaaggcagtggatttttctcttgcgtctctgtcttcttcagtttcgacttatcgaatttctcgatctcagccatatcgg

SEQ ID NO: 258 - DNA, 551 bp, Homo sapiens
  misc_feature (1)...(551): n = A,T,C or G
ctgaatatactaaacnttgctctattatctgttgaattgctgtatttcactttttcagcatttggggatcattatttaattgaatttgtagagatcgattttccagacaggtctctgttcttcaatgaacaaatgataagaaacaatttgactccttatatgacaatggaattaaataaattgacactcatctaggaataattctacaatcatctccatctctaagattacctactgcaaacaaagaattgatctttctttctcaaaaaccacatgggtaagatgatcattgtgactctgaatgcaagaataagtgagtggaagctacaaggggagattatctgccaacatagaaagaatctagaagaaaagattttattacaggtaacatgacatagcttggagccatctttttggtctcttgcatacattttctctgcatgtctaaggaagaattcacaaggtagcaagcaccaatactttctgctttggagtttcacaaattgaaaatttgtccctctcttgttaagtcaatcaaacatctaccaatg

SEQ ID NO: 259 - DNA, 231 bp, Homo sapiens
aaacttgatccaacctctttgcatcttacaaagttaaacagctaaaagaagtaaaataagaaggcaatgcttgtggaatgtacagtgcatattggcggcgcacgcctcattacgattcgcctgcttgcttctcctgttcaatcgtttctttggaaggcagtggatttttctcttgcgtctctgtcttcttcagtttcgacttatcgaatttctcgatctcagccatatcgg

SEQ ID NO: 260 - DNA, 278 bp, Homo sapiens
aaaatatccctgaagtgacacactccttttttgagaccgatactggtattcttttattatagagactaaaaggtctgccttactagacttcccactttttgttctgaaaggaattaaggactgcaggtttccagctctgtcttcccgaggccattatgaacagattaaatggaaggacaaattctaaataactgggctttcaacatgaaaagggaaaggctgatggggagttcagaaccttgaatactgtaactgaacatccctcaaggttaatgcag

SEQ ID NO: 261 - DNA, 272 bp, Homo sapiens
ccaaaagaagtaagacagcttgctgaagatttcctgaaagactatattcatataaacattggtgcacttgaactgagtgcaaaccacaacattcttcagattgtggatgtgtgtcatgacgtagaaaaggatgaaaaacttattcgtctaatggaagagatcatgagtgagaaggagaataaaaccattgtttttgtggaaaccaaaagaagatgtgatgagcttaccagaaaaatgaggagagatgggtggcctgccatgggtatccatgg

SEQ ID NO: 262 - DNA, 500 bp, Homo sapiens
  misc_feature (1)...(500): n = A,T,C or G
ccggcagtttgtcacagccacagatgttgtccgagggaaccccaagttgaacttggcttttattgccaacctctttaacagataccctgccctgcacaaaccagagaaccaggacattgactggggggctcttgaaggtgagacgagagaagagcggacatttaggaactggatgaactccctgggtgttaaccctcgagtcaatcatttgtacagtgacttatcagatgccctggtcatcttccagctctatgaaaagatcaaagttcctgttgactggaacagagtaaacaaaccgccataccccaaactgggaggcaatatgaagaagcttgagaattgtaactacgcggtagaattggggaagaatcaagcgaagttctccctggttggcatcggtggacaagatctcaatgaaggaaaccgcactctcacactggccttgatttggcagctaatgagaaggtatacactgaatatcctcnaagaaattggtggtg

SEQ ID NO: 263 - DNA, 287 bp, Homo sapiens
ctctggcctcttactcaccctctaccacagacatggctcagtcactggctctgagcctccttaccctggttctggcctttggcatccccaggacccaaggcagtgatggaggggctcaggactgttgcctcaagtacagccaaaggaagattcccgccaaggttgtccgcagctaccggaagcaggaaccaagcttaggctgctccatcccagctatcctgttcttgccccgcaagcgctctcaggcagagctatgtgcagacccaaaggagctctgggtgcagcag

SEQ ID NO: 264 - DNA, 306 bp, Homo sapiens
ctgcccacctcaccctcagctctggcctctgactcaccctctaccacagacatggctcagtcactggctctgagcctccttatcctggttctggcctttggcatccccaggacccaaggcagtgatggaggggctcaggactgttgcctcaagtacagccaaaggaagattcccgccaaggttgtccgcagctaccggaagcaggaaccaagcttaggctgctccatcccagctatcctgttcttgccccgcaagcgctctcaggcagagctatgtgcagacccaaaggagctctgggtgcagcag

SEQ ID NO: 265 - DNA, 242 bp, Homo sapiens
ctgggagagctagactaagttggtcatgatgcagaagctactcaaatgcagtcggcttgtcctggctcttgccctcatcctggttctggaatcctcagttcaaggttatcctacgcagagagccaggtaccaatgggtgcgctgcaatccagacagtaattctgcaaactgccttgaagaaaaaggaccaatgttcgaactacttccaggtgaatccaacaagatcccccgtctgaggactg

SEQ ID NO: 266 - DNA, 132 bp, Homo sapiens
ctgcttccattggtgggtcatttttgctgtcaccagcaacgttgccacgacgaacatccttgacagacacattcttgacattgaagcccacattgtccccaggaagagcttcactcaaagcttcatggtgca

SEQ ID NO: 267 - DNA, 108 bp, Homo sapiens
ccatgggaatctaattaatttcataatgatgttggttgaacatgataccaaaaaatgcaggtattttcaagaacaataagatagataacagcattaaagcataatcct

SEQ ID NO: 268 - DNA, 414 bp, Homo sapiens
cctgacacaatatccctgttcactttgaagtgaattttgactctatattcagaaccttcctttaacacaatggtttcctttttgagggcttccagatctccagtaaggtccatggtgattggtcccggggcactctcacaaaccagggtgagccgggtgacaacgacattgggggctttcggatctgtcaccacaggaccatctcccagcagcgttttcttgtacttaattagactctcatcatctttgtccatttcctgcagctctttcagggacttctgtggtggaggcttataattgagcttgctgtccagctcatcatcgtcatcctcctccacatgtgggctctggggctttttcagtcattctgatctatttattcagtgcttcacgtctctgtccggggtgcctctg

SEQ ID NO: 269 - DNA, 461 bp, Homo sapiens
cgcgtggagggaatatgtgttctggaagaatagagatcaaattccaaggacggtggggaacagtgtgtgatgataacttcaacatagatcatgcatctgtcatttgtagacaacttgaatgtggaagtgctgtcagtttctctggttcatctaattttggagaaggctctggaccaatctggtttgatgatcttatatgcaaccggaaatgagtcagctctctggaactgcaaacatcaaggatggggaaagcataactgtgatcatgctgaggatgctggagtgatttgctcaaagggagcagatctgagcctgagactggtagatggagtcactgaatgttcaggaagattagaagtgagattccaaggagaatgggggacaatatgtgatgacggctgggacagttacgatgctgctgtggcatgcaagcaactgggatgtccaactgccgtcccagc

SEQ ID NO: 270 - DNA, 206 bp, Homo sapiens
gaatccaacaagatcccccgtctgaggactgacctttttccaaagacgagaatccaggacttgaatcgtatcttcccactttctgaggactactctggatcaggcttcggctccggctccggctctggatcaggatctgggagtggcttcctaacggaaatggacaaggattccaactagtagacgaaagtgatgctttccatgac

SEQ ID NO: 271 - DNA, 500 bp, Homo sapiens
  misc_feature (1)...(500): n = A,T,C or G
atgatgcagaagctactcaaatgcagtcgggttgtcctggctcttgccctcatcctggttctggaatcctcagttcaaggttatcctacgcagagagccaggtaccaatgggtgcgctgcaatccagacagtaattctgcaaactgccttgaagaaaaaggaccaatgttcnaactacttccaggtgaatccaacaagatcccccgtctgaggactgacctttttccaaagaccagaatccaggacttgaatcgtatcttcccnctttctgaggactactctggatcaggcttcggctccggctccggntctggatcaggatctgggagtggcttcctaacggaaatggaacaggattaccaactagtagaccaaagtgatgctttccatgacaaccttaggtctcttgacaggaatctgccctcanacagccnggacttgggtcaacatggattagaagaggattttatgttataaaagaggattttccccccttgncn

SEQ ID NO: 272 - DNA, 511 bp, Homo sapiens
  misc_feature (1)...(511): n = A,T,C or G
ggtcatgatgcagaagctactcaaatgcagtcggcttgtcctggctcttgccctcatcctggttctggaatcctcagttcaaggttatcctacgcagagagccaggtaccaatgggtgcgctgcaatccagacagtaattctgcaaactgccttgaagaaaaaggaccaatgttcgaactacttccaggtgaatccaacaagatcccccgtctgaggactgacctttttccaaagacgagaatccaggacttgaatcgtatcttcccnctttctgaggactactctggatcaggcttcggctcccgctccggctctggatcaggatctgggagtggcttcctaacggaaatggaaccnggattacccaactagtagacgaaagtgatgctttccatgacaacccttaggtctcttgacaggaatctgccctcacacngccaggacttgggtcaacatggattagaagaggattttattgntataaaagaggattttccccnccnttgaccc

SEQ ID NO: 273 - DNA, 101 bp, Homo sapiens
  misc_feature (1)...(101): n = A,T,C or G
gttngtaatnatgcanaagctactcnaatgcagtccnnctttttctggctcttgccctcatcctggttctngaatcctcacttcaaggttatcctacncac

SEQ ID NO: 274 - DNA, 451 bp, Homo sapiens
  misc_feature (1)...(451): n = A,T,C or G
anctagactannntggtcatgatgcagaagctactcaaatgcagtcggcttgtcctggctcttgccctcatcctggttctggaatcctcagttcaaggttatcctacgcagagagccaggtaccaatgggtgcgctgcaatccagacagtaattctgcaaactgccttgaagaaaaaggaccaatgttngaactacttncaggtgaatncaacangatcccccgtctgaggactgacctttttccaaagacgagaatccaggacttgaatcgtatcttcccactttctgaggactactctggatcaggcttcggctccggctccggctctggatcaggatctgggagtggcttcctaacggaaatggaacaggattaccaactantagacgaaagtgatgctttccatgacaaccttangtctcttgacaggaatctgcccncagacagcc

SEQ ID NO: 275 - DNA, 423 bp, Homo sapiens
attgacacttcctggtgggatccgagtgaggcgacggggtaggggttggcgctcaggcggcgaccatggcgtatcacggcctcactgtgcctctcattgtgatgagcgtgttctggggcttcgtcggcttcttggtgccttggttcatccctaagggtcctaaccggggagttatcattaccatgttggtgacctgttcagtttgctgctatctcttttggctgattgcaattctggcccaactcaaccctctctttggaccgcaattgaaaaatgaaaccatctggtatctgaagtatcattggccttgaggaagaagacatgctctacagtgctcagtctttgaggtcacgagaagagaatgccttctagatgcaaaatcacctccaaaccagaccacttttcttgacttgcctgttttgg

SEQ ID NO: 276 - DNA, 433 bp, Homo sapiens
  misc_feature (1)...(433): n = A,T,C or G
tgnncatgatgcanaagctactcaaatgcagtcggcttgtcctggctcttgccctcatcctggttctggaatcctcagttcaaggttatcctacgcagagagccaggtaccaatgggtgcgctgcaatccagacagtaattctgcaaactgccttgaagaaaaaggaccaatgttcgaactacttccangtgaatccaacaagatcccccgtctgaggactgacctttttncaaagacgagaatccaggacttgaatcgtatcttcccactttctgaggactactctggatcaggcttnggntccggctccggctctggatcangatctgggagtggcttcctaacggaaatggaacaggattaccaactagnngacgaaagtgatgctttccatgacaaccttaggtctcttgacaggaatctgccctcaga

SEQ ID NO: 277 - DNA, 478 bp, Homo sapiens
ctggctaggtgtgtgtgtatgtgagtaggggtgctattgattggcacatattttcccccctggagtttaggggtggcagaaagcttttatagtaccaaaaaagtaaacattgataatatggcctgacaacaatcagatatgctaagctctagaagcaaaagcaaggtaggattgcctccaaatgttgacaggtattagccataccacagtaactagatctaatgtgagggctaaatgcctggagaggcagaaccctaaaggatgcttagttatagctccatgctgccgccgagtggcttgatgctccattacaccctccttggatccaaccttccattaaggctgaaggctctagagggcagagtattcaagatgttagatctggtccaagcccaaattctagagttaaaagcagaggggttcttagtggctgaaaaaaaacaaaacctgatgacatttgggactccagttttgagga

SEQ ID NO: 278 - DNA, 208 bp, Homo sapiens
aagctactcaaatgcagtcggcttgtcctggctcttgccctcatcctggttctggaatcctcagttcaaggttatcctacgcagagagccaggtaccaatgggtgcgctgcaatccagacagtaattctgcaaactgccttgaagaaaaaggaccaatgttcgaactacttccaggtgaatccaacaagatcccccgtctgaggactg

SEQ ID NO: 279 - DNA, 330 bp, Homo sapiens; identical to SEQ ID NO: 2

SEQ ID NO: 280 - DNA, 294 bp, Homo sapiens
ccaaactcctccagatgccagacggtctccttcttgtccagatccacatagaacatctcatcttcatcaaattcaaacataaactcccctgttggtctatgcgtctgtacaaacgcggcataagttgacacatggtccgccttgatggccccagctcctcggagactcagcaggaaagccaaggagagggctctcaagatcacagctctgatatggaacattctgtcttcagggcgcatgttgtggggtctataattgatgactgtgagcacaggaacagtgatgaggaactga

SEQ ID NO: 281 - DNA, 269 bp, Homo sapiens; identical to SEQ ID NO: 4

SEQ ID NO: 282 - DNA, 491 bp, Homo sapiens
ccaggagtgtcaaactctgtaagcacacggataccccggagccgtgcgtattcaatgacctccttcacatcctgtgctgtgtagatgtgggtgacagggttgtaggacccctttctcatgagctctggaaaagtgaagctctcatatgggaaggaaggatcatctaccagatgccagtggaacacgttcaatttattgtacgccatgacatccagagtgtccaggatgctagagagtggcaggtaatggcgagatgtatccaacagcaagccccggtgaggaaagcggggaaagtcctcaatctcagtcttgttgataaagaactcggagagctccccagacagtctcagagaggagtaaacactggtcatcatttatggtcagggtataattctccactgactccaaagtaggaagctggttacatccaggtgtgactacagagacaaccaacacattcttctccagtgtatgcccgtttccctaggttg

SEQ ID NO: 283 - DNA, 472 bp, Homo sapiens
  misc_feature (1)...(472): n = A,T,C or G
cctcnnacngaaggctggtgaccaggtcccaggcgggcaagactcagccttggtggggcctgaggacagaggaggcccaggagcatcggggagagaggtggagggacaccgggagagccaggagcgtggacacagccagaactcatcacagaggctggcgtccagtcccgggtcacgtgcagcaggaacaagcagccactctgggggcaccaggtggagaggcaagacgacaaagagggtgcccgtgttcttgcgaaagcggggctgctggccacgagtgctggacagaggcccccacgctctgcttgcccccatcacgccgttccgtgactgtcacgcagaatctgcanacaggaagggagactctaagcgggagtgcggccaagcctgcctccgcccgtcagggaggactcccgggctcactcnaaggaggtgccaccatttccgctttggnnagcttttctttttcttt

SEQ ID NO: 284 - DNA, 349 bp, Homo sapiens
  misc_feature (1)...(349): n = A,T,C or G
aaaaaatttactcatcttccataaagcgacttttaatgtatcaacacttaaagatacacagtgacttaatgaaatatcagcacaactgcatagaattgagctccagagaattatacactcgagctgctttcctgggctctggtttataagggtattggcttagagaccagcttggagtcatttgcccctacccgggaaatgcaggccaggaaacttaagattttgcgggccttttctgtttctaggtaaaatgcagggagctccctgaaggncttgaaaaccatcaaccattcaaatatggtatcctggggacctttcctcttgagtaaanggaagaaaggaggtttgg

SEQ ID NO: 285 - DNA, 179 bp, Homo sapiens
  misc_feature (1)...(179): n = A,T,C or G
aaagntggctcaagactggcccangcataatactgtcaatctaaaggtaaccggcaacatcaaaaagtacatctcaaaagaatcaggcttaaagataaacaggagaactggatatatctaagagtaagaagtgtaaacaatagaaaagaggtagggtttagggttctcatctagggatt

SEQ ID NO: 286 - DNA, 462 bp, Homo sapiens; identical to SEQ ID NO: 16
  misc_feature (1)...(462): n = A,T,C or G

SEQ ID NO: 287 - DNA, 388 bp, Homo sapiens
ggacattcaaatgtctttatccacattcctgaaggataattgttatagattccctacctccataggaatgcttataatggattatctatacaatctccacattcccacattttgcattagagaatggaatcagtcaaaccctgttcccagagtttcccttagagttctcacctgttgtcttatatccatctaggaatccccatctctaatgtaagcttggagatccgggcccccgggggacaggtgactgaaggacaaaaactgatcctgctctgctcagtggctgggggtacaggaaatgtcacattctcctggtacagagaggccacaggaaccagtatgggaaagaaaacccagcgttccctgtcagcagagctggagatcccag

SEQ ID NO: 288 - DNA, 387 bp, Homo sapiens; identical to SEQ ID NO: 20

SEQ ID NO: 289 - DNA, 279 bp, Homo sapiens
  misc_feature (1)...(279): n = A,T,C or G
ngnccacaagatatgttctatagacgtccatgagtcctcttgctgtgngggagcggtatccacagacttntggaataattggcctgtgaggaagctcatcaaagctgcaaacagtacaantgaatgcaataganagncacagggccttattagcctttctgatggaggacttganatttgttgnccaggaanctattgtgtcataaactgaagagacatnccactttgatggattatttttcttttcagaaagacttggcttccttgtcctttctactg

SEQ ID NO: 290 - DNA, 235 bp, Homo sapiens
  misc_feature (1)...(235): n = A,T,C or G
ngtccagtagggctgagatgttgggagccatcaatcaggaaagccgggttagtaaagcagttgaagtgatgattcancacgtagaaaacttgaagaggatgtatgccaaaaagcaccgctgaattagaagaactgaaacaggttcttctgcagaatgaaaggcctttcaatnctcttgaagatgatgatgactgccaaattaaaaaacgttcagcttttctaaactccaagccat

SEQ ID NO: 291 - DNA, 318 bp, Homo sapiens
  misc_feature (1)...(318): n = A,T,C or G
cctttccttgagctgcacgtgaacctgtgtgggcaggcagcgtttgcaggcgtgtttacgggcaggcagcgtttgcaggcgtgtttaccggcaggcagcgtttgcaggcgtgtttacatgcaggcgtancaccatgtgagaccactggtccagggtttcagaggtcctgctcaggtgaatcggctgtgttctcacaagttcacggagctgantgggtgtgcaacatgaaatactagtgctgtgagggacagaagggacagaaagaggctnaagaccatnatccagctatacctgtgcctcggcttttctcagacctcg

SEQ ID NO: 292 - DNA, 381 bp, Homo sapiens
  misc_feature (1)...(381): n = A,T,C or G
ccaagcctcatcaataactgtatccaaaaggagacgctgcttggggtgtacccagagaaaacaccaagctttcctggcttcccggccctccctctccccattagtctttggggtgcatacataagtgttgtgtgaagtctcttggggtttagaagatcttgcactcattgatggagaagagcctccttctgtttcgtctcctggcctggttgacggcagttcggacgacgcactcaaacacctgctgtactccccgattgctaagggctgagcactccaggtagcccttggctctgacatcctgggccagnttcttcccttccatggcattgacgcangaggccctgtggggccccatctcccgctggtcagtctgggtgg

SEQ ID NO: 293 - DNA, 416 bp, Homo sapiens; identical to SEQ ID NO: 37
  misc_feature (1)...(416): n = A,T,C or G

SEQ ID NO: 294 - DNA, 317 bp, Homo sapiens
aaattatgacacaaaattttattaacaaggaaatatccattaattgactactacagtaaaaactttataatgcttgtatcatgaagaaagaccttccttttccttatatattaattgaactacataggcttgctgtacattttgttattcatgttataagaattctagattccattgcttttgaaatatgtttctttttaggaactaaaagtcaacttatagtttgatttctgttttatttgtactgtgtttctgattttgtgggtttctaaataaaaagatcaaacccaccactttcaatatactgttttctattt

SEQ ID NO: 295 - DNA, 156 bp, Homo sapiens; identical to SEQ ID NO: 40
  misc_feature (1)...(156): n = A,T,C or G

SEQ ID NO: 296 - DNA, 533 bp, Homo sapiens; identical to SEQ ID NO: 43
  misc_feature (1)...(533): n = A,T,C or G

SEQ ID NO: 297 - DNA, 529 bp, Homo sapiens
  misc_feature (1)...(529): n = A,T,C or G
cctgtggaaacgggcccctcccggagcccanggaaaagactgcttctctctcagcagccccattcctggttattccagggctgaccaacaaggacatttccacctcacaagctgctgctcactgatgttcccgtgggataagaggggaaattaagtgacaaccgcagcagcatccgctgggtctgtccctgtatcgcatgccagaggcttgcgcatcaccaagggtcgggcgtagctgtgctgccctgcgttgtgtgcatagcctctctctcctctgcttgcttaagtccttcttanccaccctctcccttanggctctaccaggtatgccacggggagcaggaatattaatcctagaatcctgactctcagtggcaatacagagtgtactccagggatgctgggtgaaacccggggaattctactcaccattaaccttgggagtaagaggccatacctcatctgaaactttacctgcccgggcgggccgttcaaaaggccnattcccccnccctttgcgccnttatag

SEQ ID NO: 298 - DNA, 345 bp, Homo sapiens
  misc_feature (1)...(345): n = A,T,C or G
ccaatgtggttggtcttcancttgcanttagccaggttccataccttgaccagcttgtcccagccacaggagacgatgatagggttgctgctgttgggcgagaagcggacacaagacacccactctgagtggctctcatcctggacagtgtatttgcacacacccagggtattccatagcttgatggttttatctcgagatccagagacaatctgccggttgtcagaggagaaggccacactcagcacatccttggtatggcccacaaatcgcctcgtggtggtgcccgttgtgagatcccagaggcgcagggttccatcccaggagcctgagagggcaaactgg

SEQ ID NO: 299 - DNA, 182 bp, Homo sapiens
  misc_feature (1)...(182): n = A,T,C or G
ccacaagatatgttctagagacgtccatgagtcctcttgctgtgtgggagcggnatccacagacttctggaataattggcctgtgaggaagcccatcaaagctgcaaacagtacaatgaatgcaatagagagccagagggccttattagcctttntgatggaggacttgagatttgttgccc

SEQ ID NO: 300 - DNA, 440 bp, Homo sapiens
ctgcaaatggttctgctgaaacatctgccttggacacagggttctcgctcaacctttcagagctgagagaatatacagagggtctcacggaagccaaggaagacgatgatggggaccacagttcccttcagtctggtcagtccgttatctccctgctgagctcagaagaattaaaaaaactcatcgaggaggtgaaggttctggatgaagcaacattaaagcaattagacggcatccatgtcaccatcttacacaaggaggaaggtgctggtcttgggttcagcttggcaggaggagcagatctagaaaacaaggtgattacggttcacagagtgtttccaaatgggctggcctcccaggaagggactattcagaagggcaatgaggttctttcctcaacggcaagtctctcaaggggaccacgcaccatgatgccttgg

SEQ ID NO: 301 - DNA, 396 bp, Homo sapiens
  misc_feature (1)...(396): n = A,T,C or G
cttgcgtccccgcgtgtgtgcgcctaatctcaggtggtccacccgagaccccttgagcaccaaccctagtcccccgcgcggccccttattcgctccgacaagatgaaagaaacaatcatgaaccaggaaaaactcgccaaactgcaggcacaagtgcgcattggtgggaaaggaactgctcgcagaaagaagaaggtggttcatagaacagccacagcagatgacaaaaaacttcagttctccttaaagaagttangggtaaacaatatctctggtattgaagaggtgaatatgtttacaaaccaaggaacagtgatccactttaacaaccctaaagttcaggcatctctggcagcgaacactttcaccattacaggccatgctgagacaaagcag

SEQ ID NO: 302 - DNA, 548 bp, Homo sapiens
  misc_feature (1)...(548): n = A,T,C or G
ctgcgtgattcccgtgattgcgttacaagctttgtctccttcgacttggagtctttgtccaggacaatgagacactcaaagagaacttattgtcctgattgggatgacaaggattgggattatggaaaatggaggagcagcagcagtcataaaagaaggaagagatcacatagcagtgcccaggagaacaagcgctgcaaatacaatcactctaaaatgtgtgatagccattatctggaaagcaggtctataaatgagaaagattatcatagtcgacgctacattgatgagtacagaaatgactacactcaaggatgtgaacctggacatcgccaaagagaccatgaaagccggtatcagaaccatagtagcaagtcttctggtagaagtggaagaagtagttataaaagcaaacacaggattcaccacagtacttcacatcgtcgttcacatggggtatgaaccgtttttacctgcccgggcgggcgctaanggcgaattccagcacactnggcgccgttctaggggatccgagctcggtccanctt

SEQ ID NO: 303 - DNA, 232 bp, Homo sapiens
ccagcgacagcctggcctgggaatggactggcagctcatcactaaaatgactcctttcatggaatccactgctatgcagccacactgaccacagagcaactgaataggtgagcattggattgttgatgacaactcttcagcagaacaattgtgtgtttgaagggactgttttatgatgaaataactgttatttcctggagctaattgttgaatgacagtttgtcaactgttt

SEQ ID NO: 304 - DNA, 232 bp, Homo sapiens; identical to SEQ ID NO: 57

SEQ ID NO: 305 - DNA, 191 bp, Homo sapiens; identical to SEQ ID NO: 58
  misc_feature (1)...(191): n = A,T,C or G

SEQ ID NO: 306 - DNA, 342 bp, Homo sapiens
aaacttttgagttgtagtcagaaactgttgttggactgcatagttttcaaaagtttttggtacatttctgactttagaaatctggggtaggaatccctttccatatgcatatagactattttctgagcttcttcaaaacatgtttcagtgggttcctgaatgttcctgatgatagtctctcttgtcgaactgtcaatgttaatctctctaggggactgtggctggatgtaaatcttataaagcttctttgccctagaaattctgctccaccgtgaggcaattttcttataggtttcacatgccatccagaattgaatattctcgtcactgtgctccattttt

SEQ ID NO: 307 - DNA, 545 bp, Homo sapiens
ccagtagggctgagatgttgggagccatcaatcaggaaagccgggttagtaaagcagttgaagtgatgattcagcacgtagaaaacttgaagaggatgtatgccaaagagcacgctgaattagaagaactgaaacaggttcttctgcagaatgaaaggtctttcaatcctcttgaagatgatgatgactgccaaattaaaaaacgttcagcttctctaaactccaagccatcttctctacgaagagtgactattgcctctttacccagaaatattggaaatgcaggaatggtggctgggatggaaaataatgatcgattcagtagaaggtcaagcagttggcgtattttggggtcaaagcagagtgaacaccgtccctcattacctcgatttattagcacctattcctgggcagatgctgaagaagaaaaatgtgaactaaaaactaaagatgactcagagccatctggagaagaaacagtagaaaggacaaggaagccaagtctttctgaaaagaaaaataatccatcaaagtgggatgtctct

SEQ ID NO: 308 - DNA, 330 bp, Homo sapiens
cctccatctcggctccagtccacactgtagatcgtgtctgggtgcacctctgggcccagtgtcagcatggccgccccagtgcccacgtcccacaccatgatcacgttgtcacaacctgcactgagcagcacgttctgggctgtggtgtgccaggccacaatgcccacacgcttggtgtggccctccagggtgacgacgggctcccgcaggggcagcatcaggcccccatccgggatctcccacaccatgactgtgcagtcctcggagccactggcaatgacgttgtcattgtgcgggcaccaggcgatgtctagcgcaggggctgtgtgg

SEQ ID NO: 309 - DNA, 392 bp, Homo sapiens; identical to SEQ ID NO: 67
  misc_feature (1)...(392): n = A,T,C or G

SEQ ID NO: 310 - DNA, 221 bp, Homo sapiens
  misc_feature (1)...(221): n = A,T,C or G
nccaggctcaggccctggggtgaaaggagacaggtgctgccaagaccatacatcagtcatctggcagcagctcgagaagcatgtcctccacgccgtcaatcttgatgtggtgcactaaagcgccnagaaaacttggagtctgaggatcggtatcgtccatcagggtagagctgccacatgataggcagcaggcttgggcctatctgggtgggggtcatagg

SEQ ID NO: 311 - DNA, 118 bp, Homo sapiens
  misc_feature (1)...(118): n = A,T,C or G
ncctcccagagaaggctggtgaccaggtcccaggcgggcaagactcagccttggtggggcctgaggacagaggaggcccaggagcatcggggagagaggtggagggacaccnggaaaa

SEQ ID NO: 312 - DNA, 133 bp, Homo sapiens
  misc_feature (1)...(133): n = A,T,C or G
gccggncaggtaaagaactaatttgtaaattatgacacaaaattttattaacaaggaaatatccattaattgactactacagtaaaaactttataatgcttgtatcatgaagaaagaccttccttttncctat

SEQ ID NO: 313 - DNA, 274 bp, Homo sapiens
  misc_feature (1)...(274): n = A,T,C or G
ngtaaatgattctttatttcaataaactttaacaaacaatatataatatttcttccttaaaaagctcattcaaagatcataggcagacttcttccccattgtattttagttggggagataaaggcaaaaagaggaaatgtaagctatcttacagtcattctgagaacctctggtttcatgctatactttcccagctaaaagttactaatttacgaagttcagatctgaaacttaaaaatcaanatccatatattaggatgtcctgctgtcacac

SEQ ID NO: 314 - DNA, 268 bp, Homo sapiens
  misc_feature (1)...(268): n = A,T,C or G
gtgatctccccatttgaaggtcgactgattagcaatctaagttctgcccggaactttaattcctctttgccaggtaatgcattcacagatcctggggactagggtgtggacatctttgggaggcattattctgcctgccataatagaattgttnggaagattaaacaacataatatacatgacgtatgttgangcacgcttggcacctgggaaatactcaggatgtactaaccattgctcctacacagntcagctnctgaaggagtcc

SEQ ID NO: 315 - DNA, 201 bp, Homo sapiens
aaaatttccaacctgaagatgggtcataattacacgttcaccgtccaagcaagatgcctttttggcaaccagatctgtggggagcctgccatcctgctgtacgatgagctggggtctggtgcagatgcatctgcaacgcaggctgccagatctacggatgttgctgctgtggtggtgcccatcttattcctgatactgctg

SEQ ID NO: 316 - DNA, 202 bp, Homo sapiens; identical to SEQ ID NO: 78
  misc_feature (1)...(202): n = A,T,C or G

SEQ ID NO: 317 - DNA, 182 bp, Homo sapiens
  misc_feature (1)...(182): n = A,T,C or G
accagcagtcctgcggcacctacctccgcgtgcgccagccgccccccaggcccttcctggacatgggggagggcaccaagaaccgaatcatcacagccgaggggatcatcctcctgttctgcgcggtggtgcctgggacgctgctgctgttnaggaaacgatggcaagaacganaactcngg

SEQ ID NO: 318 - DNA, 149 bp, Homo sapiens; identical to SEQ ID NO: 80
  misc_feature (1)...(149): n = A,T,C or G

SEQ ID NO: 319 - DNA, 240 bp, Homo sapiens
  misc_feature (1)...(240): n = A,T,C or G
ccagcctacaatggggatgttgtgtttctgttcaccttcgtttactatgcctgtgtcttctccaccacgctggggtctgggaggaatggacagacagaggatgagctctacccagggcctgcaggacctgcctgtagcccactctgctcgccttagcactaccactcctgccaaggaggattccatttggcagagcttcttccaggtgcccagctatacctgtgcctcggctttttcana

SEQ ID NO: 320 - DNA, 374 bp, Homo sapiens; identical to SEQ ID NO: 83

SEQ ID NO: 321 - DNA, 285 bp, Homo sapiens
cctttccttgagctgcacgtgaacctgtgtgggcaggcagcgtttgcaggcgtgtttacgggcaggcagcgtttgcaggcgtgtttaccggcaggcagcgtttgcaggcgtgtttacatgcaggcgtagcaccatgtgagaccactggtccagggtttcagaggtcctgctcaggtgaatcggctgtgttctcacaagttcacggagctgagtgggtgtgcaacatgaaatactagtgctgtgagggacagaagggacagaaagaggctgaagaccatcatccag

SEQ ID NO: 322 - DNA, 135 bp, Homo sapiens
aaagagaactaatggaagtggattgaatacagcagtctcaactgggggcaattttgccccccagaggacattgggcaatgtttggagacattttggtcattatacttggggggttgggggatggtgggatgtgtg

SEQ ID NO: 323 - DNA, 297 bp, Homo sapiens
ccattgcgggaaccctcaagttcaacccagagaccgactacctgacgggcacggatggcaagaagttcaggctggaggctccggatgcagatgagcttcccaaaggggagtttgacccagggcaggacacctaccagcacccacccaaggacagcagcgggcagcatgtggacgtgagccccaccagccagcgcctgcagctcctggagccttttgacaagtgggatggcaaggacctggaggacctgcagatcctcatcaaggtcaaagggaagtgtaccactgaccacatctcag

SEQ ID NO: 324 - DNA, 413 bp, Homo sapiens
  misc_feature (1)...(413): n = A,T,C or G
ccttgcctcanatccnnggtcactcggaagaggccatgtctaccctcaatgacactcatggaggaaatgctgagagaagcattcagatgcatgacacaagagccaatgaaaggccctattgctatgcaatctggtccaaaaccactcttcaggaggatgtcttcactggtgggccccacgcaaagcttcttcatgagggaatctaagactttgggggctgtccagattatgaatgggctcttccacattgccctggggggtcttctgatgatcccagcaagggatctatgcacccatctgtgtgactgtgtggtaccctctctgggggaggcattatgtatattattttccggatcactcctggcagnaacggagaaaaaactccangaagttgtttggtcaaaggaaaaatg

SEQ ID NO: 325 - DNA, 340 bp, Homo sapiens
ctggggggtccgggaaaggggttgggccatgagccaggcagctccgaagcagtcactgaggccagggagcctgcacccaggtcatggggcgacctggctctcactcctggcctgggtgctcacctacagaccacttcacttcccctgtccgcagcgtcactatgtcctcataggtggctgtctggtcaatgtccaggccctcgtaggtgtgatcttcctccatgccagccttgctgtcatccttgtccagcagcaggaagataggcacgatgatgaagaggatgatcagcagcgtctggatcatgatgataccatccttcagcgtgttcctctgcttcag

SEQ ID NO: 326 - DNA, 240 bp, Homo sapiens
ccagcctacaatggggatgttgtgtttctgttcaccttcgtttactatgcctgtgtcttctccaccacgctggggtctgggaggaatggacagacagaggatgagctctacccagggcctgcaggacctgcctgtagcccactctgctcgccttagcactaccactcctgccaaggaggattccatttggcagagcttcttccaggtgcccagctatacctgtgcctcggcttttctcag

SEQ ID NO: 327 - DNA, 353 bp, Homo sapiens
aaaaaaacaaagaagaagaagtcacaaagcaattgaaatggagcatccgcttggagaattaagacagggtgctcctgagacagacttccaagacagcttctttgaagtgctgtgtggggttaaatattcttcagcaaagagggtcacaggtaagggccccgtgaaacagcagttcttaatatcatctttatcttcccttaggataatataccccaaaatactttgcatctataagatgtatacatcactgcagttcacgaaacacagtctgctgcccaatacatatccatgttgcatggctaatgaaatgtcaaaccctactgggtacatggcagtggagctccacagcaagg

SEQ ID NO: 328 - DNA, 267 bp, Homo sapiens; identical to SEQ ID NO: 143

SEQ ID NO: 329 - DNA, 228 bp, Homo sapiens
cctccccaggacgacgtcttcccgacgcaagagcacccgtaactgtaacctatcctttatctcgatggttaagggcagccaggcgtgctgcttctcgtccaaatacacgaacttctcccaggcccacaggcggtccgggtggtcggtgactgcctccccgagtgtcgggcactcggccatggcgtcctcgggccgcctaagaagcaagagccagagcctctcaaggcc

SEQ ID NO: 330 - DNA, 580 bp, Homo sapiens
ctgaaggatgaaagagattggcaaggaagcaggaatgagtcagctttgggggaatattacctggtggctcccatcatttattgcttaggacatacccttttacctacttgctatcatgctggacctcagcatttcagggaccagaaaagatggggacaccaatgcaagcccaagactaccatccagaggaccgttcctgcccatgctgcttcctctagttttgctttcagagtggtgtcaccccacttgctaactcaagagtgcatcactaggcttcctgagcaggtttgatcgggatttggcctgggtctgttggtcagggaggcagaggtgtggggagaagggtgaaaggtgactgagccagggttccaggctcctcactcacggggctgaagctgggcatcgtcaggctcagagcccctcgacgtgcggcagcggtagcccttcttcttgagcacgtggcagatcatgaagcctgccaggcccatgaggaagaagaccagcacaagcaggaagagcatatatagcccatgttggggcggttccaggtcaggctgtggttccgacatgaggccctggg

SEQ ID NO: 331 - DNA, 542 bp, Homo sapiens
  misc_feature (1)...(542): n = A,T,C or G
aaactccaaattcctttatcgaagcagctatctgctaatattactgaatgacaagtctttggaaatgatagttaaccgaaaatgcagaaagaatcatagcaactaatgataatgacgggtaaaggatagaaaataaaatttttagccacaggttgtggttacagcatccaggccatcaccgacatctcggcagggctatgccgccacttcgtattaaacgtctactcctccgagaatgcccttattaaattaagtgcaaagtaaggcatcccaccccagacagagggatccacattctttaatcatgatgcgggccactgtaacagggagatggatgcaggacgcagacggggtggggcgcccaagcgacgcacttagacggtgatctgttggttttctctgaaaaatgatctctggtgtgaggcacaaatatctggaaacatccggaagacctggtctggcggcggctcctcgggggcctgcatcacaganccggctccacagctcttcccagcctcttctgccagttgccggacatacag

SEQ ID NO: 332 - DNA, 345 bp, Homo sapiens
ccaatgtggttggtcttcagcttgcagttagccaggttccataccttgaccagcttgtcccagccacgggagacgatgatagggttgctgctgttgggcgagaagcggacacaagacacccactctgagtggctctcatcctggacagtgtatttgcacacacccagggtattccatagcttgatggttttatctcgagatccagagacaatctgccggttgtcagaggagaaggccacactcagcacatccttggtatggcccacaaatcgcctcgtggtggtgcccgttgtgagatcccagaggcgcagggttccatcccaggagcctgagagggcaaactgg

SEQ ID NO: 333 - DNA, 542 bp, Homo sapiens
ctgtatgtccggcaactggcagaagaggctgggaagagctgtggagccggctctgtgatgcaggcccccgaggagccgccgccagaccaggtcttccggatgtttccagatacttgtgcctcacaccagagatcatttttcagagaaaaccaacagatcaccgtctaagtgcgtcgcttgggcgccccaccccgtctgcgtcctgcatccatctccctgttacagtggcccgcatcatgattaaagaatgtggatccctctgtctggggtgggatgccttactttgcacttaatttaataagggcattctcggaggagtagacgtttaatacgaagtggcggcatagccccgccgagatgtcggtgatggcctggatgctgtaaccacaacctgtggctaaaaattttattttctatcctttacccgtcattatcattagttgctatgattctttctgcattttcggttaactatcatttccaaagacttgtcattcagtaatattagcagatagctgcttcgataaaggaatttggagttt

SEQ ID NO: 334 - DNA, 618 bp, Homo sapiens
  misc_feature (1)...(618): n = A,T,C or G
aaaaaaaaaataattaagatacaggtttcaaaccatattaccacgatttcaaaaattttgtgaataaaagaagacacaccgtatttataaagcttctaggggctgtaatagatacataattttggatgtggtataggttggcctatatatacaaaaatacgtcactaaaattaagtggagtcacaataactttttatgtaactttgttttagttctaatttggtaacagtgactcaaaataaatagaatcatattttaggtggaaactcgatgatccatgtaagtagcggggctggagttctgtgctgtctgggcagagaaagcacttggactgaatgatgggcacagctctctctgtgaagtcctgcagagtcactaaccttgagttcatgtgctctaagcttcactgtccctccaacccaagatcccaatttcttttattccatcttgtttcctcttgtaaacagaagagcacaatatgacctgttttcaaaggagccggcaggaatctggttctgataacaaagtccctgtcactcctgtgtctattagttctcctaggtagtttcttcagggctgcgccaacttcacttcacagtanatgaaggaatagtgcca

SEQ ID NO: 335 - DNA, 193 bp, Homo sapiens; identical to SEQ ID NO: 166
  misc_feature (1)...(193): n = A,T,C or G

SEQ ID NO: 336 - DNA, 421 bp, Homo sapiens; identical to SEQ ID NO: 172
  misc_feature (1)...(421): n = A,T,C or G

SEQ ID NO: 337 - DNA, 481 bp, Homo sapiens; identical to SEQ ID NO: 173
  misc_feature (1)...(481): n = A,T,C or G

SEQ ID NO: 338 - DNA, 146 bp, Homo sapiens
  misc_feature (1)...(146): n = A,T,C or G
gtgtttgatggtaaggtttntcacanagccgaaaatgtngctgaanatcaaaaaaatctcacaagaaggggagggagaagagattcgattctgagtctcctactcccgggttctgcgtagagaagccgactgntgctggaggtcng

SEQ ID NO: 339 - DNA, 395 bp, Homo sapiens
  misc_feature (1)...(395): n = A,T,C or G
ctggaaaaggcnaaanagagncttaagaacgtggatgagaacattcgcangctcacngggcgggatccgaatgacntgaggcccatccaagccagattgctggccctttctggtcctggnggaggnagaggacgtggtagtntattactgaggcgtggattctnanatagtgnaggaggacccncagccnaacagagagaccttgaaggggcagtcantangctgggcggggagcgtnggaccagaagagaatcacgccaggaaagcgacccggangatgatgatgttaaaaagccancattgcagncttcagttgtagctacctncaaagagcgcacacgtanagacnttatccagnatcaaaatatggatgaaaagggaaagcaaaggaaccg

SEQ ID NO: 340 - DNA, 579 bp, Homo sapiens
ctgccctacttttcaattcagatatactagtaccttacctagaaataatgttaacctagggtgaagtcactataatctgtagtctattatttgggcatttgctacatgatgagtgctgccagattgtggcaggtaaagagacaatgtaatttgcactccctatgatatttctacatttttagcgaccactagtggaagacattccccaaaattagaaaaaaaggagatagaagatttctgtctatgtaaagttctcaaaatttgttctaaattaataaaactatctttgcgttcttttctgcaacagatgattccaacatgggtgtttgtctattcttctttactcttgaaacattagaccatgggaggctcttacagccttgagttgatatttatacaacccaaatctaggcttgaacggtgaggtgtcaggtcatcaaatattcatgtctatatagtcttacacaggttctcaaaaaaaatgttcatgggataggtcattgataatggattccttattctgagaactccagacgactgaaatatatgagagaaggaaaaggacatagtaggagcagg

SEQ ID NO: 341 - DNA, 585 bp, Homo sapiens; identical to SEQ ID NO: 183

SEQ ID NO: 342 - DNA, 295 bp, Homo sapiens
aaaaagtttctaatattaaagtcagaatattaatacaattaatattaatattaactacagaaaagacaaacagtagagaacagcaaaaaaataaaaaggatctccttttttcccagcccaaattctcctctctaaaagtgtccacaagaaggggtgtttattcttccaacacatttcacttttctgtaaatatacataaacttaaaaagaaaacctcatggagtcatcttgcacacactttcatgcagtgctctttgtagctaacagtgaagatttacctcgttctgctcagagg

SEQ ID NO: 343 - DNA, 534 bp, Homo sapiens
aaatgtttcatttgcagagttttatatccattaagtgcctttgaaagtttccagttgtgtgggctgctgtctcacctcccaccaatttctcctttctccatatggtgctaaaacctcaaagctgaggagggctgcaggacccttagcagattcagtgtgtcacccttgtcctgtgttcacgccagggcttcctaaatgaaagacatcggttacctgcttatgggaaggtgagcagcaaaggaattgaagttcgggacagggtagaattatgggttttcattgtgtttcatgccaaacccacaaaatccaaaatagaattcaagttaaacaaacttctactacaaaatggaaggggaaaaaggctcaggaaggtctatgagaatgagctgacttatctcgttaaatcttaagataaatgagggtaacccaaggctgcaccttggtgtaccaccctgagtggagttgaggtgacttcatttgattgcttcaggcgaactatataggtcaagtccagattataaaaaaattatctgc

SEQ ID NO: 344 - DNA, 464 bp, Homo sapiens; identical to SEQ ID NO: 200
  misc_feature (1)...(464): n = A,T,C or G

SEQ ID NO: 345 - DNA, 437 bp, Homo sapiens
  misc_feature (1)...(437): n = A,T,C or G
cctccgtggcagcagaagatcttttcgtccactatggccgcgatgggcaggcagttgaagcagtcagtgaaggttttccacagtttgatgttgtagcgtctcttgcactcatcgtagaaaccatagatgcggttgatgctggcacactcgtggttcccacggagcaggaagaagttctcggggtacttgatcttataggccagcagcaggcagatggtctccaaggactgcttgcccctgtccacatagtcccccagaaagaggtagttgctctcgggagggaaaccgccatactcaaatagtcgcagaaggtcgtagtactggccgtgtatgtcaccgcagatcttgaggggtgcctccagctccanaagaatgggctggctcagaaaaatctcccgggatttcaggcacagaccgcggatctcgttctctgtcag

SEQ ID NO: 346 - DNA, 562 bp, Homo sapiens
ctgttgactcagattcggcattttaattacattgtttccaagtatgatattctgagagtgtctatagcacttagtgtctgcttcatataaactaccagttattatatatttatgatgcaagtagttttccaaatgtggtgaaagtctgagtctttttatccccatgggtaaaatctgaatctggctctctgtgtctctcagtgcttgtttattgctggtcagagagtaaattcttgataaaagctgttgacttggctctcacagtttatgcagacattggagagacaatttggttatttcaaacatcacaggatttgagtaagaagacctggttatgaaacaaggctctcataattactagttatgactgttgacaagttaccttttcttgtttacaagttatttggcctctttgaattacttgtaaaatagagatagggattctttcttgatcatgaaacatcaaatgaagttatttgatgaaatactttgtcatctggaaattataaatataactaaatgttaattattatttgaaatttgggcacctcatggtggcatt

SEQ ID NO: 347 - DNA, 332 bp, Homo sapiens
aaatattgtacagggaataatcgagcatgcaaaattgaaaaccccatgtaaagacagcatgataagctcactggaaattttttaattaaataagcttaaaaagacattggactaaatgctaatatatggaatataagatttcccaatgttaatttagttaacaacttttttgtagtagcatacacacacataccacctttatgtactatctctagaagtaaaatagtaaactatataagatagatatatatgagtagaacaaggaggacatcttgaggtcatttcagaaatgtacatgattttattgagtctgcacacagtttatgattttt

SEQ ID NO: 348 - DNA, 126 bp, Homo sapiens
  misc_feature (1)...(126): n = A,T,C or G
ggntgttgactcanattcggcattttaattacattgtttccaagtatgatattctgagagtgtctatagcacttagtgtctgcttcatataaactaccagttattatatatttatgatgcaagtag

SEQ ID NO: 349 - DNA, 294 bp, Homo sapiens
ccacaaagccattgtatgtagctttagctcagcgcaaagaagagcgccaggctcacctcactaaccagtatatgcagagaatggcaagtgtacgagctgttcccaaccctgtaatcaacccctaccagccagcacctccttcaggttacttcatggcagctatcccacagactcagaaccgtgctgcatactatcctcctagccaaattgctcaactaagaccaagtcctcgctggactgctcagggtgccagacctcatccattccaaaatatgcccggtgctatccgcccag

SEQ ID NO: 350 - DNA, 237 bp, Homo sapiens; identical to SEQ ID NO: 206

SEQ ID NO: 351 - DNA, 428 bp, Homo sapiens
  misc_feature (1)...(428): n = A,T,C or G
gtacaagcttttttttttttttttttttttttttttttccaccaaagtttatttntntgaaacaatcaccagttgctgtcctntntggcacactganagccccaggagggtctttaactccnttcctcanattatattcatcccaaaaatntancctnggacaatantttggttacagcatantcccagnaatgaggtcccccaaatngctaagttttacatagggganactgggaaattcaaanaatnggatgganaaaccataggatccaanataatgtcagggggttnaaaatnttgganaggcatggtaccatcattgagttngaatctccttctcacttggagnggaagttgtaggattctgcctctaggaaatgngccntccntntgaataattggncccagnaanaggagngtaactagag

SEQ ID NO: 352 - DNA, 563 bp, Homo sapiens
aaaaaaaactacatctctttattgcagaatttatacttgtttgaaaaatacaaaatgtagcgttgataagattgaagcatgttgaaaggtaagtacagggaaaggtcctttcagaatgactgcaacagtgcagcaaggattcccattccccgcctaaaggacaatacctttttaatagaaataaatgagttagttagttagatttttattacagattgaattaaacagttagttacaaagacattctctgatacattcattcatagaggtcttaacgtataaatacatagtaaatatcctataaaatggtaggcaatctcatcgtgcattatctttttgtgctcagacttgacttcacattcagtctctacatacagcttgattagaatcataaaaacaatatgaagacgattgcataaagggatagtttgacaaagcatattcagatattgtaacatttatggtgggtaaaaatgtatcttttgaaacaatatattagactccatttttagctgaaatgaaatttactgattcaatctttttaagaatttgtggatgtttac

SEQ ID NO: 353 - DNA, 524 bp, Homo sapiens; identical to SEQ ID NO: 209

SEQ ID NO: 354 - DNA, 340 bp, Homo sapiens
  misc_feature (1)...(340): n = A,T,C or G
ctgaagcagaggaacacgctgaaggatggtatcatcatgatccanacgctgctgatcatcctnntcntcatcgtgcctatcttcctgctgctggacaaggatgacagcaaggctggcatggaggaagatcacacctacgagggcctggacattgaccagacagccacctatgaggacatagtgacgctgcggacaggggaagtgaagtggtctgtaggtgagcacccaggccaggagtgagagccaggtcgccccatgacctgggtgcaggctccctggcctcagtgactgcttcggagctgcctggctcatggcccaacccctttcccggaccccccag

SEQ ID NO: 355 - DNA, 556 bp, Homo sapiens; identical to SEQ ID NO: 211

SEQ ID NO: 356 - DNA, 561 bp, Homo sapiens
ccaagaggtggactcagagccttccttgagctaaactcggccaaccaaggcacgcagcatgtcccctcaggtctccagtcagtccaggttgaccctcagttctggacgtgtgtatatagctgtatttaatacctcaaggtcattgtggctctggggatgccggggcaggaggacgagggtgcgctgtggacacagcagtccgcggaattccgttctgggaagccaatggtcgccggcaccccttgcttcctccctctgttgtctgcctgtgtgacacacatcaatggcaataacttcttccaactcctcgcagaagtgggagaggccggcagcctgcaccgagaggggctttcctctctcttgctccccgcttcgttctgttttggctgcagagagtggttcatccatactctcattccctcgcctccccttgtggacgggggtcttgccttttcaattcctgtgttttggtgtcttcccttatctgctaccctgaatcacctgccctggtcttgctgtgtgatgggaacatgcttgtaaactgcgtaacaaatctacttt

SEQ ID NO: 357 - DNA, 353 bp, Homo sapiens; identical to SEQ ID NO: 212

SEQ ID NO: 358 - DNA, 202 bp, Homo sapiens
  misc_feature (1)...(202): n = A,T,C or G
ctgaagcagaggaacacgctgaaggatggtatcatcatgatccanacgctgctgatcatcctattcatcatcgtgcctatcttcctgctgctggacaaggatgacagcaaggctggcatggaggaagatcacncctacgagggcctggacattgaccagacagccacctatgaggacatagtgacgctgcggacaggggaag

SEQ ID NO: 359 - DNA, 463 bp, Homo sapiens
  misc_feature (1)...(463): n = A,T,C or G
ctcctntgtatgactgcaagtcctccaagatgccttctgcatntntnaatactacattcacctgattataaatttccttctcagactctgtaggctgggcattttcanantcaaggaaaaaatttggcccctgctcaaggtctgtgcatgtcaaaactttaagaagattccccatgttaaggtaccttcagccagtgctggtgattctgtccttgtccttctatccttggattggcgttccctctttcctagttcacttgttccagtccttcaacttctgtttcttgctaacaggtgtgcaaatgaattaccaactgggtaaccttgaatgagttaatcaaattccaggccatcgtccacgccaccaacagtcaaaggccaaggaagctgttggctgaaaaggtggtctatgttggcgtntggatccctgccctcctgctgactattnccgacttcatctttg

SEQ ID NO: 360 - DNA, 588 bp, Homo sapiens; identical to SEQ ID NO: 215

SEQ ID NO: 361 - DNA, 396 bp, Homo sapiens; identical to SEQ ID NO: 217
  misc_feature (1)...(396): n = A,T,C or G

SEQ ID NO: 362 - DNA, 253 bp, Homo sapiens
  misc_feature (1)...(253): n = A,T,C or G
gaaggatggtatcatcatgatccagacgctgctgatcatcctcttcatcatcgtgcctatcttcctgctgctggacaaggatgacagcaaggctggcatggaggaagatcacacctacgagggcctggacattgaccagacagccacctatgaggacatagtgacgctgcggacaggggaagtgaagtggttctgtaggtgangcacccaggccaggagtgagagccaggtcgccccatgacctgggtgcagg

SEQ ID NO: 363 - DNA, 571 bp, Homo sapiens
  misc_feature (1)...(571): n = A,T,C or G
ccttgcctcagatccaaggtcactcggaagaggccatgtctaccctcaatgacactcatggaggaaatgctgagagaagcattcagatgcatgacacaaggtaagactgccaaaaatcttgttcttgctctcctcattttgttatttgttttatttttaggagttttgagagcaaaatgacaacacccagaaattcagtaaatgggactttcccggcagagccaatgaaaggccctattgctatgcaatctggtccaaaaccactcttcaggaggatgtcttcactggtgggccccgcgcaaagcttcttcatgagggaatctaagactttgggggctgtccagattatgaatgggctcttccacattgccctggggggtcttctgatgattccagcagggatctatgcacccatctgtgtgactgtgtggtaccctctctggggaggcattatgtatattatttccggatcactcctggcagcaacggagaaaaactccaggaagtgttgggtcaaaggaaaaatgataatgaattcattgancctntttgctgccatttctggaatgat

SEQ ID NO: 364 - DNA, 420 bp, Homo sapiens
ctgtagcctctgcaagtgaaaatccaggccgacttgcagtcattggactgatgtccaagtgcaatcaccatacagcagctacaggcagggctggctgatagggagtatgggagaaggacacgctcagatgaaaacatgcatgcaacgattttcaccactgaacacactgttttctgtgatagaaactgtcggccctgctgggggacaagatattcacggcctcactagccagtgagatgccaccagggcggcctgcccctgatgctcctttgttacctgctaaagaaggaccataaggtaaaaggcaccttaccttatggagtgagcccagaccccagggaaaagcttgggtagaacaatccaaggggcagcctgggtgtgagaatccagcccaagctagctgctctagaagcctggagg

SEQ ID NO: 365 - DNA, 374 bp, Homo sapiens
  misc_feature (1)...(374): n = A,T,C or G
agccacttgtttctcatttggtcgaaacagcctgcccacagggatcaccactggctcatatagcttctgcttccagacacactccatcgccttgtcgattttggaatgtctgggctcagacttcatgctcgtgggtgtaatacgatgtacagcaaagcgacccttggtgtcatagatcagacggaaattctctcccgtcttgncaatgctgatgacatccatgaatccagcagnggtaggtnatatcagttcggaccttgccatcnattttaatgaaccgctgcatgcaaatcttctttacttcatctnctgncagggcatacttaagtctgttcctcaggaaaatgatgagggggagacactctctnnacttg

SEQ ID NO: 366 - DNA, 431 bp, Homo sapiens; identical to SEQ ID NO: 219
  misc_feature (1)...(431): n = A,T,C or G

SEQ ID NO: 367 - DNA, 286 bp, Homo sapiens; identical to SEQ ID NO: 220
  misc_feature (1)...(286): n = A,T,C or G

SEQ ID NO: 368 - DNA, 536 bp, Homo sapiens; identical to SEQ ID NO: 221
  misc_feature (1)...(536): n = A,T,C or G

SEQ ID NO: 369 - DNA, 565 bp, Homo sapiens; identical to SEQ ID NO: 222
  misc_feature (1)...(565): n = A,T,C or G

SEQ ID NO: 370 - DNA, 402 bp, Homo sapiens
  misc_feature (1)...(402): n = A,T,C or G
ctgttgactcanattcggcattttaattacattgtttccaagtatgatattctgagagtgtctatagcacttagtgtctgcttcatataaactaccagttattatatatttatgatgcaagtanttttccaaatgtggngaaagtctgagtctttttatccccatgggtaaaatctgaatctggctctctgtgtctctcagtgcttgtttattgctggtcagagagtaaattcttgataaaanctgttgacttggctctcacagtttatgcagacattggagagacaatttggttatttcaaacatcacaggatttgagtaagaagacctggttatgaaacaaggctctcataattactagttatgactgttgacaagntaccttttcttgtttacaantta

SEQ ID NO: 371 - DNA, 346 bp, Homo sapiens
ctgccctacttttcaattcagatatactagtaccttacctagaaataatgttaacctagggtgaagtcactataatctgtagtctattatttgggcatttgctacatgatgagtgctgccagattgtggcaggtaaagagacaatgtaatttgcactccctatgatatttctacatttttagcgaccactagtggaagacattccccaaaattagaaaaaaaggagatagaagatttctgtctatgtaaagttctcaaaatttgttctaaattaataaaactatctttgtgttcttttctgcaacagatgattcaaaaaaaaaaaaaaaaaaaaaaaaaaagcttg

SEQ ID NO: 372 - DNA, 348 bp, Homo sapiens
cctacgacgaggaccggcttttcttcttcgacttttcccagaacactcgggtgccttgcctgcccgaatttgctgactgggctcaggaacagggagatgctcctgccattttatttgacaaagagttctgcgagtggatgatccagcaaatagggccaaaacttgatgggaaaatcccggtgtccagagggtttcctatcgctgaagtgttcacgctgaagcccctggagtttggcaagcccaacactttggtctgttttgtcagtaatctcttcccacccatgctgacagtgaactggcagcatcattccgtccctgtggaaggatttgggcctacttttgtctcag

SEQ ID NO: 373 - DNA, 598 bp, Homo sapiens; identical to SEQ ID NO: 226

SEQ ID NO: 374 - DNA, 381 bp, Homo sapiens
cctgacacaatatccctgttcactttgaagtgaattttgactctatattcagaaccttcctttaacacaatggtttcctttttgagggcttccagatctccagtaaggtccatggtgattggtcccggggcactctcacaaaccagggtgagccgggtgacaacgacattgggggctttcggatctgtcaccacaggaccatctcccagcagcgttttcttgtacttaattagactctcatcatctttgtccatttcctgcagctctttcagggacttctgtggtggaggcttataattgagcttgctgtccagctcatcatcgtcatcctcctccacatgtggctctggggctttttcagtcattctgatctatttattc

SEQ ID NO: 375 - DNA, 573 bp, Homo sapiens; identical to SEQ ID NO: 245

SEQ ID NO: 376 - DNA, 612 bp, Homo sapiens; identical to SEQ ID NO: 227
  misc_feature (1)...(612): n = A,T,C or G

SEQ ID NO: 377 - DNA, 288 bp, Homo sapiens; identical to SEQ ID NO: 228
  misc_feature (1)...(288): n = A,T,C or G

SEQ ID NO: 378 - DNA, 584 bp, Homo sapiens; identical to SEQ ID NO: 231
  misc_feature (1)...(584): n = A,T,C or G

SEQ ID NO: 379 - DNA, 457 bp, Homo sapiens; identical to SEQ ID NO: 232

SEQ ID NO: 380 - DNA, 574 bp, Homo sapiens
ctgctgtaaccaggtttccccttgtgggaagtgttgtttcttgctgggcagttgggaagggaatggagaacagagaagagagtggaaatcacatgctcacttgaactttcctggggaacgtctcctcacagcgtacacaagagcctccctttagaaatggagtgttcattttatcatgggaaaagaatctgagtgggacatgattcagaacaggaccggcccaaggaagtgcaggggctgtggagtgggatggagacaagctctgaaaggacacatgggagatctagatgtagaaggtacacaagtagtaggataactcacaggatggatccactggaggttaagacatgtggtaagacagtgtaataggaagctgctcagttggagaaagtaaggaagcaaacattgttaccgtgggggcaatggagaggacagtgaggagccctttatcctgataagggtggctttgaggtaaaggaaggaaagaggatgccttgagaggccccactgtattagagaggacctggaagccaggatgctaattctggggagatggattccccaggcttactct

SEQ ID NO: 381 - DNA, 571 bp, Homo sapiens; identical to SEQ ID NO: 234
  misc_feature (1)...(571): n = A,T,C or G

SEQ ID NO: 382 - DNA, 471 bp, Homo sapiens
ccaccaccaatttcttcgaggatattcagtgtataccttctcattagctgccaaatcaaggccagtgtgagagtgcggtttccttcattgagatcttgtccaccgatgccaaccagggagaacttcgcttgattcttccccaattctaccgcgtagttacaattctcaagcttcttcatattgcctcccagtttggggtatggcggtttgtttactctgttccagtcaacaggaactttgatcttttcatagagctggaagatgaccagggcatctgataagtcactgtacaaatgattgactcgagggttaacacccagggagttcatccagttcctaaatgtccgctcttctctcgtctcaccttcaagagccccccagtcaatgtcctggttctctggtttgtgcagggcagggtatctgttaaagaggttggcaataaaagccaagttcaacttggggttccctcgg

SEQ ID NO: 383 - DNA, 489 bp, Homo sapiens; identical to SEQ ID NO: 235
  misc_feature (1)...(489): n = A,T,C or G

SEQ ID NO: 384 - DNA, 306 bp, Homo sapiens; identical to SEQ ID NO: 236

SEQ ID NO: 385 - DNA, 560 bp, Homo sapiens; identical to SEQ ID NO: 237
  misc_feature (1)...(560): n = A,T,C or G

SEQ ID NO: 386 - DNA, 186 bp, Homo sapiens
ctgtgccaaggtgctgaatcccatgactcgcagctctgtgccgcagccctggtagacctccgaggtgttgttgcacttctgctggcagaagtagatgccattgtcctcaaaccggatgccttggatggtgagggtggcgagagattcgttctgggactcttccatgcggcccttttccagcttcag

SEQ ID NO: 387 - DNA, 439 bp, Homo sapiens; identical to SEQ ID NO: 240
  misc_feature (1)...(439): n = A,T,C or G

SEQ ID NO: 388 - DNA, 320 bp, Homo sapiens
  misc_feature (1)...(320): n = A,T,C or G
ccacacagactcaccaagccacagacttgtcttccacaagcacgttcttacctcagccacgaagggaccaagccacacgtactaaaggttgaactcaaagatatgtacagggtattaaacaaatnccaaggggaacagntaacttgaatacaaggtcaaaatcagcaacaagntctacaatccagtgctgatatcaaatacaagcttcaaggacaatttcttttcgaaggcttattccantttcgngaggctagcatgaggtgtgngcatttgccaggggcaaatttctattctcaattaacccatgcagnaaatgctac

SEQ ID NO: 389 - DNA, 331 bp, Homo sapiens
ctgccctacttttcaattcagatatactagtaccttacctagaaataatgttaacctagggtgaagtcactataatctgtagtctattatttgggcatttgctacatgatgagtgctgccagattgtggcaggtaaagagacaatgtaatttgcactccctatgatatttctacatttttagcgaccactagtggaagacattccccaaaattagaaaaaaaggagatagaagatttctgtctatgtaaagttctcaaaatttgttctaaattaataaaactatctttgtgttcttttctacaaaaaaaaaaaaaaaaaaaaaaaaaaagg

SEQ ID NO: 390 - DNA, 391 bp, Homo sapiens
  misc_feature (1)...(391): n = A,T,C or G
ctttttttttttttttttttttttttngagttttnattatttgnggngctaaaaanaagggaacatggttggaggcccagtgaganaaacagtgntttgaatcaaagagcanaatgatagaaactgacttcanagcaacttnttggcagcagtatccaatttggaagttgaaggtctgtcctggagccagatgctaacgaaacacagcaaatgcttttcctaaggcacaatagtcttttcagngagctcaggaaccctgtttatgcanatcctcgnngaactttcttgctcctcctgtgcatgaagatgcccactccacanatgatgagccccagcacnaagcccccagctcccgtcaatgtcttactccgggcanaatcagactgngcct

SEQ ID NO: 391 - DNA, 462 bp, Homo sapiens
  misc_feature (1)...(462): n = A,T,C or G
ccttgcctcanatccaaggtcactcggaagaggccatgtctaccctcaatgacactcatggaggaaatgctganagangcattcagatgcatgacacaaggtaagactgccaaaaatcttgttcttgctctcctcattttgttatttgttttatttttaggagtttngagagcaaaatgacnacacccagaaattcagtaaatgggactttcccggcagaaccaatgaaaggccctattgctatgcaatctggtncaaaaccactcttnangaggatgtcttcactggtgggccccacncaaagcttcttcntgagggaatctaanactttgggggctgnccagattatnaatgggctcttccacattgccctggggggtcttntgatgatcccancngggatctatgcacccatctgtgtgactgtgtggtnccctctctggggaggcattatgtatatta

SEQ ID NO: 392 - DNA, 554 bp, Homo sapiens
  misc_feature (1)...(554): n = A,T,C or G
aaagcgaattcatactataacagcagaaacaaaacttcagatttcagaatttgttattggcaaaatttattctcattatacctgcttcatatgggtatattactattaaaacagaataccatagagtaattgcattatttgaaaattctntcattttacaatgcacttcaccaatgaaacagntaatttccattttgaaaattaaaagaaaacagcacagagaagttaaatgcggtgtagcaaagttatggggtctgcttgagggcactaacctcaacagattattcctcctctccttagaataaccatgaaaatacaaatttacttagcacatttttgctttttaagtagctggttcattttctgaatttcccacattcagagttccagtcattattgttacatcatgtttgcagaaaccttgtcttatttagtgtctatttgcatataaccctgaaaacattattatttgaaaacttttctatatctcaaattaatatacattttcataacctacctttgnattaagacttgcaattttatcaatctattat

SEQ ID NO: 393 - DNA, 555 bp, Homo sapiens
ctgttgactcagattcggcattttaattacattgtttccaagtatgatattctgagagtgtctatagcacttagtgtctgcttcatataaactaccagttattatatatttatgatgcaagtagttttccaaatgtggtgaaagtctgagtctttttatccccatgggtaaaatctgaatctggctctctgtgtctctcagtgcttgtttattgctggtcagagagtaaattcttgataaaagctgttgacttggctcccacagtttatgcagacattggagagacaatttggttatttcaaacatcacaggatttgagtaagaagacctggttatgaaacaaggctctcataattactagttatgactgttgacaagttaccttttcttgtttacaagttatttggcctctttgaattacttgtaaaatagagatagggattctttcttgatcatggaacatcaaatgaagttatttgatgaaatactttgtcatctggaaattataaatataactaaatgttaattattatttgaaatttgggcacctcatgg

SEQ ID NO: 394 - DNA, 340 bp, Homo sapiens; identical to SEQ ID NO: 325

SEQ ID NO: 395 - DNA, 482 bp, Homo sapiens
aaaaaaacagaacatttacaagacaccagttattttgtgccccatatgtcattaaaaaagtttactttacctttattattatttccctaggctagtcaagcagcaaaccattaatcggtcggagaaaccttcatgacatatgcccgactggctcttcgccacccacttgaaggacactacccaatcgatggaagcctttaatcgcacagccctccctattagcggactattggcggatgcagacatgttctactcgagcagttaccaaggaccactttactgcgatcaggattccaacgaccacctaatttcgtatctttcaactcttttcgaccggacctcttattcggaagcgttacaggaagacaggtctcaacttagggatcagatcacgttatcaacgctctgggatcgctgcaacctggcacttcaaggaagtgcaccgataacgtctagaccggcaaacacagatctagaggtgg

SEQ ID NO: 396 - DNA, 448 bp, Homo sapiens
gaaagaatccctatctctattttacaagtaattcaaagaggccaaataacttgtaaacaagaaaaggtaacttgtcaacagtcataactagtaattatgagagccttgtttcataaccaggtcttcttactcaaatcctgtgatgtttgaaataaccaaattgtctctccaatgtctgcataaactgtgagagccaagtcaacagcttttatcaagaatttactctctgaccagcaataaacaagcactgagagacacagagagccagattcagattttacccatggggataaaaagactcagactttcaccacatttggaaaactacttgcatcataaatatataataactggtagtttatatgaagcagacactaagtgctatagacactctcagaatatcatacttggaaacaatgtaattaaaatgccgaatctgagtcaacag

SEQ ID NO: 397 - DNA, 573 bp, Homo sapiens; identical to SEQ ID NO: 245

SEQ ID NO: 398 - DNA, 340 bp, Homo sapiens; identical to SEQ ID NO: 325

SEQ ID NO: 399 - DNA, 593 bp, Homo sapiens; identical to SEQ ID NO: 247

SEQ ID NO: 400 - DNA, 504 bp, Homo sapiens
aaatcctgagtcaagccaaaaaaaaaaaaaaaaaccaaaacaaaacaaaaaaaacaaataaagccatgccaatctcatcttgttttctgcgcaagttaggttttgtcaagaaagggtgtaacgcaactaagtcatagtccgcctagaagcatttgcggtggacgatggaggggccggactcgtcatactcctgcttgctgatcacatctgctggaaggtggacagcgaggccaggatggagccgccgatccacacggagtacttgcgctcaggaggagcaatgatcttgatcttcattgtgctgggtgccagggcagtgatctccttctgcatcctgtcggcaatgccagggtacatggtggtgccgccagacagcactgtgttggcgtacaggtctttgcggatgtccacgtcacacttcatgatggagttgaaggtagtttcgtggatgccacaggactccatgcccaggaaggaaggctggaagagtgcctcagggcagcg

SEQ ID NO: 401 - DNA, 608 bp, Homo sapiens; identical to SEQ ID NO: 249

SEQ ID NO: 402 - DNA, 588 bp, Homo sapiens
ctgggccaggagctgtgcccagtgcctgcagccttcataagcacacacgtccattccctactaaggcccagacctcctggtatctgccccgggctccctcatcccacctccatccggagttgcccaagatgcatgtccagcataggcaggattgctcggtggtgagaaggttaggtccggctcagactgaataagaagagataaaatttgccttaaaacttacctggcagtggctttgctgcacggtctgaaaccacctgttcccaccctcttgaccgaaatttccttgtgacacagagaagggcaaaggtctgagcccagagttgacggagggagtatttcagggttcacttcaggggctcccaaagcgacaagatcgttagggagagaggcccagggtggggactgggaatttaaggagagctgggaacggatcccttaggttcaggaagcttctgtgcaagctgcgaggatggcttgggccgaagggttgctctgcccgccgcgctagctgtgagctgagcaaagccctgggctcacagcaccccaaaagcctgtggcttcagtcctgcgtctgcaccacacatt

SEQ ID NO: 403 - DNA, 425 bp, Homo sapiens; identical to SEQ ID NO: 252

SEQ ID NO: 404 - DNA, 603 bp, Homo sapiens
  misc_feature (1)...(603): n = A,T,C or G
ctggtggttaacaagtggatcgtcatgttcagtagtttatacattatgtgagaagtaacgttctgattctttttcttacacagaattggcagagggggtcgatttgggaggaaaggtgtggctataaactttgttactgaagaagacaagaggattcttcgtgacattgagactttctacaatactacagtggaggagatgcccatgaatgtggctgaccttatttaattcctgggatgagagttttggatgcagtgctcgctgttgctgaataggcgatcacaacgtgcattgtgcttctttctttgggaatatttgaatcttgtctcaatgctcataacggatcagaaatacagattttgatagcaaagcgacgttagtcgtgagctcttgtgaggaaagtcattggctttatcctctttagagttagactgttggggtgggtataaaagatggggtctgtaaaatctttctttcttagaaatttatttcctagttctgtagaaatggntgnattagatgttctctatcatttaataatatacttgnggactaaaagatataagtgctgnataaaatcagccaattatgttaaactagcat

SEQ ID NO: 405 - DNA, 603 bp, Homo sapiens; identical to SEQ ID NO: 253

SEQ ID NO: 406 - DNA, 578 bp, Homo sapiens
ctgctgtggaagggctccttcaagcccagcgagcatgtgaaacccagggccccaggaaacctgacagttcacaccaatgtctccgacactctgctgctgacctggagcaacccgtatccccctgacaattacctgtataatcatctcacctatgcagtcaacatttggagtgaaaacgacccggcagatttcagaatctataacgtgacctacctagaaccctccctccgcatcgcagccagcaccctgaagtctgggatttcctacagggcacgggtgagggcctgggctcagtgctataacaccacctggagtgagtggagccccagcaccaagtggcacaactcctacagggagcccttcgagcagcacctcctgctgggcgtcagcgcttcctgcattgtcatcctggccgtctgcctgttgtgctatgtcagcatcaccaagattaagaaagaatggtgggatcagattcccaacccagcccgcagccgcctcgtggctataataatccaggatgctcaggggtcacagtgggagaagcggtcccgaggccaggaaccagccaagtgcccaca

SEQ ID NO: 407 - DNA, 568 bp, Homo sapiens; identical to SEQ ID NO: 255

SEQ ID NO: 408 - DNA, 125 bp, Homo sapiens
  misc_feature (1)...(125): n = A,T,C or G
ctggggggtccaggaaaggggttgggccatgagccaggcagctccgaagcagtcactgaggccagggagcctgcacccagnncatgggncgaccnggctctcactcctggcctgggtgctcacct

SEQ ID NO: 409 - DNA, 291 bp, Homo sapiens
ccagtgcttagacaaatttggggttggggggaacactttggtttgaaagcacagagcagtttgccatgtttcttctgtgcctaccattctcccttggcctcaacttctgtaagatgggggggggacaaaaagagaagtaaagttaagaagaaagtggaaaattaaaaaaaagatgtcaaagtttttacatgcatatatttcagcttatgctgaagacctacctgtatgttgcacattgaatcatactttcagaacccctcagaaaccatccctctctccctaaagaatttt

SEQ ID NO: 410 - DNA, 231 bp, Homo sapiens; identical to SEQ ID NO: 259

SEQ ID NO: 411 - DNA, 406 bp, Homo sapiens
cctaagaactgagacttgtgacacaaggccaacgacctaagattagcccagggttgtagctggaagacctacaacccaaggatggaaggcccctgtcacaaagcctacctagatggatagaggacccaagcgaaaaaggtatctcaagactaacggccggaatctggaggcccatgacccagaacccaggaaggatagaagcttgaagacctggggaaatcccaagatgagaaccctaaaccctacctcttttctattgtttacacttcttactcttagatatttccagttctcctgtttatctttaagcctgattcttttgagatgtactttttgatgttgccggttacctttagattgacagtattatgcctgggccagtcttgagccagctttacctcggccg

SEQ ID NO: 412 - DNA, 278 bp, Homo sapiens; identical to SEQ ID NO: 260

SEQ ID NO: 413 - DNA, 284 bp, Homo sapiens
ccgggcaggtctggaagccttgttggcccctaagcctttgtttcatgctacagtactgaggggtatgtgtccccaatgcacagccacccgcacacaactcaatgagcttcctgggaaacactattcccccacctccaccttaggtggctgcctcagttttccaaccactggaatcagtccctcagctcctgcctctagtctccaccccaaaagttcagtcgtctctgtcttggagggcactgtcggccccctcaggttgaagttcaacactcctcaatgagcag

SEQ ID NO: 414 - DNA, 288 bp, Homo sapiens
aaaaatacagcttttattctgagacattgaccttcactagagtgggacctgtggccccagcctggctggagaagcagtccagggcctgagtgacaccatttccctttcctgaaataggaacaagttattccaaaggagaaaggagagcccagagagatctgtacaggacctctcttgcacatggtgactggaggcagagggtggggagctggagaggagtccagtccctccaacaaatattgagggcttcaaagagctcttcctggacgtttctcttaatctggattt

SEQ ID NO: 415 - DNA, 348 bp, Homo sapiens
  misc_feature (1)...(348): n = A,T,C or G
ccaaaagaagtaagacagcttgctgaagatttcctgaaagactatattcatataaacattggtgcacttgaactgagtgcaaaccacaacattcttcagattgtggatgtgtgtcatgacntanaaaaggatgaaaaacttattngtctaatggaagagatcatgagtgagaaggagaataaaaccattgtttttgtggaaaccaaaagaagatgtgatgagcttaccagaaaaatgaggagagatgggtggcctgccatgggtatccatggngacaagagtcaacaagagcgtgactgggctctaaatgaatccaaacatggaaaagctcctattctgattnctaca

SEQ ID NO: 416 - DNA, 284 bp, Homo sapiens
  misc_feature (1)...(284): n = A,T,C or G
ggcggcaagatggcagtgcaaatatccaagaagaggaagtttgtcgctgatggcatcttcaaagctgaactgaatgagtttcttactcgggagctggctgaagatggctactctggagttgagggtgcgagttacaccaaccaggacagaaatcattatcttanccaccagaacacanaatgttcttggtgagaagggccggcggattcgggaactgactgctgtagttcagaagaggtttggctttccagagggcagtgtagagctttatgctnaaaaggtgg

SEQ ID NO: 417 - DNA, 212 bp, Homo sapiens
ccaatgtggttggtcttcagcttgcagttagccaggttccataccttgaccagcttgtcccagccacaggagacgatgatagggttgctgctgttgggcgagaagcggacacaagacacccactctgagtggctctcatcctggacagtgtatttgcacacacccagggtattccatagcttgatggttttatctcgagatccaaaaacaat

SEQ ID NO: 418 - DNA, 285 bp, Homo sapiens
cctttccttgagctgcacgtgaacctgtgtgggcaggcagcgtttgcaggcgtgtttacgggcaggcagcgtttgcaggcgtgtttaccggcaggcagcgtttgcaggcgtgtttacatgcaggcgtagcaccatgtgagaccactggtccagggtttcagaggtcctgctcaggtgaatcggctgtgttctcacaagttcacggagctgagtgggtgtgcaacatgaaatactagtgctgtgagggacagaaaggacagaaagaggctgaagaccatcatccag

SEQ ID NO: 419 - DNA, 271 bp, Homo sapiens
ggtggcaacaaacctgaccacatgattaagcctgttgaagtcactgagtcagcataaataaagactgcacaggagaattacccctatacctgagcctcaaccttctgggggaaagggaactagataacatacttcttacttgtctgtacagtaccttgttgcagatgggtgatatataatggtaatagaatagcacagccagacttgcttcctgcatggtagggagagacacaaaagatgggaaactgcttttccacaaggaatctccgta

SEQ ID NO: 420 - DNA, 287 bp, Homo sapiens; identical to SEQ ID NO: 263

SEQ ID NO: 421 - DNA, 286 bp, Homo sapiens
ccagagcggtgagtcccaccacctcgaactctgggaattcgagccacagctctgccagtaccccaagactcagcactagtctgatgacctgctaattcactgacagcatagggctgtctgttgtttttgcgcaagttggtgtgaacaaagttcacaatatctggtcgaataggagccttgaatacagcaggcaaagtgacatttttgccagatgactcccccttttcggagtacaccgatatcagtgggcgagcacacgccatggcggagagaggagacagccacg

SEQ ID NO: 422 - DNA, 306 bp, Homo sapiens; identical to SEQ ID NO: 264

SEQ ID NO: 423 - DNA, 242 bp, Homo sapiens; identical to SEQ ID NO: 265

SEQ ID NO: 424 - DNA, 132 bp, Homo sapiens; identical to SEQ ID NO: 266

SEQ ID NO: 425 - DNA, 414 bp, Homo sapiens; identical to SEQ ID NO: 268

SEQ ID NO: 426 - DNA, 101 bp, Homo sapiens
  misc_feature (1)...(101): n = A,T,C or G
ctgtgattctccactgaaattttttttttaagggagctcaaggtcacaagaagaaatgaaaggaacaatcagcagccctgttcanaaggnggtttgaagac

SEQ ID NO: 427 - DNA, 353 bp, Homo sapiens
gtttcagccgaaggactcttctattcggaagtacaccctcactattaggaagattcttaggggtaatttttctgaggaaggaggactagccaacttaagaattacaggaagaaagtggtttggaagacagccaaagaaataaaagcagattaaactgtatcaggtacattccagcctgttggcaactccataaaaacatttcagattttaatccgaatttagctaatgagactggatttttgttttttatgttgtgtgtcacagagctaaaaactcagttcccaaatccccagtttatgcagccgccatcaggtattttaagctaaacttcttcacccctgagagcatgtcag

SEQ ID NO: 428 - DNA, 104 bp, Homo sapiens
  misc_feature (1)...(104): n = A,T,C or G
tatttaaaaactcaacaggacctacactacntgttcaaatctgtaatctttcacaccncactaacaaagttnttaggaaaacaggactacccaaanatgttacc

SEQ ID NO: 429 - DNA, 471 bp, Homo sapiens
  misc_feature (1)...(471): n = A,T,C or G
ccaaaaaanntcaagattnnntttttttatttgtactgaaaaactaatcataactgttaattctcagccatctttgaagcttgaaagaagagtctttggtattttgtaaacgttagcagactttcctgccagtgtcagaaaatcctatttatgaatcctgtcggtattccttggtatctgaaaaaaataccaaatagtaccatacatgagttatttctaagtttgaaaagtaaaaagaaattgcatcacactaattacaaaatacaagttctggaaaaaatatttttcttcattttaaaacttttttaactaataatggctttgaaagaagaggcttaatttgggggtggtaactaaaatcaaaagaaatgattgacttgagggtctctgtttggtaaaaatacatcattagcttaaataagcagcagaaggttagttttaattatgtancttctgtnaatattaagtgtt

SEQ ID NO: 430 - DNA, 395 bp, Homo sapiens
  misc_feature (1)...(395): n = A,T,C or G
aggcgacnnggtaggggnnggcgctcaggcggcgaccatggcgtatcacggcctcactgtgcctctcattgtgatgagcgtgttctggggcttcgtcggcttcttggtgccttggttcatccctaagggtcctaaccggggagttatcattaccatgttggtgacctgttcagtttgctgctatctcttttggctgattgcaattctggcccaactcaaccctctctttggaccgcaattgaaaaatgaaaccatctggtatctgaagtatcattggccttgaggaagaagacatgctctacagtgctcagtctttgaggtcacgagaagagaatgccttctagatgcaaaatcacctccaaaccagaccacttttcttgacttgcctgttttgg

SEQ ID NO: 431 - DNA, 303 bp, Homo sapiens
  misc_feature (1)...(303): n = A,T,C or G
caggcatgaaaaaatgacaagaattttaaaacaagggcatcatttgatctttaaatatgactattttctttaaaaacgatggattttgaccaacctagatgtacaccatagtttatagatcaaataaaagctattaaaaatatcttaacttnttacaaatgttagcagtctttgtgtgcagtattagagatcagagttgtgattgtttctgagcatgtcttgtgggttataactatgttttcaattaaaattataagattgagatactttctggaagatgtatagaaaatgttgntatattca

SEQ ID NO: 432 - DNA, 477 bp, Homo sapiens
  misc_feature (1)...(477): n = A,T,C or G
tttttttnnttttttttnntaaaanaaggattttaggtttntttggngaaacaaaagcagatataaaaagttacaaagattttanattttcattcacaaaaaaagtcattcacattttacactatacacgttatgatataaatacaggaaagtattatgtgcattgtaaagagaaaggaaaaatagaaacctactagatcaacacagngttgttctgtgctctaaaatacctaaaggnggattacatttaatgcaacaaccaagggaacctgcttaaacatactgngtattattgtagctagagtcattccttctaagccaaaggaggttttataaaaaanaatcaatattgggccaatccctttgngccctttttctctttttctatgngcattttattttttgnctactcttcttcaagttgctctaaactgaaattagggaaggagtctcactttccnttanaggtttttcttt

SEQ ID NO: 433 - DNA, 566 bp, Homo sapiens
ccaggttttagatattaacctggctgcagagccaaaagtgaaccgaggaaaagcaggtgtgaaacgatctgcagcggagatgtacgggtcagtaacagaacacccttctccgtcccctctactcagctcctcttttgacttggactatgactttcaacgggactattatgataggatgtacagttacccagcacgtgtacctcctcctcctcctattgctcgggctgtagtgccctcgaaacgtcagcgtgtatcaggaaacacttcacgaaggggcaaaagtggcttcaattctaagagtggacagcggggatcttccaagtctggaaagttgaaaggagatgaccttcaggccattaagaaggagctgacccagataaaacaaaaagtggattctctcctggaaaacctggaaaaaattgaaaaggaacagagcaaacaagcagtagagatgaagaatgataagtcagaagaggagcagagcagcagctccgtgaagaaagatgagactaatgtgaagatggagtctgaggggggtgcagatgactctgctgaggagggggacc

SEQ ID NO: 434 - DNA, 384 bp, Homo sapiens
  misc_feature (1)...(384): n = A,T,C or G
ccacaggggaaggcaagaggcgatagctgggggtcacttgtcactagatggaagctccttggtccacacagtcccaaagaaaggtctgcctttgggcccacgaaacccatcccagccctcacaggctgaacctcaccctgggttttcccagagaggtgcccaagaagacccaagctgccccaagtcagaggagcagcaggaaacagcctcagaagtccgtcactcttcagtactcctcccttagaatgtccacttcctgtttggtgaccatggcaaccaaaagacaatggcagtgcagtgcgtgtgggatgggggagctccatcttccttgggtacatggggaggagactccagtgaccangagaagcggggagagccatggga

SEQ ID NO: 435 - DNA, 468 bp, Homo sapiens
  misc_feature (1)...(468): n = A,T,C or G
ctgtggctgtctgtcagagaagcacatttttctgcagataattagaatggcttcccccatctctcacggactgtcccaagtctagaaaagaattgagttcctcttctattagtcaaataaaagggaagagaatgtttgtcttcctttcctttctgtagtgttaagaaaataaacgaacttaatgattctaaattatcagtgagcttaacactgtactatagaccaaagattaccttttcaaaaagtcctttgaggtgaaatattttgtatacgtaatacatagatgcacatataaacacacacatatagaatctcaatattttaacacttctttgggtagttgtactaactcactaaccctgaggaaaaagttaagaaattgaaagtgttttcttcanaagttgagatttaacaataaaaggtgttactttgataactaaaaggaactttattatcctcttcctaaaa

SEQ ID NO: 436 - DNA, 124 bp, Homo sapiens
  misc_feature (1)...(124): n = A,T,C or G
gtagggttgccagatgcnntacaanatttctggttaaatttgaatttcagtaaacaatgaatagtttttcattgtaccatgaaatatccaaaacatacttatatgtnaagtattatttatttgn

SEQ ID NO: 437 - DNA, 126 bp, Homo sapiens; identical to SEQ ID NO: 348
  misc_feature (1)...(126): n = A,T,C or G

SEQ ID NO: 438 - DNA, 612 bp, Homo sapiens; identical to SEQ ID NO: 227
  misc_feature (1)...(612): n = A,T,C or G

SEQ ID NO: 439 - DNA, 330 bp, Homo sapiens; identical to SEQ ID NO: 2

SEQ ID NO: 440 - DNA, 472 bp, Homo sapiens; identical to SEQ ID NO: 283
  misc_feature (1)...(472): n = A,T,C or G

SEQ ID NO: 441 - DNA, 349 bp, Homo sapiens; identical to SEQ ID NO: 284
  misc_feature (1)...(349): n = A,T,C or G

SEQ ID NO: 442 - DNA, 179 bp, Homo sapiens; identical to SEQ ID NO: 285
  misc_feature (1)...(179): n = A,T,C or G

SEQ ID NO: 443 - DNA, 170 bp, Homo sapiens; identical to SEQ ID NO: 15

SEQ ID NO: 444 - DNA, 342 bp, Homo sapiens
  misc_feature (1)...(342): n = A,T,C or G
ngtctcacaggtagtctcctgagtagttgacggctagcggggagctagttccgccgcatagttatagtgttgatgtgtgaacgctgacctgtcctgtgtgctaagagctatgcagcttagctgaggcgcctagattactagatgtgctgtatcacggggaatgaggtgggggtgcttattttttaatgaactaatcagagcctcttgagaaattgttactcattgaactggagcatcaagacatctcatggaagtggatacggagtgatttggtgtccatgcttttcaccctnaggacatttaatcngagaacctcctgtngaattttgtgggagacacttg

SEQ ID NO: 445 - DNA, 387 bp, Homo sapiens; identical to SEQ ID NO: 20

SEQ ID NO: 446 - DNA, 279 bp, Homo sapiens; identical to SEQ ID NO: 289
  misc_feature (1)...(279): n = A,T,C or G

SEQ ID NO: 447 - DNA, 235 bp, Homo sapiens; identical to SEQ ID NO: 290
  misc_feature (1)...(235): n = A,T,C or G

SEQ ID NO: 448 - DNA, 292 bp, Homo sapiens; identical to SEQ ID NO: 29

SEQ ID NO: 449 - DNA, 318 bp, Homo sapiens; identical to SEQ ID NO: 291
  misc_feature (1)...(318): n = A,T,C or G

SEQ ID NO: 450 - DNA, 317 bp, Homo sapiens; identical to SEQ ID NO: 294

SEQ ID NO: 451 - DNA, 156 bp, Homo sapiens; identical to SEQ ID NO: 40
  misc_feature (1)...(156): n = A,T,C or G

SEQ ID NO: 452 - DNA, 345 bp, Homo sapiens; identical to SEQ ID NO: 298
  misc_feature (1)...(345): n = A,T,C or G

SEQ ID NO: 453 - DNA, 182 bp, Homo sapiens; identical to SEQ ID NO: 299
  misc_feature (1)...(182): n = A,T,C or G

SEQ ID NO: 454 - DNA, 440 bp, Homo sapiens; identical to SEQ ID NO: 300

SEQ ID NO: 455 - DNA, 396 bp, Homo sapiens; identical to SEQ ID NO: 301
  misc_feature (1)...(396): n = A,T,C or G

SEQ ID NO: 456 - DNA, 232 bp, Homo sapiens; identical to SEQ ID NO: 303

SEQ ID NO: 457 - DNA, 232 bp, Homo sapiens; identical to SEQ ID NO: 57

SEQ ID NO: 458 - DNA, 342 bp, Homo sapiens; identical to SEQ ID NO: 306

SEQ ID NO: 459 - DNA, 545 bp, Homo sapiens; identical to SEQ ID NO: 307

SEQ ID NO: 460 - DNA, 330 bp, Homo sapiens; identical to SEQ ID NO: 308

SEQ ID NO: 461 - DNA, 118 bp, Homo sapiens; identical to SEQ ID NO: 311
  misc_feature (1)...(118): n = A,T,C or G

SEQ ID NO: 462 - DNA, 310 bp, Homo sapiens
  misc_feature (1)...(310): n = A,T,C or G
atgttgggagccatcaatcaggaaagccgggttagtaaagcagttgaagtgatgattcagcacgtanaaaacttgaagaggatgtatgccaaanagcacgcttgaattagaagaactgaaacaggttcttctgcataatgaaaggtctttcaatcctcttgaagatgatgatgactgccaaattaaaaaacgtccagcttctctaaactccaagccatcttctctacgaagagtgactattgcctctttacccanaaatattggaaatgcaggaatggtggctgggatggaaaataatgatccgattcnn

SEQ ID NO: 463 - DNA, 133 bp, Homo sapiens; identical to SEQ ID NO: 312
  misc_feature (1)...(133): n = A,T,C or G

SEQ ID NO: 464 - DNA, 182 bp, Homo sapiens; identical to SEQ ID NO: 317
  misc_feature (1)...(182): n = A,T,C or G

SEQ ID NO: 465 - DNA, 149 bp, Homo sapiens; identical to SEQ ID NO: 80
  misc_feature (1)...(149): n = A,T,C or G

SEQ ID NO: 466 - DNA, 374 bp, Homo sapiens; identical to SEQ ID NO: 83

SEQ ID NO: 467 - DNA, 545 bp, Homo sapiens; identical to SEQ ID NO: 307

SEQ ID NO: 468 - DNA, 285 bp, Homo sapiens; identical to SEQ ID NO: 321

SEQ ID NO: 469 - DNA, 135 bp, Homo sapiens; identical to SEQ ID NO: 322

SEQ ID NO: 470 - DNA, 511 bp, Homo sapiens
ccagtagggctgagatgttgggagccatcaatcaggaaagccgggttagtaaagcagttgaagtgatgattcagcacgtagaaaacttgaagaggatgtatgccaaagagcacgctgaattagaagaactgaaacaggttcttctgcagaatgaaaggtctttcaatcctcttgaagatgatgatgactgccaaattaaaaaacgttcagcttctctaaactccaagccatcttctctacgaagagtgactattgcctctttacccagaaatattggaaatgcaggaatggtggctgggatggaaaataatgatcgattcagtagaaggtcaagcagttggcgtattttggggtcaaagcagagtgaacaccgtccctcattacctcgatttattagcacctattcctgggcagatgctgaagaagaaaaatgtgaactaaaaactaaagatgactcagagccatctggagaagaaacagtagaaaggacaaggaagccaagtctttctga

SEQ ID NO: 471 - DNA, 562 bp, Homo sapiens
  misc_feature (1)...(562): n = A,T,C or G
ctgagacaaaagtaggcccaaatccttccacagggatggaatgatgctgccagttcactgtcagcatgggtgggaagagattactgacaaaacagaccaaagtgttgggcttgccaaactccaggggcttcagcgtgaacacttcagcgataggaaaccctggtggggggattgaagtgtagggggaaaaagagactagtttagatggtatctctgtgtttggaggggccatggcatatggaggggagggcagagaagaacacagtgggtcaggctttgggagacagagatgagcgaggagctgggctctgaagggaggtcttcttccaggcaaggactgcanctagacgtagaagcagagccagatccaggctactctggacccctccaccatgacttccttcagcacttcctgtctagagctcacattgatgtctaaccatgcactgtcttctcactaagacatagtcacgtcatcagatatttccactcttcccatccatcttgctgggcatagtagcacaagtgttaatattcagtangtatcagttggtacctgttg

SEQ ID NO: 472 - DNA, 487 bp, Homo sapiens; identical to SEQ ID NO: 135
  misc_feature (1)...(487): n = A,T,C or G

SEQ ID NO: 473 - DNA, 340 bp, Homo sapiens; identical to SEQ ID NO: 325

SEQ ID NO: 474 - DNA, 542 bp, Homo sapiens; identical to SEQ ID NO: 331
  misc_feature (1)...(542): n = A,T,C or G

SEQ ID NO: 475 - DNA, 342 bp, Homo sapiens; identical to SEQ ID NO: 306

SEQ ID NO: 476 - DNA, 421 bp, Homo sapiens; identical to SEQ ID NO: 172
  misc_feature (1)...(421): n = A,T,C or G

SEQ ID NO: 477 - DNA, 562 bp, Homo sapiens; identical to SEQ ID NO: 346

SEQ ID NO: 478 - DNA, 294 bp, Homo sapiens; identical to SEQ ID NO: 349

SEQ ID NO: 479 - DNA, 237 bp, Homo sapiens; identical to SEQ ID NO: 206

SEQ ID NO: 480 - DNA, 563 bp, Homo sapiens; identical to SEQ ID NO: 352

SEQ ID NO: 481 - DNA, 340 bp, Homo sapiens; identical to SEQ ID NO: 354
  misc_feature (1)...(340): n = A,T,C or G

SEQ ID NO: 482 - DNA, 353 bp, Homo sapiens; identical to SEQ ID NO: 212

SEQ ID NO: 483 - DNA, 202 bp, Homo sapiens; identical to SEQ ID NO: 358
  misc_feature (1)...(202): n = A,T,C or G

SEQ ID NO: 484 - DNA, 306 bp, Homo sapiens
aaaaacaatctacaggcagttctttacaagtctcatatttacagatagcacaagctatggcatggcgtatggcctccctcctaaatatacgattctttggcatattggaattggtcagcctcaaagaccggctggctacatcgtcgcacgagacagtcccgcttattcctctgcacggactcggagacggtcctcagcgggaggagctcaggtctccctgggccagacacgtgccccagagagtccccagaagcatggacagttctgctctgtttccatcgctcaggcaggggagagagtccgtgg

SEQ ID NO: 485 - DNA, 396 bp, Homo sapiens; identical to SEQ ID NO: 217
  misc_feature (1)...(396): n = A,T,C or G

SEQ ID NO: 486 - DNA, 253 bp, Homo sapiens; identical to SEQ ID NO: 362
  misc_feature (1)...(253): n = A,T,C or G

SEQ ID NO: 487 - DNA, 374 bp, Homo sapiens; identical to SEQ ID NO: 365
  misc_feature (1)...(374): n = A,T,C or G

SEQ ID NO: 488 - DNA, 529 bp, Homo sapiens; identical to SEQ ID NO: 223

SEQ ID NO: 489 - DNA, 402 bp, Homo sapiens; identical to SEQ ID NO: 370
  misc_feature (1)...(402): n = A,T,C or G

SEQ ID NO: 490 - DNA, 556 bp, Homo sapiens
gtttgatgaccgtcgcggacgcccagtgggatttcccatgcggggaagaggtggttttgacagaatgcctcctggtcggggtgggcgtcccatgcctccatctagaagagattatgatgatatgagccctcgtcgaggaccacctccccctcctcccggacgaggcggccggggtggtagcagagctcggaatcttcctcttcctccaccaccaccacctagagggggagacctcatggcctatgacagaagagggagacctggagaccgttacgacggcatggttggtttcagtgctgatgaaacttgggactctgcaatagatacatggagcccatcagaatggcagatggcttatgaaccacagggtggctccggatatgattattcctatgcagggggtcgtggctcatatggtgatcttggtggacctattattactacacaagtaactattcccaaagatttggctggatctattattggcaaaggtggtcagcggattaaacaaatccgtcatgagtcgggagcttcgatcaaaattgatgagccttta

SEQ ID NO: 491 - DNA, 381 bp, Homo sapiens; identical to SEQ ID NO: 374

SEQ ID NO: 492 - DNA, 573 bp, Homo sapiens; identical to SEQ ID NO: 245

SEQ ID NO: 493 - DNA, 288 bp, Homo sapiens; identical to SEQ ID NO: 228
  misc_feature (1)...(288): n = A,T,C or G

SEQ ID NO: 494 - DNA, 574 bp, Homo sapiens; identical to SEQ ID NO: 380

SEQ ID NO: 495 - DNA, 471 bp, Homo sapiens; identical to SEQ ID NO: 382

SEQ ID NO: 496 - DNA, 489 bp, Homo sapiens; identical to SEQ ID NO: 235
  misc_feature (1)...(489): n = A,T,C or G

SEQ ID NO: 497 - DNA, 306 bp, Homo sapiens; identical to SEQ ID NO: 236

SEQ ID NO: 498 - DNA, 345 bp, Homo sapiens
  misc_feature (1)...(345): n = A,T,C or G
ccaatgtggttggtcttcagcttgcagttagccaggttccataccttgaccagcttgtcccagccacaggagacgatgatagggttgctgctgttgggcgagaagcggacacaagacacccactctgagtggctctcatcctggacagtgtatttgcacacacccagggtattccatagcttgatggttttatctcgagatccanagacaatctgccggttgtcagaggagaaggccacactcancacatccttggcatggcccacaaatcgnctngtggtggtgcccgttgtgagatcccagaggcgcagggttccatcccaggagcctgagagggcaaactgg

SEQ ID NO: 499 - DNA, 555 bp, Homo sapiens; identical to SEQ ID NO: 393

SEQ ID NO: 500 - DNA, 340 bp, Homo sapiens; identical to SEQ ID NO: 325

SEQ ID NO: 501 - DNA, 482 bp, Homo sapiens; identical to SEQ ID NO: 395

SEQ ID NO: 502 - DNA, 448 bp, Homo sapiens; identical to SEQ ID NO: 396

SEQ ID NO: 503 - DNA, 573 bp, Homo sapiens; identical to SEQ ID NO: 245

SEQ ID NO: 504 - DNA, 340 bp, Homo sapiens; identical to SEQ ID NO: 325

SEQ ID NO: 505 - DNA, 593 bp, Homo sapiens; identical to SEQ ID NO: 247

SEQ ID NO: 506 - DNA, 425 bp, Homo sapiens; identical to SEQ ID NO: 252

SEQ ID NO: 507 - DNA, 603 bp, Homo sapiens; identical to SEQ ID NO: 253

SEQ ID NO: 508 - DNA, 578 bp, Homo sapiens; identical to SEQ ID NO: 406

SEQ ID NO: 509 - DNA, 568 bp, Homo sapiens; identical to SEQ ID NO: 255

SEQ ID NO: 510 - DNA, 125 bp, Homo sapiens; identical to SEQ ID NO: 408
  misc_feature (1)...(125): n = A,T,C or G

SEQ ID NO: 511 - DNA, 231 bp, Homo sapiens; identical to SEQ ID NO: 259

SEQ ID NO: 512 - DNA, 278 bp, Homo sapiens; identical to SEQ ID NO: 260

SEQ ID NO: 513 - DNA, 288 bp, Homo sapiens; identical to SEQ ID NO: 414

SEQ ID NO: 514 - DNA, 284 bp, Homo sapiens; identical to SEQ ID NO: 416
  misc_feature (1)...(284): n = A,T,C or G

SEQ ID NO: 515 - DNA, 211 bp, Homo sapiens
  misc_feature (1)...(211): n = A,T,C or G
ctgtctcacactttacaagctgtgagagacacatcagagccctgggcactgtcactgcttgcagcctgagagtagctccctccttttctatctgagctgttcctcctccacatcacagcagcgaccacagctccagtgatcacagctccaaggagaaccaggccagcaatgatgcccacgatggggacggtgggctgggaaganggctccn

SEQ ID NO: 516 - DNA, 212 bp, Homo sapiens; identical to SEQ ID NO: 417

SEQ ID NO: 517 - DNA, 272 bp, Homo sapiens; identical to SEQ ID NO: 261

SEQ ID NO: 518 - DNA, 285 bp, Homo sapiens; identical to SEQ ID NO: 418

SEQ ID NO: 519 - DNA, 287 bp, Homo sapiens; identical to SEQ ID NO: 263

SEQ ID NO: 520 - DNA, 286 bp, Homo sapiens; identical to SEQ ID NO: 421

SEQ ID NO: 521 - DNA, 242 bp, Homo sapiens; identical to SEQ ID NO: 265

SEQ ID NO: 522 - DNA, 132 bp, Homo sapiens; identical to SEQ ID NO: 266

SEQ ID NO: 523 - DNA, 414 bp, Homo sapiens; identical to SEQ ID NO: 268

SEQ ID NO: 524 - DNA, 104 bp, Homo sapiens; identical to SEQ ID NO: 428
  misc_feature (1)...(104): n = A,T,C or G

SEQ ID NO: 525 - DNA, 423 bp, Homo sapiens; identical to SEQ ID NO: 275

SEQ ID NO: 526 - DNA, 478 bp, Homo sapiens; identical to SEQ ID NO: 277

SEQ ID NO: 527 - DNA, 384 bp, Homo sapiens
cctgacacaatatccctgttcactttgaagtgaattttgactctatattcagaaccttcctttaacacaatggtttcctttttgagggcttccagatctccagtaaggtccatggtgattggtcccggggcactctcacaaaccagggtgagccgggtgacaacgacattgggggctttcggatctgtcaccacaggaccatctcccagcagcgttttcttgtacttaattagactctcatcatctttgtccatttcctgcagctctttcagggacttctgtggtggaggcttataattgagcttgctgtccagctcatcatcgtcatcctcctccacatgtggctctggggctttttcagtcattctgatctatttattcagt

SEQ ID NO: 528 - DNA, 208 bp, Homo sapiens; identical to SEQ ID NO: 278

SEQ ID NO: 529 - DNA, 330 bp, Homo sapiens; identical to SEQ ID NO: 2

SEQ ID NO: 530 - DNA, 294 bp, Homo sapiens; identical to SEQ ID NO: 280

SEQ ID NO: 531 - DNA, 269 bp, Homo sapiens; identical to SEQ ID NO: 4

SEQ ID NO: 532 - DNA, 197 bp, Homo sapiens
cctgaacaaggacctctgccctccctattcagacccttcgttgcctcacctggtcaatacaaccacttcacctctgaccgcaggggcaggggactagatagaatgacctactgagcctcgtctgtctgtctgtctgtctgtctctctctctctgtttgtctctttgtgtgtccgacaagaacccagactgagggggc

SEQ ID NO: 533 - DNA, 364 bp, Homo sapiens; identical to SEQ ID NO: 9
  misc_feature (1)...(364): n = A,T,C or G

SEQ ID NO: 534 - DNA, 382 bp, Homo sapiens; identical to SEQ ID NO: 10
  misc_feature (1)...(382): n = A,T,C or G

SEQ ID NO: 535 - DNA, 349 bp, Homo sapiens; identical to SEQ ID NO: 284
  misc_feature (1)...(349): n = A,T,C or G

SEQ ID NO: 536 - DNA, 170 bp, Homo sapiens; identical to SEQ ID NO: 15

SEQ ID NO: 537 - DNA, 387 bp, Homo sapiens; identical to SEQ ID NO: 20

SEQ ID NO: 538 - DNA, 533 bp, Homo sapiens; identical to SEQ ID NO: 43
  misc_feature (1)...(533): n = A,T,C or G

SEQ ID NO: 539 - DNA, 332 bp, Homo sapiens; identical to SEQ ID NO: 44

SEQ ID NO: 540 - DNA, 375 bp, Homo sapiens; identical to SEQ ID NO: 50

SEQ ID NO: 541 - DNA, 443 bp, Homo sapiens
ccatttgactaaccagtcctacaaatttcacatatccgtcactcagatgagcatataccaagtcagaggaaacaaaacatgcacatatacaaaagtagaaagagaaaacactcatgccttcagaagttcacaaattaaaagccctttaataatataaaacagttgaacactggaatgtttttttctaggtcatgaaaaaagtgaattccaaatctatgtaataaatctaaaataatacagcatcactgtcttctgttctggtgtttatcaaacctgcacatgagtttttagaaggtgaattggggatgcttcagaatgtattttctccaaacagatggagcctgaaaactgtgtgattttccaaaccaagtggagaaaagcaggaagaaattggtgtttagctggtcagcagacggggatccccgggatgcaatcagccttgg

SEQ ID NO: 542 - DNA, 232 bp, Homo sapiens; identical to SEQ ID NO: 57

SEQ ID NO: 543 - DNA, 392 bp, Homo sapiens; identical to SEQ ID NO: 67
  misc_feature (1)...(392): n = A,T,C or G

SEQ ID NO: 544 - DNA, 371 bp, Homo sapiens; identical to SEQ ID NO: 74

SEQ ID NO: 545 - DNA, 187 bp, Homo sapiens
  misc_feature (1)...(187): n = A,T,C or G
gacctgctcggaggaatggcgccgccgggttcaagcactgtcttcctgttggccctgacaatcatagccagcacctgggctctgacgcccactcactacctcaccaagcatgacgnggagagactaaaagcctcgctggatccgccctttcacaaagttggaagtctngtcttctactccatcntgg

SEQ ID NO: 546 - DNA, 558 bp, Homo sapiens
  misc_feature (1)...(558): n = A,T,C or G
ccatgggatggctcttctgaccattgggggccaggccaggccaggccaggcttagggcagcaaggaccaggccaaaggggcagggcctcctttggaggggttgaggggtacatcctcggctggtgtttgcatccaggggtccagcaggatctcttccagtgagggtcgggaagaaggtttgggggccaggcaccggcggattagggcacagcaatcttggggaaaacatgggcttgggaagtggagctcagcttccagaatctcctggtccctctcaaagggaatgtccccacacaccatgtcatagaggaggatgcccagtgaccagacagtggccgggagtgcatggtactggtgtcgagagatccactctggggggctgtacacccttgtcccatcaaagtcagtgtagggttcatcatgaagcagggcaccagaaccaaaatcaatgagtttggcacagccacggcgtaggtctatcaggatgntctcatccttgatgtcacgatggacaactncacgggaaatggcagtgctggatggctgccactactttgg

SEQ ID NO: 547 - DNA, 357 bp, Homo sapiens; identical to SEQ ID NO: 84

SEQ ID NO: 548 - DNA, 260 bp, Homo sapiens
  misc_feature (1)...(260): n = A,T,C or G
ccaagtagtggcanccatccagcactgccattcccgtggagttgtccatcgtgacatcaaggatgagaacatcctgatagacctacgccgtggctgtgccaaactcattgattttggttctggtgccctgcttcatgatgaaccctacactgactttgatgggacaagggtgtacagccccccagagtggatctctcgacaccagtaccatgcactcccggccactgtctggtcactgggcatcctnctctatgacatgg

SEQ ID NO: 549 - DNA, 366 bp, Homo sapiens; identical to SEQ ID NO: 105
  misc_feature (1)...(366): n = A,T,C or G

SEQ ID NO: 550 - DNA, 368 bp, Homo sapiens; identical to SEQ ID NO: 136

SEQ ID NO: 551 - DNA, 539 bp, Homo sapiens
ccttggtcctagcacccactcgagaattggctcagcagatacagaaggtggtcatggcactaggagactacatgggcgcctcctgtcacgcctgtatcgggggcaccaacgtgcgtgctgaggtgcagaaactgcagatggaagctccccacatcatcgtgggtacccctggccgtgtgtttgatatgcttaaccggagatacctgtcccccaaatacatcaagatgtttgtactggatgaagctgacgaaatgttaagccgtggattcaaggaccagatctatgacatattccaaaagctcaacagcaacacccaggtagttttgctgtcagccacaatgccttctgatgtgcttgaggtgaccaagaagttcatgagggaccccattcggattcttgtcaagaaggaagagttgaccctggagggtatccgccagttctacatcaacgtggaacgagaggagtggaagctggacacactatgtgacttgtatgaaaccctgaccatcacccaggcagtcatcttcatcaacacccgg

SEQ ID NO: 552 - DNA, 529 bp, Homo sapiens
  misc_feature (1)...(529): n = A,T,C or G
aaatcctgagtcaagccaaaaaaaaaaaaaccaaaacaaaacaaaaaaaacaaataaagccatgccaatctcatcttgttttctgcgcaagttaggttttgtcaagaaagggtgtaacgcaactaagtcatagtccgcctagaagcatttgcggtggacgatggaggggccggactcgtcatactcctgcttgctgatccacatctgctggaaggtggacagcgaggccaggatggagccgccgatccacacggagtacttgcgctcaggaggagcaatgatcttgatcttcattgngctgggtgccagggcagngatctccttctgcatcctgtcggnaatgccagggtacatggtggtgccgccagacagcactgngttggcgtacaggtctttgcggatgtccacgtcacacttcatgatggagttgaaggtagtttcgtggatgccacaggactccatgcccaggaaggaaggctgnaanagtgcctcagggcagcggaaccgctcattgccaatggtgatgacc

SEQ ID NO: 553 - DNA, 375 bp, Homo sapiens; identical to SEQ ID NO: 161

SEQ ID NO: 554 - DNA, 193 bp, Homo sapiens; identical to SEQ ID NO: 166
  misc_feature (1)...(193): n = A,T,C or G

SEQ ID NO: 555 - DNA, 421 bp, Homo sapiens; identical to SEQ ID NO: 172
  misc_feature (1)...(421): n = A,T,C or G

SEQ ID NO: 556 - DNA, 372 bp, Homo sapiens; identical to SEQ ID NO: 175

SEQ ID NO: 557 - DNA, 119 bp, Homo sapiens; identical to SEQ ID NO: 185
  misc_feature (1)...(119): n = A,T,C or G

SEQ ID NO: 558 - DNA, 375 bp, Homo sapiens; identical to SEQ ID NO: 50

SEQ ID NO: 559 - DNA, 130 bp, Homo sapiens; identical to SEQ ID NO: 197
  misc_feature (1)...(130): n = A,T,C or G

SEQ ID NO: 560 - DNA, 464 bp, Homo sapiens; identical to SEQ ID NO: 200
  misc_feature (1)...(464): n = A,T,C or G

SEQ ID NO: 561 - DNA, 332 bp, Homo sapiens; identical to SEQ ID NO: 347

SEQ ID NO: 562 - DNA, 237 bp, Homo sapiens; identical to SEQ ID NO: 206

SEQ ID NO: 563 - DNA, 443 bp, Homo sapiens
aaactcattgattaaataatgattaatgcattctccacattttaatattgcaaaggcccattggagtttctgaagtggctccacagaattgaaataatttcaaataactgtaaaggaactgaaaatcttcacagagatgaagtggggtttccattaggtgctttgaaatttgataacaaatcatcaacttccactggtcaatatatagattttgggtgtctgaggccccaagattagatgccactaatctccaaagattccctccaattatgaaatattttaatgtctacttttagagagcactagccagtatatgaccatgtgattaatttcttttcacactagataaaattacctggttcaaaagtggtttttgtttattaaatttggtaataaatatatataatacacagacaggatagtttttatgctgaagtttttgg

SEQ ID NO: 564 - DNA, 524 bp, Homo sapiens; identical to SEQ ID NO: 209

SEQ ID NO: 565 - DNA, 556 bp, Homo sapiens; identical to SEQ ID NO: 211

SEQ ID NO: 566 - DNA, 353 bp, Homo sapiens; identical to SEQ ID NO: 212

SEQ ID NO: 567 - DNA, 286 bp, Homo sapiens; identical to SEQ ID NO: 220
  misc_feature (1)...(286): n = A,T,C or G

SEQ ID NO: 568 - DNA, 529 bp, Homo sapiens; identical to SEQ ID NO: 223

SEQ ID NO: 569 - DNA, 556 bp, Homo sapiens; identical to SEQ ID NO: 490

SEQ ID NO: 570 - DNA, 598 bp, Homo sapiens; identical to SEQ ID NO: 226

SEQ ID NO: 571 - DNA, 647 bp, Homo sapiens
  misc_feature (1)...(647): n = A,T,C or G
ctgagggaggggtcagggtgggtgcgcggtgacggggagggcaaaggtggtgtcagtatcttcattttgaggattggggttcagagcacttctggggtgtcagctcctccttgtccccccgtggggctccgtaggactggaaagaggacatgaagagctctgacagagagcagcagaaactctggaactgtttccagagggcctgcactgcatggaccagggccaccaccttctccttcacccaggccagaaccccgtgccaccaggtctgcagccgctgcagcatggcctggaaccatctcatgaccttgtcacaaaagctctccccaggctcctcggttgcgggatcctcaacatccgggacaggggatctgttgcctcggcaccgtaatccatctctttctttttcaagtagaggagtgagctctaggtgctgctcctcataataagccgccactgtctccaggtagccctctttgaagtcgtcctccagctctgccaggctcgacatcacctgtccacgtcctgattctgcattttgcattttatcataaaatctttctatggcctggtgcattcgggccttcagcttcttcatgtcatcagagaggaccttcgggaagcacatggcggccaaangttcaagg

SEQ ID NO: 572 - DNA, 360 bp, Homo sapiens
cctgacacaatatccctgttcactttgaagtgaattttgactctatattcagaaccttcctttaacacaatggtttcctttttgagggcttccagatctccagtaaggtccatggtgattggtcccggggcactctcacaaaccagggtgagccgggtgacaacgacattgggggctttcggatctgtcaccacaggaccatctcccagcagcgttttcttgtacttaattagactctcatcatctttgtccatttcctgcagctctttcagggacttctgtggtggaggcttataattgagcttgctgtccagctcatcatcgtcatcctcctccacatgtggctctggggctttttca

SEQ ID NO: 573 - DNA, 457 bp, Homo sapiens; identical to SEQ ID NO: 232

SEQ ID NO: 574 - DNA, 388 bp, Homo sapiens
  misc_feature (1)...(388): n = A,T,C or G
aaaaacaaaacaaaacgatccttttgattgtgtggtgcagacgcaggactgaagccacaggcttttggggtgctgtgagcccagggctttgctcagctcacagctagcgcggcgggcagagcaacccttcggcccaagccatcctcgcagcttgtacagaagcttcctgaacctaagggatccgttcccagctctccttaaattcccagtccccaccctgggcctctctccctaacgatcttgtcgctttgggagcctctgaagtgaaccctgaaatactccctccgtcaactctgggctcagacctttgcccttctctgngtcacaaggaaatttcggtcaaganggtgggaacaggtggtttcagaccgtgcagcaaagccactgc

SEQ ID NO: 575 - DNA, 571 bp, Homo sapiens; identical to SEQ ID NO: 234
  misc_feature (1)...(571): n = A,T,C or G

SEQ ID NO: 576 - DNA, 306 bp, Homo sapiens; identical to SEQ ID NO: 236

SEQ ID NO: 577 - DNA, 342 bp, Homo sapiens
  misc_feature (1)...(342): n = A,T,C or G
aaaaacaaaacaaaacgatccttttgaatgtgtggngcagacgcaggactgaagccacaggcttttggggtgctgtgagcccagggctttgctcagctcacagctagcgcggcgggcagagcaacccttcggcccaagccatcctcgcagcttgcacagaagcttcctgaacctaagggatccgttcccagctctccttaaattcccagtccccaccctgggcctctctccctaacgatcttgtcgctttgggagcccctgaagngaaccctgaaatactccctccgtcaactctgggctcagacctttgcccttctctgtgtcacaaggaaatttcggtca

SEQ ID NO: 578 - DNA, 560 bp, Homo sapiens; identical to SEQ ID NO: 237
  misc_feature (1)...(560): n = A,T,C or G

SEQ ID NO: 579 - DNA, 504 bp, Homo sapiens; identical to SEQ ID NO: 400

SEQ ID NO: 580 - DNA, 303 bp, Homo sapiens
ctggagatggcagccgttgtttgcggagcccaggctgactccggattcaacgttgctggggagagaaaagcagtatagactccaccttccaggatgtccatttcggggagaggagcaggtgggaccctcaagaaaatgacggagaacatcccagacagatgggactcaagcaggatgggtgctatatccaagaagccaagaagggagagtttcgtgcactgtggttaacaggagggctgcctggaggcagtggctgagccagaaagtaacacagagctcatgcttggagagagagagtcttgg

SEQ ID NO: 581 - DNA, 363 bp, Homo sapiens
  misc_feature (1)...(363): n = A,T,C or G
tctatgaggccctagagctccgggacaatgataagactcgctatatggggaagggtgtctcaaaggctgttgagcacatcaataaaactattgcgcctgccctggttagcaagaaactgaacgtcacagaacaagagaagattgacaaactgatgatcgagatggatggaacagaaaataaatctaantttggtgcgaacgccattctgggggtgtcccttgccgtctgcaaagctggtgccgttgagaagggggtccccctgtaccgccacatcgctgacttggctggcaactctgaagtcatcctgccagtcccggcgttcaatgtcatcaatggcggttctcatgctggcaacaagctgg

SEQ ID NO: 582 - DNA, 584 bp, Homo sapiens
  misc_feature (1)...(584): n = A,T,C or G
aaataatccaggcaggagaagagaggagggcacacttggaactcccctccccacaatacgtgattatttacattttagtaattggacaatcccggctcaggaggaggttgcaagaatctgcaaaagttggagggagcgccccaggagaacaaacagcaagccttatttcccctagcccatcccccaaaaaaccatccatcccatcctagtgtctggtggtgtccggtggtgtccatcttccattccttcccaaattatggaagtaaggttcttctcaccagaataagagcacttgggataacagagtagggtcccctcacccaaaaaaaaaaaaaaaaangaagccttggggtaacaacagggcattacctcccccagaataaagaatcctgggctgaggcaggtaagcagcttgacccaatatgggaccctaggctaggggaaagggtccctttactaaaataaaagctactggggtattggaaggaaagcacccttgcccaagtaagagcatatgaactaagtttgngtggnggtagtaggaggngccaatgtggggtgacacatcatcagaataagagtcc

SEQ ID NO: 583 - DNA, 547 bp, Homo sapiens
  misc_feature (1)...(547): n = A,T,C or G
ctgattgnncacctgaccacacgcccccacaggctctgaccagcagcctatgagggggtttggcaccaagctctgtccaatcaggtaggctgggcctgaactagccaatcagatcaactctgtcttgggcgtttgaactcagggagggaggcccttgggagcaggtgcttgtggacaaggctccacaagcgttgagccttggaaaggtagacaagcgttgagccactaagcagaggaccttgggttcccaatacaaaaatacctactgctgagagggctgctgaccatttggtcaggattcctgttgcctttatatccaaaataaactcccctttcttgaggttgtctgagtcttgggtctatgccttgaaaaaagctgaattattggacagtctcacctcctgccatagggtcctgaatgtttcagaccacaaggggctccacacctttgctgtgtgttctggggcaacctactaatcctctctgcaagtcggtctccttatccccccaaatggnaattgnatttgccttctccactttgggaggc

SEQ ID NO: 584 - DNA, 400 bp, Homo sapiens; identical to SEQ ID NO: 250

SEQ ID NO: 585 - DNA, 393 bp, Homo sapiens; identical to SEQ ID NO: 251

SEQ ID NO: 586 - DNA, 425 bp, Homo sapiens; identical to SEQ ID NO: 252

SEQ ID NO: 587 - DNA, 595 bp, Homo sapiens
ctgagggaggggtcagggtgggtgcgcggtgacggggagggcaaaggtggtgtcagtatcttcattttgaggattggggttcagagcacttctggggtgtcagctcctccttgtccccccgtggggctccgtaggactggaaagaggacatgaagagctctgacagagagcagcagaaactctggaactgtttccagagggcctgcactgcatggaccagggccaccaccttctccttcacccaggccagaaccccgtgccaccaggcctgcagccgctgcagcatggcctggaaccatctcatgaccttgtcacaaaagctctccccaggctcctcggttgcgggatcctcaacatccgggacaggggatctgttgcctcggcaccgtaatccatctctttctttttcaagtagaggagtgagctctgggtgctgctcctcataataagccgccactgtctccaggtagccctctttgaagtcgtcctccagctctgccaggctcgacatcaccattcgggccttcagctttttcatgtcatcagagaggaccttcgggaagcacatggcggccaaaagttcaaggagccaagg

SEQ ID NO: 588 - DNA, 278 bp, Homo sapiens; identical to SEQ ID NO: 260

SEQ ID NO: 589 - DNA, 284 bp, Homo sapiens; identical to SEQ ID NO: 416
  misc_feature (1)...(284): n = A,T,C or G

SEQ ID NO: 590 - DNA, 211 bp, Homo sapiens; identical to SEQ ID NO: 515
  misc_feature (1)...(211): n = A,T,C or G

SEQ ID NO: 591 - DNA, 286 bp, Homo sapiens; identical to SEQ ID NO: 421

SEQ ID NO: 592 - DNA, 242 bp, Homo sapiens; identical to SEQ ID NO: 265

SEQ ID NO: 593 - DNA, 132 bp, Homo sapiens; identical to SEQ ID NO: 266

SEQ ID NO: 594 - DNA, 108 bp, Homo sapiens; identical to SEQ ID NO: 267

SEQ ID NO: 595 - DNA, 206 bp, Homo sapiens; identical to SEQ ID NO: 270

SEQ ID NO: 596 - DNA, 322 bp, Homo sapiens
  misc_feature (1)...(322): n = A,T,C or G
ttctgccacctatggggnccaggcaggtgtggtgccttggctaagtccacanacttctgagaggcccacgctttcttcttctccanaaataaaccctgaaactcaagcagctttaatcagagggcaggattccacgatagcagcatcagaacagcaagtggcanccnagaattcttgattccnatgatcangcaacagtaaaccctgtggaatttaatactgaggttgcaacaccaccattttcccttctgganacttctaatgaaacanatttcctgattggcattaatgaagagncactggaaggcacngcaatctattt

SEQ ID NO: 597 - DNA, 500 bp, Homo sapiens; identical to SEQ ID NO: 271
  misc_feature (1)...(500): n = A,T,C or G

SEQ ID NO: 598 - DNA, 511 bp, Homo sapiens; identical to SEQ ID NO: 272
  misc_feature (1)...(511): n = A,T,C or G

SEQ ID NO: 599 - DNA, 101 bp, Homo sapiens; identical to SEQ ID NO: 273
  misc_feature (1)...(101): n = A,T,C or G

SEQ ID NO: 600 - DNA, 414 bp, Homo sapiens
gcttcctaacggaaatggaacaggattaccaactagtagacgaaagtgatgctttccatgacaaccttaggtctcttgacaggaatctgccctcagacagccaggacttgggtcaacatggattagaagaggattttatgttataaaagaggattttcccaccttgacaccaggcaatgtagttagcatattttatgtaccatggttatacgattaatcttgggacaaagaattttatagaaatttttaaacatctgaaaaagaagcttaagttttatcatccttttttttctcatgaattcttaaaggattatgctttaatgctgttatctatcttattgttcttgaaaatacctgcattttttggtatcatgttcaaccaacatcattatgaaattaattagattcccatgg

SEQ ID NO: 601 - DNA, 525 bp, Homo sapiens
  misc_feature (1)...(525): n = A,T,C or G
ctggtgtcaagacctgggttagaggtttgtcaaacagaggcagggcccagtcacctctttggaggggagtgatgagaaggggattttggtcacctgagagggttgagtaaacttggatcagggcacaggcttctctcaccatactcagctttttgcactcactccctagttgagcctactggcatcaagctctagatgccaaggctgggatggctgtggagcaggagctatggcccaagtagctctgagaggggaagagacctaaaacccctagcagggaaaatactgacgctaggtgtgaacatatcctctcttttcacaagagtcctgatggggctggctgagcttttgggtactcatccctactgttatagctggagaggatttgggtattgaagcagggaggggcagatcccacgaagtgactgcagatctggaataataagtaaggggtagatctgcccatagagctcactttagaccggcctatactcctacaaggaattggggtangatcttctactc

SEQ ID NO: 602 - DNA, 433 bp, Homo sapiens; identical to SEQ ID NO: 276
  misc_feature (1)...(433): n = A,T,C or G

SEQ ID NO: 603 - DNA, 510 bp, Homo sapiens
  misc_feature (1)...(510): n = A,T,C or G
gaggaagaaacagctccctaatgacaaatgcatctgtgggcgggaggggacttgggattgtgctggaactggatttctgaattgctactacatcttttttcctctcatccaggtctcttcagagctgctgtgcccagtggtgcttcaactggtatctatgaggccctagagctccgggacaatgataagactcgctatatggggaagggtgtctcaaaggctgttgagcacatnaataaaactattgcgcctgccctggttagcaagaaactgaacgtcacagaacaagagaagattgacaaactgatgatcgagatggatggaacagaaaataaatctaagtttggtgcgaacgccattctgggggtgtcccttgccgtctgcaaagctggtgccgttgagaagggggtccccctgtaccgccacatcgctgacttggctggcaactctgaagtcatcctgccagtcccggcgttcaatgtcatcaatggcggntctcatgctggcaac

SEQ ID NO: 604 - DNA, 478 bp, Homo sapiens; identical to SEQ ID NO: 277

SEQ ID NO: 605 - DNA, 384 bp, Homo sapiens; identical to SEQ ID NO: 527

SEQ ID NO: 606 - DNA, 208 bp, Homo sapiens; identical to SEQ ID NO: 278

SEQ ID NO: 607 - DNA, 550 bp, Homo sapiens
  misc_feature (1)...(550): n = A,T,C or G
gcagaagctactcaaatgcngtcggcttgtcctggctcttgccctcatcctggttctggaatcctcagttcaaggttatcctacgcagagagccaggtaccaatgggtgcgctgcaatccagacagtaattctgcaaactgccttgaagaaaaaggaccaatgttcgaactacttccaggtgaatccaacaagatcccccgtctgaggactgacctttttccaaagacgagaatccaggacttgaatcgtatcttcccactttctgaggactactctggatcaggcttcggctccggctccggctctggatcaggatctgggagtggcttcctaacggaaatggaacaggattaccaactagtagacgaaagtgatgctttccatgacaaccttaggtctcttgacaggaatctgccctcagacagccaggacttgggtcaacatggattagaagaggattttatgttataaaagaggattttcccaccttgacaccaggcaatgtagttagcatattttatgtaccatggttatatgattaatcttggg

SEQ ID NO: 608 - DNA, 564 bp, Homo sapiens
ccagaggatcagtgtccgatgaggaaatgatggagctcagagaagcttttgccaaagttgcttcaatgagttgaatgacttgttcaaggctgcttgcttgcctttgcctgggtatagagtacgagaaattacagaaaacctgatggctacaggtgatctggaccaagatggaaggatcagctttgatgagtttatcaagattttccatggcctaaaaagcacagatgttgccaagacctttagaaaagcaatcaataagaaggaagggatttgtgcaatcggtggtacttcagagcagtctagcgttggcacccaacactcctattcagaggaagaaaagtatgcctttgtcaactggataaacaaagccctggaaaatgatcctgattgtcggcatgtcatcccaatgaacccaaacacgaatgatctctttaatgctgttggagatggcattgtcctttgtaaaatgatcaacctgtcagtgccagacacaattgatgaaagaacaatcaacaaaaagaagctaacccctttcaccattcaggaaaatctgaacttggctct

SEQ ID NO: 609 - DNA, 564 bp, Homo sapiens
tgcagatggaagctccccacatcatcgtgggtacccctggccgtgtgtttgatatgcttaaccggagatacctgtcccccaaatacatcaagatgtttgtactggatgaagctgacgaaatgttaagccgtggattcaaggaccagatctatgacatattccaaaagctcaacagcaacacccaggtagttttgctgtcagccacaatgccttctgatgtgcttgaggtgaccaagaagttcatgagggaccccattcggattcttgtcaagaaggaagagttgaccctggagggtatccgccagttctacatcaacgtggaacgagaggagtggaagctggacacactatgtgacttgtatgaaaccctgaccatcacccaggcagtcatcttcatcaacacccggaggaaggtggactggctcaccgagaagatgcatgctcgagatttcactgtatccgccatgcatggagatatggaccaaaaggaacgagacgtgattatgagggagtttcgttctggctctagcagagttttgattaccactgacctgctggacctgc

SEQ ID NO: 610 - DNA, 550 bp, Homo sapiens
ccagatgccaagtgacaagaccattgggggaggagatgattccttcaacaccttcttcagtgaaacgggtgctggcaagcatgtaccccgggcagtgtttgtagacttggaacccacagtcattgatgaagttcgcactggcacttaccgccagctcttccaccctgagcaactcatcacaggcaaggaagatgctgccaataactatgcccgagggcactacaccattggcaaggagatcattgacctcgtgttggaccgaattcgcaagctggctgaccagtgcaccggtcttcagggcttcttggttttccacagctttggtgggggaactggttctgggttcacctcgctgctcatggaacgtctctcagttgattatggcaagaagtccaagctggagttctccatttacccggcgccccaggtttccacaggagaggagaccagagtctgcctggagtgcagactgggagggggcagatgactggggtggagcatgaagaaatttctggggtgattatcctatcttatttggggtgatatttac

SEQ ID NO: 611 - DNA, 349 bp, Homo sapiens; identical to SEQ ID NO: 284
  misc_feature (1)...(349): n = A,T,C or G

SEQ ID NO: 612 - DNA, 342 bp, Homo sapiens; identical to SEQ ID NO: 444
  misc_feature (1)...(342): n = A,T,C or G

SEQ ID NO: 613 - DNA, 246 bp, Homo sapiens; identical to SEQ ID NO: 34

SEQ ID NO: 614 - DNA, 178 bp, Homo sapiens; identical to SEQ ID NO: 39
  misc_feature (1)...(178): n = A,T,C or G

SEQ ID NO: 615 - DNA, 406 bp, Homo sapiens
  misc_feature (1)...(406): n = A,T,C or G
ncgaggtcctccccaaagccagtcctgtgtcaccaatcaaaggaaaggaagccgtcagcagagatgaacagaataaccaccaaggaagccacttcctcctgccccccaaaatcccctcttggagagacccgccagaaactctggaggagcctcaaaatgctccccgagagaggccagagggtccggcagcagctaaaaagccacctcgccactgtgaacttgtcgtcactcttggatgtccggagatccacggtgatctcaggccctgggaccggaaaaggcagccaagatcactcaggggatcccacctcgggggacagaggctacacggatccctgtgcggccacatctntnaaaagcccctcacagccccaggcaccaaaanacanaaaggtccccaccagga

SEQ ID NO: 616 - DNA, 445 bp, Homo sapiens
ctgccgccgtggaatccaaaatttcgggagctgtgaccctttcctcatgtaaaacgagtagtcttggacgatctgggcataggaaccaatcagaaacaatcgcttcagcaatcaagaccattgttcatcatggaggaacccgtggatacctctgagcctctatctgcattaccattcactgggcagcagtcttttgagccaagtggcaaatttggacagtatccatcgatgcagatgaaccacatccaggcactggggaagtggaggacatagaacagctcaatcagtgtttgatccaacacttccatctcattaagacaagtttgatttttctttgctttttatttcatggaatacatgagaatctcttaactgttggagtttccaaggaggcatacctcatgacttcagttaatgggaagaacaaaactaaaatgctgtatgg

SEQ ID NO: 617 - DNA, 240 bp, Homo sapiens
cctaagccgcctaaggggctgcctcggctgtccatcagttacctcgtttcctgagcagagtaattgggtgagattgttcatggaggcattgctggctctctagtcctggaacctacagttggtccaattcattatgccaaagggtccgtctaggaggttcttgttccaagtattgagattcccgagagaagtaggtccccttagatagaagcagagtttctcagaggtatttagcagcag

SEQ ID NO: 618 - DNA, 268 bp, Homo sapiens
aaaatttattttattttacaatacttttagatttatagaaaagttgggaagatggtacaaagagttcccatatataccatacccagtttcccctaataacatcttacattggtatattatggttgtcacaattaaatgggctaatattgatacattagtattaactaaagtccatactttgttcagatttcattagtttttatgtaatgtcttttgtctgttctaggatcccgttgaagataccacattacacttaggctcctgttgg

SEQ ID NO: 619 - DNA, 277 bp, Homo sapiens
  misc_feature (1)...(277): n = A,T,C or G
cgcttttttaggcctagttgaaagtcaagaaggacagcagcaagcataggctcaggattaaagaaaaaaatctgctcacagtctgttctggaggtcacatcaccaacaaagctcacgccctatgcagttctgagaaggtggaggcaccaggctcaaaagaggaaatttanaatttctcattgggagagtaaggtacccccatcccagaatgataactgcacagtggcagaacaaactccaccctaatgtgggtggaccccatccagtctgttgaagg

SEQ ID NO: 620 - DNA, 233 bp, Homo sapiens
ctgtgcgtgctcacgggctcctcctgctggaagagagagagatgtgcacgccactcctatggcatgtctagcaggtctgagcagtgttcatagaagaaaaatgttttaacagtctcagattttgggaggtagggggaaaaaaatcattgaaatctgggaaagacatttttaagctgctgacttcacctgcaaaatctaacaggttggattagtttttttttttttttttacct

SEQ ID NO: 621 - DNA, 311 bp, Homo sapiens
  misc_feature (1)...(311): n = A,T,C or G
ctgcaagacagcagagaanctgccaatatccagttagcagatgactttgctggcaagcagaggaagncggtaaaagcttgtctcccagccaggaaacttgacaccaagntaagatttggagctaggaaacaaacccaaaaggctcacagcaagcggagaaaaaaaccccaaaatctgtaacctgtatcacaaagcgttcatatccttcagatataaagagttattagatatcaataagaaaaatgcaaacactcctgaaaagtagaaaaaagctatgaacaggcaattcactgaaattaaaaaaaaaaaaa

SEQ ID NO: 622 - DNA, 243 bp, Homo sapiens
ctgtggcttagctggctttgctggtcgtaatggaggacaaaagtgccttctggtgaaactcagcttccatagtgatggaacctaagggtagcagagtttatggtgaccctgtagtgtatctccagaaatggtgattgtttgaatgcatgtaagacattccctagggactccaagaaatattgattagaggaagatgtggtgctttgaaagggacttggtgttcctacatgaaccaagtgaagg

SEQ ID NO: 623 - DNA, 388 bp, Homo sapiens; identical to SEQ ID NO: 287

SEQ ID NO: 624 - DNA, 529 bp, Homo sapiens; identical to SEQ ID NO: 297
  misc_feature (1)...(529): n = A,T,C or G

SEQ ID NO: 625 - DNA, 571 bp, Homo sapiens
ctgagctcctctggttcttctctagacctgctccctctctgaaatgcaaggccgtgcctttaatgggcttttggcattctgtctccagacctcccttctcatctgaagggctctcaggagaacagagaaaaaaccagcctgtctccaaactggcccgtctcagggactgggggcctttacccccagtgaaagatgcagactttacagcgctgcagtacagtagagttaagtgactccttcagatagttggatgggtctctcgatcattcctgataataacattttgcctatgttaagtgctttccacctatcatgttaccttctaactactcccttggttggatacaggtattagccccatttcacaattaagaaattgaggcttaaaaggattaaagagttttttagaggagaaacagctcttccttacagaaggatcccaagtaataaatgtgaatgctccctctccagaaggtggcacttaattcccctgtcctggagtttgacctcgcttagtgactggcttctgatgaataaaatggggaaaaggaaaaatagtaactccacagtg

SEQ ID NO: 626 - DNA, 449 bp, Homo sapiens; identical to SEQ ID NO: 52
  misc_feature (1)...(449): n = A,T,C or G

SEQ ID NO: 627 - DNA, 410 bp, Homo sapiens; identical to SEQ ID NO: 60

SEQ ID NO: 628 - DNA, 343 bp, Homo sapiens; identical to SEQ ID NO: 48
  misc_feature (1)...(343): n = A,T,C or G

SEQ ID NO: 629 - DNA, 117 bp, Homo sapiens; identical to SEQ ID NO: 71
  misc_feature (1)...(117): n = A,T,C or G

SEQ ID NO: 630 - DNA, 111 bp, Homo sapiens
  misc_feature (1)...(111): n = A,T,C or G
agcactggtggtgctcaccatggctggacgtctctctcggctctctctcactgacagactctggactctatgtntactcaacaccctagtgcagtggccacgaaaacagca

SEQ ID NO: 631 - DNA, 303 bp, Homo sapiens
  misc_feature (1)...(303): n = A,T,C or G
ctggacgangaangntnctgacactcactaggactgtgactagatgttccagtggcagaaagtcctcctggtttccttcgggccctggcgtaatgcagcagagcagcagcanctacnannacnaagatgttgaccaccagccccntgattcccgcagtggtaaggcctgttctgttcctggaagttcctgtaacattgagtgtcaccactttactgtgctgggcccccaggccattgtcaagcctcacatgagtagtttccagaatgntctgtagtcagagagaggttgaaggatgcccctcc

SEQ ID NO: 632 - DNA, 246 bp, Homo sapiens
  misc_feature (1)...(246): n = A,T,C or G
ncgangtctgaagcccactaaggaatccaggagatgtgctgggccctggagtgggagcaccttgccactggattagaaaacctgccagtcagggctttaactgggaaacaggtgacagtccagcagggccctgcattctggtcagactgagaatgaggacatgtgaaacaaaggccagtagatatggtctggggcagnctaaatcttccacttcaatgctgcttctccccaaggggaactttgcgg

SEQ ID NO: 633 - DNA, 544 bp, Homo sapiens
  misc_feature (1)...(544): n = A,T,C or G
aaatgcgcatgtaatttatttatgataatgtaaatacttcttaaatgtctgtaactcttcaaaagtgatgcttcaggataaatgagctgctaagcattttaagaatttaccgtaactctaatatactggaggggaagggatggatctgaaaggctaccatcagtaagaggaataaaacttgctctgtgtcctccagaagtctggacagtgatcagcaggtaatagacacagaggaactgatttcaacttttgaaaaagagttttccactaattaacactgtcccacggcggaataggttccctgaagatgttgagtgctgaaagtgatcaagcagaggctagagggcttcttgcctgggagcaggggagggttgggggagaaggacaagaggacagtggggtaggtgacctctagcatcattgtcactgctaatattctatcttgtgcattcatttgctcattcacacagcttcccaagatggcccccaatgatccttgccagtggngtattcatgcccttgggcaattccttnccagactgaa

SEQ ID NO: 634 - DNA, 220 bp, Homo sapiens
ccacctgggggcaggtagccccggcttgcttgttctctctttcctagcccaggaatcgggtccttgggtctaaagcacagggccaagttctcaaggatcaacatcccagacagctcccatggtctggggcttggagctggtatgaagggtgaaccaggttccatcctggactgtttatggttggagggcctgggcccctggcaccaagaccttcacttcc

SEQ ID NO: 635 - DNA, 224 bp, Homo sapiens
  misc_feature (1)...(224): n = A,T,C or G
cctaaaaaagcggcctcggtgggaatgcatttctcttgctccacgtctattttagttgcatatctgtagtgatgacaaatgcctccagccttgtcctctgcaaggctgcactgggctgcatacaggctcctgtctcaggtgtctggtttcctccttgaaaggttggggcagcggagtcagccctgtctatctgggcaaggncctgacacttggaancatgaaaa

SEQ ID NO: 636 - DNA, 453 bp, Homo sapiens
ctgtcatgaggtctcttctatagccatcaggtcttctcacagggatattcaccaccttgctctggataggcacatggccgttgtcagctctacagtaatatttgccggcatcactctctttcacagctgggatctccagctctgctgacagggaacgctgggttttctttcccatactggttcctgtggcctctctgtaccaggagaatgtgacatttcctgtacccccagccactgagcagagcaggatcagtttttgtccttcagtcacctgtcccccgggggcccggatctccaagcttacattagagatggggattcctagatggatataagacaacaggtgagaactctaagggaaactctgggaacagggtttgactgattccattctctaatgcaaaatgtgggaatgtggagattgtatagataatccattataagcattcctat

SEQ ID NO: 637 - DNA, 215 bp, Homo sapiens
ccgcccgggcaggtccacccaggaactcctgactgctttccttcccctgcttgctatacattgtctggaactggctaagaaatggggaacatttgtgaaaaccaagaaatgtaatggttttggatgaataaaatagaccaaagttaaggtaagtgcacaaatatcagtgtcaggctatggaagaaagataaagagatacttcttttttttttttt

SEQ ID NO: 638 - DNA, 497 bp, Homo sapiens
  misc_feature (1)...(497): n = A,T,C or G
gttcggggagagggtggtancacagggcttgggatatcggcagtgtgggaaatgcgaagcatttctcatcatcatcatctctgctacagncatgtttctgcatgtcagcgagcgacactgtccctgcctcaggttggaggttttatcanccaaagtgtttttttcatgtatcgttcgttccattcatccactctgnnccttgncagcctttgaaaggcttggttgctcccaggctgctgttctcagggaccttaaaagggacctggttagtcttggggcagagagtatctacttgggcactctcttccaagaaagaccttgtctccattttcattaggacaatgcttcttgtgtgtgttctggaagatcttctaaatggaatgcttgttgcactgntcccangcgagtggntgccatgagacctgangaccacacttgggggaccaatcatgtncttnaccactgngccttagaatcgcccctggacagagttcctg

SEQ ID NO: 639 - DNA, 591 bp, Homo sapiens
ctgataacgttcacagccccatcctcagcacgtggattcgagtcaccgtgagaattccggtatctcaccctgtcctcaccttcagggctcccagggcccacactgtggtgggggacctgctggagcttcactgtgagtccctgagaggctctcccccgatcctgtaccgattttatcatgaggatgtcaccctggggaacagctcagccccctctggaggaggagcctccttcaacctctctctgactgcagaacattctggaaactactcctgtgatgcagacaatggcctgggggcccagcacagtcatggagtgagtctcagggtcacagttccggtgtctcgccccgtcctcaccctcagggctcccggggcccaggctgtggtgggggacccgctggagcttcactgtgagtccctgagaggctccttcccgatcctgtactggttttatcacgaggatgacaccttggggaacatctcggcccactctggaggaggggcatccttcaacctctctctgactacagaacattctggaaactactcatgtgaggctgacaatggcctggggcccagcacagtaaagt

SEQ ID NO: 640 - DNA, 349 bp, Homo sapiens
ccagagtgcaggatacatcattggcaccaagggtctttttcaattcttggtcaatcctctgcagcaagcacccccggatgacgtcctcatagatgccctcagtggtcagagcctggctgcccacggcaaggacatccccctcgaactcaggcagctcctttttgcagcctggctcgagttggctcagcacaaaaggtaaaaagatgcagagaccccagcctcggatgaacctcctctgcgccaacccgctgtccgatttgaatttcttcagcacgcgccccctgactctctccagcctctgggcagcctggtcacagttgagggccgtcgtcagacactggtcagccag

SEQ ID NO: 641 - DNA, 555 bp, Homo sapiens
aaaggatgcactcttgccattttatgtactggaagatcattggtcagatgaatactgtgtctgacaaaaatgtaaactgtataaactgaggaacctcagctaatcagtattactttgtagatcaccatgcccaccacatttcaaactcaaactatctgtagatttcaaaatccattgtgtttgagtttgtttgcagttccctcagcttgctggtaattgtggtgttttgttttttgttttgttttcaatgcaaatgtgatgtaatattcttattttctttggatcaaagctggactggaaattgtatcgtgtaattatttttgtgttcttaatgttatttggtacttaagttgtaaataacgtctactactgtttattccagtttctactacctcaggtgtcctatagatttttcttctaccaaagttcactttcacaatgaaattatatttgctgtgtgactatgattcctaagatttccagggcttaagggctaacttctattagcaccttactgtgtaagcaaatgttacaaaaaaaaaaaaaaatctctgg

SEQ ID NO: 642 - DNA, 179 bp, Homo sapiens; identical to SEQ ID NO: 191
  misc_feature (1)...(179): n = A,T,C or G

SEQ ID NO: 643 - DNA, 582 bp, Homo sapiens
  misc_feature (1)...(582): n = A,T,C or G
ccattggatggctggggattcaccagagaaacggacacaccaggttctattctaaaaacattaagtggtttcccaggacagcagtcttccctgattttatcttctgcttcggaggcaaacttgacttctatgtgttctagctcaagcgaattagtcagatagactatattctccataagcacagccttttcatcaaattctaattgcaaatccagaatacgaggccccatcttctccagattttccttaatcatggcaacaaatggcatgactttcttcatgtatttcttcagttctggcatactgcttagttcactagcaatgactttgttgtcaggcagttttccgttattggcctcaaagtgtttacgtagaacagacagggtggtatgttgccaaggtggatagttctttgccacatagatggtgcaatgtgagggcttctgcaggggttgtttgtcagtcttcttccctttagctggcatcatatagttcttgagtcgtagtctaaggtcatgtgttacttccataagatactgngaggagtgtattaaaacttcattaacaggacctgccacaggc

SEQ ID NO: 644 - DNA, 420 bp, Homo sapiens
  misc_feature (1)...(420): n = A,T,C or G
ctggggcacacagaggaggggcctgggtaccccttttggggaaactgagacgaagctatttagaacagcttgaaaataagagacttttctagaatggggtggcagctaaagtagcttctttttctttctttcagaatgctcagatgcatcagttccttaatatacacgtgaaatttgaaaactgtacattcggtgagattaaattttatatacaactagcaattgtccagctttgttgctcattttcaattaaggctaaagtgttcaacatgagaaaatgtgatacatttgatacagtgtggggtgggagtggatgggcagctcttggtggtactggaccttncacaaggctgtgtccacccagaatccatgctggcaggagggaggcagaggtatcaaaccanacctctcaccaagcgg

SEQ ID NO: 645 - DNA, 505 bp, Homo sapiens
  misc_feature (1)...(505): n = A,T,C or G
aaagacagaatccctgagtgctgagcagattctcaaaacacatttanaatccctgaaattagaaagatcaatgacaaaatatctgtcagccaggccacaaacaggtgtaaaattatgaaaggagtggttggatgtgccaagtttggtaaagtggtgactgcatctgagaaagaggctgtgaggctgaactcttggtggcttccttctgtaacttccagagggagtcttcaacacaggccccgtgctcgtaggaatacggtagcacctatgtaggaagtgcgtggagttttctgtcttctttctgtgtgatttttggcctttttatcagcacttctcccctcccaggagcctggggatgccaaacatccagaatgtgatgggacaagatgggggcaggggcctcacctccctgcagaggtccggccaggtctccttgtccctggacaatctcctgagcctctctgcttggtggagcaggcacctgtgtgcagaattcccactgtgg

SEQ ID NO: 646 - DNA, 474 bp, Homo sapiens; identical to SEQ ID NO: 205
  misc_feature (1)...(474): n = A,T,C or G

SEQ ID NO: 647 - DNA, 478 bp, Homo sapiens
ccagcatcaccacagcctggggcccagaaggagccataacctgttgctgcctgatggagggcccagcatgggacacaagccagatcatcatcaccgggagtcaagacggcatggtccgggtttggaagactgaggatgtgaagatgtctgttcctggacggccagcaggagaggagcccctggctcagcctccaagcccaagaggccacaagtgggagaagaacctggccttgagtcgagagctggacgttagcattgctttgacagggaagcccagcaaaaccagccccgcagtgactgctctggccgtgtccagaaaccacaccaaactcctggttggtgatgagagggggagaatattctgctggtctgcagatgggtaggaagagagaggcagcagaggctctggcacaacagtgccaggctgagggtggcagaggtgactggggcctgagctctgcctacagaagaaaccccc

SEQ ID NO: 648 - DNA, 443 bp, Homo sapiens; identical to SEQ ID NO: 563

SEQ ID NO: 649 - DNA, 563 bp, Homo sapiens; identical to SEQ ID NO: 352

SEQ ID NO: 650 - DNA, 306 bp, Homo sapiens; identical to SEQ ID NO: 484

SEQ ID NO: 651 - DNA, 561 bp, Homo sapiens; identical to SEQ ID NO: 356

SEQ ID NO: 652 - DNA, 420 bp, Homo sapiens; identical to SEQ ID NO: 364

SEQ ID NO: 653 - DNA, 196 bp, Homo sapiens
tcagaagtgtgctcctctggcctcagttctcctcttttggaacaacataaaacaaatttaattttctacgcctctggggatatctgctcagccaatggaaaatctgggttcaaccagcccctgccatttcttaagactttctgctgcactcacaggatcctgagctgcacttacctgtgagagtcttcaaactttt

SEQ ID NO: 654 - DNA, 581 bp, Homo sapiens
  misc_feature (1)...(581): n = A,T,C or G
ctgctcgacagcatatggcaccagcccattttcaatttgctgagcatcggccaaagcctgtatgcgaaagccaaggagctggacagagtgaaggaaattcaggagcagctcttccatatcaagaagctgttgaagacctgtaggtttgctaacagtgcattaaaggagtttgtagggcaggtgccgggacacttgactgatgagctccacctgttctcccttgaggacctggtcaggatcaagaaagggctgctggcacccttactcaaggacattctgaaagcttcccttgcacatgtggctggctgtgagctgtgtcaaggaaagggctttatttgtgaattttgccagaatacgactgtcatcttcccatttcagacagcaacatgtagaagatgttcagcgtgcagggcttgctttcacaaacagtgcttccagtcctccgagtgcccccggtgtgcgaggatcacagcgaggagaaaacttctggaaagtgtggcctctgcagcaacatgatgcccctgagtactgngaaaaagactgttcaacatgccttatgataacaccgatttgngtctatt

SEQ ID NO: 655 - DNA, 482 bp, Homo sapiens; identical to SEQ ID NO: 395

SEQ ID NO: 656 - DNA, 252 bp, Homo sapiens
  misc_feature (1)...(252): n = A,T,C or G
aaaatacttttataaaattataaattgataataatccccncaaactgaagngaaatacttttaatactacttgaaattaaagtacagttgnttatacaacaatgaataaggacaagatatnaaactgaaaattcaaaaataaacagaagaaatgtaaacagttctaaaatatcagtatttataaatgttgcttagaggaaggctattcaaagcatggtccattaactatttgtgagctgtccagaatgaaag

SEQ ID NO: 657 - DNA, 379 bp, Homo sapiens
  misc_feature (1)...(379): n = A,T,C or G
aaaataagctatggtttttccagtagccaaaatgatcctgcaccanagctcatanactgagaacctgancatgcaaanccacagtctgggtgaagggatgtctgctttgtaaatgacctgctaattctttgcaacccacagtaatttggtttctgtgaacccacagaagcaggcccaccaaaaagggccttgtctgctagcctggagtatacatgantcactggcggtgggatcagtcattttttaggctgccccattttcctaacatgttaaaatgtgtgttctcagtcttttcaagagaggaagaagcaaagcggcacttacagagtgtgtgatangacacagatctgtggcgagggattggggaaggtgggtggca

SEQ ID NO: 658 - DNA, 551 bp, Homo sapiens; identical to SEQ ID NO: 258
  misc_feature (1)...(551): n = A,T,C or G

SEQ ID NO: 659 - DNA, 278 bp, Homo sapiens; identical to SEQ ID NO: 260

SEQ ID NO: 660 - DNA, 414 bp, Homo sapiens; identical to SEQ ID NO: 268

SEQ ID NO: 661 - DNA, 353 bp, Homo sapiens; identical to SEQ ID NO: 427

SEQ ID NO: 662 - DNA, 101 bp, Homo sapiens
  misc_feature (1)...(101): n = A,T,C or G
agggggntggtggctgncntnatnaggacctggacggcctggnctgagctgaccnatgccngatntactggtnctncactgaangtacacaanatcnttaa

SEQ ID NO: 663 - DNA, 442 bp, Homo sapiens
cctccaattccacagagcacaatttaaaactacagcatatgaaaatagcaaatgcaaaaaaacaaaaacaaaaacacaacacaaaatgccacatgtaaatggtggagtatgtatttatacataacatccccacatacatacatacactcaaaacaatactatataatttttctatgtgaacatacaatgtccttctggaagaacatacaaaaactggtaacagtagctaactttaggggagaatccttgattagggttggtagatgaaaagacttcagccctttctgtaaggtgggcagcacatatttacaaaaggaatgtatctctgtattgtgtgtgaatataccattaatttctaaaaggttccatgagaaaattttcgaagaattgcacaaacatcctttgctatgtagacaaagatggtgactcggcacaaagccag

SEQ ID NO: 664 - DNA, 317 bp, Homo sapiens
  misc_feature (1)...(317): n = A,T,C or G
ctggtggttaacaagtggatcgtcatgttcagtagtttatacattatgtgagaagtaacgttctgattctttttcttacacagaattggcagagggggtcgatttgggaggaaaggtgtggctataaactttgttactgaagaagacaagaggattcttcgtgacattgagactttctacaatactacagtggaggagatgcccatgaatgtgactgaccttatttaattcctgggatgagagttttcgatgcagtgctcgctgttgntgaataggcnatcacnacgtgcattgtgcttctttctttggnaatattt

SEQ ID NO: 665 - DNA, 1324 bp, Homo sapiens
cttgagaggctctggctcttgcttcttaggcggcccgaggacgccatggccgagtgcccgacactcggggaggcagtcaccgaccacccggaccgcctgtgggcctgggagaagttcgtgtatttggacgagaagcagcacgcctggctgcccttaaccatcgagataaaggataggttacagttacgggtgctcttgcgtcgggaagacgtcgtcctggggaggcctatgacccccacccagataggcccaagcctgctgcctatcatgtggcagctctaccctgatggacgataccgatcctcagactccagtttctggcgcttagtgtaccacatcaagattgacggcgtggaggacatgcttctcgagctgctgccagatgactgatgtatggtcttggcagcacctgtctcctttcaccccagggcctgagcctggccagcctacaatggggatgttgtgtttctgttcaccttcgtttactatgcctgtgtcttctccaccacgctggggtctgggaggaatggacagacagaggatgagctctacccagggcctgcaggacctgcctgtagcccactctgctcgccttagcactaccactcctgccaaggaggattccatttggcagagcttcttccaggtgcccagctatacctgtgcctcggcttttctcagctggatgatggtcttcagcctctttctgtcccttctgtccctcacagcactagtatttcatgttgcacacccactcagctccgtgaacttgtgagaacacagccgattcacctgagcaggacctctgaaaccctggaccagtggtctcacatggtgctacgcctgcatgtaaacacgcctgcaaacgctgcctgccggtaaacacgcctgcaaacgctgcctgcccgtaaacacgcctgcaaacgctgcctgcccacacaggttcacgtgcagctcaaggaaaggcctgaaaggagcccttatctgtgctcaggactcagaagcctctgggtcagtggtccacatcccgggacgcagcaggaggccaggccggcgagccctgtggatgagccctcagaacccttggcttgcccacgtggaaaagggatagaggttgggtttcccccctttatagatggtcacgcacctgggtgttacaaagttgtatgtggcatgaatactttttgtaatgattgattaaatgcaagatagtttatctaacttcgtgcgcaatcagcttctatccttgacttagattctggtggagagaagtgagaataggcagcccccaaataaaaaatattcatggaaaaaaaaaaaaaaa

SEQ ID NO: 666 - protein, 114 aa, Homo sapiens
MAECPTLGEAVTDHPDRLWAWEKFVYLDEKQHAWLPLTIEIKDRLQLRVLLRREDVVLGRPMTPTQIGPSLLPIMWQLYPDGRYRSSDSSFWRLVYHIKIDGVEDMLLELLPDD

SEQ ID NO: 667 - DNA, 1659 bp, Homo sapiens
tcagcgggcgagtccccggctcctccagctccttcctcctcttcctcctcctcctccacctccggcttttgggggatcactgtcctctctcggcagcagaatgagccggcaggtggtccgctccagcaagttccgccacgtgtttggacagccggccaaggccgaccagtgctatgaagatgtgcgcgtctcacagaccacctgggacagtggcttctgtgctgtcaaccctaagtttgtggccctgatctgtgaggccagcgggggaggggccttcctggtgctgcccctgggcaagactggacgtgtggacaagaatgcgcccacggtctgtggccacacagcccctgtgctagacatcgcctggtgcccgcacaatgacaacgtcattgccagtggctccgaggactgcacagtcatggtgtgggagatcccggatgggggcctgatgctgcccctgcgggagcccgtcgtcaccctggagggccacaccaagcgtgtgggcattgtggcctggcacaccacagcccagaacgtgctgctcagtgcaggttgtgacaacgtgatcatggtgtgggacgtgggcactggggcggccatgctgacactgggcccagaggtgcacccagacacgatctacagtgtggactggagccgagatggaggcctcatttgtacctcctgccgtgacaagcgcgtgcgcatcatcgagccccgcaaaggcactgtcgtagctgagaaggaccgtccccacgaggggacccggcccgtgcgtgcagtgttcgtgtcggaggggaagatcctgaccacgggcttcagccgcatgagtgagcggcaggtggcgctgtgggacacaaagcacctggaggagccgctgtccctgcaggagctggacaccagcagcggtgtcctgctgcccttctttgaccctgacaccaacatcgtctacctctgtggcaagggtgacagctcaatccggtactttgagatcacttccgaggcccctttcctgcactatctctccatgttcagttccaaggagtcccagcggggcatgggctacatgcccaaacgtggcctggaggtgaacaagtgtgagatcgccaggttctacaagctgcacgagcggaggtgtgagcccattgccatgacagtgcctcgaaagtcggacctgttccaggaggacctgtacccacccaccgcagggcccgaccctgccctcacggctgaggagtggctggggggtcgggatgctgggcccctcctcatctccctcaaggatggctacgtacccccaaagagccgggagctgagggtcaaccggggcctggacaccgggcgcaggagggcagcaccagaggccagtggcactcccagctcggatgccgtgtctcggctggaggaggagatgcggaagctccaggccacggtgcaggagctccagaagcgcttggacaggctggaggagacagtccaggccaagtagagccccgcagggcctccagcagggtcagccattcacacccatccactcacctcccattcccagccacatggcagagaaaaaaatcataataaaatggctttattttctggtaaaaaaaaaaaaaaaaaaaaaaaaaaaaaaaaaaaaaaaaaaaaaaaaaaagggggggggga

SEQ ID NO: 668 - protein, 461 aa, Homo sapiens
MSRQVVRSSKFRHVFGQPAKADQCYEDVRVSQTTWDSGFCAVNPKFVALICEASGGGAFLVLPLGKTGRVDKNAPTVCGHTAPVLDIAWCPHNDNVIASGSEDCTVMVWEIPDGGLMLPLREPVVTLEGHTKRVGIVAWHTTAQNVLLSAGCDNVIMVWDVGTGAAMLTLGPEVHPDTIYSVDWSRDGGLICTSCRDKRVRIIEPRKGTVVAEKDRPHEGTRPVRAVFVSEGKILTTGFSRMSERQVALWDTKHLEEPLSLQELDTSSGVLLPFFDPDTNIVYLCGKGDSSIRYFEITSEAPFLHYLSMFSSKESQRGMGYMPKRGLEVNKCEIARFYKLHERRCEPIAMTVPRKSDLFQEDLYPPTAGPDPALTAEEWLGGRDAGPLLISLKDGYVPPKSRELRVNRGLDTGRRRAAPEASGTPSSDAVSRLEEEMRKLQATVQELQKRLDRLEETVQAK

SEQ ID NO: 669 - protein, 79 aa, Homo sapiens
GKHPDPSAWHRPSDTEPLNKGTPTPHHILRSGAPQVDTRTLTPCPSSTPQVSPRLPPRSLCSRPPLRSFKPTRPHWCVS

SEQ ID NO: 670 - protein, 124 aa, Homo sapiens
TFRHRAPEQGHPNTSSYTEVRGSPGGHQDSDPLPLIHPAGQPKAAPSVTLFPPSSEELQANKATLVCLISDFYPGAVTVAWKADSSPVKAGVETTTPSKQSNNKYAASSYLSLTPEQWKSHKSY

SEQ ID NO: 671 - protein, 50 aa, Homo sapiens
PAGWMRGRGSESWCPPGEPLTSVYDEVLGCPCSGALCLKVYARQRGQGVF

SEQ ID NO: 672 - protein, 108 aa, Homo sapiens
VAFVGLPLLRRQAQVAAGRVLVVALFGGCGGLHSRLDGAAICLPGHCHGSRVEVTYETHQCGLVGLKLLRGGREQSDRGGSLGLTCGVDEGQGVRVLVSTWGAPDLSI

SEQ ID NO: 673 - protein, 58 aa, Homo sapiens [sequence omitted]

SEQ ID NO: 674 - protein, 109 aa, Homo sapiens
HTAPVLDIAWCPHNDNVIASGSEDCTVMVWEIPDGGLMLPLREPVVTLEGHTKRVGIVAWHTTAQNVLLSAGCDNVIMVWDVGTGAAMLTLGPEVHPDTIYSVDWSRDG

SEQ ID NO: 675 - protein, 100 aa, Homo sapiens
IVSGCTSGPSVSMAAPVPTSHTMITLSQPALSSTFWAVVCQATMPTRLVWPSRVTTGSRRGSIRPPSGISHTMTVQSSEPLAMTLSLCGHQAMSSTGAVW

SEQ ID NO: 676 - protein, 103 aa, Homo sapiens [sequence omitted]

SEQ ID NO: 677 - protein, 89 aa, Homo sapiens
TGFYPDHVELSWWVNGKEVHSGVSTDPQPLKEQPALNDSRYCLSSRLRVSATFWQNPRNHFRCQVQFYGLSENDEWTQDRAKPVTQIVS

SEQ ID NO: 678 - protein, 89 aa, Homo sapiens
ADDLGDRFGPILGPLVILREPVELDLTAEVVAGVLPEGGRDPQAAAQAVSGVIEGGLLLEGLRVCADPTVHLLPIHPPAQLHVVGVEAC

SEQ ID NO: 679 - protein, 59 aa, Homo sapiens
QRKWLRGFCQKVAETLRRLLRQYLESLRAGCSLRGCGSVLTPLCTSFPFTHQLSSTWSG

SEQ ID NO: 680 - protein, 123 aa, Homo sapiens
  variant (1)...(123): Xaa = Any amino acid
TXXINRXEAGDEADYYCQVWDRNNDHVVFGGGTKLAVLGQPKAAPSVTLFPPSSEELQANKATLVCLISDFYPGAVTVAWKAXSSPVKAGVETTTPSKQSNNKYAASSYLSLTPEQWKSHXTT

SEQ ID NO: 681 - protein, 85 aa, Homo sapiens
  variant (1)...(85): Xaa = Any amino acid
CSXVGLPLLRRQAQIAAGRVLVVALFGGCGGLHSRLDGAAXCLPGHCHGSRVEVTYETHQCGLVGLKLLRGGREQSDRGGSLGLT

SEQ ID NO: 682 - protein, 85 aa, Homo sapiens
VASVGLPLLRRQAQIAAGRVLVVALFGGCGGLHSRLDGAAICLPGHCHGSRVEVTYETHQCGLVGLKLLRGGREQSDRGGSLGLT

SEQ ID NO: 683 - protein, 123 aa, Homo sapiens
TLTINRVEAGDEADYYCQVWDRNNDHVVFGGGTKLAVLGQPKAAPSVTLFPPSSEELQANKATLVCLISDFYPGAVTVAWKADSSPVKAGVETTTPSKQSNNKYAASSYLSLTPEQWKSHRSY

SEQ ID NO: 684 - protein, 161 aa, Homo sapiens
  variant (1)...(161): Xaa = Any amino acid
PCLRSKVTRKRPCLPSMTLMEEMLREAFRCMTQEPMKGPIAMQSGPKPLFRRMSSLVGPTQSFFMRESKTLGAVQIMNGLFHIALGGLLMIPAGIYAPICVTGVVPSLGRHYVYYFRITPGSNRKKNSRKCLVKGKNDNEFIXPSLLAFSGKNSFQIMGPY

SEQ ID NO: 685 - protein, 60 aa, Homo sapiens
  variant (1)...(60): Xaa = Any amino acid
LGWYPLWGGIMYIISGSLLAATGKKTPGSVWSKEKMIMNSLXPLCLPFLERILFKSWDHT

SEQ ID NO: 686 - protein, 67 aa, Homo sapiens
LPQIQGHSEEAMSTLNDTHGGNAERSIQMHDTRANERPYCYAIWSKTTLQEDVFTGGPHAKLLHEGI

SEQ ID NO: 687 - protein, 68 aa, Homo sapiens
DFGGCPDYEWALPHCPGGSSDDPSRDLCTHLCDWGGTLSGEALCILFPDHSWQQPEKKLQEVFGQRKK

SEQ ID NO: 688 - protein, 106 aa, Homo sapiens
  variant (1)...(106): Xaa = Any amino acid
VWSHDLKRILSRKGKQRGXNEFIIIFSFDQTLPGVFFPVAARSDPEIIYIMPPQRGYHPSHTDGCIDPCWDHQKTPQGNVEEPIHNLDSPQSLRFPHEEALRGAHQ

SEQ ID NO: 689 - protein, 94 aa, Homo sapiens
IPAGIIRRPPRAMWKSPFIIWTAPKVLDSLMKKLCVGPTSEDILLKSGFGPDCIAIGPFIGSCVMHLNASLSISSMSVIEGRHGLFRVTLDLRQ

SEQ ID NO: 690 - protein, 151 aa, Homo sapiens
  variant (1)...(151): Xaa = Any amino acid
PGGQHGGDWSWRVTVEPQDSGTSALPLVSLFFYVVTDGKEVLLPEVGAKGQLKFISGHTSELGNFRFTLLPPTSPGDTAPKYGSYNVFWTSNPGLPLLTEMVKSRLNSWFQHRPPGASPERYLGLPGSLKWEDRXPSGQGXGAVLDTAGDP

SEQ ID NO: 691 - protein, 59 aa, Homo sapiens
WGSARRGLELESDCRASGLRYFCPPFGLPVLLCGDRWQGSPTTRGWGQGAVEVYQWAHQ

SEQ ID NO: 692 - protein, 85 aa, Homo sapiens
  variant (1)...(85): Xaa = Any amino acid
FKGHLLYQELPXALAHLDXCPPTSGILASRGSVQGRPLGADAETSYLGDSLPSLSAGAVLGWRSRRHCSCHTWGLYPLDWLVAKV

SEQ ID NO: 693 - protein, 53 aa, Homo sapiens
TSTAPWPQPLVVGLPCHLSPHRRTGRPKGGQKYLSPEALQSLSSSSPLRADPQ

SEQ ID NO: 694 - protein, 62 aa, Homo sapiens
ATLYHLCQQGQSWVGGPEDIVAAILGGCIPWTGWWQKCKAEVTKFTGVPTDKLQLPLGPNLW

SEQ ID NO: 695 - protein, 51 aa, Homo sapiens
LPYLGAVSPGLVGGKSVKRKLPSSLVCPLINFNCPLAPTSGSRTSLPSVTT

SEQ ID NO: 696 - protein, 71 aa, Homo sapiens
  variant (1)...(71): Xaa = Any amino acid
IRSKSHPGLGPSTHSRIGSADTEGGHGTRRLHGRLLSRLYPGHQRXVLTCINCXWNSPHHRGYPWPXXLKC

SEQ ID NO: 697 - protein, 97 aa, Homo sapiens
  variant (1)...(97): Xaa = Any amino acid
ASYSYXXEKPSAIQQRAILPCIKGYDVIAQAQSGTGKTATFAISILXQIELDLKATQALVLAPTRELAQQIQKVVMALGDYMGASCHACIRGTNVXC

SEQ ID NO: 698 - protein, 52 aa, Homo sapiens
  variant (1)...(52): Xaa = Any amino acid
PPSVSAEPILEWVLGPRPGWLLDLIQSXAESIWQMWPFSQSQIGLEQSHHNP

SEQ ID NO: 699 - protein, 70 aa, Homo sapiens
SGHSMDMRVPAQLLGLLLLWLPGAKCDIQMTQSPSTLSASVGDTSYNKLSGLSEYRSVVGLASTETRQSP

SEQ ID NO: 700 - protein, 97 aa, Homo sapiens
  variant (1)...(97): Xaa = Any amino acid
PNLLPPCLHLSEIQVTISCRASQNIDRWLAWHQQKPGKAPNVLIYATSSLEEGVSLRFTGSGSGTQFNLTITSLQPDDSATYYXQHYSASLRSFWTS

SEQ ID NO: 701 - protein, 72 aa, Homo sapiens [sequence omitted]

SEQ ID NO: 702 - protein, 51 aa, Homo sapiens
EARQLIVTCISDRCRQGGRRLGHLDVTFGTWEPEQQEPQELSGDPHVHAVS

SEQ ID NO: 703 - protein, 61 aa, Homo sapiens
  variant (1)...(61): Xaa = Any amino acid
LLAAYLLLLCLEGVVXSTPALTGLAICLPGHCHXSRVEVTYETHQXGLVGLKLLXGGRETE

SEQ ID NO: 704 - protein, 56 aa, Homo sapiens
  variant (1)...(56): Xaa = Any amino acid
VAAVGLPLLRRQAQIAAGRVLVVALFGGCGXLHSRLDGACYLPSRPLSXLPGRSHL

SEQ ID NO: 705 - protein, 76 aa, Homo sapiens
  variant (1)...(76): Xaa = Any amino acid
VSPXLPPRSFCFPPSXEELQANKAXLVCLISDFYPGXVTVAWKADSKPRQGGSGXHHTLQTKQQQVRGQQLSEPDA

SEQ ID NO: 706 - protein, 154 aa, Homo sapiens
  variant (1)...(154): Xaa = Any amino acid
TLTINRVEAGDEADYYCQVWDRNNDHVVFGGGTKLAVLGQPKAAPSVTLFPPSSEELQANKATLVCLISDFYPGAVTVAWKADSSPVKAGVETTTPSKQSNNKYAASSYLSLTPEQWKSHRSYRPARAAKGEFQHTWRRYYGSXSVPTWRNHXH

SEQ ID NO: 707 - protein, 67 aa, Homo sapiens
  variant (1)...(67): Xaa = Any amino acid
YXHDYAKLVPSXIHSNGAKCAGIRPWPPGQVCSFCGTSTAQASGSDSCWPRTCCCFVWRVWWSPLPP

SEQ ID NO: 708 - protein, 116 aa, Homo sapiens
  variant (1)...(116): Xaa = Any amino acid
MXMITPSWYRXGSIVTAPSVLEFALGRPGRSVASVGLPLLRRQAQIAAGRVLVVALFGGCGGLHSRLDGAAICLPGHCHGSRVEVTYETHQCGLVGLKLLRGGREQSDRGGSLGLT

SEQ ID NO: 709 - protein, 125 aa, Homo sapiens
  variant (1)...(125): Xaa = Any amino acid
TLTINRVEAGDEADYYCQVWDRNNDHVVFGGGTKLAVLGQPKAAPSVTLFPPSSEELQANKATLVCLISDFYPGAVTVAWKADSSPVKAGVETTTPSKQSNNKYAXQQLSEALTPEQVESPTEAT

SEQ ID NO: 710 - protein, 70 aa, Homo sapiens
  variant (1)...(70): Xaa = Any amino acid
LLXRVLVVALFGGCGGLHSRLDGAAICLPGHCHGSRVEVTYETHQCGLVGLKLLRGGREQSDRGGSLGLT

SEQ ID NO: 711 - protein, 53 aa, Homo sapiens
  variant (1)...(53): Xaa = Any amino acid
VASVGLSTCSGVKASDSCXAAYLLLLCLEGVVVSTPALTGLLSAFQATVTAPG

SEQ ID NO: 712 - protein, 56 aa, Homo sapiens
PPRVRAPSVPGPRPSRQRSFHSAWDDGEEKNPDLPHPGPKESAGDVHQAEVRADEE

SEQ ID NO: 713 - protein, 56 aa, Homo sapiens
RRGSVRPASQGPGRADKDHSTQPGTMGRKKIQISRILDQRNRQVTFTKRKFGLMKK

SEQ ID NO: 714 - protein, 56 aa, Homo sapiens
LLHQPELPLGERHLPIPLVQDAGDLDFFPPHRPRLSGMIFVCSAWALGRWAHGPAA

SEQ ID NO: 715 - protein, 120 aa, Homo sapiens
  variant (1)...(120): Xaa = Any amino acid
PAICTDKYRCLKHNLNSLIKRSNSTAATNEXPEVTVFSKSPVTLGQPNILICLVDNIFPPVXNITWLSNGHSVTEXVSETSFLSKSDHSFFKISTSPSSLLXEESYDCKXXHWGLGQASS

SEQ ID NO: 716 - protein, 52 aa, Homo sapiens
  variant (1)...(52): Xaa = Any amino acid
AMGTQSQXVFLRPASSPRVIIPSSRSVPHPPPFWXRRVMTARXXTGDWDKPL

SEQ ID NO: 717 - protein, 60 aa, Homo sapiens
  variant (1)...(60): Xaa = Any amino acid
VPIAQPCDVXHRRKDVVHKTDEDVGLTQCHGRLGKHCDLRXLIGSSGRVGAFNQTVQVMF

SEQ ID NO: 718 - protein, 52 aa, Homo sapiens [sequence omitted]

SEQ ID NO: 719 - protein, 53 aa, Homo sapiens [sequence omitted]

SEQ ID NO: 720 - protein, 59 aa, Homo sapiens [sequence omitted]

SEQ ID NO: 721 - protein, 68 aa, Homo sapiens
  variant (1)...(68): Xaa = Any amino acid
QVLGWLTWAPWAWGRCVTRFGLCREKIGSYGDLGWRWMRQHPAGACPWTRATLGLLSRLELEGEDLXR

SEQ ID NO: 722 - protein, 51 aa, Homo sapiens
  variant (1)...(51): Xaa = Any amino acid
XGXGPRPPAQGGTRALEWPESRDRPQQGADASTSIPDPRNSQSSLCRAQIL

SEQ ID NO: 723 - protein, 52 aa, Homo sapiens
SGPSPGTGPSRVLTHPPPSQIPVTPNLLSAEPKSCDTPPPCPRCPGKPAQDL

SEQ ID NO: 724 - protein, 57 aa, Homo sapiens
RKQHWWCLSHGLDRSPPRPPLSLHRLCDLLCVDSDTLSVSGPRKDGQDYLWGKQYWE

SEQ ID NO: 725 - protein, 97 aa, Homo sapiens
GSSTGGASAMAWTVLLLGLLSHCTDSVTSYVLTQTPSVSVAPGKTAKITCGGNNIGSNNVHWYYQKPGQAPVLIISFDNDRPSGISERFSGFNSGDM

SEQ ID NO: 726 - protein, 65 aa, Homo sapiens
  variant (1)...(65): Xaa = Any amino acid
QAXDEADYYCQXWDRNNDHVVFGGGTKLAXLXXPNAAPSXTLFPPSSEELQANXATXVCLIXDFY

SEQ ID NO: 727 - protein, 60 aa, Homo sapiens
  variant (1)...(60): Xaa = Any amino acid
KXAMRPTITVKXGIVIMTMSSSAEGPNWXSXVXPTLPPQXLCSRPPLRSFKPTXPHXCVS

SEQ ID NO: 728 - protein, 59 aa, Homo sapiens
  variant (1)...(59): Xaa = Any amino acid
DTXVWXCWLEAPQRRAGTEXLRGQRWXDXGXPVWSLRRRRHGHYYDPXLDSNSRPHRXL

SEQ ID NO: 729 - protein, 56 aa, Homo sapiens
GVFLHTFTSSALSIYTHTQHPQYLTSNRLYHLYLTMTPGRRSKFFFTISNSSLSLF

SEQ ID NO: 730 - protein, 50 aa, Homo sapiens
ISQITKSSLRQQFKTVPGIKIYSHLRSLPSHLHLLSLKYIHTHPTPSILD

SEQ ID NO: 731 - protein, 70 aa, Homo sapiens
RSAYAARWVAKSLVKGGLCRRVLVQVSYAIGVSHPLSISIFHYGTSQKSERELLEIVKKNFDLRPGVIVR

SEQ ID NO: 732 - protein, 53 aa, Homo sapiens
GLLMLLVGWQNPLLKEVCAGGFLFRSLMLLEFLIHYLSPFSIMVPLRRVRESY

SEQ ID NO: 733 - protein, 76 aa, Homo sapiens
  variant (1)...(76): Xaa = Any amino acid
KQHWWCLSHGLDRSPPRPPLSLHRLCDLLCVDSDTLSVSGPXKDGQDYLWGKQYWELQCTLVLPKARPGPCPNHLF

SEQ ID NO: 734 - protein, 96 aa, Homo sapiens
  variant (1)...(96): Xaa = Any amino acid
SSTGGASAMAWTVLLLGLLSHCTDSVTSYVLTQTPSVSVAPXKTAKITCGGNNIGSYSVHWYYQKPGQAPVLIISFDDXRPSXISERFSGLQFWGT

SEQ ID NO: 735 - protein, 85 aa, Homo sapiens
  variant (1)...(85): Xaa = Any amino acid
VASVGLPLLRRQAQIAAGRVLVVALFGGCXGLHSRLDGAAICLPGHCHGSRVEVTYETHQCGLVGLKLLTGGREQSDRGGSLGLT

SEQ ID NO: 736 - protein, 87 aa, Homo sapiens
  variant (1)...(87): Xaa = Any amino acid
VLGQPKAAPSVTLFPPSCEELQANKATLVCLISDFYPGAVTVAWKADSSPVKAGVETXTPSKQSNNKYAASSYLSLTPEQWKSHRSY

SEQ ID NO: 737 - protein, 125 aa, Homo sapiens
RSTLTINRVEAGDEADYYCQVWDRNNDHVVFGGGTKLAVLSQPKAAPSVTLFPPSSEELQANKATLVCLISDFYPGAVTVAWKADSSPVKAGVETTTPSKQSNNKYAASSYLSLTPEHWKSHKSY

SEQ ID NO: 738 - protein, 85 aa, Homo sapiens
VAFVGLPMLRGQAQIAAGRVLVVALFGGCGGLHSRLDGAAICLPGHCHGSRVEVTYETHQCGLVGLKLLRGGREQSDRGGSLGLT

SEQ ID NO: 739 - protein, 67 aa, Homo sapiens [sequence omitted]

SEQ ID NO: 740 - protein, 97 aa, Homo sapiens; identical to SEQ ID NO: 725

SEQ ID NO: 741 - protein, 57 aa, Homo sapiens
SWPSFLGPLTLRVSESTHRRSQSLCSERGGRGGERSRPWLRHHQCCFLRPRLSRFLP

SEQ ID NO: 742 - protein, 143 aa, Homo sapiens
  variant (1)...(143): Xaa = Any amino acid
TLTINRVEAGDEADYYCQVWDRNNDHVVFGGGTKLAVLGQPKAAPSVTLFPPSSEELQANKATLVCLISDFYPGAVTVAWKADSSPVKAGVETTTPSKQSNNKYAASSYLXLTPEQWKSHRSYSLGLAYLGHPWGNGGXCVTK

SEQ ID NO: 743 - protein, 53 aa, Homo sapiens
  variant (1)...(53): Xaa = Any amino acid
HXFPHCPTGAQGKPSPGCSFCGTSTAQASXSDSCWPRTCCCFVWRVWWSPLPP

SEQ ID NO: 744 - protein, 105 aa, Homo sapiens
  variant (1)...(105): Xaa = Any amino acid
FCDTXSPIAPRVPKVSQAQAVASVGLPLLRRQXQIAAGRVLVVALFGGCGGLHSRLDGAAICLPGHCHGSRVEVTYETHQCGLVGLKLLRGGREQSDRGGSLGLT

SEQ ID NO: 745 - protein, 59 aa, Homo sapiens
  variant (1)...(59): Xaa = Any amino acid
XGXGPEHTFGWNSLRDQKAPVSHRAEEPGQKSNPRVRCAGETQSSLYLSGWQEGTGSGR

SEQ ID NO: 746 - protein, 78 aa, Homo sapiens
  variant (1)...(78): Xaa = Any amino acid
GTKRPQYPTELRSQARKVTPEFAVQGRHRALFICQDGRRGQGQGAEGXMSVLGAKAPRDLRTGGQVSKVKQLPVQIRA

SEQ ID NO: 747 - protein, 50 aa, Homo sapiens
  variant (1)...(50): Xaa = Any amino acid
PQSSLCRGDTELSLSVRMAGGDRVRALRVXCRCWGPRPREISGQVVRCLR

SEQ ID NO: 748 - protein, 56 aa, Homo sapiens
  variant (1)...(56): Xaa = Any amino acid
NSSPCRSGHSGKHPDPSAWHRPSDTEPLNXGTPTPHHILRAGAPQVDTRTLTPLPL

SEQ ID NO: 749 - protein, 118 aa, Homo sapiens
  variant (1)...(118): Xaa = Any amino acid
GVGVXLFRGSVSEGLCQAEGSGCFPLCPDLHGELFYLRHLTTCPEISRGLGPQHRHXTLSALTLSPPAILTDKESSVSPLHSELWGYFSGLAPQLCGILGPFGPSGCSSQMCVLDXGR

SEQ ID NO: 750 - protein, 60 aa, Homo sapiens
  variant (1)...(60): Xaa = Any amino acid
GARGSESWCPPGEPLPSVYDEVLGCXCSGALCLKVYARQRGQGVFHYALICTGSCFTLDT

SEQ ID NO: 751 - protein, 67 aa, Homo sapiens
  variant (1)...(67): Xaa = Any amino acid
AAPSVTLFPPSSEELQANKATLVCLISDFYPGAVTVAWXADSTPXKAGVETTTPXKQSNNKYPASSY

SEQ ID NO: 752 - protein, 67 aa, Homo sapiens
  variant (1)...(67): Xaa = Any amino acid
IAAGRVLVVALFXGCGGLHSRLXGGAICXPGHCHGSRVEVTYETHQCGLVGLKLLRGGREQSDRGGS

SEQ ID NO: 753 - protein, 97 aa, Homo sapiens; identical to SEQ ID NO: 725

SEQ ID NO: 754 - protein, 56 aa, Homo sapiens
KQHWWCLSHGLDRSPPRPPLSLHRLCDLLCVDSDTLSVSGPRKDGQDYLWGKQYWE

SEQ ID NO: 755 - protein, 139 aa, Homo sapiens
  variant (1)...(139): Xaa = Any amino acid
XPXXRSKVTRKRPCLPSMTLMEEMLREAFRCMTQGKTAKKSCSCSPHFVICFIFXSFESKMTTPRNSVNGTFPAEPMKXPIAMQSGPKPLFRRMSSLVGPTQSFFMRESKTLGAVQIMNGLFHIALGXLLMIPXGXYAP

SEQ ID NO: 756 - protein, 51 aa, Homo sapiens
  variant (1)...(51): Xaa = Any amino acid
EQNDNTQKFSKWDFPGRANERXYCYAIWSKTTLQEDVFTGGPHAKLLHEGI

SEQ ID NO: 757 - protein, 92 aa, Homo sapiens
  variant (1)...(92): Xaa = Any amino acid
GAXIPXGIIRXPPRAMWKSPFIIWTAPKVLDSLMKKLCVGPTSEDILLKSGFGPDCIAIXPFIGSAGKVPFTEFLGVVILLSKLXKIKQITK

SEQ ID NO: 758 - protein, 53 aa, Homo sapiens
  variant (1)...(53): Xaa = Any amino acid
PAGWMRGRGSKSWCPPGEPLTSVYDEVLGCPCSGALCLKVYARQRGXGVFTMP

SEQ ID NO: 759 - protein, 108 aa, Homo sapiens
  variant (1)...(108): Xaa = Any amino acid
VAFVGLPLLRRQAQVAAGRVLVVALFGGCGGLHSRLDGAAICLPGHCHGSRVEVTYETHQCGLVGLKLLXGGREQSDRGGSLGLTCGVDEGQGVKVLVSTWGAPDLSI

SEQ ID NO: 760 - protein, 78 aa, Homo sapiens
  variant (1)...(78): Xaa = Any amino acid
KHXXPSAWHRPSDTEPLNKGTPTPHHILRSGAPQVDTRTLTPCPSSTPQVSPRLPPRSLCSRPPXRSFKPTRPHWCVS

SEQ ID NO: 761 - protein, 124 aa, Homo sapiens
  variant (1)...(124): Xaa = Any amino acid
TFRHRAPEQGHPNTSSYTEVRGSPGGHQDFDPLPLIHPAGQPKAAPSVTLFPPSXEELQANKATLVCLISDFYPGAVTVAWKADSSPVKAGVETTTPSKQSNNKYAASSYLSLTPEQWKSHKSY

SEQ ID NO: 762 - protein, 62 aa, Homo sapiens
NGQVVGEKKVPGSLEKNVKRCSRPMRRIRQEIHRCARLLRSTCQQQLPSLSLGEQDSGVWDF

SEQ ID NO: 763 - protein, 59 aa, Homo sapiens
KSQTPESCSPKLKEGSCCWQVLLRSLAHLCISCLILLIGLEHLFTFFSREPGTFFSPTT

SEQ ID NO: 764 - protein, 87 aa, Homo sapiens
  variant (1)...(87): Xaa = Any amino acid
VSPKAAPSVTLFPPSSEELQANKATLVCLISDFYPGAVTVAWKADSSPVKAGVETTTPSKQXNNKYXASSYLSLTPEQWKXHISYXP

SEQ ID NO: 765 - protein, 55 aa, Homo sapiens
  variant (1)...(55): Xaa = Any amino acid
STLTINRXEAGDEADYYCQVWDRNNDHVVFGGGTKLAVLGQPQGCPLGHSVPALL

SEQ ID NO: 766 - protein, 121 aa, Homo sapiens
  variant (1)...(121): Xaa = Any amino acid
RXVAYVXLPLLRRQAQIAAGXVLVVXLFGGCGGLHSRLDGAAICLPGHCHGSRVEVTYETHQCGLVGLKLLRGGREQSDRGGSLGADLGRPVWSLRRRRHGHYYDPTLDSNSRPHRRLXPC

SEQ ID NO: 767 - protein, 60 aa, Homo sapiens
NSVMMVFKDSRKGVMSQNLPECPSIVRRKRTSLVDVHVLIPWRLGHQTMRFGNICYQDEP

SEQ ID NO: 768 - protein, 73 aa, Homo sapiens
  variant (1)...(73): Xaa = Any amino acid
ARSXWLSDPPRPLPHTRAPEHTFGWNSLRDQKAPVSHRAEEPGQKSNPRVRCAGETQSSLYLSGWQEGTGSGH

SEQ ID NO: 769 - protein, 74 aa, Homo sapiens
  variant (1)...(74): Xaa = Any amino acid
GTKRPQYPTELRSQARKVTPEFAVQERHRALFICQDGRRGQGQGTEGXMSVWGAKAPRDLRTXXHVSXVKXLPR

SEQ ID NO: 770 - protein, 50 aa, Homo sapiens
  variant (1)...(50): Xaa = Any amino acid
PQSSLCRRDTELSLSVRMAGGDRVRALRVXCRCGGPRPREISGXVXMCLX

SEQ ID NO: 771 - protein, 62 aa, Homo sapiens
  variant (1)...(62): Xaa = Any amino acid
QIKRALCLSCTANSGVTFLAWLLSSVGYWGLLVPQAVPAKCVFWSPCMGQGPGGIGEPXRPR

SEQ ID NO: 772 - protein, 59 aa, Homo sapiens
  variant (1)...(59): Xaa = Any amino acid
RELCVSPAQRTLGLLFWPGSSALWDTGAFWSLRLFQPNVCSGARVWGKGLGGSESHXDR

SEQ ID NO: 773 - protein, 102 aa, Homo sapiens
  variant (1)...(102): Xaa = Any amino acid
TGKXFYXRHMXXCPEISRGLGPPHRHXTLSALTLSPPAILTDKESSVSLLHSELWGYFSGLAPQLCGILGPFGPSGCSSQMCVLEPVYGARAWGDRRAXSTA

SEQ ID NO: 774 - protein, 102 aa, Homo sapiens
  variant (1)...(102): Xaa = Any amino acid
MDMRVPAQLLGLLLLWLPGAKCDIQMTQSPSTLSASVGDTVTISCRASQNIDRWLAWHQQKPGKAPNVLIYATSSLEEGVSLRFTGSGSGTQFNLTXTRSAA

SEQ ID NO: 775 - protein, 54 aa, Homo sapiens
  variant (1)...(54): Xaa = Any amino acid
CPNLCDFQFRRRGLIKIYWQWIWDTIQFNHXQVCSLTIXQLIIXNIILHXXXVL

SEQ ID NO: 776 - protein, 68 aa, Homo sapiens
DIRGFAWFLLMPGQPPIYILRGPTTYCNCISDRCRQGGRRLGHLDVTFGTWEPEQQEPQELSGDPHVH

SEQ ID NO: 777 - protein, 50 aa, Homo sapiens
  variant (1)...(50): Xaa = Any amino acid
QNXXXMQNNVXNNKLXNRQAADLXMVKLNCVPDPLPVNLNETPSSKLEVA

SEQ ID NO: 778 - protein, 138 aa, Homo sapiens
  variant (1)...(138): Xaa = Any amino acid
QYTHEFDGDEQFYVDLGRKETAWCLPVLRQFRFDPQFALTNIAVLKHNLNSLIKRSNSTAATNEVPEVTVFSKSPVTLGQPNILICLVDNIFPPVXNITWLSNGHSVTXXVSETSFLSKSDHXFFXIXYPTLLPSSEE

SEQ ID NO: 779 - protein, 60 aa, Homo sapiens
  variant (1)...(60): Xaa = Any amino acid
VPIAQPCDVXHRRKDVVHKTDEDVGLTQCHGRLGKHCDLRNLIGSSGRVGAFNQTVQVMF

SEQ ID NO: 780 - protein, 66 aa, Homo sapiens
PSVTGDLENTVTSGTSLVAAVELERLIRLFKLCFRTAMFVSANCGSNLNCLRTGKHQAVSFLPRST

SEQ ID NO: 781 - protein, 84 aa, Homo sapiens
  variant (1)...(84): Xaa = Any amino acid
SVASVGLPLLRRQAQIAAGRVLVVALFGGCGXLHSRLDGXAIXLPGHCHGSRVEVTYETHQCGLVGLXLLIXGREQSDRXGSLG

SEQ ID NO: 782 - protein, 84 aa, Homo sapiens
  variant (1)...(84): Xaa = Any amino acid
PKAAXSVTLFPPXYEEXQANKATLVCLISDFYPGAVTVAWKXDSXPVKAGVEXTTPSKQSNNKYAASSYLSLTPEQWKSHRSYR

SEQ ID NO: 783 - protein, 51 aa, Homo sapiens
  variant (1)...(51): Xaa = Any amino acid
DTFKWAQCQPTGLLTGTTSQMPFSAHTLQAEARGXHPSGDGXCXCVXVCSA

SEQ ID NO: 784 - protein, 59 aa, Homo sapiens
  variant (1)...(59): Xaa = Any amino acid
PXXVQMSETPSNGPSASQLGSSLAPRPRCPSLPTPCRLRPEEXTPPEMGXVXVCXYVLX

SEQ ID NO: 785 - protein, 59 aa, Homo sapiens
  variant (1)...(59): Xaa = Any amino acid
RRTYXHTXTXPISGGVXSSGLSLQGVGREGHLGRGASEEPSWLALGPFEGVSDIWTXXG

SEQ ID NO: 786 - protein, 58 aa, Homo sapiens
  variant (1)...(58): Xaa = Any amino acid
AEHXHTHXHXPSPEGXPPLASACRVWAEKGIWDVVPVRSPVGWHWAHLKVSQTFGPXX

SEQ ID NO: 787 - protein, 52 aa, Homo sapiens
  variant (1)...(52): Xaa = Any amino acid
PKEVRQLAEDFLKDYIHINIGALELXANHNILXXVDVCHDXXKDEKLIRLME

SEQ ID NO: 788 - protein, 55 aa, Homo sapiens
  variant (1)...(55): Xaa = Any amino acid
QHWWXXSHGXGRSPLRPPLSLHXLCXLLCVDSDTLSVSGPRKGGQDYLWGKQYWE

SEQ ID NO: 789 - protein, 95 aa, Homo sapiens
  variant (1)...(95): Xaa = Any amino acid
STGXXSAMXWAVLLFGLLSHCTXSVXSYVLTQTPSVSVAPGKAAKITCGGNNIGSNNVXWYYQKPGQAPVLIISFDNDRPSGISERFSGFNSGDM

SEQ ID NO: 790 - protein, 90 aa, Homo sapiens
VLTVINYRPHNMRPEDRMFHIRAVILRALSLAFLLSLRGAGAIKADHVSTYAAFVQTHRPTGEFMFEFDEDEMFYVDLDKKETVWHLEEF

SEQ ID NO: 791 - protein, 55 aa, Homo sapiens
VSEELGPSRRTMCQLMPRLYRRIDQQGSLCLNLMKMRCSMWIWTRRRPSGIWRSL

SEQ ID NO: 792 - protein, 56 aa, Homo sapiens
LACCSGPWSCPVLQHGVSEAPWRLLHGSSDSDTDGAELPTGFGWGHQTTFLGVLYV

SEQ ID NO: 793 - protein, 177 aa, Homo sapiens
  variant (1)...(177): Xaa = Any amino acid
LPAALAPGPVLFSSMVCLRLPGGSCMAVLTVTLMVLSSPLALAGDTRPRFLEYSTSECHFFNGTERVRFLDRYFYNQEEYVRFDSDVGEFRAVTELGRPDEEYWNSQKDFLEDRRAAVDTYCRHNYGVGESFTVQRRVHPKVTVYPSKTHPCSTTTSWSVLXVVSIQAALNXVVPEW

SEQ ID NO: 794 - protein, 56 aa, Homo sapiens
APHWLWLGTPDHVSWSTLRLSVISSMGRSGCGSWTDTSITKRSTCASTATWGSSGR

SEQ ID NO: 795 - protein, 70 aa, Homo sapiens [sequence omitted]

SEQ ID NO: 796 - protein, 53 aa, Homo sapiens
STPRNVVWCPQPKPVGSSAPSVSLSELPCRSLQGASDTPCWRTGQDQGPEQQA

SEQ ID NO: 797 - protein, 146 aa, Homo sapiens [sequence omitted]

SEQ ID NO: 798 - protein, 58 aa, Homo sapiens
HSDVEYSKKRGLVSPAKASGELSTISVTVRTAMQEPPGSLRHTMLENRTGPGARAAGK

SEQ ID NO: 799 - protein, 110 aa, Homo sapiens
ALNEDLRSWTAADMAAQITKRKWEAAHEAEQLRAYLDGTCVEWLRRYLENGKETLQRTDPPKTHMTHHPISDHEATLRCWALGFYPAEITLTWQRDGEDQTQDTELVETR

SEQ ID NO: 800 - protein, 110 aa, Homo sapiens
PGLHELRVLGLVLPIPLPGQCDLRRVEAQGPAPQGGLMVRDGVVGHMCLGGVRALQRLLPVLQVSAEPLHARAIQVGSQLLRLMGRLPLALGDLSRHVRRGPRAQVLVQG

SEQ ID NO: 801 - protein, 70 aa, Homo sapiens
SPQGRSPGPSTSGWPHGQRWGGGSYVSWGGPCAAASPSRSPGICGATPRTCHPGRLSTAPPHGPPPTCAW

SEQ ID NO: 802 - protein, 53 aa, Homo sapiens
  variant (1)...(53): Xaa = Any amino acid
PRGQXWADLGRPVWSLRRRRHGYYYXPXLDSNSXPSSPASDPFDGXGXDLWPX

SEQ ID NO: 803 - protein, 85 aa, Homo sapiens
  variant (1)...(85): Xaa = Any amino acid
XAXVGLPLLRRQAXIAAGRVLVVALFGGCGGLHSRLDGAAICLPGHCHGSRVEVTYETHQCGLVGLKLLRGGREQSDRGGXLGLT

SEQ ID NO: 804 - protein, 129 aa, Homo sapiens
  variant (1)...(129): Xaa = Any amino acid
RAKGPXLXHQKGQKPAMKXDYYCQVXDXNNNHVVFGGGTILAVLSQPKXAPSVTLFPPSSEELQANKATLVCLISDFYPGAVTVAWKADSSPVKAGVETTTPSKQSNNKYAASSYXSLTPEQWKSHXSX

SEQ ID NO: 805 - protein, 140 aa, Homo sapiens
  variant (1)...(140): Xaa = Any amino acid
TLTINRVEAGDEADYYCQVWDLNNDHVVFGGGTKLAVLGQPKAAPSVTLFPPSSEELQANKATLVCLISDFYPGAVTVAWKADSSPVKXGVETTTPXKQSNNKYAASSYXSLTPEQWKSHRXYRPARAXXGEFQHTGGRY

SEQ ID NO: 806 - protein, 71 aa, Homo sapiens
  variant (1)...(71): Xaa = Any amino acid
ETSYXHDXAKLGTELXSTSNAPQCAGIRXXPPGQVCXFCGTSTAQASGXDSCWPRTCCCFVXRVWWSPLXP

SEQ ID NO: 807 - protein, 120 aa, Homo sapiens
  variant (1)...(120): Xaa = Any amino acid
KPAMXMIXPSLVPSSXPLVTPPSVLEFAXXRPGRSVXSVGLPLLRRQAXIAAGRVLVVALFXGCGGLHSXLDGAAICLPGHCHGSRVEVTYETHQCGLVGLKLLRGGREQSDRGGSLGLT

SEQ ID NO: 808 - protein, 80 aa, Homo sapiens
  variant (1)...(80): Xaa = Any amino acid
TXXXNRGEAGDEADYYCQVWDLNNDHVVFGGGTKLXVLGQPKAAPSVTLFPPSSEELQANKATLVCLISDXYPXAVTVAW

SEQ ID NO: 809 - protein, 63 aa, Homo sapiens
  variant (1)...(63): Xaa = Any amino acid
KKIKIYXVYXLTSYTQRIXDFSLKIIIKPPISPVEKEILRFXCFFFQHNSVTYGWEKICREII

SEQ ID NO: 810 - protein, 123 aa, Homo sapiens
  variant (1)...(123): Xaa = Any amino acid
TLTINRVEAGDEADYYCQVWDRNNDHVVFGGGTKLAVLGQPKAAPSVTLFPPSSEELQANKATLVCLISDXYPGAVTVAWKADSSPVKAGVETTTPSKQSNNKYAASSYLSLTPEQWKSHRSY

SEQ ID NO: 811 - protein, 50 aa, Homo sapiens
  variant (1)...(50): Xaa = Any amino acid
LLAAYLLLLCLEGVVVSTPALTGLLSAFQATVTAPGXKSLMRHTSVALLA

SEQ ID NO: 812 - protein, 85 aa, Homo sapiens
  variant (1)...(85): Xaa = Any amino acid
VASVGLPLLRRQAQIAAGRVLVVALFGGCGGLHSRLDGAAICLPGHCHGSRVXVTYETHQCGLVGLKLLRGGREQSDRGGSLGLT

SEQ ID NO: 813 - protein, 71 aa, Homo sapiens
DIRGFAWFLLMPGQPPIYILRGPTTYCNCISDRCRQGGRRLGHLDVTFGTWEPEQQEPQELSGDPHVHAVS

SEQ ID NO: 814 - protein, 124 aa, Homo sapiens
SGHSMDMRVPAQLLGLLLLWLPGAKCDIQMTQSPSTLSASVGDTVTISCRASQNIDRWLAWHQQKPGKAPNVLIYATSSLEEGVSLRFTGSGSGTQFNLTITSLQPDDSATYYCQHYSASLRSF

SEQ ID NO: 815 - protein, 114 aa, Homo sapiens
  variant (1)...(114): Xaa = Any amino acid
TLTINRVEAGDEADYYCQVWDRNNDHVVFGGGTKLAVLGQPKAAPSVTLFPPSSEELQANKATLVCLISDFYPGAVTVAWKXDSSPVKAGVETTTPSKQSNNKYRGQQLSEPDA

SEQ ID NO: 816 - protein, 70 aa, Homo sapiens
  variant (1)...(70): Xaa = Any amino acid
LLPAVLVVALFGGCGGLHSRLDGAAIXLPGHCHGSRVEVTYETHQCGLVGLKLLRGGREQSDRGGSLGLT

SEQ ID NO: 817 - protein, 61 aa, Homo sapiens
TCISRFLGQLFIISLKSHDINSGPHTWGLKKSGTYNRNHIMSLISKPVSCLWTVCVRHAYL

SEQ ID NO: 818 - protein, 65 aa, Homo sapiens
  variant (1)...(65): Xaa = Any amino acid
TLTINRVEAGDGADYYCQVWDRNNDHVVFGGGTKLAVLSQPKAAPSXTLFPPXSXELXANKXTLV

SEQ ID NO: 819 - protein, 61 aa, Homo sapiens
  variant (1)...(61): Xaa = Any amino acid
TPVXPCWLXAXQXRAGTEXPRGQPWADLGRPVWSLRRRRHGHYYDPTLDNNSRPHRRLRPC

SEQ ID NO: 820 - protein, 141 aa, Homo sapiens
  variant (1)...(141): Xaa = Any amino acid
EPXNPSEKNSPSTQYCYSIQSLFLGILSVMLIFAFFQELVIAGIVENEWKXXCSXPKSNIVLLSXEEKKEQTIEIKEEVVGLTETSSQPKNEEDIEIIPIQEEEEEETETNFXEPPQDQESSPIENDSSPXVISSXFXXLF

SEQ ID NO: 821 - protein, 101 aa, Homo sapiens
  variant (1)...(101): Xaa = Any amino acid
SWGGSXKFVSVSSSSSSWIGIISMSSSFFGWEDVSVSPTTSSFISIVCSFFSSXDRRTMLDLGXEHXLFHSFSTMPAITSSWKKAKISITDKMPKNRDCML

SEQ ID NO: 822 - protein, 66 aa, Homo sapiens
DHLKSCYQDSHEDPTKMKRFLFLLLTISLLVMVQIQTGLSGQNDTSQTSSPSASSSMSGGIFLFFV

SEQ ID NO: 823 - protein, 75 aa, Homo sapiens
TKRSLQTALRSPKKLLPRQPRRSYQNEALPLPPTHHQPPGYGTDTNWTLRTKRHQPNQQPLSIQQHERRHFPFLR

SEQ ID NO: 824 - protein, 59 aa, Homo sapiens
TKKRKMPPLMLLDAEGLLVWLVSFCPESPVCICTITRRLMVSRRKRKRFILVGSSWLSW

SEQ ID NO: 825 - protein, 59 aa, Homo sapiens
  variant (1)...(59): Xaa = Any amino acid
PCLRSXXTXKRPCLPXMTLMEEMLREAFXCMTQGKTAKNLVLALLILLFVLFLGVLRAK

SEQ ID NO: 826 - protein, 63 aa, Homo sapiens
  variant (1)...(63): Xaa = Any amino acid
SGCCHFALKTPKNKTNNKMRRARTRFLAVLPCVMHXNASLSISSMSVIXGRHGLXRVXLDLRQ

SEQ ID NO: 827 - protein, 85 aa, Homo sapiens
  variant (1)...(85): Xaa = Any amino acid
VASVGLPLLRRQAQIAAGRVLVVALFGGCGGLHSRLDGAAICLXGHCHXXRVEVTYETHQCXLVGLKLXXGGREXSDRGGSLGLT

SEQ ID NO: 828 - protein, 85 aa, Homo sapiens
  variant (1)...(85): Xaa = Any amino acid
GQPKAAPSVTXFPPSXXELQANKXTLVCLISDFYPXXVTVAXKADSSPVKAGVETTTPSKQSNNKYAASSYLSLTPEQWKSHRSY

SEQ ID NO: 829 - protein, 61 aa, Homo sapiens
ALDRKSLDCPEEVVSRNMDVKGAPAEVLGGNEGHDIGREDGGGDCSDASTDLGDQDAAAIT

SEQ ID NO: 830 - protein, 103 aa, Homo sapiens
VMAAASWSPRSVDASLQSPPPSSRPMSCPSFPPRTSAGAPLTSIFLLTTSSGQSRLFLSSAHCPILSIPQAISPFLGICYGSTPLPGTKTSHMIMTAPHCSGL

SEQ ID NO: 831 - protein, 83 aa, Homo sapiens
  variant (1)...(83): Xaa = Any amino acid
SVXLPLLTRXAQIAAGRVLVVALXGGCGGLHPRLDGAAICLPGHCHGSRVEVTYETHQCGLVGLKLLXGGREQSDRGGSLGLT

SEQ ID NO: 832 - protein, 119 aa, Homo sapiens
  variant (1)...(119): Xaa = Any amino acid
TINRVEAGDEADYYCQVWDRNNDHVXFGGGTKLAVLGQPKAAPSVTLFPPSXEELQANKATLVCLISDFYPGAVTVAWKADSSPVKAGVETTTPSXQSNNKYAASSYLSXTREQWKXHR

SEQ ID NO: 833 - protein, 85 aa, Homo sapiens
  variant (1)...(85): Xaa = Any amino acid
VASVGLPLLRRQAQIAAGRVLVVALFGGCGGLHSRLDGAAICLPGHCHGSRVEVTYETHQCGLVGLKLLXGGREQSDRGGXLGLT

SEQ ID NO: 834 - protein, 121 aa, Homo sapiens
  variant (1)...(121): Xaa = Any amino acid
PSTGSXPXMRXTXNCXVWDRNNDHVVFGGGTKLAVLGQPKXAPSVTLFPPSXEELQANKATLVCLISDFYPGAVTVAWKADSSPVKAGVETTTPSKQSNNKYAASSYLSLTPEQWKSHRSY

SEQ ID NO: 835 - protein, 127 aa, Homo sapiens
  variant (1)...(127): Xaa = Any amino acid
VASVGLPLLRRQAQIAAGRVLVVALFGGCGGLHSRLDGAAICLPGHCHGSRVEVTYETHQCGLVGLKLLRGGREQSDRGGSLGLTXDGQFGPSAEDDMVIITIPHLTVIVGLIAGFDPVDGQGGPRP

SEQ ID NO: 836 - protein, 127 aa, Homo sapiens
  variant (1)...(127): Xaa = Any amino acid
RPRSTLTINRVEAGDEADYYCQVWDRNNDHVVFGGGTKLAVXGQPKAAPSVTLFPPSSEELQANKATLVCLISDFYPGAVTVAWKADSSPVKAGVETTTPSKQSNNKYAASSYLSLTPEQWKSHRSY

SEQ ID NO: 837 - protein, 85 aa, Homo sapiens; identical to SEQ ID NO: 682

SEQ ID NO: 838 - protein, 123 aa, Homo sapiens; identical to SEQ ID NO: 683

SEQ ID NO: 839 - protein, 85 aa, Homo sapiens
  variant (1)...(85): Xaa = Any amino acid
VASVGLPLLGRQAQVAAGRVLVVALFGGFGGLHSRLDGAAICLPGHCHSSRVEVTYETHQXGLXGLXLLXGGREXXDXGGXLGLT

SEQ ID NO: 840 - protein, 54 aa, Homo sapiens
LLPGSCDSGLEGRWQPRQGGSGDHQTLQTEQQQVRGQQLPEPDARAVEVPQKLQ

SEQ ID NO: 841 - protein, 110 aa, Homo sapiens
  variant (1)...(110): Xaa = Any amino acid
DYYCQVXDRNNDHVVFGGGTKLAVLGQPKXAPXVXXFPPSXEEXQAXKAXLVCLISDFYPGAVTVAWKADGSPVKAGVETTKPSKQSNNKYAASSYLSLTPEQWKSHRSY

SEQ ID NO: 842 - protein, 85 aa, Homo sapiens; identical to SEQ ID NO: 682

SEQ ID NO: 843 - protein, 125 aa, Homo sapiens
  variant (1)...(125): Xaa = Any amino acid
RSTLTINRVEADDEXDYYCQVWDRNNDHVVFGGGTKLAVLGQPKAAPSVTLFPPSSEELQANKATLVCLISDFYPGAVTVAWKADSSPVKAGVETTTPSKQSNNKYAASSYLSLTPEQWKSHRSY

SEQ ID NO: 844 - protein, 94 aa, Homo sapiens
  variant (1)...(94): Xaa = Any amino acid
XLACCSGPWSCPVLQHGVSEAPWRLLHGSSDSDTDGAELPTCFGLGTPDHVSWSTLRLSVISSMGRSGCGSWTDTSITKRSTCASTATWGSSGR

SEQ ID NO: 845 - protein, 57 aa, Homo sapiens
VLPAALAPGPVLFSSMVCLRLPGGSCMAVLTVTLMVLSSPLALGWGHQTTFLGVLYV

SEQ ID NO: 846 - protein, 93 aa, Homo sapiens
  variant (1)...(93): Xaa = Any amino acid
APHLLWAGDTRPRFLEYSTSECHFFNGTERVRFLDRYFYNQEEYVRFDSDVGEFRAVXELGRADEEYWNSXXGLPGXQAXRGGHLLXTQLRGW

SEQ ID NO: 847 - protein, 121 aa, Homo sapiens
  variant (1)...(121): Xaa = Any amino acid
VSTAXRLXSRKSXXAVPVLLISPPQLXHRPELPHVAVEAHVLLLVIEVSVQEPHPLRPIEEMTLRRRVLQETWSGVPSPKQVGSSAPSVSLSELPCRSLQGASDTPCWRTGQDQGPEQQAR

SEQ ID NO: 848 - protein, 54 aa, Homo sapiens
  variant (1)...(54): Xaa = Any amino acid
QPRSCXCSRCPPXPACXPGSPXWLFQYSSSARPSXVTARNSPTSLSKRTYSSWL

SEQ ID NO: 849 - protein, 59 aa, Homo sapiens
HSDVEYSKKRGLVSPAQSKWGAQHHQCHCQNCHAGASREPQTHHAGEQDRTRGQSSRQD

SEQ ID NO: 850 - protein, 67 aa, Homo sapiens
  variant (1)...(67): Xaa = Any amino acid
NPVVVXAVGVHRXPPXFQEVLXGCSSTPHQPAPAXSPPGTPPRRCRSARTPLGYRSICPGTAPAPSH

SEQ ID NO: 851 - protein, 55 aa, Homo sapiens
  variant (1)...(55): Xaa = Any amino acid
STPRNVVWCPQPKASGELSTISVTVRTAMQEPPGSLRHTMLENRTGPGARAAGKX

SEQ ID NO: 852 - protein, 146 aa, Homo sapiens
  variant (1)...(146): Xaa = Any amino acid
KMESLNFIRAHTPYINIYNCEPPNPSEKNSPSTQYXYSIQSLFLGILSVMLIFAFFQELVIXGIVDNEWKRTCSRPKSNIVLLSAEEKKEXTIEIKEEVVGLTETSSQPKNEEXIEIIPXQEEEEERNXRRTFQNXPRSGILTNRK

SEQ ID NO: 853 - protein, 137 aa, Homo sapiens
  variant (1)...(137): Xaa = Any amino acid
CHFLLVRIPDLXRFWKVRLXFLSSSSSXIGIISMXSSFFGWEDVSVSPTTSSFISIXCSFFSSADRRTMLDLGLEHVLFHSLSTMPXITSSWKKAKISITDKMPKNRDCMLXQYWVDGEFFSEGLGGSQLYMLIYGV

SEQ ID NO: 854 - protein, 59 aa, Homo sapiens
  variant (1)...(59): Xaa = Any amino acid
AATASIAGAPTQYPPGRGGPPPPMGRRTPPPGMMGPPPXFXTSYGCPQWGIPXGRXLQW

SEQ ID NO: 855 - protein, 59 aa, Homo sapiens
  variant (1)...(59): Xaa = Any amino acid
PLEXSSXGDPPLGAPIGGXKXGRWAHHAWRGCSSAHRWGRTPTARWVLGWSPGNTGCGS

SEQ ID NO: 856 - protein, 50 aa, Homo sapiens
KLLEGTCYNGRLIWKVTDYKMKKREAVDGHTVSIFSQSFYTNPLWLPALC

SEQ ID NO: 857 - protein, 61 aa, Homo sapiens
RRERRWMGTQCPSSASPSTPTRCGYRLCARAYLNGDGSGRGSHLSLYFVVMRGEFDSLLQW

SEQ ID NO: 858 - protein, 85 aa, Homo sapiens; identical to SEQ ID NO: 682

SEQ ID NO: 859 - protein, 123 aa, Homo sapiens; identical to SEQ ID NO: 683

SEQ ID NO: 860 - protein, 123 aa, Homo sapiens
GHSMDMRVPAQLLGLLLLWLPGAKCDIQMTQSPSTLSASAGNTVTISCRASQNIDRWLAWHQQKPGKAPNVLIYATSSLEEGVSLRFTGSGSGTQFNLTITSLQPDDSATYYCQHYSASLRSF

SEQ ID NO: 861 - protein, 71 aa, Homo sapiens
DIRGFAWFLLMPGQPPIYILRGPTTYCNCISGRCRQGGRRLGHLDVTFGTWEPEQQEPQELSGDPHVHAVS

SEQ ID NO: 862 - protein, 57 aa, Homo sapiens
GSSTGGASAMAWTVLLLGLLSHCTDSVTSYVLTQTPSVSVAPGKDGQDYLWGKQYWE

SEQ ID NO: 863 - protein, 65 aa, Homo sapiens
LRHPQCQWPQEKTAKITCGGNNIGSNNVHWYYQKPGQAPVLIISFDNDRPSGISERFSGFNSGDM

SEQ ID NO: 864 - protein, 72 aa, Homo sapiens
KQHWWCLSHGLDRSPPRPPLSLHRLCDLLCVDSDTLSVSGPRKRRPRLPVGETILGVTMYTGITRSQARPLS

SEQ ID NO: 865 - protein, 72 aa, Homo sapiens
DRGLAWLLVIPVYIVTPNIVSPTGNLGRLFLGPLTLRVSESTHRRSQSLCSERGGRGGERSRPWLRHHQCCF

SEQ ID NO: 866 - protein, 69 aa, Homo sapiens
SSTGGASAMAWTVLLLGLLSHCTGDPPRVSPTCPAQGFWVQRVLNSELRRALPVVGRMLMTLVQGGKVG

SEQ ID NO: 867 - protein, 59 aa, Homo sapiens
AALVVPQPWPGPFSSSASSLTAQVIPPGSHQPAQPKASGSSVSLILSSGGPFLWWAGCS

SEQ ID NO: 868 - protein, 115 aa, Homo sapiens
  variant (1)...(115): Xaa = Any amino acid
VASVGLPLLRRQAQIAAGRVLVVALFGGCGGLHSRLDGAAICLPGHCHGSRVEVTYETHQRGLVGLKLLXXRRETEXPRGXLGLTRTAVWSSAKHMALLRSTLDSNSXLIXGFTL

SEQ ID NO: 869 - protein, 97 aa, Homo sapiens
  variant (1)...(97): Xaa = Any amino acid
CHVFGGGPNCRPSQPKXAPRXFCFPPXXEEFQANKATLVCLISDFYPGAVTVAWKADSSPVKAGVETTTPSKQSNNKYAASSYLSLTPEQWKSHRSY

SEQ ID NO: 870 - protein, 75 aa, Homo sapiens
  variant (1)...(75): Xaa = Any amino acid
XGFALRCRGRVHPDHHRVKPXMSXLLLSSVDRNNAMCLAEDQTAVLVSPRXPLGXSVSRLXXRSFKPTRPRWCVS

SEQ ID NO: 871 - protein, 67 aa, Homo sapiens
  variant (1)...(67): Xaa = Any amino acid
PRMMKTVPTTMPTRPTDNPRAQTTVSVSSDIGAGISGSQCFRRGLSSPQCSTLQSXLSSXEGRRVRX

SEQ ID NO: 872 - protein, 66 aa, Homo sapiens
  variant (1)...(66): Xaa = Any amino acid
XLTLLPSXEEXYDCKVEHWGLDKPLLKHWEPEIPAPMSELTETVVCALGLSVGLVGIVVGTVFIIR

SEQ ID NO: 873 - protein, 63 aa, Homo sapiens
  variant (1)...(63): Xaa = Any amino acid
GLCLVSVDARPTTDLYSERPRQLIVTGISDRCRQGGRRLGHLDVTFGTWEPEQQEPXELSGDP

SEQ ID NO: 874 - protein, 77 aa, Homo sapiens
VVGASQNIDRWLAWHQQKPGKAPNVLIYATSSLEEGVSLRFTGSGSGTQFNLTITSLQPDDSATYYCQHYSASLRSF

SEQ ID NO: 875 - protein, 97 aa, Homo sapiens
  variant (1)...(97): Xaa = Any amino acid
GSSTGGASAMAWTVLLLGLLSHCTDSVTSYVLTQTPSVSVAPGKTAKITCGGNNIGSHNVHWYYQKPGQAPVLIISFDNDRXSXISERFSGFNSGDM

SEQ ID NO: 876 - protein, 76 aa, Homo sapiens
KQHWWCLSHGLDRSPPRPPLSLHRFCDFLCVDSDTLSVSGPRKDGQDYLWGKQYWESQCTLVLPEARPGPCPNHLF

SEQ ID NO: 877 - protein, 94 aa, Homo sapiens
  variant (1)...(94): Xaa = Any amino acid
NEKALLLCNLVQNHSSGRMSSLVGPTQSFFMRESKTLGAVQIMNGLFHIALGGLLMIPAGIYAPICVTVWYPLWGGIMYIISGSLLXQRKKLQE

SEQ ID NO: 878 - protein, 60 aa, Homo sapiens
  variant (1)...(60): Xaa = Any amino acid
DFGGCPDYEWALPHCPGGSSDDPSRDLCTHLCDCVVPSLGRHYVYYFRITPAXTEKTPGS

SEQ ID NO: 879 - protein, 60 aa, Homo sapiens
IPAGIIRRPPRAMWKSPFIIWTAPKVLDSLMKKLCVGPTSEDILPEEWFWTRLHSNRAFS

SEQ ID NO: 880 - protein, 62 aa, Homo sapiens
SGNNIHNASPERVPHSHTDGCIDPCWDHQKTPQGNVEEPIHNLDSPQSLRFPHEEALRGAHQ

SEQ ID NO: 881 - protein, 71 aa, Homo sapiens [sequence omitted]

SEQ ID NO: 882 - protein, 73 aa, Homo sapiens
TKISLNIEVWNYFFDISANSLKLKDPQITVNSLKQGCTMASHAKDGTRRNTTAVNCEDNFHFFPRREQFTGQR

SEQ ID NO: 883 - protein, 118 aa, Homo sapiens
MRVPAQLLGLLLLWLPGAKCDIQMTQSPSTLSASVGDTVTISCRASQNIDRWLAWHQQKPGKAPNVLIYATSSLEEGVSLRFTGSGSGTQFNLTITSLQPDDSATYYCQHYSASLRSF

SEQ ID NO: 884 - protein, 66 aa, Homo sapiens
DIRGFAWFLLMPGQPPIYILRGPTTYCNCISDRCRQGGRRLGHLDVTFGTWEPEQQEPQELSGDPH

SEQ ID NO: 885 - protein, 109 aa, Homo sapiens
TLTINRIEAGDEADYYCQVWDLNNDHVVFGGGTKLAVLGQPKAAPSVTLFPPSSEELQANKATLVCLISDFYPGAVTVAWKADSSPVKAGVETTTPSKQSNNKYAAAAI

SEQ ID NO: 886 - protein, 85 aa, Homo sapiens
CSFCGTSTAQASGSDSCCRVLVVALFGGCGGLHSRLDGAAICLPGHCHGSRVEVTYETHQCGLVGLKLLRGGREQSDRGGSLGLT

SEQ ID NO: 887 - protein, 51 aa, Homo sapiens
VASVGLPLLRRQAQIAAAAYLLLLCLEGVVVSTPALTGLLSAFQATVTAPG

SEQ ID NO: 888 - protein, 118 aa, Homo sapiens
  variant (1)...(118): Xaa = Any amino acid
TLTINRVEAGDEADYYCQVWDLNNDHVVFGGGTKLAVLGQPKAAPSVTLFPPSSEELQANKATLVCLISDFYPGAXTVAWKADSSPVKAGVETTTPXKQSNNKYAASSYLSLTPEQWK

SEQ ID NO: 889 - protein, 80 aa, Homo sapiens
  variant (1)...(80): Xaa = Any amino acid
LPLLRRQAQIAAGRVLVVALFXGCGGLHSRLDGAAICLPGHCXGSRVEVTYETHQCGLVGLKLLRGGREQSDRGGSLGLT

SEQ ID NO: 890 - protein, 62 aa, Homo sapiens
LSLGLRKQHWWCLSHGLDRSPPRPPLSLHRLCDLLCVDSDTLSVSGPRKDGQDYLWGKQYWE

SEQ ID NO: 891 - protein, 97 aa, Homo sapiens; identical to SEQ ID NO: 725

SEQ ID NO: 892 - protein, 52 aa, Homo sapiens
SWPSFLGPLTLRVSESTHRRSQSLCSERGGRGGERSRPWLRHHQCCFLRPRL

SEQ ID NO: 893 - protein, 68 aa, Homo sapiens
  variant (1)...(68): Xaa = Any amino acid
TLTINRVEAGDEADYYCQVWDRNNDHVVFGGGTKLAVLGQPKAAPSXTLFPPSSEELQANKATLVCLI

SEQ ID NO: 894 - protein, 62 aa, Homo sapiens
  variant (1)...(62): Xaa = Any amino acid
DTPVWPCWLEAPQRRAGTEXPRGQPWADLGRPVWSLRRRRHGHYYDPTLDSNSRPHRRLRPC

SEQ ID NO: 895 - protein, 85 aa, Homo sapiens; identical to SEQ ID NO: 682

SEQ ID NO: 896 - protein, 123 aa, Homo sapiens
TLTINRVEAGDEADYYCQVWDHNNDHVVFGGGTKLAVLGQPKAAPSVTLFPPSSEELQANKATLVCLISDFYPGAVTVAWKADSSPVKAGVETTTPSKQSNNKYAASSYLSLTPEQWKSHRSY

SEQ ID NO: 897 - protein, 115 aa, Homo sapiens
PAQLLGLLLLWLPGAKCDIQMTQSPSTLSASVGDTVTISCRASQNIDRWLAWHQQKPGKAPNVLIYATSSLEEGVSLRFTGSGSGTQFNLTITSLQPDDSATYYCQHYSASLRSF

SEQ ID NO: 898 - protein, 63 aa, Homo sapiens
DIRGFARFLLMPGQPPIYILRGPTTYCNCISDRCRQGGRRLGHLDVTFGTWEPEQQEPQELSG

SEQ ID NO: 899 - protein, 85 aa, Homo sapiens; identical to SEQ ID NO: 682

SEQ ID NO: 900 - protein, 53 aa, Homo sapiens
DGQFGPSAEDDMVIITIPHLTVIVGLIAGFDPVDGQGGHVPRIEARPGPCPNH

SEQ ID NO: 901 - protein, 139 aa, Homo sapiens
MIRTGAWPGFNSGDMATLTINRVEAGDEADYYCQVWDRNNDHVVFGGGTKLAVLGQPKAAPSVTLFPPSSEELQANKATLVCLISDFYPGAVTVAWKADSSPVKAGVETTTPSKQSNNKYAASSYLSLTPEQWKSHRSY

SEQ ID NO: 902 - protein, 85 aa, Homo sapiens
  variant (1)...(85): Xaa = Any amino acid
VASVXLPLLRRQAQIAAGRVLVVALFGGCGGLHSRLDGAAICLPGHCHGSRVEVTYETHXXGLXGLKLXRGGREQSDRGGSLGLT

SEQ ID NO: 903 - protein, 107 aa, Homo sapiens
  variant (1)...(107): Xaa = Any amino acid
VKCGIXNNDXVXXGXGTKLAVLGQPKAAPSVTLFPPSSXELQAXKAXXVCLISDFYPGAVTVAWKADSSPVKAGVETTTPSKQSNNKYAASSYLSLTPEQWKXHRSY

SEQ ID NO: 904 - protein, 55 aa, Homo sapiens
  variant (1)...(55): Xaa = Any amino acid
VASXGLPLLRRQAQIAAGRVLVXALFGGCGXLHSXLDGAXICLPGHCHXSRXEVT

SEQ ID NO: 905 - protein, 55 aa, Homo sapiens
  variant (1)...(55): Xaa = Any amino acid
SDFXPGXVTVAWKADXSPVKXGVEXTTPSKQSXNKYAASSYLSLTPEQWKSXRSY

SEQ ID NO: 906 - protein, 101 aa, Homo sapiens
  variant (1)...(101): Xaa = Any amino acid
VASVXLPLLRRQAQIAAGRVLVVALFGGCGGLHSRLDGAAICLPXHCHGSRVEVTYETHQCGLVGLKLLXGXRXQSDRXGXLGLTXDGQXGPSAEXDMVII

SEQ ID NO: 907 - protein, 101 aa, Homo sapiens
  variant (1)...(101): Xaa = Any amino acid
NNDHVXFGGGTXLAVXGQPKXAXSVTLXPXSXEELQANKATLVCLISDFYPGAVTVXWKADSSPVKAGVETTTPSKQSNNKYAASSYLSLTPEQWKXHRSY

SEQ ID NO: 908 - protein, 57 aa, Homo sapiens
  variant (1)...(57): Xaa = Any amino acid
PRGQPWADLNLGLDPGSGSQLCDSRASAPRALGPSKVSXEVPPSDPLFPIPQEMEPT

SEQ ID NO: 909 - protein, 189 aa, Homo sapiens
  variant (1)...(189): Xaa = Any amino acid
VASVGLPLLRRQAQIAAGRVLVVALFGGCGGLHSRLDGAAICLPGHCHGSRVEVTYETHQCGLVGLKLLRGGREQSDRGGSLGLTSIWVWILALGPSSVIPEHQPRGHWVLLKSPXRCLPQTPCSQFPRRWNPRNPRVNLFRQEPRLRGPEQNKAXRPSLRLSDTQRDKQRERDRQTDXQTRLSRSFYL

SEQ ID NO: 910 - protein, 113 aa, Homo sapiens
  variant (1)...(113): Xaa = Any amino acid
ASSVXLSVCLSLSVCLFVCLTGADWVXKPCSVLAPSVWVLVGTGLPLGYVGSISWGIGNKGSEGGTXWETLEGPSALGADARESQSWDPEPGSRPRLRSAQGCPLGHSVPALL

SEQ ID NO: 911 - protein, 50 aa, Homo sapiens
  variant (1)...(50): Xaa = Any amino acid
QAQTGSXSLVLFWPPQSGFLSEQVYPWVTWVPSPGELGTRGLREAPXGRL

SEQ ID NO: 912 - protein, 85 aa, Homo sapiens
GQPKAAPSVTLFPPSSEELQANKATLVCLISDFYPGAVTVAWKADSSPVKAGVETTTPSKQSNNKYAASSYLSLTPEQWKSHRSY

SEQ ID NO: 913 - protein, 85 aa, Homo sapiens
  variant (1)...(85): Xaa = Any amino acid
VASVXLPLLRRQAQIAAGRVLVVALFGGCGGLHSRLDGAAICLPGHCHGSRVEVTYETHQCGLVGLKLLRGGREQSDRGGSLGLT

SEQ ID NO: 914 - protein, 111 aa, Homo sapiens
  variant (1)...(111): Xaa = Any amino acid
ADYYCXVWDXNNDHVVFGGGTKLAVLGQPKAAPSVTLFPPSSEELQANKATLVCLISDFYPGAVTVAWKADSSPVKAGVETTTPSKQSNNKYAASSYLSLTPEQWKXHRSY

SEQ ID NO: 915 - protein, 75 aa, Homo sapiens
  variant (1)...(75): Xaa = Any amino acid
VSPXLPPXXLMXXPSSEELQANKATLVCLIXDFYPGAVTVAWKAXSXPVKAXVXTXTXSKQSNNKYAXXSYLSPD

SEQ ID NO: 916 - protein, 54 aa, Homo sapiens
  variant (1)...(54): Xaa = Any amino acid
TLTINRVEAGDEADYYCQVWDRNNDHVVFGGXTKLAXLGQPXXAPXXTHXXALL

SEQ ID NO: 917 - protein, 109 aa, Homo sapiens
  variant (1)...(109): Xaa = Any amino acid
VRTQIAXXRVLVVALFGXCXGXHXRLDGXAXCLPGHCHGSRVEVXYETHQCGLVGLKLLRGGXXHEXXRGQXWADLXRPVWXXRRRRHGHYYDPTLDSNSRPHRRLRPC

SEQ ID NO: 918 - protein, 85 aa, Homo sapiens; identical to SEQ ID NO: 682

SEQ ID NO: 919 - protein, 52 aa, Homo sapiens
  variant (1)...(52): Xaa = Any amino acid
TINRXEAGDEXXYYCQVWDRNNDHXVFDGGTKTGRPRSAQGCPLGHSVPALL

SEQ ID NO: 920 - protein, 121 aa, Homo sapiens
  variant (1)...(121): Xaa = Any amino acid
PSTGXKPAMXPXITVKCGIVIMTMXSSTEGPKLAVLGQPKAAPSVTLFPPSSEELQANKATLVCLISDFYPGAVTVAWKADSSPVKAGVETTTPSKQSNNKYAASSYLSLTPEQWKSHRSY

SEQ ID NO: 921 - protein, 109 aa, Homo sapiens
  variant (1)...(109): Xaa = Any amino acid
VASVXLPLLRRXAQIAAGRVLVVALFGGCGGLHSRLDGAAICLPGHCHGSRVEVTYETHQCGLVGLKLLRGGREXSDRGGXLXLTXDGQFGPSAEDDMVIITIPHLTVI

SEQ ID NO: 922 - protein, 109 aa, Homo sapiens
  variant (1)...(109): Xaa = Any amino acid
YYCQVWDRNNDHVVFGGGTKLAVXGQXKXAPSVTXFPPSSEELQANKATLVCLISDFYPGAVTVAWKADSSPVKAGVETTTPSKQSNNKYAASSYLSXTPEQWKXHRSY

SEQ ID NO: 923 - protein, 83 aa, Homo sapiens
  variant (1)...(83): Xaa = Any amino acid
SVGLPLLRRXAXIAAGRVLVVAXXGGCGGXHSRLDGAAICLPGHCHGSRVEVTYETHXCGLVGLKLLXGGREQSDRGGSLGLT

SEQ ID NO: 924 - protein, 122 aa, Homo sapiens
  variant (1)...(122): Xaa = Any amino acid
ATLTINRVEAGDEADYYCQVWDRNNDHVVFGGGTKLAVLGQPKAAPSVTLFPPSXEELQANKATXVCLISDFYPGAVTVAWKADSSPVKAGVXTTTPSXXSNNKYAASSYXSXTPEQWKSHR

SEQ ID NO: 925 - protein, 84 aa, Homo sapiens
  variant (1)...(84): Xaa = Any amino acid
TLTINRVEAGDEADYYCQVWDRNNDHVXFXGGTKLAVLGQPKAAPSVTLFPPSSEELQANKATLVCLISDFYPGAVTVAWKADS

SEQ ID NO: 926 - protein, 121 aa, Homo sapiens
  variant (1)...(121): Xaa = Any amino acid
GHSMDMRVPAQLLGLLLLWLPGAKCDIQMTQSPSTLSASVGDTVTISXRASXNIDRWLAWHQQKPGKAPNVLIYATSSLEEGVSLRFTGSGSGTQFNLTITSLQPDDSATYYCQHYXASLX

SEQ ID NO: 927 - protein, 71 aa, Homo sapiens
  variant (1)...(71): Xaa = Any amino acid
DIRGFAWFLLMPGQPPIYIXRGPXTYCNCISDRCRQGGRRLGHLDVTFGTWEPEQQEPQELSGDPHVHAVS

SEQ ID NO: 928 - protein, 150 aa, Homo sapiens
KMESLNFIRAHTPYINIYNCEPANPSEKNSPSTQYCYSIQSLFLGILSVMLIFAFFQELVIAGIVENEWKRTCSRPKSNIVLLSAEEKKEQTIEIKEEVVGLTETSSQPKNEEDIEIIPIQEEEEEETETNFPEPPQDQESSPIENDSSP

SEQ ID NO: 929 - protein, 53 aa, Homo sapiens [sequence omitted]

SEQ ID NO: 930 - protein, 101 aa, Homo sapiens
SWGGSGKFVSVSSSSSSWIGIISMSSSFFGWEDVSVSPTTSSFISIVCSFFSSADRRTMLDLGLEHVLFHSFSTMPAITSSWKKAKISITDKMPKNRDCML

SEQ ID NO: 931 - protein, 123 aa, Homo sapiens
TLTINRVEAGDEADYYCQVWDRNYDHVVFGGGTKLAVLGQPKAAPSVTLFPPSSEELQANKATLVCLISDFYPGAVTVAWKADSSPVKAGVETTTPSKQSNNKYAASSYLSLTPEQWKSHRSY

SEQ ID NO: 932 - protein, 85 aa, Homo sapiens; identical to SEQ ID NO: 682

SEQ ID NO: 933 - protein, 150 aa, Homo sapiens; identical to SEQ ID NO: 928

SEQ ID NO: 934 - protein, 101 aa, Homo sapiens; identical to SEQ ID NO: 930

SEQ ID NO: 935 - protein, 61 aa, Homo sapiens [sequence omitted]

SEQ ID NO: 936 - protein, 114 aa, Homo sapiens
  variant (1)...(114): Xaa = Any amino acid
IPPKLCSRTCENLRDCTCQEKVVSFQFEVSIQQDICGPLGLRLIAGDTLRVYRLSGFCLGQQDKGFQKEYLSLGRQPLXHLFFXLFIYFFIYSYLCRLCDLLCVDSDTLSVSGP

SEQ ID NO: 937 - protein, 64 aa, Homo sapiens
  variant (1)...(64): Xaa = Any amino acid
GFTDSLDFVWDSRTRDFKRNTFHLEGNLSXIYSFXYLFIFLFILIFADSVTSYVLTQTPSVSVA

SEQ ID NO: 938 - protein, 82 aa, Homo sapiens [sequence omitted]

SEQ ID NO: 939 - protein, 88 aa, Homo sapiens
  variant (1)...(88): Xaa = Any amino acid
EPEGLHLPRESSEFSVRSLHTTGHLWATGATADCRGYPEGLQTLWILSGTAGQGISKGIPFTWKATSLXFILLXIYLFFYLFLSLQTL

SEQ ID NO: 940 - protein, 66 aa, Homo sapiens
KLTTFSWQVQSLRFSQVLEHSLGGIQPHQPPTLHQGHEHPAHHRKGPPELRIKDTLDPEALGWAGW

SEQ ID NO: 941 - protein, 136 aa, Homo sapiens
  variant (1)...(136): Xaa = Any amino acid
IXKRINXREVAFQVKGIPFEIPCPAVPDKIQRVCKPSGYPLQSAVAPVAHKCPVVWRLRTENSLLSLGRCSPSGSHKSLSTVWGEFSPTSLPPCTRVMSILPTTGRALLSSELRTRWTQKPWAGQVGETLGGSPVQ

SEQ ID NO: 942 - protein, 84 aa, Homo sapiens
  variant (1)...(84): Xaa = Any amino acid
TLTINRVEAGDEADYYCQVWDRNNDHVVFGGGTKLAVLGQPKAAPSVTLFPPSSEELQANKATLVCLISDFYPXAVTVAWKAXS

SEQ ID NO: 943 - protein, 85 aa, Homo sapiens
  variant (1)...(85): Xaa = Any amino acid
VASVGLPLLXRXAQIAAGRVLVVALFGGCGGLHSRLDGAAICLPGHCHGSRVEVTYETHQCGLVGLKLLIGGRXQXDRXGSLXLT

SEQ ID NO: 944 - protein, 121 aa, Homo sapiens
  variant (1)...(121): Xaa = Any amino acid
TINRVEAGXEADYYCQVWDRNNDHVVFGGGTKLAVLGQXKAAXSVXLXPPSYEELQANKATLVCLISDFYPGAVTVAWKADSSPVKAGVETTTPSKQSNNKYAASSYLSXTXEQWKSHRSY

SEQ ID NO: 945 - protein, 119 aa, Homo sapiens
  variant (1)...(119): Xaa = Any amino acid
VASVGLPLLRRQAQIAAGRVLVVALFGGCGGLHSRLDGAAICLPGHCHGSRVEVTYETHQCGLVGLKLLRGGREQSDRGGSLGLTXXGQFGPSAXDDMVHYYDPTLDSNSRPHRRLXPC

SEQ ID NO: 946 - protein, 121 aa, Homo sapiens
  variant (1)...(121): Xaa = Any amino acid
PSTGXKPAMRPTITVKCGIVIMNHVVXGGGTKLAXXGQPKAAPSVTLFPPSSEELQANKATLVCLISDFYPGAVTVAWKADSSPVKAGVETTTPSKQSNNKYAASSYLSLTPEQWKSHRSY

SEQ ID NO: 947 - protein, 56 aa, Homo sapiens
  variant (1)...(56): Xaa = Any amino acid
TATLTINRXEAGDEADYYCQVWDRNNEPCRLXRRDQTGRXRSAQGCPLGHSVPALL

SEQ ID NO: 948 - protein, 62 aa, Homo sapiens
  variant (1)...(62): Xaa = Any amino acid
TLTINRVEAGDEADYYCQVWDRNNDHVVFXGGTKLAVLGXPKAAPSVTLFPPSSXELQXNKA

SEQ ID NO: 949 - protein, 101 aa, Homo sapiens
  variant (1)...(101): Xaa = Any amino acid
VASVXLPLLXRQAQIAAGRVLVVALFGGCGGLHSRLDGAAICLPGHCHGSRVEVTYETHXCGLVGLKLLRGGREXXDRXGSLGLTXDGQFGSSAXXDMVNY

SEQ ID NO: 950 - protein, 102 aa, Homo sapiens
  variant (1)...(102): Xaa = Any amino acid
LIIDHVXXGGGTKLAVXGQPKAAXSVXXFPPSSEELQANKATXVCLISDFYPGAVTVAWKADSSPVKAGVETTTPSKQSNNKYAASSYLSLTXEQWKXHRSY

SEQ ID NO: 951 - protein, 67 aa, Homo sapiens
  variant (1)...(67): Xaa = Any amino acid
VASVXLPLLRRQAQIAAGRVLVVALFGGCGGLHSRLDGAAICLPGHCHGSRVEVTYETHQCGLXGLK

SEQ ID NO: 952 - protein, 67 aa, Homo sapiens
  variant (1)...(67): Xaa = Any amino acid
LQAXKATLVCLISDFYPGAVTVAWKADSSPVKAGVETTTPSKQSNNKYAASSYLSLTPEQWKXHRSY

SEQ ID NO: 953 - protein, 83 aa, Homo sapiens
  variant (1)...(83): Xaa = Any amino acid
TLTINRVEAGDEADYYCQVWDRNNDHVVFGGGTKLAVLGQPKAAPSVTLFPPSSEELQANKATLVCLISDFLPGSRDXGLXGX

SEQ ID NO: 954 - protein, 58 aa, Homo sapiens
  variant (1)...(58): Xaa = Any amino acid
LRKQHWWCLSHGLDRSPPRPPLSLHRLCDLLCVDSDTLSVSGPXKDGQDYLWGKQYWE

SEQ ID NO: 955 - protein, 77 aa, Homo sapiens
  variant (1)...(77): Xaa = Any amino acid
GSSTGGASAMAWTVLLLGLLSHCTDSVTSYVLTQTPSVSVAPXKTAKITCGGNNIGSNNVHWYYQKXGXAPVPNHLF

SEQ ID NO: 956 - protein, 55 aa, Homo sapiens
  variant (1)...(55): Xaa = Any amino acid
LRHPQCQWPXERRPRLPVGETILGVTMYTGITRSXAXPLFLIISFDNDRXSGISE

SEQ ID NO: 957 - protein, 69 aa, Homo sapiens
  variant (1)...(69): Xaa = Any amino acid
VASXGLPLLRRQAQIAAGRVLVVTLFGGCGGLHSRLDGAAICLPGHCHGSRVEVTYETHXCGLVGLKLL

SEQ ID NO: 958 - protein, 69 aa, Homo sapiens
  variant (1)...(69): Xaa = Any amino acid
EELQANKATXVCLISDFYPGAVTVAWKADSSPVKAGVETTTPSKQSNNKYAASSYLSLTPEQWKSXRSY

SEQ ID NO: 959 - protein, 97 aa, Homo sapiens; identical to SEQ ID NO: 725

SEQ ID NO: 960 - protein, 56 aa, Homo sapiens
KQHWWCLGHGLDRSPPRPPLSLHRLCDLLCVDSDTLSVSGPRKDGQDYLWGKQYWE

SEQ ID NO: 961 - protein, 87 aa, Homo sapiens
GSSTGGASAMAWTVLLPGLLSHCTDSVTSYVLTQTPSVSVAPGKTAKITCGGNNIGSYSVHWYYQKPGQAPVLIISFDNDRPPGQVQ

SEQ ID NO: 962 - protein, 63 aa, Homo sapiens
  variant (1)...(63): Xaa = Any amino acid
SSLLITTGRPGRSNEDTPQLYVACGRGPRSSLRVLRHGLEVSEMAVSELPGXPKRCLDSASTH

SEQ ID NO: 963 - protein, 76 aa, Homo sapiens
KQHWWCLSHGLDRSPPRPPLSLHRLCDLLCVDSDTLSVSGPRKDGQDYLWGKQYWELQCTLVLPKARPGPCPNHLF

SEQ ID NO: 964 - protein, 71 aa, Homo sapiens
  variant (1)...(71): Xaa = Any amino acid
CRHQTHLQCVDALSRQRLGXPGSSETAISDTSSPCLRTLRDDRGPLPQATYNCGVSSLDLPGRPVVIKRDD

SEQ ID NO: 965 - protein, 89 aa, Homo sapiens
  variant (1)...(89): Xaa = Any amino acid
GGIHERHNDVGIKLIFNVSTHCPDSVWGXQVAQKQPFLTPQVHVLGLSEMIGVPYHRPHTTVEYLHWTCPGGRSLSKEMIRTGAWPGFW

SEQ ID NO: 966 - protein, 66 aa, Homo sapiens
  variant (1)...(66): Xaa = Any amino acid
TLTINRVEAGDEADYYCQVWDRNNDHVVFGGXTKLAVLGQPKAAPSVTLFPPSSEELQANKATLVC

SEQ ID NO: 967 - protein, 51 aa, Homo sapiens
  variant (1)...(51): Xaa = Any amino acid
VAXAGLPLLRRQAQIAAGRVLVVALFGGCGGLHSRLDGAAICLPGHCHGSR

SEQ ID NO: 968 - protein, 51 aa, Homo sapiens
  variant (1)...(51): Xaa = Any amino acid
PGAVTVAWKADSSPVKAGVETTTPSKQSNNKYAASSYLSLTPEQWKSGXSY

SEQ ID NO: 969 - protein, 52 aa, Homo sapiens
  variant (1)...(52): Xaa = Any amino acid
TLTINRVEAGDEADYYCQVWDLNDDHVVFGGXTKLAVLGQPKAAPSVTLXPP

SEQ ID NO: 970 - protein, 66 aa, Homo sapiens
  variant (1)...(66): Xaa = Any amino acid
TLTINRVEAGDEADYYCQVWDRNNDHVVFGGXTKLAVLGQXKAXPSVTLFPPSXXELQANKATLVC

SEQ ID NO: 971 - protein, 56 aa, Homo sapiens
  variant (1)...(56): Xaa = Any amino acid
VASXXLPLLRRQAXIAAGRVLVVALFGGCGGLHSRLDGAAICLPGHCHGSRVEVTL

SEQ ID NO: 972 - protein, 55 aa, Homo sapiens
  variant (1)...(55): Xaa = Any amino acid
SDFYPGAVTVAWKADSSPVKAGVETTTPSKQSNNKYAASSYXSLTPEQWKXXRSY

SEQ ID NO: 973 - protein, 101 aa, Homo sapiens; identical to SEQ ID NO: 930

SEQ ID NO: 974 - protein, 150 aa, Homo sapiens; identical to SEQ ID NO: 928

SEQ ID NO: 975 - protein, 53 aa, Homo sapiens
  variant (1)...(53): Xaa = Any amino acid
VASXGLPLLRRQAQIAAGRVLVVALFGGCGGLHSRLDGAAICLPGHCHGSRVE

SEQ ID NO: 976 - protein, 53 aa, Homo sapiens
  variant (1)...(53): Xaa = Any amino acid
FYPGAVTVAWKADSSPVKAGVETTTPSKQSNNKYAASSYLSLTPEQWKSXRSY

SEQ ID NO: 977 - protein, 97 aa, Homo sapiens
  variant (1)...(97): Xaa = Any amino acid
TLTINRVEAGDEADYYCQVWDHNNDHVVFGGGTKLAVLGQPKAAPSVTLFPPSSEELQANKATLVCLISDFYPGAVTXXWKAXXSPVXAGVXTTTPS

SEQ ID NO: 978 - protein, 59 aa, Homo sapiens
  variant (1)...(59): Xaa = Any amino acid
GGCGGXHSRXDGAXXCLPXXCHGSRVEVTYETHQCGLVGLKLLRGGREQSDRGGSLGLT

SEQ ID NO: 979 - protein, 83 aa, Homo sapiens
  variant (1)...(83): Xaa = Any amino acid
TLTINRVXAGDEADYYCQVWDRNNDHVVFGGGTKLAVLGQPKAAPSVTLXPXSXXELQANKATLVCLISDFYPGAVTVAWKAX

SEQ ID NO: 980 - protein, 60 aa, Homo sapiens
  variant (1)...(60): Xaa = Any amino acid
LEGVVVSTPALTGLLXCLPGHCHGSRVEVTYETHQCGLVGLKLXXGXRXQSDRGGSLGLT

SEQ ID NO: 981 - protein, 123 aa, Homo sapiens
  variant (1)...(123): Xaa = Any amino acid
VASVGLPLFRRQAQIAAGRVLVVALFGGCGGLHSRLDGAAICLPGHCHGSRVEVTYETHQCGLVGLKLLRGGREQSDRGGSLGLTXDGQFGPSTEDDMVIITIPHLTVIVGLIAGFDPVDGQG

SEQ ID NO: 982 - protein, 123 aa, Homo sapiens
  variant (1)...(123): Xaa = Any amino acid
TLTINRVEAGDEADYYCQVWDRNNDHVVFGGGTKLAVXGQPKAAPSVTLFPPSSEELQANKATLVCLISDFYPGAVTVAWKADSSPVKAGVETTTPSKQSNNKYAASSYLSLTPEQWKSHRSY

SEQ ID NO: 983 - protein, 150 aa, Homo sapiens
  variant (1)...(150): Xaa = Any amino acid
KMESLNFIRAHTPYINIYNCEPANPSEKNSPSTQYCYSIQSLFLGILSVMLIFAFFQELVIAGIVENEWKRTCSRPKSNIVLLSAEEKKEQTIEIKEEVVGLTETSSQPKNEEDIEIIPIQEEEEEETETNFPEPPQDQESSXIENDSSP

SEQ ID NO: 984 - protein, 101 aa, Homo sapiens; identical to SEQ ID NO: 930

SEQ ID NO: 985 - protein, 122 aa, Homo sapiens
SMDMRVPAQLLGLLLLWLPGAKCDIQMTQSPSTLSASVGDTVTISCRASQNIDRWLAWHQQKPGKAPNVLIYATSSLEEGVSLRFTGSGSGTQFNLTITSLQPDDSATYYCATLFCISSQFW

SEQ ID NO: 986 - protein, 69 aa, Homo sapiens
DIRGFAWFLLMPGQPPIYILRGPTTYCNCISDRCRQGGRRLGHLDVTFGTWEPEQQEPQELSGDPHVHA

SEQ ID NO: 987 - protein, 118 aa, Homo sapiens
  variant (1)...(118): Xaa = Any amino acid
TLTINRVEAGDEADYYCQVWDRNNDHVVFGGGTKLAVLGQPKAAPSVTLFPPSSXXLXANKATLVCLISDFYPGAVTVAWKADSSPVKAGVETTTPSKQSNNKYXASXYLSLTPEQWK

SEQ ID NO: 988 - protein, 80 aa, Homo sapiens
  variant (1)...(80): Xaa = Any amino acid
LPLLRRQAQIXAGXVLVVALFGGCGGLHSRLDGAAICLPGHCHGSRVEVTYETHQCGLVGXKXXRGGREQSDRGGSLGLT

SEQ ID NO: 989 - protein, 63 aa, Homo sapiens
  variant (1)...(63): Xaa = Any amino acid
LLAAYLLLLCXEGVXVSTPALXGLLXXFQSHXHGSRVEVTYETHXCGLVXXKLLRGGREQSDR

SEQ ID NO: 990 - protein, 56 aa, Homo sapiens
  variant (1)...(56): Xaa = Any amino acid
VASVGLPLLRRQAQIAAGRVLVVALXXGCXXLHSRLXXAAIXLPEPXSRLPGRSHL

SEQ ID NO: 991 - protein, 123 aa, Homo sapiens
TLTINRVEAGDEANYYCQVWDRNNDHVVFGGGTKLAVLGQPKAAPSVTLFPPSSEELQANKATLVCLISDFYPGAVTVAWKADSSPVKAGVETTTPSKQSNNKYAASSYLSLTPEQWKSHRSY

SEQ ID NO: 992 - protein, 85 aa, Homo sapiens
VASVGLPLLRRQAQIAAGRVLVVALFGGCGGLHSRLDGAAICLPGHCHGSRVEVTYEAHQCGLVGLKLLRGGREQSDRGGSLGLT

SEQ ID NO: 993 - protein, 123 aa, Homo sapiens; identical to SEQ ID NO: 683

SEQ ID NO: 994 - protein, 85 aa, Homo sapiens; identical to SEQ ID NO: 682

SEQ ID NO: 995 - protein, 88 aa, Homo sapiens
TVINYRPHNMRPEDRMFHIRAVILRALSLAFLLSLRGAGAIKADHVSTYAAFVQTHRPTGEFMFEFDEDEMFYVDLDKKETVWHLEEF

SEQ ID NO: 996 - protein, 55 aa, Homo sapiens; identical to SEQ ID NO: 791

SEQ ID NO: 997 - protein, 83 aa, Homo sapiens
SVGLPLLRRQAQIAAGRVLVVALFGGCGGLHSRLDGAAICLPGHCHGSRVEVTYETHQCGLVGLKLLRGGREQSDRGGSLGLT

SEQ ID NO: 998 - protein, 121 aa, Homo sapiens
TLTINRVEAGDKADYYCQVWDLNNDHVVFGGGTKLAVLGQPKAAPSVTLFPPSSEELQANKATLVCLISDFYPGAVTVAWKADSSPVKAGVETTTPSKQSNNKYAASSYLSLTPEQWKSHR

SEQ ID NO: 999 - protein, 56 aa, Homo sapiens; identical to SEQ ID NO: 754

SEQ ID NO: 1000 - protein, 96 aa, Homo sapiens
SSTGGASAMAWTVLLLGLLSHCTDSVTSYVLTQTPSVSVAPGKTAKITCGGNNIGSNNVHWYYQKPGQAPVLIISFDNDRPSGISERFSGFNSGDM

SEQ ID NO: 1001 - protein, 81 aa, Homo sapiens
LGLLSHCTDSVTSYVLTQTPSVSVAPGKTAKITCGGNNIGSNNVHWYYQKPGRAPVLIISFDNDWPSGISERFSGFNSGDM

SEQ ID NO: 1002 - protein, 170 aa, Homo sapiens
QAFSFEAQGGLANIAILNNNLNTLIQRSNHTQATNDPPEVTVFPKEPVELGQPNTLICHIDKFFPPVLNVTWLCNGELVTEGVAESLFLPRTDYSFHKFHYLTFVPSAEDFYDCRVEHWGLDQPLLKHWEAQEPIQMPETTETVLCALGLVLGLVGIIVGTVLIIKSLRS

SEQ ID NO: 1003 - protein, 61 aa, Homo sapiens
PCFPRSLWSWASPTPSSATLTSSSHQCSTSRGCATGSWSLRVSLRASSCPEQITASTSSIT

SEQ ID NO: 1004 - protein, 51 aa, Homo sapiens [sequence omitted]

SEQ ID NO: 1005 - protein, 59 aa, Homo sapiens
PERRDFMMRTVPTMMPTRPSTRPRAQSTVSVVSGIWIGSWASQCLRSGWSKPQCSTLQS

SEQ ID NO: 1006 - protein, 61 aa, Homo sapiens
SVLGRKRLSATPSVTSSPLHSHVTLSTGGKNLSMWQMRVLGWPSSTGSLGNTVTSGGSLVA

SEQ ID NO: 1007 - protein, 106 aa, Homo sapiens
GHKGQVMELVEAVICSGQEEALSDTLSDQLPVAQPRDVEHWWEELVNVADEGVGLAQLHRLLGKHGHLRGIVGGLSVVGTLDQGIQVVVQYSNVSQPALSLKGKGL

SEQ ID NO: 1008 - protein, 59 aa, Homo sapiens
SVGLPLLRRQAQIAAGRVLVVALFGGCGGLHSRLDGAAICLPGHCHGSRVEVTYETHQC

SEQ ID NO: 1009 - protein, 59 aa, Homo sapiens
TLVCLISDFYPGAVTVAWKADSSPVKAGVETTTPSKQSNNKYAASSYLSLTPEQWKSHR

SEQ ID NO: 1010 - protein, 85 aa, Homo sapiens; identical to SEQ ID NO: 682

SEQ ID NO: 1011 - protein, 123 aa, Homo sapiens; identical to SEQ ID NO: 683

SEQ ID NO: 1012 - protein, 83 aa, Homo sapiens; identical to SEQ ID NO: 997

SEQ ID NO: 1013 - protein, 83 aa, Homo sapiens
GQPKAAPSVTLFPPSSEELQANKATLVCLISDFYPGAVTVAWKADSSPVKAGVETTTPSKQSNNKYAASSYLSLTPEQWKSHR

SEQ ID NO: 1014 - protein, 55 aa, Homo sapiens
PRMMKTVPTTMPTRPTDNPRAQTTVSVSSDIGAGISGSQCFRRGLSSPQCSTLQS

SEQ ID NO: 1015 - protein, 50 aa, Homo sapiens
  variant (1)...(50): Xaa = Any amino acid
PSVTGDLENTVTSGTSLVAAVELERLIRLFKLCFXTAMFVSANCGSNLNC

SEQ ID NO: 1016 - protein, 59 aa, Homo sapiens
  variant (1)...(59): Xaa = Any amino acid
HRGWNLRLPVFQKRLVQSPVLHLAVITLLSRREEGEVTDLEEGMITLGEEAGLXNTFCD

SEQ ID NO: 1017 - protein, 76 aa, Homo sapiens
  variant (1)...(76): Xaa = Any amino acid
VPIAXPCDVDHRRKDVVHKTDEDVGLTQCHGRLGKHCDLRNLIGSSGRVGAFNQTVQVMFXDSDVCQCKLRVKSKL

SEQ ID NO: 1018 - protein, 52 aa, Homo sapiens
  variant (1)...(52): Xaa = Any amino acid
AMGTQSQKVFXRPASSPRVIIPSSRSVTSPSSLLLRRVMTARWSTGDWTSLF

SEQ ID NO: 1019 - protein, 165 aa, Homo sapiens
  variant (1)...(165): Xaa = Any amino acid
QFRFDPQFALTNIAVXKHNLNSLIKRSNSTAATNEVPEVTVFSKSPVTLGQPNILICLVDNIFPPVVNITWXSNGHSVTEGVXETSFLSKSDHSFFKISYLTLLPSAEESYDCKVEHWGLDKPLLKHWEPEIPAPMSELTETVVCALGLSVGLVGIVVGTVFIIR

SEQ ID NO: 1020 - protein, 85 aa, Homo sapiens; identical to SEQ ID NO: 682

SEQ ID NO: 1021 - protein, 123 aa, Homo sapiens; identical to SEQ ID NO: 896

SEQ ID NO: 1022 - protein, 50 aa, Homo sapiens
  variant (1)...(50): Xaa = Any amino acid
LLAAYLLLLCLEGVXVSTPALTGLLSAFQATVXAPGXKSLXRHTXVALXA

SEQ ID NO: 1023 - protein, 80 aa, Homo sapiens
  variant (1)...(80): Xaa = Any amino acid
VASXGLPLLRRQAQIAAGRVLVVALFGGCXGLHSRLDGAAICLPGHCHXSRVXVTXETHXCGLXGLXLLIGGREQXDRGG

SEQ ID NO: 1024 - protein, 80 aa, Homo sapiens
  variant (1)...(80): Xaa = Any amino acid
APSVXLFPPSYEEXQAXKATXVCLXSDXYPGXVTVAWKADSSPVKAGVETXTPSKQSNNKYAASSYLSLTPEQWKSXRSY

SEQ ID NO: 1025 - protein, 101 aa, Homo sapiens
  variant (1)...(101): Xaa = Any amino acid
TLTINRVEAGDEADYYCQVWDRNNDHVVFGGGTKLAVLGQPKAAPSVTLFPPSSEELQANKATLVCLISDFYPGAVTVAWKADSXPVKAGVETTTPSKQXN

SEQ ID NO: 1026 - protein, 63 aa, Homo sapiens
  variant (1)...(63): Xaa = Any amino acid
VXLFGGCGGLHSRLDGXAICLPGHCHGSRVEVTYETHQCGLVGLKLLRGGREQSDRGGSLGLT

SEQ ID NO: 1027 - protein, 75 aa, Homo sapiens
GCLSQHIGGHRVTFSWQVQSLRFSQVLEHSLGGIQPHQPPTLHQGHEHPAHHRKGPPELRIKDTLDPEALGWAGW

SEQ ID NO: 1028 - protein, 77 aa, Homo sapiens
EVTELLSLGRCSPSGSHKSLSTVWGEFSPTSLPPCTRVMSILPTTGRALLSSELRTRWTQKPWAGQVGETLGGSPVQ

SEQ ID NO: 1029 - protein, 82 aa, Homo sapiens [sequence omitted]

SEQ ID NO: 1030 - protein, 84 aa, Homo sapiens
EPEGLHLPRESNSVTSYVLTQTPSVSVAPGKTAKITCGGNNIGSNNVHWYYQKPGQAPVLIISFDNDRPSGISERFSGFNSGDM

SEQ ID NO: 1031 - protein, 60 aa, Homo sapiens
EAALVVPQPWPGPFSSSASSLTAQVIPPGSHQPAQPKASGSSVSLILSSGGPFLWWAGCS

SEQ ID NO: 1032 - protein, 71 aa, Homo sapiens
GEVSRSAARGGCPEPQGWSWGLSVLPQAFQVQKALWGLGLCQGKESCLGGGREVREVTHVALEPAKSNVSM

SEQ ID NO: 1033 - protein, 77 aa, Homo sapiens
CPKRASPGALGLGLREERSVGQRPGVAALSPRAGPGVCQSFPRLSRSRRLCGVWGCVRVRKAALVEEEKSERSHMWP

SEQ ID NO: 1034 - protein, 54 aa, Homo sapiens
  variant (1)...(54): Xaa = Any amino acid
PESSRYPSLLASGSGSRGGGSSQSXVSSMPWGLCRTGRLEEPLCLDRFCRLPHL

SEQ ID NO: 1035 - protein, 50 aa, Homo sapiens
LLFLHQGSFPYPDTAPDPTKPSGPGKPGEGLTDPRTSPGAQGSHPGPLTD

SEQ ID NO: 1036 - protein, 69 aa, Homo sapiens
LEPPPRLPLPEARREGYLEDSGHLLLAQGLKDAGPPNLTLRLPATFSPGFCRLASLPLLSHADVGLSRF

SEQ ID NO: 1037 - protein, 61 aa, Homo sapiens
  variant (1)...(61): Xaa = Any amino acid
SGGACRTCPGTVAPQACLSCRVPMAWSLHXTDWSPLPDSHFQKLGGRDTWKTPVTSFLLRA

SEQ ID NO: 1038 - protein, 59 aa, Homo sapiens
KMLVLPTSLSDSLPPFPLGSAVLPHFPSCHMLTLDLAGSKATCVTSLTSLPPPRQLSLP

SEQ ID NO: 1039 - protein, 56 aa, Homo sapiens
HSPRPHKAFWTWKAWGRTDRPQDQPWGSGQPPRAADRLTSPHGGPAPKPQGWPVWD

SEQ ID NO: 1040 - protein, 85 aa, Homo sapiens; identical to SEQ ID NO: 682

SEQ ID NO: 1041 - protein, 123 aa, Homo sapiens; identical to SEQ ID NO: 683

SEQ ID NO: 1042 - protein, 96 aa, Homo sapiens
  variant (1)...(96): Xaa = Any amino acid
VASVGLPLLRRQAQIAAGRVLVVALFGGCGGLHSRLDGAAICLPGHCHGSRVEVTYETHQCGLVGLKLLRGGREQSDRGGSLGLTXDGQFXPSAED

SEQ ID NO: 1043 - protein, 96 aa, Homo sapiens
  variant (1)...(96): Xaa = Any amino acid
VFGGGXKLAVXGQPKAAPSVTLFPPSSEELQANKATLVCLISDFYPGAVTVAWKADSSPVKAGVETTTPSKQSNNKYAASSYLSLTPEQWKSHRSY

SEQ ID NO: 1044 - protein, 85 aa, Homo sapiens
  variant (1)...(85): Xaa = Any amino acid
VASVGLPLLRRQAQIAAGRVLVVALFGGCGGLHSRLDGAAICLPGHCHGSRVEVTYETHXCGLVGLKLLXGGREQSDRGGSLGLT

SEQ ID NO: 1045 - protein, 90 aa, Homo sapiens
  variant (1)...(90): Xaa = Any amino acid
KLAVLGQPKAAPSVTLFPPSXEELQANKATXVCLISDFYPGAVTVAWKADSSPVKAGVETTTPSKQSNNKYAASSYLSLTPEQWKSHRSY

SEQ ID NO: 1046 - protein, 124 aa, Homo sapiens; identical to SEQ ID NO: 814

SEQ ID NO: 1047 - protein, 71 aa, Homo sapiens [sequence omitted]

SEQ ID NO: 1048 - protein, 95 aa, Homo sapiens
  variant (1)...(95): Xaa = Any amino acid
TLTINRVEAGDEADYYCQVWDRNNDHVVFGGGTKLAVLGQPKAAPSVTLFPPSSEELQANKATLVCLISDFYPGAVTVAWKAXSXPXKAGVETTT

SEQ ID NO: 1049 - protein, 57 aa, Homo sapiens
  variant (1)...(57): Xaa = Any amino acid
CGGLHSRLXGXAXCLPGHCHGSRVEVTYETHQCGLVGLKLLRGGREQSDRGGSLGLT

SEQ ID NO: 1050 - protein, 98 aa, Homo sapiens
TLTINRVEAGDEADYYCQVWDRNNDHVVFGGGTKLAVLGQPKAAPSVTLFPPSSEELQANKATLACLISDFYPGAVTVAWKADSSPVKAGVETTTPSK

SEQ ID NO: 1051 - protein, 60 aa, Homo sapiens
FGGCGGLHSRLDGAAICLPGHCHGSRVEVTYETRQCGLVGLKLLRGGREQSDRGGSLGLT

SEQ ID NO: 1052 - protein, 60 aa, Homo sapiens
SWPSFLGPLTLRVSESTHRRSQTLCSERGGRGGERSRPWLRHHQCCFLRQSYPCLKWYLL

SEQ ID NO: 1053 - protein, 80 aa, Homo sapiens
LCLRKQHWWCLSHGLDRSPPRPPLSLHRVCDLLCVDSDTLSVSGPRKDGQDYLWGKQYWELQCTLVLPKARPGPCPNHLF

SEQ ID NO: 1054 - protein, 97 aa, Homo sapiens
GSSTGGASAMAWTVLLLGLLSHCTESVTSYVLTQTPSVSVAPGKTAKITCGGNNIGSYSVHWYYQKPGQAPVLIISFDNDRPSGISERFSGFNSGDM

SEQ ID NO: 1055 - protein, 97 aa, Homo sapiens; identical to SEQ ID NO: 725

SEQ ID NO: 1056 - protein, 56 aa, Homo sapiens; identical to SEQ ID NO: 754

SEQ ID NO: 1057 - protein, 64 aa, Homo sapiens
  variant (1)...(64): Xaa = Any amino acid
EPXPLRPIEEMTLRRRVLQETWXGVPSQSQWGAXHHXCHXQNXHAGTSREPXTHHAGXQDRTRG

SEQ ID NO: 1058 - protein, 53 aa, Homo sapiens
  variant (1)...(53): Xaa = Any amino acid
HSDVEYSKKRXLVSPAKASGELXTIXVTXRTXMQEPPGSXRHTMLXNRTGPGA

SEQ ID NO: 1059 - protein, 51 aa, Homo sapiens
  variant (1)...(51): Xaa = Any amino acid
GPWSCPVXQHGVSXAPWRFLHXSSXSDXDGXELPTGFGWGHQXTFLGVLYV

SEQ ID NO: 1060 - protein, 64 aa, Homo sapiens
  variant (1)...(64): Xaa = Any amino acid
APGPVLXSSMVCXRLPGGSCMXVLXVTXMVXSSPLALAGDTXPRFLEYSTSECHFFNGTERXRF

SEQ ID NO: 1061 - protein, 85 aa, Homo sapiens; identical to SEQ ID NO: 682

SEQ ID NO: 1062 - protein, 123 aa, Homo sapiens
  variant (1)...(123): Xaa = Any amino acid
TLTINRVEAGXEADYYCQVWDRNNDHVVFGGGTKLAVLGQPKAAPSVTLFPPSSEELQANKATLVCLISDFYPGAVTVAWKADSSPVKAGVETTTPSKQSNNKYAASSYLSLTPEQWKSHRSY

SEQ ID NO: 1063 - protein, 59 aa, Homo sapiens
PCLRSKVTRKRPCLPSMTLMEEMLREAFRCMTQGKTAKNLVLALLILLFVSFLGVLRAK

SEQ ID NO: 1064 - protein, 51 aa, Homo sapiens
EQNDNTQKFSKWDFPGRANERPYCYAIWSKTTLQEDVFTGGPHAKLLHEGI

SEQ ID NO: 1065 - protein, 120 aa, Homo sapiens
  variant (1)...(120): Xaa = Any amino acid
DCQKSCSCSPHFVICFIFRSFESKMTTPRNSVNGTFPAEPMKGPIAMQSGPKPLFRRMSSLVGPTQSFFMRESKTLGAVQIMNGLFHIALGGLLMIPAGIYAPICVTVWYPLWGXXGSIK

SEQ ID NO: 1066 - protein, 89 aa, Homo sapiens
IPAGIIRRPPRAMWKSPFIIWTAPKVLDSLMKKLCVGPTSEDILLKSGFGPDCIAIGPFIGSAGKVPFTEFLGVVILLSKLLKMKQITK

SEQ ID NO: 1067 - protein, 60 aa, Homo sapiens
  variant (1)...(60): Xaa = Any amino acid
LYASXXSPERVPHSHTDGCIDPCWDHQKTPQGNVEEPIHNLDSPQSLRFPHEEALRGAHQ

SEQ ID NO: 1068 - protein, 64 aa, Homo sapiens [sequence omitted]

SEQ ID NO: 1069 - protein, 59 aa, Homo sapiens
PCLRSKVTRKRPCLPSMTLMEEMLREAFRCMTQGKTAKNLVLALLILLFVLFLGVLRAK

SEQ ID NO: 1070 - protein, 51 aa, Homo sapiens; identical to SEQ ID NO: 1064

SEQ ID NO: 1071 - protein, 108 aa, Homo sapiens
DCQKSCSCSPHFVICFIFRSFESKMTTPRNSVNGTFPAEPMKGPIAMQSGPKPLFRRMSSLVGPTQSFFMRESKTLGAVQIMNGLFHIALGGLLMIPAGIYAPICVTV

SEQ ID NO: 1072 - protein, 64 aa, Homo sapiens
ISGCCHFALKTPKNKTNNKMRRARTRFLAVLPCVMHLNASLSISSMSVIEGRHGLFRVTLDLRQ

SEQ ID NO: 1073 - protein, 89 aa, Homo sapiens
IPAGIIRRPPRAMWKSPFIIWTAPKVLDSLMKKLCVGPTSEDILLKSGFGPDCIAIGPFIGSAGKVPFTEFLGVVILLSKLLKIKQITK

SEQ ID NO: 1074 - protein, 59 aa, Homo sapiens; identical to SEQ ID NO: 1069

SEQ ID NO: 1075 - protein, 51 aa, Homo sapiens
EQNDNTQKFSKWDFPGRANERPYCYAIWSKTTLQEDVFTGGPHARLLHEGI

SEQ ID NO: 1076 - protein, 76 aa, Homo sapiens
  variant (1)...(76): Xaa = Any amino acid
DFGGCPDYEWALPHCPGGSSDDPSRDLCTHLCDCVVPSLGRHYVYYFRITPGSNGEKLQEVFGQRKNDNEFIXPLC

SEQ ID NO: 1077 - protein, 149 aa, Homo sapiens
  variant (1)...(149): Xaa = Any amino acid
DCQKSCSCSPHFVICFIFRSFESKMTTPRNSVNGTFPAEPMKGPIAMQSGPKPLFRRMSSLVGPTQGFFMRESKTLGAVQIMNGLFHIALGGLLMIPAGIYAPICVTVWYPLWGGIMYIISGSLLAATEKNSRKCLVKGKMIMNSXXLF

SEQ ID NO: 1078 - protein, 89 aa, Homo sapiens
IPAGIIRRPPRAMWKSPFIIWTAPKVLDSLMKKPCVGPTSEDILLKSGFGPDCIAIGPFIGSAGKVPFTEFLGVVILLSKLLKIKQITK

SEQ ID NO: 1079 - protein, 62 aa, Homo sapiens; identical to SEQ ID NO: 880

SEQ ID NO: 1080 - protein, 64 aa, Homo sapiens; identical to SEQ ID NO: 1072

SEQ ID NO: 1081 - protein, 94 aa, Homo sapiens [sequence omitted]

SEQ ID NO: 1082 - protein, 61 aa, Homo sapiens [sequence omitted]

SEQ ID NO: 1083 - protein, 58 aa, Homo sapiens
  variant (1)...(58): Xaa = Any amino acid
GNPDPRPTDGGXGGXXVRLSGRNCPVDVIDHQYFLLEQRDLSERAHFKFIRCIGQNPV

SEQ ID NO: 1084 - protein, 139 aa, Homo sapiens
  variant (1)...(139): Xaa = Any amino acid
XTGAVSFXMXEETQTQDQPMEEXEVXTFAFQAEIAQLMSLIINTFYSNKEIFLRELISNSSDALDKIRYESLTDPSKLDSEKELHINLIPNKQDRTLTIVDTGIGMTKADLINNLGTIAKSGTKAFMEALQAGADISMI

SEQ ID NO: 1085 - protein, 66 aa, Homo sapiens
  variant (1)...(66): Xaa = Any amino acid
PCLXSXVTRKRPCLPSMTLMEEMLXEAFXCMTQGKTAKNLXLALLILLXVLXLGVXRAKXXHPEIQ

SEQ ID NO: 1086 - protein, 51 aa, Homo sapiens
  variant (1)...(51): Xaa = Any amino acid
EQNXXTQKFSKWDFPGRXNERPYCYAIWSKTTLQEDXFTGGPHAKLLHEGI

SEQ ID NO: 1087 - protein, 52 aa, Homo sapiens
  variant (1)...(52): Xaa = Any amino acid
DFGGCPDYEWALPHCPGGSSDDPXRDLCXHLCDCVVPSLGRHYVYYFRITPG

SEQ ID NO: 1088 - protein, 125 aa, Homo sapiens
  variant (1)...(125): Xaa = Any amino acid
DCQKSXSCSPHFVIXFXFRSXESKXTXPRNSVNGTFPAXPMKGPIAMQSGPKPLFRRMXSLVGPTQSFFMRESKTLGAVQIMNGLFHIALGGLLMIPXGIYXPICVTVWYPLWGGIMYIISGSLL

SEQ ID NO: 1089 - protein, 89 aa, Homo sapiens
  variant (1)...(89): Xaa = Any amino acid
IPXGIIRRPPRAMWKSPFIIWTAPKVLDSLMKKLCVGPTSEXILLKSGFGPDCIAIGPFIXSAGKVPFTEFLGXXILLSXLLKXKXITK

SEQ ID NO: 1090 - protein, 62 aa, Homo sapiens
  variant (1)...(62): Xaa = Any amino acid
SGNNIHNASPERVPHSHTDGXIDPXWDHQKTPQGNVEEPIHNLDSPQSLRFPHEEALRGAHQ

SEQ ID NO: 1091 - protein, 64 aa, Homo sapiens
  variant (1)...(64): Xaa = Any amino acid
ISGXCXFALXTPKXKXNNKMRRARXRFLAVLPCVMHXNASXSISSMSVIEGRHGLFRVTXDXRQ

SEQ ID NO: 1092 - protein, 123 aa, Homo sapiens
GHSMDMRVPAQLLGLLLLWLPGAKCDIQMTQSPSTLSASVGDTVTISCRASQNIDRWLAWHQQKPGKAPNVLIYATSSLEEGVSLRFTGSGSGTQFNLTITSLQPDDSATYYCQHYSASLRSF

SEQ ID NO: 1093 - protein, 71 aa, Homo sapiens; identical to SEQ ID NO: 813

SEQ ID NO: 1094 - protein, 85 aa, Homo sapiens
  variant (1)...(85): Xaa = Any amino acid
VASVGLPLLRRQAQIAAGRVLVVALFGGCGXLHSRLDGAAICLPGHCHGSRVEVTYETHQCGLVGLKLLRGGREQSDRGGSLGLT

SEQ ID NO: 1095 - protein, 123 aa, Homo sapiens
  variant (1)...(123): Xaa = Any amino acid
TLTINRVEAGDEADYYCQVWDRNNDHVVFGGGTKLAVLGQPKAAPSVTLFPPSSEELQANKATLVCLISDFYPGAVTVAWKADSSPVKAGVEXTTPSKQSNNKYAASSYLSLTPEQWKSHRSY

SEQ ID NO: 1096 - protein, 85 aa, Homo sapiens; identical to SEQ ID NO: 682

SEQ ID NO: 1097 - protein, 102 aa, Homo sapiens
TLTINRVEAGDEADYYCQVWDRNNDHVVFGGGTKLAVLSQPKAAPSVTLFPPSSEELQANKATLVCLISDFYPGAVTVAWKADSSPVKAGVETTTPSKQSNN

SEQ ID NO: 1098 - protein, 85 aa, Homo sapiens; identical to SEQ ID NO: 682

SEQ ID NO: 1099 - protein, 108 aa, Homo sapiens
  variant (1)...(108): Xaa = Any amino acid
YXQVWDRNYDHVVFGGGTKLAVLGQPKAAPSVTLFPPSSEELQANKATLVCLISDFYPGAVTVAWKADSSPVKAGVETTTPSKQSNNKYAASSYLSLTPEQWKSHRSY

SEQ ID NO: 1100 - protein, 56 aa, Homo sapiens
  variant (1)...(56): Xaa = Any amino acid
VASVGLPLLXRQAQIAAGRVLVVALFGGCGGLHSXLDGXXYLPSXPLXRLXGRSHL

SEQ ID NO: 1101 - protein, 54 aa, Homo sapiens
  variant (1)...(54): Xaa = Any amino acid
KATXVCLISDFYXGAVXVXWKADSXPRQXGSGDHHTLQTKQQQVRGQQLSEPDX

SEQ ID NO: 1102 - protein, 55 aa, Homo sapiens
  variant (1)...(55): Xaa = Any amino acid
VTSTXEPXQWXGRQIXXPVKXGVETTTPSKQSNNKYAASSYLSLTXEQWKSHRSY

SEQ ID NO: 1103 - protein, 56 aa, Homo sapiens
  variant (1)...(56): Xaa = Any amino acid
TLTINRVEAGDEADYYCQVWDRNNDHVXFGGGTKLAVLGXPKAAPSVTLFXPXSXE

SEQ ID NO: 1104 - protein, 85 aa, Homo sapiens; identical to SEQ ID NO: 682

SEQ ID NO: 1105 - protein, 123 aa, Homo sapiens
TLTINRVEAGDEADYYCQVWDLNNDHVVFGGGTKLAVLGQPKAAPSVTLFPPSSEELQANKATLVCLISDFYPGAVTVAWKADSSPVKAGVETTTPSKQSNNKYAASSYLSLTPEQWKSHRSY

SEQ ID NO: 1106 - protein, 194 aa, Homo sapiens
QYTHEFDGDEQFYVDLGRKETVWCLPVLRQFRFDPQFALTNIAVLKHNLNSLIKRSNSTAATNEVPEVTVFSKSPVTLGQPNILICLVDNIFPPVVNITWLSNGHSVTEGVSETSFLSKSDHSFFKISYLTLLPSAEESYDCKVEHWGLDKPLLKHWEPEIPAPMSELTETVVCALGLSVGLVGIVVGTVFIIR

SEQ ID NO: 1107 - protein, 52 aa, Homo sapiens
AMGTQSQKVFLRPASSPRVIIPSSRSVTSPSSLLLRRVMTARWSTGDWTSLF

SEQ ID NO: 1108 - protein, 55 aa, Homo sapiens; identical to SEQ ID NO: 1014

SEQ ID NO: 1109 - protein, 66 aa, Homo sapiens
PSVTGDLENTVTSGTSLVAAVELERLIRLFKLCFRTAMFVSANCGSNLNCLRTGKHQTVSFLPRST

SEQ ID NO: 1110 - protein, 59 aa, Homo sapiens
HRGWNLRLPVFQKRLVQSPVLHLAVITLLSRREEGEVTDLEEGMITLGEEAGLRNTFCD

SEQ ID NO: 1111 - protein, 60 aa, Homo sapiens
VPIAQPCDVDHRRKDVVHKTDEDVGLTQCHGRLGKHCDLRNLIGSSGRVGAFNQTVQVMF

SEQ ID NO: 1112 - protein, 51 aa, Homo sapiens
  variant (1)...(51): Xaa = Any amino acid
KQHWWCLSHGLDRSPXRXPLSPXRLCDLLCVDSDTXSXXGPRXXGQDYLWG

SEQ ID NO: 1113 - protein, 51 aa, Homo sapiens
  variant (1)...(51): Xaa = Any amino acid
SSTGGASAMAWTVLXLXLLSHXTDSVTSYVLTQTPXVXXAPGXTAKITCGG

SEQ ID NO: 1114 - protein, 79 aa, Homo sapiens
PTVTLFPPSSEELQANKATLVCLISDFYPGAVTVAWKADGSPVKAGVETTKPSKQSNNKYAASSYLSLTPEQWKSHRSY

SEQ ID NO: 1115 - protein, 54 aa, Homo sapiens; identical to SEQ ID NO: 840

SEQ ID NO: 1116 - protein, 59 aa, Homo sapiens
VASVGLPLLGRQAQVAAGRVLVVALFGGFGGLHSRLDGAAICLPGHCHSSRVEVTDQTH

SEQ ID NO: 1117 - protein, 85 aa, Homo sapiens
  variant (1)...(85): Xaa = Any amino acid
VASVGLPLLRRQAQIAAGRVLVVALFGGCGGLHSRLDGAAICLPGHCHGSRVEVTYETHQCGLVGLKLLXGGREQSDRGGSLGLT

SEQ ID NO: 1118 - protein, 93 aa, Homo sapiens
  variant (1)...(93): Xaa = Any amino acid
XGTKXAVLGQPKAAPSVTLFPPSXEELQANKATLVCLISDFYPGAVTVAWKADSSPVKAGVETTTPSKQSNNKYAASSYLSLTPEQWKSHRSY

SEQ ID NO: 1119 - protein, 194 aa, Homo sapiens; identical to SEQ ID NO: 1106

SEQ ID NO: 1120 - protein, 52 aa, Homo sapiens; identical to SEQ ID NO: 1107

SEQ ID NO: 1121 - protein, 55 aa, Homo sapiens; identical to SEQ ID NO: 1014

SEQ ID NO: 1122 - protein, 66 aa, Homo sapiens; identical to SEQ ID NO: 1109

SEQ ID NO: 1123 - protein, 59 aa, Homo sapiens; identical to SEQ ID NO: 1110

SEQ ID NO: 1124 - protein, 60 aa, Homo sapiens; identical to SEQ ID NO: 1111

SEQ ID NO: 1125 - protein, 94 aa, Homo sapiens
TGGASAMAWTVLLLGLLSHCTDSVTSYVLTQTPSVSVAPGKTAKITCGGNNIGSNNVHWYYQKPGQAPVLIISFDNDRPSGISERFSGFNSGDM

SEQ ID NO: 1126 - protein, 53 aa, Homo sapiens
WWCLSHGLDRSPPRPPLSLHRLCDLLCVDSDTLSVSGPRKDGQDYLWGKQYWE

SEQ ID NO: 1127 - protein, 71 aa, Homo sapiens; identical to SEQ ID NO: 813

SEQ ID NO: 1128 - protein, 124 aa, Homo sapiens; identical to SEQ ID NO: 814

SEQ ID NO: 1129 - protein, 63 aa, Homo sapiens
  variant (1)...(63): Xaa = Any amino acid
NNDHVVFGGGTKLAVLGQPKAAPSVTLFPPXXEXLQANKATLVCLISDFYPGAVTVAWKAXSS

SEQ ID NO: 1130 - protein, 73 aa, Homo sapiens
WWCLSHGLDRSPPRPPLSPHRFCDFLCVDSNTLSVSGPRKDGQDYLWGKQYWESQCTLVLPEARPGPCPNHLF

SEQ ID NO: 1131 - protein, 57 aa, Homo sapiens
GGASAMAWTVLLLGLLSHRTDSVTSYVLTQTPSVSVAPGKTAKITCGGNNIGSHNVH

SEQ ID NO: 1132 - protein, 85 aa, Homo sapiens
  variant (1)...(85): Xaa = Any amino acid
SQESVQEPFLTPVMDNKAXPEEDEPQHEASNATQHLALGRFRLSPPLHGDGVLEAGVLHVAGVDVSMLGSHFQHHQDLEXPVTXS

SEQ ID NO: 1133 - protein, 56 aa, Homo sapiens
DYFNWDWLSLFCNACLSLPRIPNCLCQPVPLRSESYSGCHAATRSSPFIPTPRRWL

SEQ ID NO: 1134 - protein, 70 aa, Homo sapiens
  variant (1)...(70): Xaa = Any amino acid
ICPEQDAEWHWRLRAGAHLPRXGPYYPSQESERAPALTPETILTGIGYHFSVTPACPCPEFPTACVSLSP

SEQ ID NO: 1135 - protein, 82 aa, Homo sapiens
  variant (1)...(82): Xaa = Any amino acid
LGXGDWXFQILVMLEMTPQHGDVYTCHVEHPSLQNPITVEWRAQSESAQSKMLSGIGGFVLGLIFLGXGLIIHHRSQKGLLH

SEQ ID NO: 1136 - protein, 56 aa, Homo sapiens
RLLVPAQNSQLPVSACPPEIRVLQWLSRSHQVISFHPHPKALAVTLLPALTQSLCL

SEQ ID NO: 1137 - protein, 85 aa, Homo sapiens; identical to SEQ ID NO: 682

SEQ ID NO: 1138 - protein, 123 aa, Homo sapiens; identical to SEQ ID NO: 683

SEQ ID NO: 1139 - protein, 123 aa, Homo sapiens
  variant (1)...(123): Xaa = Any amino acid
TLTINRVEAGDEADYYCQVWDRNNDHVVFGGGTKLXXLGXXKAAPSVTLFPPSSEELQANKATLVCLISDFYPGAATVAWKADSSPVKAGVETTTPSKQSNNKYAASSYLSLTPEQWKSHRSY

SEQ ID NO: 1140 - protein, 85 aa, Homo sapiens
  variant (1)...(85): Xaa = Any amino acid
VASVGLPLLRRQAQIAAGRVLVVALFGGCGGLHSRLDGAAICLPGHCRGSRVEVTYETHQCGLVGLKLLRGGREQSDRGGSLXXT

SEQ ID NO: 1141 - protein, 85 aa, Homo sapiens; identical to SEQ ID NO: 682

SEQ ID NO: 1142 - protein, 123 aa, Homo sapiens; identical to SEQ ID NO: 683

SEQ ID NO: 1143 - protein, 115 aa, Homo sapiens
TLPPDRMKFISTSLLLMLLVSSLSPVQGVLEVYYTSLRCRCVQESSVFIPRRFIDRIQILPRGNGCPRKEIIVWKKNKSIVCVDPQAEWIQRMMEVLRKRSSSTLPVPVFKRKIP

SEQ ID NO: 1144 - protein, 55 aa, Homo sapiens
EKEVLQLYQFQCLRERFPDADISTKNTCILPLSLLWILVLCLVKSFPGKRTSPYK

SEQ ID NO: 1145 - protein, 51 aa, Homo sapiens
SHAYLYGEVLFPGKDLTKHKTKIQSRDKGRMQVFLVEISASGNLSLKHWNW

SEQ ID NO: 1146 - protein, 60 aa, Homo sapiens
VRRSSSVAQVKAMIETKTGIIPETQIVTCNGKRLEDGKMMADYGIRKGNLLFLACYCIGG

SEQ ID NO: 1147 - protein, 74 aa, Homo sapiens
DPDCDLQWKETGRWEDDGRLRHQKGQLTLPGMLLYWRVTTLGMGCWQGSKSLFLLISYSTNTSSDDFPKLMRMR

SEQ ID NO: 1148 - protein, 74 aa, Homo sapiens [sequence omitted]

SEQ ID NO: 1149 - protein, 57 aa, Homo sapiens
SIPGGYNTDISRVFNGNNCTSCQQKLLPGPLEIYDIDAITFPFIDVLFHLEVKIGAT

SEQ ID NO: 1150 - protein, 78 aa, Homo sapiens
LDVLQMKEEDVLKFLAAGTHLGGTNLDFQMEQYIYKRKSDGIYIINLKRTWEKLLLAARAIVAIENPADVSVISSRNT

SEQ ID NO: 1151 - protein, 115 aa, Homo sapiens
TLSPDRMKFISTSLLLMLLVSSLSPVQGVLEVYYTSLRCRCVQESSVFIPRRFIDRIQILPRGNGCPRKEIIVWKKNKSIVCVDPQAEWIQRMMEVLRKRSSSTLPVPVFKRKIP

SEQ ID NO: 1152 - protein, 55 aa, Homo sapiens; identical to SEQ ID NO: 1144

SEQ ID NO: 1153 - protein, 51 aa, Homo sapiens
PHAYLYGEVLFPGKDLTKHKTKIQSRDKGRMQVFLVEISASGNLSLKHWNW

SEQ ID NO: 1154 - protein, 59 aa, Homo sapiens [sequence omitted]

SEQ ID NO: 1155 - protein, 110 aa, Homo sapiens
EQRDLHTETPSWAPGTMAPLKMLALVTLLLGASLQHIHAARGTNVGRECCLEYFKGAIPLRKLKTWYQTSEDCSRDAIVFVTVQGRAICSDPNNKRVKNAVKYLQSLERS

SEQ ID NO: 1156 - protein, 145 aa, Homo sapiens
PPLDPGAQGGGGEHRRWRSQVVPGDSQESGVRRLQDLSRLCRYLTAFFTLLLLGSEQMALPCTVTKTMASLEQSSDVWYHVFSFLRGMAPLKYSRQHSRPTLVPRAAWMCCREAPRRRVTRASIFSGAMVPGAQEGVSVCRSLCS

SEQ ID NO: 1157 - protein, 132 aa, Homo sapiens
TPTVEVPGSPGRQSGVWGEEASRPLKALQVFNCILHSLVVGVRTDGPALHSYKNDGIPGAVLRCLVPRLQLSKGNGSLEVLQAALPAHIGPSSCVDVLQRSPQEEGNQGQHLQWGHGARSPGGSLCVQVPLL

SEQ ID NO: 1158 - protein, 174 aa, Homo sapiens
ALAPGPVLFSSMVCLRLPGGSCMAVLTVTLMVLSSPLALAGDTRPRFLEYSTSECHFFNGTERVRFLDRYFYNQEEYVRFDSDVGEFRAVTELGRPDEEYWNSQKDFLEDRRAAVDTYCRHNYGVVESFTVQRRVHPKVTVYPSKTQPLQHHNLLVCSVSGFYPGSIEVRWFRN

SEQ ID NO: 1159 - protein, 56 aa, Homo sapiens; identical to SEQ ID NO: 794

SEQ ID NO: 1160 - protein, 52 aa, Homo sapiens
SGPWSCPVLQHGVSEAPWRLLHGSSDSDTDGAELPTGFGWGHQTTFLGVLYV

SEQ ID NO: 1161 - protein, 54 aa, Homo sapiens
HSDVEYSKKRGLVSPAKASGELSTISVTVRTAMQEPPGSLRHTMLENRTGPGAR

SEQ ID NO: 1162 - protein, 70 aa, Homo sapiens
SSPQPRSCVCSRCPPRPACLPGSPSGCSSTPHQAAPAPSPPGTPPRRCRSARTPLGYRSICPGTAPAPSH

SEQ ID NO: 1163 - protein, 50 aa, Homo sapiens
STPRNVVWCPQPKPVGSSAPSVSLSELPCRSLQGASDTPCWRTGQDQGPE

SEQ ID NO: 1164 - protein, 143 aa, Homo sapiens
RIHSHLRMDSPLHCEALHNPVVVSAVGVHRGPPVFQEVLLAVPVLLIRPPQLRHRPELPHVAVEAHVLLLVIEVSVQEPHPLRPIEEMTLRRRVLQETWSGVPSQSQWGAQHHQCHCQNCHAGASREPQTHHAGEQDRTRGQS

SEQ ID NO: 1165 - protein, 63 aa, Homo sapiens [sequence omitted]

SEQ ID NO: 1166 - protein, 50 aa, Homo sapiens
  variant (1)...(50): Xaa = Any amino acid
YICEYGLSFLADQISRRLLYTXEVHSYRKFKKSTLSFLSNSSEVMGSCSS

SEQ ID NO: 1167 - protein, 115 aa, Homo sapiens; identical to SEQ ID NO: 1143

SEQ ID NO: 1168 - protein, 55 aa, Homo sapiens; identical to SEQ ID NO: 1144

SEQ ID NO: 1169 - protein, 51 aa, Homo sapiens; identical to SEQ ID NO: 1145

SEQ ID NO: 1170 - protein, 117 aa, Homo sapiens
AAMARGPKKHLKRVAAPKHWMLDKLTGVFAPRPSTGPHKLRECLPLIIFLRNRLKYALTGDEVKKICMQRFIKIDGKVRTDITYPAGFMDVISIDKTGENFRLIYDTKGRFAVHRIT

SEQ ID NO: 1171 - protein, 117 aa, Homo sapiens
CNTMYSKATLGVIDQTEILSRLVNADDIHESSRVGYISSDLAIDFNEPLHANLLYFISCQGILKSVPQENDEGETLSQLVGTGGWTRSKHTGQFIQHPMLWSCHPLQMLLGTTSHGC

SEQ ID NO: 1172 - protein, 83 aa, Homo sapiens
VISVRTLPSILMNRCMQIFFTSSPVRAYLSLFLRKMMRGRHSLNLWGPVDGRGANTPVNLSSIQCFGAATRFRCFLGPRAMAA

SEQ ID NO: 1173 - protein, 170 aa, Homo sapiens
CYSFASMGMLEARIRILTNNSQTPILSPQEVVSCSQYAQGCDGGFPYLIAGKYAQDFGLVEEACFPYTGTDSPCKMKEDCFRYYSSEYHYVGGFYGGCNEALMKLELVHHGPMAVAFEVYDDFLHYKKGIYHHTGLRDPFNPFELTNHAVLLVGYGTDSASGMDYWIVKN

SEQ ID NO: 1174 - protein, 91 aa, Homo sapiens
KGLLDQCGGRSPFCSGGSHHILQKQLPWAHDGPTQASSGLHCSLHRNLLHSGTQRSNNESSLPSFCMENQCLCRGSKLLPPAQNLGRTFLQ

SEQ ID NO: 1175 - protein, 109 aa, Homo sapiens [sequence omitted]

SEQ ID NO: 1176 - protein, 51 aa, Homo sapiens; identical to SEQ ID NO: 1145

SEQ ID NO: 1177 - protein, 78 aa, Homo sapiens
RCRCVQESSVFIPRRFIDRIQILPRGSGCPRKEIIVWKKNKSIVCVGPQAEWIQRMMEVLRKRSSSTLPVPVFKRKIP

SEQ ID NO: 1178 - protein, 53 aa, Homo sapiens
IFSRKKNFPIQISMRLCKNNLVEADGANSSFFTHSTLYTLGVCILIHQGGKFL

SEQ ID NO: 1179 - protein, 55 aa, Homo sapiens; identical to SEQ ID NO: 1144

SEQ ID NO: 1180 - protein, 99 aa, Homo sapiens
LSFLEVLCTYAPHLYLAFAWSDHSSFSLTLNVENVAIVAACVVTLLLLSNFLTLKKGRMSASECDFLLTCSLDRLFSIVFFLSFSPSTTRETAPDGKDI

SEQ ID NO: 1181 - protein, 57 aa, Homo sapiens
YFFCHFLHQQPGRLHLMEKIYDCFMTFLNYLFFIPHLRFWWSPFCIIVLRMIKKNNN

SEQ ID NO: 1182 - protein, 87 aa, Homo sapiens
SSHISFPSGAVSLVVDGENDKKNTILKSLSKEQVSRKSHSEALILPFFSVRKLLKRRSVTTQAATMATFSTFNVREKELWSLHAKAR

SEQ ID NO: 1183 - protein, 53 aa, Homo sapiens
AMLFLQKTDGCWLFRASLMGCGNSKNVPQCQPCRKINGMGSVLSLVVIFFYHP

SEQ ID NO: 1184 - protein, 59 aa, Homo sapiens
STHSAFLQCKKVAQKKKRDNTSCYNGYILYIQCKREGAMVTPCKGQIEMWCVCAEYLKK

SEQ ID NO: 1185 - protein, 115 aa, Homo sapiens; identical to SEQ ID NO: 1143

SEQ ID NO: 1186 - protein, 55 aa, Homo sapiens; identical to SEQ ID NO: 1144

SEQ ID NO: 1187 - protein, 51 aa, Homo sapiens; identical to SEQ ID NO: 1145

SEQ ID NO: 1188 - protein, 98 aa, Homo sapiens
  variant (1)...(98): Xaa = Any amino acid
PNCLSNVCINCESQXXQLLSRIYSLTSNKQALRDTESQIQILPMGIKRLRLSPHLENYLHHKYIITGSLYEADTKCYRHSQNIILGNNVIKMPNLSQQ

SEQ ID NO: 1189 - protein, 142 aa, Homo sapiens
  variant (1)...(142): Xaa = Any amino acid
WTXLEGVEVQTDYVPLLNSLAAYGWQLTCVLPTPVVKTTSEGSVSTKQIVFLQRPCLPQKIKKKESKFQWRFSREEMHNRQMRKSKGKLSARDKQQAEENEKNLEDQSSKAGDMGNCVSGQQQEGGVSEEMKGPVQEDKGEQ

SEQ ID NO: 1190 - protein, 64 aa, Homo sapiens
TRWRPMAGSSPVCYQLPSSRLPARGVYPPSRLSFFRDLVYLRKSRRRNRSFSGDSPEKKCTTGR

SEQ ID NO: 1191 - protein, 86 aa, Homo sapiens
  variant (1)...(86): Xaa = Any amino acid
DXPGRCRSADRLRAPAELAGGLWLAAHLCATNSRRQDYQRGECIHQADCLSSETLSTSENQEEGIEVSVAILQRRNAQQADEEIKR

SEQ ID NO: 1192 - protein, 73 aa, Homo sapiens
CSPLSSWTGPFISSETPPSCCCPETQFPMSPALEDWSSKFFSFSSACCLSLALSLPFDFLICLLCISSLENRH

SEQ ID NO: 1193 - protein, 52 aa, Homo sapiens
VLPCPLGQGPSSPRRLHPPAAVLKHSFPCLQLWKTGLLSSSHFLLLVVCLWH

SEQ ID NO: 1194 - protein, 115 aa, Homo sapiens
  variant (1)...(115): Xaa = Any amino acid
TLPPDRMKFISTSLLLMLLVSSLSPVQGVLEVYYTSLRCRCVQXSSVFIPXRFIDRIQILPRGNGCPRKEIIVWKKNKSIVCVDPQAEWIQRMMEVLRKRSSSTLPVPVFKRKIP

SEQ ID NO: 1195 - protein, 70 aa, Homo sapiens
  variant (1)...(70): Xaa = Any amino acid
LPPFLSELFLLHITAATTAPVITAPRRTRPAMMPTMGMVGWEDSSHLXVRGLGRPSCCTWQVYLCSSPEG

SEQ ID NO: 1196 - protein, 63 aa, Homo sapiens
  variant (1)...(63): Xaa = Any amino acid
ALPPPHHGSDHSSSDHSSKENQASNDAHDGDGGLGRQLPSXGEGLGQTLMLHMAGVSLLLSRR

SEQ ID NO: 1197 - protein, 50 aa, Homo sapiens
  variant (1)...(50): Xaa = Any amino acid
GSAQAPHXEMGAVFPAHHPHRGHHCWPGSPWSCDHWSCGRCRDVEEEELR

SEQ ID NO: 1198 - protein, 92 aa, Homo sapiens
  variant (1)...(92): Xaa = Any amino acid
PSGEEQRYTCHVQHEGLPKPLTXRWELSSQPTIPIVGIIAGLVLLGAVITGAVVAAVMWRRKSSDRKGGSYTQAASSDSAQGSDVSLTACKV

SEQ ID NO: 1199 - protein, 55 aa, Homo sapiens
  variant (1)...(55): Xaa = Any amino acid
EKEVLQLYQFQCLRERFPDADISTKNTCILPLSLLWILVLXLVKSFPGKRTSPYK

SEQ ID NO: 1200 - protein, 115 aa, Homo sapiens; identical to SEQ ID NO: 1143

SEQ ID NO: 1201 - protein, 51 aa, Homo sapiens
  variant (1)...(51): Xaa = Any amino acid
SHAYLYGEVLFPGKDLTKXKTKIQSRDKGRMQVFLVEISASGNLSLKHWNW

SEQ ID NO: 1202 - protein, 115 aa, Homo sapiens; identical to SEQ ID NO: 1143

SEQ ID NO: 1203 - protein, 55 aa, Homo sapiens; identical to SEQ ID NO: 1144

SEQ ID NO: 1204 - protein, 51 aa, Homo sapiens; identical to SEQ ID NO: 1145

SEQ ID NO: 1205 - protein, 50 aa, Homo sapiens
RIGFSHQGYNCWWWCHSTHPQISDWEERTTEDCLKDAWIPCYLRTLNTLT

SEQ ID NO: 1206 - protein, 134 aa, Homo sapiens
ASAEFEMAGGKAGKDSGKAKTKAVSRSQRAGLQFPVGRIHRHLKSRTTSHGRVGATAAVYSAAILEYLTAEVLELAGNASKDLKVKRITPRHLQLAIRGDEELDSLIKATIAGGGVIPHIHKSLIGKKGQQKTV

SEQ ID NO: 1207 - protein, 67 aa, Homo sapiens
RCDEGVGGGISPWVRLAFSLPCLLELQRNSKWLAVRLERTPERPRQRRFPARREPACSSQWAVFIDT

SEQ ID NO: 1208 - protein, 60 aa, Homo sapiens
DNKESRHPLDSLLLSFLPNQRFVDVWNDTTTSNCSLDERIQFFISTNSKLQVTRGNTLYL

SEQ ID NO: 1209 - protein, 64 aa, Homo sapiens
IRPTGNCKPALCERETAFVLAFPESFPALPPAISNSAEAQASKAEKRLIGPTVRSHHLLLRRTA

SEQ ID NO: 1210 - protein, 53 aa, Homo sapiens
ILGVDEYGPLGTASRLSASGKPPLSWPFRSPFQPYRQPFRIPLKLKQARQRKG

SEQ ID NO: 1211 - protein, 99 aa, Homo sapiens
  variant (1)...(99): Xaa = Any amino acid
PPLDPGAQGGGGEHQRWRSQVVPGDSQESGVRRLQDLSRLCRYLTAFFTLLLLGSEQMALPCTVTKTMXSLEQXXDXWXHVFSFLXGMAPLKYSRXALP

SEQ ID NO: 1212 - protein, 86 aa, Homo sapiens
  variant (1)...(86): Xaa = Any amino acid
TPTVEVPGSPGRQSGVWGEEASRPLKALQVFNCILHSLVVGVRTDGPALHSYKNDGXPGAXXRXLXPRLQLSXGNGSLEVLQAXTP

SEQ ID NO: 1213 - protein, 64 aa, Homo sapiens
  variant (1)...(64): Xaa = Any amino acid
GSXCLEYFKGAIPXRKLKTWXQXSXXCSRXAIVFVTVQGRAICSDPNNKRVKNAVKYLQSLERS

SEQ ID NO: 1214 - protein, 84 aa, Homo sapiens
PPLDPGAQGGGGEHQRWRSQVVPGDSQESGVRRLQDLSRLCRYLTAFFTLLLLGSEQMALPCTVTKTMASLEQSSDVWYHVFSF

SEQ ID NO: 1215 - protein, 71 aa, Homo sapiens
TPTVEVPGSPGRQSGVWGEEASRPLKALQVFNCILHSLVVGVRTDGPALHSYKNDGIPGAVLRCLVPRLQL

SEQ ID NO: 1216 - protein, 199 aa, Homo sapiens
HLIYKCGGIDKRTIEKFGKEAAEMGKGSFKYAWVLDKLKAERERGITIDISLWKFETSKYYVTIIDAPGHRDFIKNMITGTSQADCAVLIVAAGVGEFEAGISKNGQTREHALLAYTLGVKQLIVGVNKMDSTEPPYSQKRYEEIVKEVSTYIKKIGYNPDTVAFVPISGWNGDNMLEPSANMPWFKGWKVTRKDGNAS

SEQ ID NO: 1217 - protein, 76 aa, Homo sapiens
TGIAILTGDFPSLEPRHVSTWLQHVVTIPTRNWHKCYCVGVVANFLNVSADFLNNFLISLLAVGWLSGIHFVNTDN

SEQ ID NO: 1218 - protein, 122 aa, Homo sapiens
LFHTQCVSQKGMLSGLPILGDTSFKFTNTSSNNQDSTVSLRCPCNHVFDKVSVSWGINDSHIVLAGLKFPQGDINGDTTFTLSFQFIQDPGILEGALSHLSSLLPKFFNGSFVDATAFIDQM

SEQ ID NO: 1219 - protein, 56 aa, Homo sapiens
YLLVSNFHKEISMVIPRSRSAFSLSKTQAYLKEPFPISAASFPNFSMVLLSMPPHL

SEQ ID NO: 1220 - protein, 62 aa, Homo sapiens
VFLSPWVKSESGSLCLSVLVYCWSESKFLIKAVDLALTVYADIGETIWLFQTSQDLSKKTWL

SEQ ID NO: 1221 - protein, 86 aa, Homo sapiens
EPSQQLLSRIYSLTSNKQALRDTESQIQILPMGIKRLRLSPHLENYLHHKYIITGSLYEADTKCYRHSQNIILGNNVIKMPNLSQQ

SEQ ID NO: 1222 - protein, 95 aa, Homo sapiens
  variant (1)...(95): Xaa = Any amino acid
PLXVALAQRKEERQAHLTNQYMQRMASVRAVPNPVINPYQPAPPSGYFMAAIPQTQNXAAYYPPSQIAQLRPSPRWTAQGARPHPFQNMPGAIRP

SEQ ID NO: 1223 - protein, 115 aa, Homo sapiens
TLPPDRMKFISTSLLLMLLVSSLSPVQGVLEVYYTSLGCRCVQESSVFIPRRFIDRIQILPRGNGCPRKEIIVWKKNKSIVCVDPQAEWIQRMMEVLRKRSFSTLPVPVFKRKIP

SEQ ID NO: 1224 - protein, 51 aa, Homo sapiens
IFSRKKNFPIQISMRLCKNNLAEADGANSSFFTHSTLYTLGVCILIHQGGK

SEQ ID NO: 1225 - protein, 64 aa, Homo sapiens
SSSRHLCFSCCWSAASLQSKVFWRSITQAWGVDVSKRAQSLSLDASLIEFKSCPVGMVVQEKKS

SEQ ID NO: 1226 - protein, 55 aa, Homo sapiens
EKEVFQLYQFQCLRERFPDADISTKNTCILPLSLLWILVLCLVKSFPGKRTSPYK

SEQ ID NO: 1227 - protein, 51 aa, Homo sapiens; identical to SEQ ID NO: 1145

SEQ ID NO: 1228 - protein, 73 aa, Homo sapiens
YSIFFCHFLHQQPGRLHLMEKIYDCFMTFLNYLFFIPHLRFWWSPFCIIVLRMIKKITTRDNTEPIPFIFLQG

SEQ ID NO: 1229 - protein, 70 aa, Homo sapiens
SFSLTLNVENVAIVAACVVTLLLLSNFLTLKKGRMSASECDFLLTCSLDRLFSIVFFFVIFSINNQGDCT

SEQ ID NO: 1230 - protein, 82 aa, Homo sapiens
ECHEAVIYLFHQVQSPWLLMEKMTKKNTILKSLSKEQVSRKSHSEALILPFFSVRKLLKRRSVTTQAATMATFSTFNVREKE

SEQ ID NO: 1231 - protein, 72 aa, Homo sapiens
AMLFLQKTDGCWLFRASLMGCGNSKNVPQCQPCRKINGMGSVLSLVVIFFIILKTMMQKGLHQKRRCGIKKR

SEQ ID NO: 1232 - protein, 50 aa, Homo sapiens
YSIFFCHFLHQQPGRLHLMEKIYDCFMTFLNYLFLFHIYVFGGVPFASLF

SEQ ID NO: 1233 - protein, 94 aa, Homo sapiens
LSFLEVLCTYAPHLYLAFAWSDHSSFSLTLNVENVAIVAACVVTLLLLSNFLTLKKGRMSASECDFLLTCSLDRLFSIVFFFVIFSINNQGDCT

SEQ ID NO: 1234 - protein, 53 aa, Homo sapiens
  variant (1)...(53): Xaa = Any amino acid
XMLFLQKTDGCWLFRASLMGCGNSKNVPQCQPCRKINGMGSVLSLVVIFFYHP

SEQ ID NO: 1235 - protein, 59 aa, Homo sapiens; identical to SEQ ID NO: 1184

SEQ ID NO: 1236 - protein, 91 aa, Homo sapiens
ECHEAVIYLFHQVQSPWLLMEKMTKKNTILKSLSKEQVSRKSHSEALILPFFSVRKLLKRRSVTTQAATMATFSTFNVREKELWSLHAKAR

SEQ ID NO: 1237 - protein, 55 aa, Homo sapiens
PRLLPAPPWRRATSCLTARSSPLAMSGSAALRHSSSLPSWAWSPVASTKLPSTPS

SEQ ID NO: 1238 - protein, 54 aa, Homo sapiens
RSRSLLLLSASTPCGSAAPSWPRCPPSSRCGSASRSMTSPAPPSSTANASRRTM

SEQ ID NO: 1239 - protein, 147 aa, Homo sapiens
TAASSSSLEKSYELPDGQVITIGNERFRCPEALFQPSFLGMESCGIHETTFNSIMKCDVDIRKDLYANTVLSGGTTMYPGIADRMQKEITALAPSTMKIKIIAPPERKYSVWIGGSILASLSTFQQMWISKQEYDESGPSIVHRKCF

SEQ ID NO: 1240 - protein, 135 aa, Homo sapiens
KHLRWTMEGPDSSYSCLLIHICWKVDSEARMEPPIHTEYLRSGGAMILIFIVLGARAVISFCILSAMPGYMVVPPDSTVLAYRSLRMSTSHFMMELKVVSWMPQDSMPRKEGWKSASGQRNRSLPMVMTWPSGSS

SEQ ID NO: 1241 - protein, 151 aa, Homo sapiens
IVRLEAFAVDDGGAGLVILLLADPHLLEGGQRGQDGAADPHGVLALRRSNDLDLHCAGCQGSDLLLHPVGNARVHGGAARQHCVGVQVFADVHVTLHDGVEGSFVDATGLHAQEGRLEECLRAAEPLIANGDDLAVRQLVALLQGGAGSSR

SEQ ID NO: 1242 - protein, 85 aa, Homo sapiens
  variant (1)...(85): Xaa = Any amino acid
PPLDPGAQGGGGEHQRWRSQVVPGDSQESGVRRLQDLSRLCRYLTAFFTLLLXGSEQMALPCXVTKTMASLEQSSDVWYHVFSFL

SEQ ID NO: 1243 - protein, 72 aa, Homo sapiens
  variant (1)...(72): Xaa = Any amino acid
TPTVEVPGSPGRQSGVWGEEASRPLKALQVFNCILHSLVXGVRTDGPALXSYKNDGIPGAVLRCLVPRLQLS

SEQ ID NO: 1244 - protein, 50 aa, Homo sapiens
  variant (1)...(50): Xaa = Any amino acid
RKLKTWYQTSEDCSRDAIVFVTXQGRAICSDPXNKRVKNAVKYLQSLERS

SEQ ID NO: 1245 - protein, 115 aa, Homo sapiens; identical to SEQ ID NO: 1143

SEQ ID NO: 1246 - protein, 55 aa, Homo sapiens; identical to SEQ ID NO: 1144

SEQ ID NO: 1247 - protein, 51 aa, Homo sapiens
  variant (1)...(51): Xaa = Any amino acid
XHAYLYGEVLFPGKDLTKHKTKIQSRDKGRMQVFLVEISASGNLSLKHWNW

SEQ ID NO: 1248 - protein, 62 aa, Homo sapiens
  variant (1)...(62): Xaa = Any amino acid
VFLSPWVKSESGSLCXSVLVYCWSESKFLIKAVDLALTVYAXIGETIWLFQTSQDXSKXTWL

SEQ ID NO: 1249 - protein, 86 aa, Homo sapiens
  variant (1)...(86): Xaa = Any amino acid
EPSQQLLSRIYSLTSNKQALXDTESQIQILPMGIKRLRLSPHLENYLHHKYIITGSLYEADTKCYRHSQNIILGNNVIKMPNLSQQ

SEQ ID NO: 1250 - protein, 69 aa, Homo sapiens [sequence omitted]

SEQ ID NO: 1251 - protein, 102 aa, Homo sapiens
LPTSPSALASYSPSTTDMAQSLALSLLILVLAFGIPRTQGSDGGAQDCCLKYSQRKIPAKVVRSYRKQEPSLGCSIPAILFLPRKRSQAELCADPKELWVQQ

SEQ ID NO: 1252 - protein, 77 aa, Homo sapiens [sequence omitted]

SEQ ID NO: 1253 - protein, 60 aa, Homo sapiens [sequence omitted]

SEQ ID NO: 1254 - protein, 115 aa, Homo sapiens; identical to SEQ ID NO: 1143

SEQ ID NO: 1255 - protein, 55 aa, Homo sapiens
  variant (1)...(55): Xaa = Any amino acid
EKEVLQLYQFQCLRERFPDADISTKNTCILPLSLLWILVLCLVKSFPGKRXSPYK

SEQ ID NO: 1256 - protein, 51 aa, Homo sapiens
  variant (1)...(51): Xaa = Any amino acid
SHAYLYGEXLFPGKDLTKHKTKIQSRDKGRMQVFLVEISASGNLSLKHWNW

SEQ ID NO: 1257 - protein, 64 aa, Homo sapiens
PNHFFFYFNSLFFFSSADRRTMLDLGLEHVLFHSFSTMPAITSSWKKAKISITDKMPKNRDCML

SEQ ID NO: 1258 - protein, 59 aa, Homo sapiens
SWGGSGKFVSVSSSSSSWIGIISMSSSFFGWEDVSVSPTTSSFISIVCSFFLLLTGELC

SEQ ID NO: 1259 - protein, 71 aa, Homo sapiens
HSSPVSRRKKEQTIEIKEEVVGLTETSSQPKNEEDIEIIPIQEEEEEETETNFPEPPQDQESSPIENDSSP

SEQ ID NO: 1260 - protein, 94 aa, Homo sapiens
  variant (1)...(94): Xaa = Any amino acid
KMESXNFIRAHTPYINIXNYEPANPXEKNSPSTQYCYSIQSLFLGILSVMLIFAFFQELVIAGIVENEWKRTCSRPKSNIVLLSAEEKKNRLLK

SEQ ID NO: 1261 - protein, 164 aa, Homo sapiens
LNMLGEKLLGPNASPDGLIPWTRFCKENINDKNFPFWLWIESILELIKKHLLPLWNDGCIMGFISKERERALLKDQQPGTFLLRFSESSREGAITFTWVERSQNGGEPDFHAVEPYTKKELSAVTFPDIIRNYKVMAAENIPENPLKYLYPNIDKDHAFGKYYS

SEQ ID NO: 1262 - protein, 72 aa, Homo sapiens
RTSSRGPSCCGSVRAPGKGPSHSHGWSGPRTEANLTSMRLNPTRRKNFLLLLSLTSFAITKSWLLRIFLRIP

SEQ ID NO: 1263 - protein, 120 aa, Homo sapiens
GVILSKGMVFVNIWIQILQGILRNILSSHDFVIANDVRESNSRKFFLRVGFNRMEVRFASVLGPLHPCECDGPFPGALTEPQQEGPRLLVLQQGTLSLLADEAHDAPIIPEREQVFFNEF

SEQ ID NO: 1264 - protein, 114 aa, Homo sapiens
GSTAWKSGSPPFWDRSTHVNVMAPSRELSLNRSRKVPGCWSFNRARSRSLLMKPMMHPSFQRGSRCFLMSSRMLSIQSQKGKFLSFIFSLQNLVHGMRPSGLALGPRSFSPNMF

SEQ ID NO: 1265 - protein, 88 aa, Homo sapiens
TLPPDRMKFISTSLLLMLLVSSLSPVQGVLEVYYTSLRCRCVQESSVFIPRRFIDRIQILPRGNGCPRKEIIVWKKNKSIVCVDPQAE

SEQ ID NO: 1266 - protein, 75 aa, Homo sapiens
CVQESSVFIPRRFIDRIQILPRGNGCPRKEIIVWKKNKSIVCVDPQAEWIQRMMEVLRKRSSSTLPVPVFKRKIP

SEQ ID NO: 1267 - protein, 53 aa, Homo sapiens
IFSRKKNFPIQISMRLCKNNLAEADGANSSFFTHSTLYTLGVCILIHQGGKFL

SEQ ID NO: 1268 - protein, 55 aa, Homo sapiens; identical to SEQ ID NO: 1144

SEQ ID NO: 1269 - protein, 52 aa, Homo sapiens
DYVKITLQKLMGQTQASSLTAPYIHLEFAFLFIREESFFENSYSVISNTGLF

SEQ ID NO: 1270 - protein, 51 aa, Homo sapiens; identical to SEQ ID NO: 1145

SEQ ID NO: 1271 - protein, 112 aa, Homo sapiens
LPEQRDLHTETPSWAPGTMAPLKMLALVTLLLGASLQHIHAARGTNVGRECCLEYFKGAIPLRKLKTWYQTSEDCSRDAIVFVTVQGRAICSDPNNKRVKNAVKYLQSLERS

SEQ ID NO: 1272 - protein, 59 aa, Homo sapiens
AEGPAHRDSLLGSWHHGPTEDAGPGHPPPGGFSAAHPRSSRDQCGPGVLPGVLQGSHSP

SEQ ID NO: 1273 - protein, 146 aa, Homo sapiens
PPLDPGAQGGGGEHQRWRSQVVPGDSQESGVRRLQDLSRLCRYLTAFFTLLLLGSEQMALPCTVTKTMASLEQSSDVWYHVFSFLRGMAPLKYSRQHSRPTLVPRAAWMCCREAPRRRVTRASIFSGAMVPGAQEGVSVCRSLCSG

SEQ ID NO: 1274 - protein, 134 aa, Homo sapiens
TPTVEVPGSPGRQSGVWGEEASRPLKALQVFNCILHSLVVGVRTDGPALHSYKNDGIPGAVLRCLVPRLQLSKGNGSLEVLQAALPAHIGPSSCVDVLQRSPQEEGDQGQHLQWGHGARSPGGSLCVQVPLLRE

SEQ ID NO: 1275 - protein, 115 aa, Homo sapiens
  variant (1)...(115): Xaa = Any amino acid
PPLDPGAQGGGGEHQRWRSQVVPGDSQESGVRRLQDLSRLCRYLTAFFTLLXLGSEQMALPCTVTKTMASLEQSSDVWYHVFSFLRGMAPLKYSRQHSRPTLVPRAAWMCCXXXP

SEQ ID NO: 1276 - protein, 102 aa, Homo sapiens
  variant (1)...(102): Xaa = Any amino acid
TPTVEVPGSPGRQSGVWGEEASRPLKALQVFNCILHSLXVGVRTDGPALHSYKNDGIPGAVLRCLVPRLQLSKGNGSLEVLQAALPAHIGPSSCVDVLXXXP

SEQ ID NO: 1277 - protein, 80 aa, Homo sapiens
  variant (1)...(80): Xaa = Any amino acid
GXXXQHIHAARGTNVGRECCLEYFKGAIPLRKLKTWYQTSEDCSRDAIVFVTVQGRAICSDPNXKRVKNAVKYLQSLERS

SEQ ID NO: 1278 - protein, 64 aa, Homo sapiens
  variant (1)...(64): Xaa = Any amino acid
MIITCVSXTXCXLWLLVIYXLPVXXKVXGXXTXKFXKHLXFSXKLXEGTREFHXXIKXSXGIST

SEQ ID NO: 1279 - protein, 79 aa, Homo sapiens
  variant (1)...(79): Xaa = Any amino acid
QXKXFKLQGXQXNTXLXXKXICFESXCMYIYMINDYNVCVXDXMXSLVVSYILXTCXXQGKXXTXXXIYXTLXFFXEVX

SEQ ID NO: 1280 - protein, 78 aa, Homo sapiens
  variant (1)...(78): Xaa = Any amino acid
NSLVPSXNFXEKXKCXINXXXCXXLTLXXTGXQYITNNQRXHXVXDTHVIIIYHIYIHAXTFKANXFXXQXSIXLXTL

SEQ ID NO: 1281 - protein, 191 aa, Homo sapiens
PKEVRQLAEDFLKDYIHINIGALELSANHNILQIVDVCHDVEKDEKLIRLMEEIMSEKENKTIVFVETKRRCDELTRKMRRDGWPAMGIHGDKSQQERDWVLNEFKHGKAPILIATDVASRGLDVEDVKFVINYDYPNSSEDYIHRIGRTARSTKTGTAYTFFTPNNIKQVSDLISVLREANQAINPKLLQ

SEQ ID NO: 1282 - protein, 51 aa, Homo sapiens
LKQLGINCLISFTKHRDKVAHLLYVIRCKESVCCACFGTASSSSNSMNIIL

SEQ ID NO: 1283 - protein, 51 aa, Homo sapiens
NPVTLLLTLVTMDTHGRPPISPHFSGKLITSSFGFHKNNGFILLLTHDLFH

SEQ ID NO: 1284 - protein, 55 aa, Homo sapiens
LLSPWIPMAGHPSLLIFLVSSSHLLLVSTKTMVLFSFSLMISSIRRISFSSFSTS

SEQ ID NO: 1285 - protein, 107 aa, Homo sapiens
DLHTETPSWAPGTMALLKMLALVTLLLGASLQHIHAARGTNVGRECCLEYFKGAIPLRKLKTWYQTSEDCSRDAIVFVTVQGRAICSDPNNKRVKNAVKYLQSLERS

SEQ ID NO: 1286 - protein, 56 aa, Homo sapiens
PAHRDSLLGSWHHGPTEDAGPGHPPPGGFSAAHPRSSRDQCGPGVLPGVLQGSHSP

SEQ ID NO: 1287 - protein, 141 aa, Homo sapiens
PPLDPGAQGGGGEHQRWRSQVVPGDSQESGVRRLQDLSRLCRYLTAFFTLLLLGSEQMALPCTVTKTMASLEQSSDVWYHVFSFLRGMAPLKYSRQHSRPTLVPRAAWMCCREAPRRRVTRASIFSRAMVPGAQEGVSVCR

SEQ ID NO: 1288 - protein, 113 aa, Homo sapiens
TPTVEVPGSPGRQSGVWGEEASRPLKALQVFNCILHSLVVGVRTDGPALHSYKNDGIPGAVLRCLVPRLQLSKGNGSLEVLQAALPAHIGPSSCVDVLQRSPQEEGDQGQHLQ

SEQ ID NO: 1289 - protein, 106 aa, Homo sapiens
ISTSLLLMLLVSSLSPVQGVLEVYYTSLRCRCVQESSVFIPRRFIDRIQILPRGNGCPRKEIIVWKKNKSIVCVDPQAEWIQRMMEVLRKRSSSTLPVPVFKRKIP

SEQ ID NO: 1290 - protein, 53 aa, Homo sapiens
IFSRKKNFPIQISMRLCKNNLAEADGANSSFFTHSTLYTLGVCILIHRGGKFL

SEQ ID NO: 1291 - protein, 55 aa, Homo sapiens; identical to SEQ ID NO: 1144

SEQ ID NO: 1292 - protein, 51 aa, Homo sapiens
DYVKITLQKLMGQTQASSLTAPYIHLEFAFLFIGEESFFENSYSVISNTGL

SEQ ID NO: 1293 - protein, 51 aa, Homo sapiens; identical to SEQ ID NO: 1145

SEQ ID NO: 1294 - protein, 74 aa, Homo sapiens
DPDCDLQWKETGRWEDDGRLRHQKGQLTLPGILLYWRVTTLGMGCWQGSKSLFLLISYSTNTSSDDFPKLMRMR

SEQ ID NO: 1295 - protein, 56 aa, Homo sapiens
SSVAQVKAMIETKTGIIPETQIVTCNGKRLEDGKMMADYGIRKGNLLFLASYCIGG

SEQ ID NO: 1296 - protein, 74 aa, Homo sapiens
LIVLESKKHRVGQYTSSYPSHPNLTLLISFSLILGNHQKMCSLSKRLKEISFLTPANTPCPGWSPSNTIRCQEE

SEQ ID NO: 1297 - protein, 115 aa, Homo sapiens
TLPPDRMKFISTSLLLMLLVSSLSPVQGVLEVYYTSLRCRCVQESSVFIPRRFIDRIQILPRGNGCPRKEIIVWKKNKSIACVDPQAEWIQRMMEVLRKRSSSTPPVPVFKRKIP

SEQ ID NO: 1298 - protein, 53 aa, Homo sapiens; identical to SEQ ID NO: 1267

SEQ ID NO: 1299 - protein, 55 aa, Homo sapiens
EKEVLQLHQFQCLRERFPDADISTKNTCILPLSLLWILVLCLVKSFPGKRTSPYK

SEQ ID NO: 1300 - protein, 53 aa, Homo sapiens [sequence omitted]

SEQ ID NO: 1301 - protein, 125 aa, Homo sapiens
RYQWVRCNPDSNSANCLEEKGPMFELLPGESNKIPRLRTDLFPKTRIQDLNRIFPLSEDYSGSGFGSGSGSGSGSGSGFLTEMEQDYQLVDESDAFHDNLRSLDRNLPSDSQDLGQHGLEEDFML

SEQ ID NO: 1302 - protein, 59 aa, Homo sapiens
SSESGKIRFKSWILVFGKRSVLRRGILLDSPGSSSNIGPFSSRQFAELLSGLQRTHWYL

SEQ ID NO: 1303 - protein, 100 aa, Homo sapiens
GCHGKHHFRLLVGNPVPFPLGSHSQILIQSRSRSRSLIQSSPQKVGRYDSSPGFSSLEKGQSSDGGSCWIHLEVVRTLVLFLQGSLQNYCLDCSAPIGTW

SEQ ID NO: 1304 - protein, 50 aa, Homo sapiens
SWEPGQVSVGTSLSRWQHSDWPCRRGWLSPLETKTGWLETVTTQVLRWSL

SEQ ID NO: 1305 - protein, 131 aa, Homo sapiens
PDSTGELVLSQSPATLSLSPGERATLSCRASQSVATYLGWSQQKPGQAPRIIIYDTSYRAAGIPARFTGSGSGTDFTLTVSSLEPEDFAVYYCHGRAKWPPSLTFGGGTKVEIKRTVAAPSVFIFPPSDEQ

SEQ ID NO: 1306 - protein, 53 aa, Homo sapiens
RLHRRTCVVTVSSHPVFVSRGESHPLLQGQSECCHLLRLVPTETWPGSQDHHL

SEQ ID NO: 1307 - protein, 78 aa, Homo sapiens
CPRWGTPRYWLGALYRNQQSSPTAPPGLLPLEYFPAAPHCSHSRQWRCSQTHRIHHHPQMLGPCRQEICGEIQGCGWF

SEQ ID NO: 1308 - protein, 134 aa, Homo sapiens [sequence omitted]

SEQ ID NO: 1309 - protein, 66 aa, Homo sapiens
ASSSPRIRLTSSFAFSVACLLWCMMPKVGNTQVLAGGTISESAKLTHCTTWAAASGVLPRSSSLLT

SEQ ID NO: 1310 - protein, 141 aa, Homo sapiens
QTNRTPEFLRKFPAGKVPAFEGDDGFCVFESNAIAYYVSNEELRGSTPEAAAQVVQWVSFADSDIVPPASTWVFPTLGIMHHNKQATENAKEEVRRILGLLDAYLKTRTFLVGERVTLVDITVVCTLLWLYKQVLEPSFHQ

SEQ ID NO: 1311 - protein, 61 aa, Homo sapiens
CHKRSLPICTYSQEEHLYGKDGSPVSLPYTLQGLSEASLMRCLKPGHGYKQLHGSKKFCPF

SEQ ID NO: 1312 - protein, 51 aa, Homo sapiens
SIFWGYDGLTFIRKYGFILIVASSSGGVNHFIFTLTWFEFLSHYCIYFAFP

SEQ ID NO: 1313 - protein, 101 aa, Homo sapiens; identical to SEQ ID NO: 930

SEQ ID NO: 1314 - protein, 150 aa, Homo sapiens; identical to SEQ ID NO: 928

SEQ ID NO: 1315 - protein, 115 aa, Homo sapiens; identical to SEQ ID NO: 1143

SEQ ID NO: 1316 - protein, 55 aa, Homo sapiens; identical to SEQ ID NO: 1144

SEQ ID NO: 1317 - protein, 51 aa, Homo sapiens; identical to SEQ ID NO: 1145

SEQ ID NO: 1318 - protein, 68 aa, Homo sapiens
PPAYAACHTGDRFSRRARRCWCGWKKGNRKQKKSLKESCHFLLVRIPDLGEVLESSSLFLLLPLLGLE

SEQ ID NO: 1319 - protein, 101 aa, Homo sapiens; identical to SEQ ID NO: 930

SEQ ID NO: 1320 - protein, 137 aa, Homo sapiens
YINIYNCEPANPSEKNSPSTQYCYSIQSLFLGILSVMLIFAFFQELVIAGIVENEWKRTCSRPKSNIVLLSAEEKKEQTIEIKEEVVGLTETSSQPKNEEDIEIIPIQEEEEEETETNFPEPPQDQESSPIENDSSP

SEQ ID NO: 1321 - protein, 59 aa, Homo sapiens
NKKAMLVECTVHIGGARLITIRLLASPVQSFLWKAVDFSLASLSSSVSTYRISRSQPYR

SEQ ID NO: 1322 - protein, 64 aa, Homo sapiens
TAKRSKIRRQCLWNVQCILAAHASLRFACLLLLFNRFFGRQWIFLLRLCLLQFRLIEFLDLSHI

SEQ ID NO: 1323 - protein, 57 aa, Homo sapiens
EGNACGMYSAYWRRTPHYDSPACFSCSIVSLEGSGFFSCVSVFFSFDLSNFSISAIS

SEQ ID NO: 1324 - protein, 51 aa, Homo sapiens
RRQRRKRKIHCLPKKRLNRRSKQANRNEACAANMHCTFHKHCLLILLLLAV

SEQ ID NO: 1325 - protein, 64 aa, Homo sapiens
  variant (1)...(64): Xaa = Any amino acid
LNILNXALLSVELLYFTFSAFGDHYLIEFVEIDFPDRSLFFNEQMIRNNLTPYMTMELNKLTLI

SEQ ID NO: 1326 - protein, 100 aa, Homo sapiens
LNKRGTNFQFVKLQSRKYWCLLPCEFFLRHAEKMYARDQKDGSKLCHVTCNKIFSSRFFLCWQIISPCSFHSLILAFRVTMIILPMWFLRKKDQFFVCSR

SEQ ID NO: 1327 - protein, 52 aa, Homo sapiens
NSKAESIGACYLVNSSLDMQRKCMQETKKMAPSYVMLPVIKSFLLDSFYVGR

SEQ ID NO: 1328 - protein, 59 aa, Homo sapiens; identical to SEQ ID NO: 1321

SEQ ID NO: 1329 - protein, 64 aa, Homo sapiens; identical to SEQ ID NO: 1322

SEQ ID NO: 1330 - protein, 57 aa, Homo sapiens; identical to SEQ ID NO: 1323

SEQ ID NO: 1331 - protein, 51 aa, Homo sapiens; identical to SEQ ID NO: 1324

SEQ ID NO: 1332 - protein, 50 aa, Homo sapiens
DRYWYSFIIETKRSALLDFPLFVLKGIKDCRFPALSSRGHYEQIKWKDKF

SEQ ID NO: 1333 - protein, 51 aa, Homo sapiens
WPREDRAGNLQSLIPFRTKSGKSSKADLLVSIIKEYQYRSQKRSVSLQGYF

SEQ ID NO: 1334 - protein, 90 aa, Homo sapiens
PKEVRQLAEDFLKDYIHINIGALELSANHNILQIVDVCHDVEKDEKLIRLMEEIMSEKENKTIVFVETKRRCDELTRKMRRDGWPAMGIH

SEQ ID NO: 1335 - protein, 52 aa, Homo sapiens
PWIPMAGHPSLLIFLVSSSHLLLVSTKTMVLFSFSLMISSIRRISFSSFSTS

SEQ ID NO: 1336 - protein, 166 aa, Homo sapiens
  variant (1)...(166): Xaa = Any amino acid
RQFVTATDVVRGNPKLNLAFIANLFNRYPALHKPENQDIDWGALEGETREERTFRNWMNSLGVNPRVNHLYSDLSDALVIFQLYEKIKVPVDWNRVNKPPYPKLGGNMKKLENCNYAVELGKNQAKFSLVGIGGQDLNEGNRTLTLALIWQLMRRYTLNILXEIGG

SEQ ID NO: 1337 - protein, 76 aa, Homo sapiens
LPNQGQCESAVSFIEILSTDANQGELRLILPQFYRVVTILKLLHIASQFGVWRFVYSVPVNRNFDLFIELEDDQGI

SEQ ID NO: 1338 - protein, 73 aa, Homo sapiens
VTVQMIDSRVNTQGVHPVPKCPLFSRLTFKSPPVNVLVLWFVQGRVSVKEVGNKSQVQLGVPSDNICGCDKLP

SEQ ID NO: 1339 - protein, 68 aa, Homo sapiens
LTRGLTPREFIQFLNVRSSLVSPSRAPQSMSWFSGLCRAGYLLKRLAIKAKFNLGFPRTTSVAVTNCR

SEQ ID NO: 1340 - protein, 60 aa, Homo sapiens
WRGSGLLPQVQPKEDSRQGCPQLPEAGTKLRLLHPSYPVLAPQALSGRAMCRPKGALGAA

SEQ ID NO: 1341 - protein, 95 aa, Homo sapiens
LASYSPSTTDMAQSLALSLLTLVLAFGIPRTQGSDGGAQDCCLKYSQRKIPAKVVRSYRKQEPSLGCSIPAILFLPRKRSQAELCADPKELWVQQ

SEQ ID NO: 1342 - protein, 50 aa, Homo sapiens
AWFLLPVAADNLGGNLPLAVLEATVLSPSITALGPGDAKGQNQGKEAQSQ

SEQ ID NO: 1343 - protein, 102 aa, Homo sapiens [sequence omitted]

SEQ ID NO: 1344 - protein, 60 aa, Homo sapiens; identical to SEQ ID NO: 1340

SEQ ID NO: 1345 - protein, 50 aa, Homo sapiens
AWFLLPVAADNLGGNLPLAVLEATVLSPSITALGPGDAKGQNQDKEAQSQ

SEQ ID NO: 1346 - protein, 76 aa, Homo sapiens
TKLVMMQKLLKCSRLVLALALILVLESSVQGYPTQRARYQWVRCNPDSNSANCLEEKGPMFELLPGESNKIPRLRT

SEQ ID NO: 1347 - protein, 68 aa, Homo sapiens
CRSYSNAVGLSWLLPSSWFWNPQFKVILRREPGTNGCAAIQTVILQTALKKKDQCSNYFQVNPTRSPV

SEQ ID NO: 1348 - protein, 87 aa, Homo sapiens
ILTLYSEPSFNTMVSFLRASRSPVRSMVIGPGALSQTRVSRVTTTLGAFGSVTTGPSPSSVFLYLIRLSSSLSISCSSFRDFCGGGL

SEQ ID NO: 1349 - protein, 55 aa, Homo sapiens
HNGFLFEGFQISSKVHGDWSRGTLTNQGEPGDNDIGGFRICHHRTISQQRFLVLN

SEQ ID NO: 1350 - protein, 120 aa, Homo sapiens
LKKPQSPHVEEDDDDELDSKLNYKPPPQKSLKELQEMDKDDESLIKYKKTLLGDGPVVTDPKAPNVVVTRLTLVCESAPGPITMDLTGDLEALKKETIVLKEGSEYRVKIHFKVNRDIVS

SEQ ID NO: 1351 - protein, 124 aa, Homo sapiens
IMHLSFVDNLNVEVLSVSLVHLILEKALDQSGLMILYATGNESALWNCKHQGWGKHNCDHAEDAGVICSKGADLSLRLVDGVTECSGRLEVRFQGEWGTICDDGWDSYDAAVACKQLGCPTAVP

SEQ ID NO: 1352 - protein, 69 aa, Homo sapiens
RGGNMCSGRIEIKFQGRWGTVCDDNFNIDHASVICRQLECGSAVSFSGSSNFGEGSGPIWFDDLICNRK

SEQ ID NO: 1353 - protein, 80 aa, Homo sapiens
LHLPVSGSDLLPLSKSLQHPQHDHSYAFPILDVCSSRELTHFRLHIRSSNQIGPEPSPKLDEPEKLTALPHSSCLQMTDA

SEQ ID NO: 1354 - protein, 59 aa, Homo sapiens
ESNKIPRLRTDLFPKTRIQDLNRIFPLSEDYSGSGFGSGSGSGSGSGSGFLTEMDKDSN

SEQ ID NO: 1355 - protein, 68 aa, Homo sapiens
SWKASLSSTSWNPCPFPLGSHSQILIQSRSRSRSLIQSSPQKVGRYDSSPGFSSLEKGQSSDGGSCWI

SEQ ID NO: 1356 - protein, 158 aa, Homo sapiens
  variant (1)...(158): Xaa = Any amino acid
MMQKLLKCSRVVLALALILVLESSVQGYPTQRARYQWVRCNPDSNSANCLEEKGPMFXLLPGESNKIPRLRTDLFPKTRIQDLNRIFXLSEDYSGSGFGSGSXSGSGSGSGFLTEMEQDYQLVDQSDAFHDNLRSLDRNLPSXSXDLGQHGLEEDFML

SEQ ID NO: 1357 - protein, 68 aa, Homo sapiens
  variant (1)...(68): Xaa = Any amino acid
CRSYSNAVGLSWLLPSSWFWNPQFKVILRREPGTNGCAAIQTVILQTALKKKDQCXNYFQVNPTRSPV

SEQ ID NO: 1358 - protein, 64 aa, Homo sapiens
  variant (1)...(64): Xaa = Any amino acid
SSEXGKIRFKSWILVFGKRSVLRRGILLDSPGSSXNIGPFSSRQFAELLSGLQRTHWYLALCVG

SEQ ID NO: 1359 - protein, 103 aa, Homo sapiens
  variant (1)...(103): Xaa = Any amino acid
GCHGKHHFGLLVGNPVPFPLGSHSQILIQXRSRSRSLIQSSPQKXGRYDSSPGFWSLEKGQSSDGGSCWIHLEVVXTLVLFLQGSLQNYCLDCSAPIGTWLSA

SEQ ID NO: 1360 - protein, 123 aa, Homo sapiens
  variant (1)...(123): Xaa = Any amino acid
VMMQKLLKCSRLVLALALILVLESSVQGYPTQRARYQWVRCNPDSNSANCLEEKGPMFELLPGESNKIPRLRTDLFPKTRIQDLNRIFXLSEDYSGSGFGSRSGSGSGSGSGFLTEMEXGLPN

SEQ ID NO: 1361 - protein, 68 aa, Homo sapiens; identical to SEQ ID NO: 1347

SEQ ID NO: 1362 - protein, 64 aa, Homo sapiens
  variant (1)...(64): Xaa = Any amino acid
SSEXGKIRFKSWILVFGKRSVLRRGILLDSPGSSSNIGPFSSRQFAELLSGLQRTHWYLALCVG

SEQ ID NO: 1363 - protein, 104 aa, Homo sapiens
  variant (1)...(104): Xaa = Any amino acid
GLSWKASLSSTSWVIXVPFPLGSHSQILIQSRSGSRSLIQSSPQKXGRYDSSPGFSSLEKGQSSDGGSCWIHLEVVRTLVLFLQGSLQNYCLDCSAPIGTWLSA

SEQ ID NO: 1364 - protein, 148 aa, Homo sapiens
  variant (1)...(148): Xaa = Any amino acid
TXXVMMQKLLKCSRLVLALALILVLESSVQGYPTQRARYQWVRCNPDSNSANCLEEKGPMXELLXGEXNXIPRLRTDLFPKTRIQDLNRIFPLSEDYSGSGFGSGSGSGSGSGSGFLTEMEQDYQLXDESDAFHDNLXSLDRNLPXDS

SEQ ID NO: 1365 - protein, 68 aa, Homo sapiens
  variant (1)...(68): Xaa = Any amino acid
CRSYSNAVGLSWLLPSSWFWNPQFKVILRREPGTNGCAAIQTVILQTALKKKDQCXNYXQVNXTXSPV

SEQ ID NO: 1366 - protein, 103 aa, Homo sapiens
  variant (1)...(103): Xaa = Any amino acid
GCHGKHHFRLXVGNPVPFPLGSHSQILIQSRSRSRSLIQSSPQKVGRYDSSPGFSSLEKGQSSDGGXCXIHLXVVXTLVLFLQGSLQNYCLDCSAPIGTWLSA

SEQ ID NO: 1367 - protein, 64 aa, Homo sapiens
  variant (1)...(64): Xaa = Any amino acid
SSESGKIRFKSWILVFGKRSVLRRGIXLXSPXSSXNIGPFSSRQFAELLSGLQRTHWYLALCVG

SEQ ID NO: 1368 - protein, 50 aa, Homo sapiens
LTLPGGIRVRRRGRGWRSGGDHGVSRPHCASHCDERVLGLRRLLGALVHP

SEQ ID NO: 1369 - protein, 93 aa, Homo sapiens
GDGVGVGAQAATMAYHGLTVPLIVMSVFWGFVGFLVPWFIPKGPNRGVIITMLVTCSVCCYLFWLIAILAQLNPLFGPQLKNETIWYLKYHWP

SEQ ID NO: 1370 - protein, 65 aa, Homo sapiens
TGHQHGNDNSPVRTLRDEPRHQEADEAPEHAHHNERHSEAVIRHGRRLSANPYPVASLGSHQEVS

SEQ ID NO: 1371 - protein, 68 aa, Homo sapiens
  variant (1)...(68): Xaa = Any amino acid
CXSYSNAVGLSWLLPSSWFWNPQFKVILRREPGTNGCAAIQTVILQTALKKKDQCSNYFXVNPTRSPV

SEQ ID NO: 1372 - protein, 143 aa, Homo sapiens
  variant (1)...(143): Xaa = Any amino acid
XMMXKLLKCSRLVLALALILVLESSVQGYPTQRARYQWVRCNPDSNSANCLEEKGPMFELLPXESNKIPRLRTDLFXKTRIQDLNRIFPLSEDYSGSGXXSGSGSGSXSGSGFLTEMEQDYQLXDESDAFHDNLRSLDRNLPS

SEQ ID NO: 1373 - protein, 64 aa, Homo sapiens
  variant (1)...(64): Xaa = Any amino acid
SSESGKIRFKSWILVFXKRSVLRRGILLDSXGSSSNIGPFSSRQFAELLSGLQRTHWYLALCVG

SEQ ID NO: 1374 - protein, 103 aa, Homo sapiens
  variant (1)...(103): Xaa = Any amino acid
GCHGKHHFRXLVGNPVPFPLGSHSQIXIQSRSRXXSLIQSSPQKVGRYDSSPGFSSLXKGQSSDGGSCWIHXEVVRTLVLFLQGSLQNYCLDCSAPIGTWLSA

SEQ ID NO: 1375 - protein, 73 aa, Homo sapiens
RMLSYSSMLPPSGLMLHYTLLGSNLPLRLKALEGRVFKMLDLVQAQILELKAEGFLVAEKKQNLMTFGTPVLR

SEQ ID NO: 1376 - protein, 52 aa, Homo sapiens
LHAAAEWLDAPLHPPWIQPSIKAEGSRGQSIQDVRSGPSPNSRVKSRGVLSG

SEQ ID NO: 1377 - protein, 64 aa, Homo sapiens
WKVGSKEGVMEHQATRRQHGAITKHPLGFCLSRHLALTLDLVTVVWLIPVNIWRQSYLAFASRA

SEQ ID NO: 1378 - protein, 55 aa, Homo sapiens
LKTGVPNVIRFCFFSATKNPSAFNSRIWAWTRSNILNTLPSRAFSLNGRLDPRRV

SEQ ID NO: 1379 - protein, 69 aa, Homo sapiens
KLLKCSRLVLALALILVLESSVQGYPTQRARYQWVRCNPDSNSANCLEEKGPMFELLPGESNKIPRLRT

SEQ ID NO: 1380 - protein, 66 aa, Homo sapiens
SYSNAVGLSWLLPSSWFWNPQFKVILRREPGTNGCAAIQTVILQTALKKKDQCSNYFQVNPTRSPV

SEQ ID NO: 1381 - protein, 58 aa, Homo sapiens [sequence omitted]

SEQ ID NO: 1382 - protein, 109 aa, Homo sapiens; identical to SEQ ID NO: 674

SEQ ID NO: 1383 - protein, 100 aa, Homo sapiens; identical to SEQ ID NO: 675

SEQ ID NO: 1384 - protein, 103 aa, Homo sapiens [sequence omitted]

SEQ ID NO: 1385 - protein, 55 aa, Homo sapiens
HMVRLDGPSSSETQQESQGEGSQDHSSDMEHSVFRAHVVGSIIDDCEHRNSDEEL

SEQ ID NO: 1386 - protein, 97 aa, Homo sapiens
QFLITVPVLTVINYRPHNMRPEDRMFHIRAVILRALSLAFLLSLRGAGAIKADHVSTYAAFVQTHRPTGEFMFEFDEDEMFYVDLDKKETVWHLEEF

SEQ ID NO: 1387 - protein, 55 aa, Homo sapiens; identical to SEQ ID NO: 791

SEQ ID NO: 1388 - protein, 89 aa, Homo sapiens; identical to SEQ ID NO: 677

SEQ ID NO: 1389 - protein, 89 aa, Homo sapiens; identical to SEQ ID NO: 678

SEQ ID NO: 1390 - protein, 59 aa, Homo sapiens; identical to SEQ ID NO: 679

SEQ ID NO: 1391 - protein, 136 aa, Homo sapiens
RSVKLCKHTDTPEPCVFNDLLHILCCVDVGDRVVGPLSHELWKSEALIWEGRIIYQMPVEHVQFIVRHDIQSVQDAREWQVMARCIQQQAPVRKAGKVLNLSLVDKELGELPRQSQRGVNTGHHLWSGYNSPLTPK

SEQ ID NO: 1392 - protein, 124 aa, Homo sapiens
MMTSVYSSLRLSGELSEFFINKTEIEDFPRFPHRGLLLDTSRHYLPLSSILDTLDVMAYNKLNVFHWHLVDDPSFPYESFTFPELMRKGSYNPVTHIYTAQDVKEVIEYARLRGIRVLTEFDTP

SEQ ID NO: 1393 - protein, 52 aa, Homo sapiens
DCLGSSPSSLSTRLRLRTFPAFLTGACCWIHLAITCHSLASWTLWMSWRTIN

SEQ ID NO: 1394 - protein, 59 aa, Homo sapiens
GNGHTLEKNVLVVSVVTPGCNQLPTLESVENYTLTINDDQCLLLSETVWGALRVLYQQD

SEQ ID NO: 1395 - protein, 88 aa, Homo sapiens
GQRRPRSIGERGGGTPGEPGAWTQPELITEAGVQSRVTCSRNKQPLWGHQVERQDDKEGARVLAKAGLLATSAGQRPPRSACPHHAVP

SEQ ID NO: 1396 - protein, 157 aa, Homo sapiens
  variant (1)...(157): Xaa = Any amino acid
LXXKAGDQVPGGQDSALVGPEDRGGPGASGREVEGHRESQERGHSQNSSQRLASSPGSRAAGTSSHSGGTRWRGKTTKRVPVFLRKRGCWPRVLDRGPHALLAPITPFRDCHAESAXRKGDSKRECGQACLRPSGRTPGLTXRRCHHFRFXXLFFFF

SEQ ID NO: 1397 - protein, 156 aa, Homo sapiens
  variant (1)...(156): Xaa = Any amino acid
XXXRLVTRSQAGKTQPWWGLRTEEAQEHRGERWRDTGRARSVDTARTHHRGWRPVPGHVQQEQAATLGAPGGEARRQRGCPCSCESGAAGHECWTEAPTLCLPPSRRSVTVTQNLXTGRETLSGSAAKPASARQGGLPGSLXGGATISALXSFSFS

SEQ ID NO: 1398 - protein, 75 aa, Homo sapiens
  variant (1)...(75): Xaa = Any amino acid
RAEAGLAALPLRVSLPXCRFCVTVTERRDGGKQSVGASVQHSWPAAPLSQEHGHPLCRLASPPGAPRVAACSCCT

SEQ ID NO: 1399 - protein, 111 aa, Homo sapiens
  variant (1)...(111): Xaa = Any amino acid
QSRNGVMGASRAWGPLSSTRGQQPRFRKNTGTLFVVLPLHLVPPEWLLVPAARDPGLDASLCDEFWLCPRSWLSRCPSTSLPDAPGPPLSSGPTKAESCPPGTWSPAFXXR

SEQ ID NO: 1400 - protein, 104 aa, Homo sapiens
  variant (1)...(104): Xaa = Any amino acid
WGQAERGGLCPALVASSPAFARTRAPSLSSCLSTWCPQSGCLFLLHVTRDWTPASVMSSGCVHAPGSPGVPPPLSPMLLGLLCPQAPPRLSLARLGPGHQPXXX

SEQ ID NO: 1401 - protein, 53 aa, Homo sapiens [sequence omitted]

SEQ ID NO: 1402 - protein, 67 aa, Homo sapiens
  variant (1)...(67): Xaa = Any amino acid
KPPFFXLLKRKGPQDTIFEWLMVFKXFRELPAFYLETEKARKILSFLACISRVGANDSKLVSKPIPL

SEQ ID NO: 1403 - protein, 120 aa, Homo sapiens; identical to SEQ ID NO: 715
  variant (1)...(120): Xaa = Any amino acid

SEQ ID NO: 1404 - protein, 52 aa, Homo sapiens; identical to SEQ ID NO: 716
  variant (1)...(52): Xaa = Any amino acid

SEQ ID NO: 1405 - protein, 60 aa, Homo sapiens; identical to SEQ ID NO: 717
  variant (1)...(60): Xaa = Any amino acid

SEQ ID NO: 1406 - protein, 52 aa, Homo sapiens [sequence omitted]

SEQ ID NO: 1407 - protein, 75 aa, Homo sapiens
SSHLLSYIHLGIPISNVSLEIRAPGGQVTEGQKLILLCSVAGGTGNVTFSWYREATGTSMGKKTQRSLSAELEIP

SEQ ID NO: 1408 - protein, 63 aa, Homo sapiens
DIQMSLSTFLKDNCYRFPTSIGMLIMDYLYNLHIPTFCIREWNQSNPVPRVSLRVLTCCLISI

SEQ ID NO: 1409 - protein, 68 aa, Homo sapiens
GISSSADRERWVFFPILVPVASLYQENVTFPVPPATEQSRISFCPSVTCPPGARISKLTLEMGIPRWI

SEQ ID NO: 1410 - protein, 56 aa, Homo sapiens; identical to SEQ ID NO: 729

SEQ ID NO: 1411 - protein, 50 aa, Homo sapiens; identical to SEQ ID NO: 730

SEQ ID NO: 1412 - protein, 70 aa, Homo sapiens; identical to SEQ ID NO: 731

SEQ ID NO: 1413 - protein, 53 aa, Homo sapiens; identical to SEQ ID NO: 732

SEQ ID NO: 1414 - protein, 69 aa, Homo sapiens
  variant (1)...(69): Xaa = Any amino acid
XHKICSIDVHESSCCXGAVSTDXWNNWPVRKLIKAANSTXECNRXXQGLISLSDGGLXICXPGXYCVIN

SEQ ID NO: 1415 - protein, 64 aa, Homo sapiens
  variant (1)...(64): Xaa = Any amino acid
XPXQQXSSPPSERLIRPCXXLLHSXVLFAALMSFLTGQLFXKSVDTAPXQQEDSWTSIEHILWX

SEQ ID NO: 1416 - protein, 92 aa, Homo sapiens
  variant (1)...(92): Xaa = Any amino acid
VERTRKPSLSEKKNNPSKWXVSSVYDTIXSWXTNXKSSIRKANKALXXSIAFXCTVCSFDELPHRPIIPXVCGYRSXTARGLMDVYRTYLVX

SEQ ID NO: 1417 - protein, 77 aa, Homo sapiens
  variant (1)...(77): Xaa = Any amino acid
GLEFRKAERFLIWQSSSSSRXLKGLSFCRRTCFSSSNSAVLFGIHPLQVFYVXNHHFNCFTNPAFLIDGSQHLSPTG

SEQ ID NO: 1418 - protein, 75 aa, Homo sapiens
  variant (1)...(75): Xaa = Any amino acid
PFLELHVNLCGQAAFAGVFTGRQRLQACLPAGSVCRRVYMQAXHHVRPLVQGFRGPAQVNRLCSHKFTELXGCAT

SEQ ID NO: 1419 - protein, 74 aa, Homo sapiens
  variant (1)...(74): Xaa = Any amino acid
AAREPVWAGSVCRRVYGQAAFAGVFTGRQRLQACLHAGVXPCETTGPGFQRSCSGESAVFSQVHGAXWVCNMKY

SEQ ID NO: 1420 - protein, 66 aa, Homo sapiens
  variant (1)...(66): Xaa = Any amino acid
LDXGLXPLSVPSVPHSTSISCCTPXQLRELVRTQPIHLSRTSETLDQWSHMVXRLHVNTPANAACR

SEQ ID NO: 1421 - protein, 127 aa, Homo sapiens
  variant (1)...(127): Xaa = Any amino acid
PPRLTSGRWGPTGPXASMPWKGRXWPRMSEPRATWSAQPLAIGEYSRCLSASSELPSTRPGDETEGGSSPSMSARSSKPQETSHNTYVCTPKTNGEREGREARKAWCFLWVHPKQRLLLDTVIDEAW

SEQ ID NO: 1422 - protein, 54 aa, Homo sapiens
VQDLLNPKRLHTTLMYAPQRLMGRGRAGKPGKLGVFSGYTPSSVSFWIQLLMRL

SEQ ID NO: 1423 - protein, 76 aa, Homo sapiens
  variant (1)...(76): Xaa = Any amino acid
TQTDQREMGPHRAXCVNAMEGKXLAQDVRAKGYLECSALSNRGVQQVFECVVRTAVNQARRRNRRRLFSINECKIF

SEQ ID NO: 1424 - protein, 138 aa, Homo sapiens; identical to SEQ ID NO: 778
  variant (1)...(138): Xaa = Any amino acid

SEQ ID NO: 1425 - protein, 60 aa, Homo sapiens; identical to SEQ ID NO: 779
  variant (1)...(60): Xaa = Any amino acid

SEQ ID NO: 1426 - protein, 66 aa, Homo sapiens; identical to SEQ ID NO: 780

SEQ ID NO: 1427 - protein, 55 aa, Homo sapiens
KLYNACIMKKDLPFPYILIELHRLAVHFVIHVIRILDSIAFEICFFLGTKSQLIV

SEQ ID NO: 1428 - protein, 52 aa, Homo sapiens; identical to SEQ ID NO: 787
  variant (1)...(52): Xaa = Any amino acid

SEQ ID NO: 1429 - protein, 56 aa, Homo sapiens; identical to SEQ ID NO: 792

SEQ ID NO: 1430 - protein, 177 aa, Homo sapiens; identical to SEQ ID NO: 793
  variant (1)...(177): Xaa = Any amino acid

SEQ ID NO: 1431 - protein, 56 aa, Homo sapiens; identical to SEQ ID NO: 794

SEQ ID NO: 1432 - protein, 70 aa, Homo sapiens [sequence omitted]

SEQ ID NO: 1433 - protein, 53 aa, Homo sapiens; identical to SEQ ID NO: 796

SEQ ID NO: 1434 - protein, 146 aa, Homo sapiens [sequence omitted]

SEQ ID NO: 1435 - protein, 58 aa, Homo sapiens; identical to SEQ ID NO: 798

SEQ ID NO: 1436 - protein, 69 aa, Homo sapiens
  variant (1)...(69): Xaa = Any amino acid
EGKLSDNRSSIRWVCPCIACQRLAHHQGSGVAVLPCVVCIASLSSACLSPSXPPSPLXLYQVCHGEQEY

SEQ ID NO: 1437 - protein, 50 aa, Homo sapiens
  variant (1)...(50): Xaa = Any amino acid
LWKRAPPGAXGKDCFSLSSPIPGYSRADQQGHFHLTSCCSLMFPWDKRGN

SEQ ID NO: 1438 - protein, 59 aa, Homo sapiens
  variant (1)...(59): Xaa = Any amino acid
VLLXHPLPXGSTRYATGSRNINPRILTLSGNTECTPGMLGETRGILLTINLGSKRPYLI

SEQ ID NO: 1439 - protein, 68 aa, Homo sapiens
  variant (1)...(68): Xaa = Any amino acid
QPQQHPLGLSLYRMPEACASPRVGRSCAALRCVHSLSLLCLLKSFLXTLSLXALPGMPRGAGILILES

SEQ ID NO: 1440 - protein, 54 aa, Homo sapiens
  variant (1)...(54): Xaa = Any amino acid
LSVAIQSVLQGCWVKPGEFYSPLTLGVRGHTSSETLPARAGRSKGXFPXPLRXY

SEQ ID NO: 1441 - protein, 100 aa, Homo sapiens
  variant (1)...(100): Xaa = Any amino acid
NSPGFTQHPWSTLCIATESQDSRINIPAPRGIPGRAXRERVXKKDLSKQRRERLCTQRRAAQLRPTLGDAQASGMRYRDRPSGCCCGCHLISPLIPREHQ

SEQ ID NO: 1442 - protein, 72 aa, Homo sapiens
  variant (1)...(72): Xaa = Any amino acid
YXGAKXGGXGLLNGPPGQVKFQMRYGLLLPRLMVSRIPRVSPSIPGVHSVLPLRVRILGLIFLLPVAYLVEX

SEQ ID NO: 1443 - protein, 115 aa, Homo sapiens
  variant (1)...(115): Xaa = Any amino acid
PMWLVFXLXLARFHTLTSLSQPQETMIGLLLLGEKRTQDTHSEWLSSWTVYLHTPRVFHSLMVLSRDPETICRLSEEKATLSTSLVWPTNRLVVVPVVRSQRRRVPSQEPERANW

SEQ ID NO: 1444 - protein, 50 aa, Homo sapiens
LDGFISRSRDNLPVVRGEGHTQHILGMAHKSPRGGARCEIPEAQGSIPGA

SEQ ID NO: 1445 - protein, 114 aa, Homo sapiens
  variant (1)...(114): Xaa = Any amino acid
QFALSGSWDGTLRLWDLTTGTTTRRFVGHTKDVLSVAFSSDNRQIVSGSRDKTIKLWNTLGVCKYTVQDESHSEWVSCVRFSPNSSNPIIVSCGWDKLVKVWNLAXCKXKTNHI

SEQ ID NO: 1446 - protein, 74 aa, Homo sapiens
  variant (1)...(74): Xaa = Any amino acid
VWPSPLTTGRLSLDLEIKPSSYGIPWVCANTLSRMRATQSGCLVSASRPTAATLSSSPVAGTSWSRYGTWLXAX

SEQ ID NO: 1447 - protein, 60 aa, Homo sapiens
  variant (1)...(60): Xaa = Any amino acid
HKICSRDVHESSCCVGAXSTDFWNNWPVRKPIKAANSTMNAIESQRALLAFXMEDLRFVA

SEQ ID NO: 1448 - protein, 60 aa, Homo sapiens
  variant (1)...(60): Xaa = Any amino acid
ATNLKSSIXKANKALWLSIAFIVLFAALMGFLTGQLFQKSVDXAPTQQEDSWTSLEHILW

SEQ ID NO: 1449 - protein, 58 aa, Homo sapiens
SNIKAIRRHPCHHLTQGGRCWSWVQLGRRSRSRKQGDYGSQSVSKWAGLPGRDYSEGQ

SEQ ID NO: 1450 - protein, 146 aa, Homo sapiens
ANGSAETSALDTGFSLNLSELREYTEGLTEAKEDDDGDHSSLQSGQSVISLLSSEELKKLIEEVKVLDEATLKQLDGIHVTILHKEEGAGLGFSLAGGADLENKVITVHRVFPNGLASQEGTIQKGNEVLSSTASLSRGPRTMMPW

SEQ ID NO: 1451 - protein, 62 aa, Homo sapiens
TVITLFSRSAPPAKLNPRPAPSSLCKMVTWMPSNCFNVASSRTFTSSMSFFNSSELSREITD

SEQ ID NO: 1452 - protein, 109 aa, Homo sapiens
  variant (1)...(109): Xaa = Any amino acid
SPARPLIRSDKMKETIMNQEKLAKLQAQVRIGGKGTARRKKKVVHRTATADDKKLQFSLKKLXVNNISGIEEVNMFTNQGTVIHFNNPKVQASLAANTFTITGHAETKQ

SEQ ID NO: 1453 - protein, 81 aa, Homo sapiens
GELKFFVICCGCSMNHLLLSASSSFPTNAHLCLQFGEFFLVHDCFFHLVGANKGPRGGLGLVLKGSRVDHLRLGAHTRGRK

SEQ ID NO: 1454 - protein, 59 aa, Homo sapiens
  variant (1)...(59): Xaa = Any amino acid
TYSPLQYQRYCLPXTSLRRTEVFCHLLWLFYEPPSSFCEQFLSHQCALVPAVWRVFPGS

SEQ ID NO: 1455 - protein, 153 aa, Homo sapiens
LRDSRDCVTSFVSFDLESLSRTMRHSKRTYCPDWDDKDWDYGKWRSSSSHKRRKRSHSSAQENKRCKYNHSKMCDSHYLESRSINEKDYHSRRYIDEYRNDYTQGCEPGHRQRDHESRYQNHSSKSSGRSGRSSYKSKHRIHHSTSHRRSHGV

SEQ ID NO: 1456 - protein, 60 aa, Homo sapiens [sequence omitted]

SEQ ID NO: 1457 - protein, 98 aa, Homo sapiens
  variant (1)...(98): Xaa = Any amino acid
MRKIIIVDATLMSTEMTTLKDVNLDIAKETMKAGIRTIVASLLVEVEEVVIKANTGFTTVLHIVVHMGYEPFLPARAGAXGEFQHTXRRSRGSELGPX

SEQ ID NO: 1458 - protein, 73 aa, Homo sapiens [sequence omitted]

SEQ ID NO: 1459 - protein, 62 aa, Homo sapiens [sequence omitted]

SEQ ID NO: 1460 - protein, 89 aa, Homo sapiens
STVVNPVFAFITTSSTSTRRLATMVLIPAFMVSLAMSRFTSLSVVISVLINVASTMIIFLIYRPAFQIMAITHFRVIVFAALVLLGTAM

SEQ ID NO: 1461 - protein, 74 aa, Homo sapiens [sequence omitted]

SEQ ID NO: 1462 - protein, 66 aa, Homo sapiens; identical to SEQ ID NO: 822

SEQ ID NO: 1463 - protein, 75 aa, Homo sapiens; identical to SEQ ID NO: 823

SEQ ID NO: 1464 - protein, 59 aa, Homo sapiens; identical to SEQ ID NO: 824

SEQ ID NO: 1465 - protein, 59 aa, Homo sapiens; identical to SEQ ID NO: 825
  variant (1)...(59): Xaa = Any amino acid

SEQ ID NO: 1466 - protein, 63 aa, Homo sapiens; identical to SEQ ID NO: 826
  variant (1)...(63): Xaa = Any amino acid

SEQ ID NO: 1467 - protein, 65 aa, Homo sapiens
KSGVGIPFHMHIDYFLSFFKTCFSGFLNVPDDSLSCRTVNVNLSRGLWLDVNLIKLLCPRNSAPP

SEQ ID NO: 1468 - protein, 107 aa, Homo sapiens
KMEHSDENIQFWMACETYKKIASRWSRISRAKKLYKIYIQPQSPREINIDSSTRETIIRNIQEPTETCFEEAQKIVYMHMERDSYPRFLKSEMYQKLLKTMQSNNSF

SEQ ID NO: 1469 - protein, 74 aa, Homo sapiens
KWSTVTRIFNSGWHVKPIRKLPHGGAEFLGQRSFIRFTSSHSPLERLTLTVRQERLSSGTFRNPLKHVLKKLRK

SEQ ID NO: 1470 - protein, 63 aa, Homo sapiens
LLPLYPEILEMQEWWLGWKIMIDSVEGQAVGVFWGQSRVNTVPHYLDLLAPIPGQMLKKKNVN

SEQ ID NO: 1471 - protein, 181 aa, Homo sapiens
SRAEMLGAINQESRVSKAVEVMIQHVENLKRMYAKEHAELEELKQVLLQNERSFNPLEDDDDCQIKKRSASLNSKPSSLRRVTIASLPRNIGNAGMVAGMENNDRFSRRSSSWRILGSKQSEHRPSLPRFISTYSWADAEEEKCELKTKDDSEPSGEETVERTRKPSLSEKKNNPSKWDVS

SEQ ID NO: 1472 - protein, 109 aa, Homo sapiens
VLINRGNEGRCSLCFDPKIRQLLDLLLNRSLFSIPATIPAFPIFLGKEAIVTLRREDGLEFREAERFLIWQSSSSSRGLKDLSFCRRTCFSSSNSACSLAYILFKFSTC

SEQ ID NO: 1473 - protein, 100 aa, Homo sapiens [sequence omitted]

SEQ ID NO: 1474 - protein, 103 aa, Homo sapiens [sequence omitted]

SEQ ID NO: 1475 - protein, 58 aa, Homo sapiens [sequence omitted]

SEQ ID NO: 1476 - protein, 109 aa, Homo sapiens
HTAPALDIAWCPHNDNVIASGSEDCTVMVWEIPDGGLMLPLREPVVTLEGHTKRVGIVAWHTTAQNVLLSAGCDNVIMVWDVGTGAAMLTLGPEVHPDTIYSVDWSRDG

SEQ ID NO: 1477 - protein, 94 aa, Homo sapiens; identical to SEQ ID NO: 844
  variant (1)...(94): Xaa = Any amino acid

SEQ ID NO: 1478 - protein, 57 aa, Homo sapiens; identical to SEQ ID NO: 845

SEQ ID NO: 1479 - protein, 93 aa, Homo sapiens; identical to SEQ ID NO: 846
  variant (1)...(93): Xaa = Any amino acid

SEQ ID NO: 1480 - protein, 121 aa, Homo sapiens; identical to SEQ ID NO: 847
  variant (1)...(121): Xaa = Any amino acid

SEQ ID NO: 1481 - protein, 54 aa, Homo sapiens; identical to SEQ ID NO: 848
  variant (1)...(54): Xaa = Any amino acid

SEQ ID NO: 1482 - protein, 59 aa, Homo sapiens; identical to SEQ ID NO: 849

SEQ ID NO: 1483 - protein, 67 aa, Homo sapiens; identical to SEQ ID NO: 850
  variant (1)...(67): Xaa = Any amino acid

SEQ ID NO: 1484 - protein, 55 aa, Homo sapiens; identical to SEQ ID NO: 851
  variant (1)...(55): Xaa = Any amino acid

SEQ ID NO: 1485 - protein, 80 aa, Homo sapiens
  variant (1)...(80): Xaa = Any amino acid
QTIYNISSLKSSFKDHRQTSSPLYFSWGDKGKKRKCKLSYSHSENLWFHAILSQLKVTNLRSSDLKLKNQXPYIRMSCCH

SEQ ID NO: 1486 - protein, 76 aa, Homo sapiens
  variant (1)...(76): Xaa = Any amino acid
VLPGTLIPLCQVMHSQILGTRVWTSLGGIILPAIIELXGRLNNIIYMTYVXARLAPGKYSGCTNHCSYTXQXLKES

SEQ ID NO: 1487 - protein, 67 aa, Homo sapiens
  variant (1)...(67): Xaa = Any amino acid
EQWLVHPEYFPGAKRXSTYVMYIMLFNLXNNSIMAGRIMPPKDVHTLVPRICECITWQRGIKVPGRT

SEQ ID NO: 1488 - protein, 67 aa, Homo sapiens
KISNLKMGHNYTFTVQARCLFGNQICGEPAILLYDELGSGADASATQAARSTDVAAVVVPILFLILL

SEQ ID NO: 1489 - protein, 58 aa, Homo sapiens
RWVIITRSPSKQDAFLATRSVGSLPSCCTMSWGLVQMHLQRRLPDLRMLLLWWCPSYS

SEQ ID NO: 1490 - protein, 61 aa, Homo sapiens
DGHHHSSNIRRSGSLRCRCICTRPQLIVQQDGRLPTDLVAKKASCLDGERVIMTHLQVGNF

SEQ ID NO: 1491 - protein, 56 aa, Homo sapiens
SSIRNKMGTTTAATSVDLAACVADASAPDPSSSYSRMAGSPQIWLPKRHLAWTVNV

SEQ ID NO: 1492 - protein, 67 aa, Homo sapiens; identical to SEQ ID NO: 871
  variant (1)...(67): Xaa = Any amino acid

SEQ ID NO: 1493 - protein, 66 aa, Homo sapiens; identical to SEQ ID NO: 872
  variant (1)...(66): Xaa = Any amino acid

SEQ ID NO: 1494 - protein, 60 aa, Homo sapiens
  variant (1)...(60): Xaa = Any amino acid
TSSPAAPTSACASRPPGPSWTWGRAPRTESSQPRGSSSCSARWCLGRCCCXGNDGKNXNX

SEQ ID NO: 1495 - protein, 60 aa, Homo sapiens
  variant (1)...(60): Xaa = Any amino acid
PAVLRHLPPRAPAAPQALPGHGGGHQEPNHHSRGDHPPVLRGGAWDAAAVXETMARTXTX

SEQ ID NO: 1496 - protein, 60 aa, Homo sapiens
  variant (1)...(60): Xaa = Any amino acid
QQSCGTYLRVRQPPPRPFLDMGEGTKNRIITAEGIILLFCAVVPGTLLLXRKRWQERXLX

SEQ ID NO: 1497 - protein, 60 aa, Homo sapiens
  variant (1)...(60): Xaa = Any amino acid
XEXSFLPSFPXQQQRPRHHRAEQEDDPLGCDDSVLGALPHVQEGPGGRLAHAEVGAAGLL

SEQ ID NO: 1498 - protein, 53 aa, Homo sapiens
  variant (1)...(53): Xaa = Any amino acid
XSXRSCHRFXNSSSVPGTTAQNRRMIPSAVMIRFLVPSPMSRKGLGGGWRTRR

SEQ ID NO: 1499 - protein, 51 aa, Homo sapiens
PAYNGDVVFLFTFVYYACVFSTTLGSGRNGQTEDELYPGPAGPACSPLCSP

SEQ ID NO: 1500 - protein, 79 aa, Homo sapiens
QPTMGMLCFCSPSFTMPVSSPPRWGLGGMDRQRMSSTQGLQDLPVAHSARLSTTTPAKEDSIWQSFFQVPSYTCASAFS

SEQ ID NO: 1501 - protein, 71 aa, Homo sapiens
LGTWKKLCQMESSLAGVVVLRRAEWATGRSCRPWVELILCLSIPPRPQRGGEDTGIVNEGEQKHNIPIVGW

SEQ ID NO: 1502 - protein, 67 aa, Homo sapiens
KSRGTGIAGHLEEALPNGILLGRSGSAKASRVGYRQVLQALGRAHPLSVHSSQTPAWWRRHRHSKRR

SEQ ID NO: 1503 - protein, 71 aa, Homo sapiens [sequence omitted]

SEQ ID NO: 1504 - protein, 73 aa, Homo sapiens; identical to SEQ ID NO: 882

SEQ ID NO: 1505 - protein, 74 aa, Homo sapiens
AAREPVWAGSVCRRVYGQAAFAGVFTGRQRLQACLHAGVAPCETTGPGFQRSCSGESAVFSQVHGAEWVCNMKY

SEQ ID NO: 1506 - protein, 66 aa, Homo sapiens
LDDGLQPLSVPSVPHSTSISCCTPTQLRELVRTQPIHLSRTSETLDQWSHMVLRLHVNTPANAACR

SEQ ID NO: 1507 - protein, 98 aa, Homo sapiens
IAGTLKFNPETDYLTGTDGKKFRLEAPDADELPKGEFDPGQDTYQHPPKDSSGQHVDVSPTSQRLQLLEPFDKWDGKDLEDLQILIKVKGKCTTDHIS

SEQ ID NO: 1508 - protein, 62 aa, Homo sapiens
GSAGPPGPCHPTCQKAPGAAGAGWWGSRPHAARCCPWVGAGRCPALGQTPLWEAHLHPEPPA

SEQ ID NO: 1509 - protein, 97 aa, Homo sapiens
DVVSGTLPFDLDEDLQVLQVLAIPLVKRLQELQALAGGAHVHMLPAAVLGWVLVGVLPWVKLPFGKLICIRSLQPELLAIRARQVVGLWVELEGSRN

SEQ ID NO: 1510 - protein, 54 aa, Homo sapiens
EMWSVVHFPLTLMRICRSSRSLPSHLSKGSRSCRRWLVGLTSTCCPLLSLGGCW

SEQ ID NO: 1511 - protein, 137 aa, Homo sapiens
  variant (1)...(137): Xaa = Any amino acid
PCLXSXVTRKRPCLPSMTLMEEMLREAFRCMTQEPMKGPIAMQSGPKPLFRRMSSLVGPTQSFFMRESKTLGAVQIMNGLFHIALGGLLMIPARDLCTHLCDCVVPSLGEALCILFSGSLLAXTEKKLXEVVWSKEK

SEQ ID NO: 1512 - protein, 67 aa, Homo sapiens
  variant (1)...(67): Xaa = Any amino acid
LPXIXGHSEEAMSTLNDTHGGNAERSIQMHDTRANERPYCYAIWSKTTLQEDVFTGGPHAKLLHEGI

SEQ ID NO: 1513 - protein, 137 aa, Homo sapiens
  variant (1)...(137): Xaa = Any amino acid
HFSFDQTTXWSFFSVXARSDPENNIHNASPREGTTQSHRWVHRSLAGIIRRPPRAMWKSPFIIWTAPKVLDSLMKKLCVGPTSEDILLKSGFGPDCIAIGPFIGSCVMHLNASLSISSMSVIEGRHGLFRVTXDXRQ

SEQ ID NO: 1514 - protein, 61 aa, Homo sapiens
  variant (1)...(61): Xaa = Any amino acid
IFPLTKQLXGVFSPXLPGVIRKIIYIMPPPERVPHSHTDGCIDPLLGSSEDPPGQCGRAHS

SEQ ID NO: 1515 - protein, 87 aa, Homo sapiens
LGGPGKGLGHEPGSSEAVTEAREPAPRSWGDLALTPGLGAHLQTTSLPLSAASLCPHRWLSGQCPGPRRCDLPPCQPCCHPCPAAGR

SEQ ID NO: 1516 - protein, 113 aa, Homo sapiens [sequence omitted]

SEQ ID NO: 1517 - protein, 79 aa, Homo sapiens
LKQRNTLKDGIIMIQTLLIILFIIVPIFLLLDKDDSKAGMEEDHTYEGLDIDQTATYEDIVTLRTGEVKWSVGEHPGQE

SEQ ID NO: 1518 - protein, 51 aa, Homo sapiens; identical to SEQ ID NO: 1499

SEQ ID NO: 1519 - protein, 79 aa, Homo sapiens
QPTMGMLCFCSPSFTMPVSSPPRWGLGGMDRQRMSSTQGLQDLPVAHSARLSTTTPAKEDSIWQSFFQVPSYTCASAFL

SEQ ID NO: 1520 - protein, 71 aa, Homo sapiens; identical to SEQ ID NO: 1501

SEQ ID NO: 1521 - protein, 68 aa, Homo sapiens
EKSRGTGIAGHLEEALPNGILLGRSGSAKASRVGYRQVLQALGRAHPLSVHSSQTPAWWRRHRHSKRR

SEQ ID NO: 1522 - protein, 117 aa, Homo sapiens
KKQRRRSHKAIEMEHPLGELRQGAPETDFQDSFFEVLCGVKYSSAKRVTGKGPVKQQFLISSLSSLRIIYPKILCIYKMYTSLQFTKHSLLPNTYPCCMANEMSNPTGYMAVELHSK

SEQ ID NO: 1523 - protein, 68 aa, Homo sapiens
MQSILGYIILREDKDDIKNCCFTGPLPVTLFAEEYLTPHSTSKKLSWKSVSGAPCLNSPSGCSISIAL

SEQ ID NO: 1524 - protein, 88 aa, Homo sapiens; identical to SEQ ID NO: 995

SEQ ID NO: 1525 - protein, 55 aa, Homo sapiens; identical to SEQ ID NO: 791

SEQ ID NO: 1526 - protein, 52 aa, Homo sapiens
GQPGVLLLVQIHELLPGPQAVRVVGDCLPECRALGHGVLGPPKKQEPEPLKA

SEQ ID NO: 1527 - protein, 75 aa, Homo sapiens
LPRTTSSRRKSTRNCNLSFISMVKGSQACCFSSKYTNFSQAHRRSGWSVTASPSVGHSAMASSGRLRSKSQSLSR

SEQ ID NO: 1528 - protein, 76 aa, Homo sapiens
GLERLWLLLLRRPEDAMAECPTLGEAVTDHPDRLWAWEKFVYLDEKQHAWLPLTIEIKDRLQLRVLLRREDVVLGR

SEQ ID NO: 1529 - protein, 52 aa, Homo sapiens
ALRGSGSCFLGGPRTPWPSARHSGRQSPTTRTACGPGRSSCIWTRSSTPGCP

SEQ ID NO: 1530 - protein, 96 aa, Homo sapiens [sequence omitted]

SEQ ID NO: 1531 - protein, 54 aa, Homo sapiens [sequence omitted]

SEQ ID NO: 1532 - protein, 59 aa, Homo sapiens
VSFGGILPGGSHHLLLRTYPFTYLLSCWTSAFQGPEKMGTPMQAQDYHPEDRSCPCCFL

SEQ ID NO: 1533 - protein, 55 aa, Homo sapiens [sequence omitted]

SEQ ID NO: 1534 - protein, 66 aa, Homo sapiens
QGLMSEPQPDLEPPQHGLYMLFLLVLVFFLMGLAGFMICHVLKKKGYRCRTSRGSEPDDAQLQPRE

SEQ ID NO: 1535 - protein, 54 aa, Homo sapiens
  variant (1)...(54): Xaa = Any amino acid
TVICWFSLKNDLWCEAQISGNIRKTWSGGGSSGACITXPAPQLFPASSASCRTY

SEQ ID NO: 1536 - protein, 55 aa, Homo sapiens
  variant (1)...(55): Xaa = Any amino acid
LYVRQLAEEAGKSCGAXSVMQAPEEPPPDQVFRMFPDICASHQRSFFRENQQITV

SEQ ID NO: 1537 - protein, 61 aa, Homo sapiens
CRPPRSRRQTRSSGCFQIFVPHTRDHFSEKTNRSPSKCVAWAPHPVCVLHPSPCYSGPHHD

SEQ ID NO: 1538 - protein, 96 aa, Homo sapiens
  variant (1)...(96): Xaa = Any amino acid
VCPATGRRGWEELWSRXCDAGPRGAAARPGLPDVSRYLCLTPEIIFQRKPTDHRLSASLGRPTPSASCIHLPVTVARIMIKECGSLCLGWDALLCT

SEQ ID NO: 1539 - protein, 115 aa, Homo sapiens [sequence omitted]

SEQ ID NO: 1540 - protein, 50 aa, Homo sapiens; identical to SEQ ID NO: 1444

SEQ ID NO: 1541 - protein, 114 aa, Homo sapiens
QFALSGSWDGTLRLWDLTTGTTTRRFVGHTKDVLSVAFSSDNRQIVSGSRDKTIKLWNTLGVCKYTVQDESHSEWVSCVRFSPNSSNPIIVSRGWDKLVKVWNLANCKLKTNHI

SEQ ID NO: 1542 - protein, 74 aa, Homo sapiens
VWPSPLTTGRLSLDLEIKPSSYGIPWVCANTLSRMRATQSGCLVSASRPTAATLSSSPVAGTSWSRYGTWLTAS

SEQ ID NO: 1543 - protein, 55 aa, Homo sapiens
LYVRQLAEEAGKSCGAGSVMQAPEEPPPDQVFRMFPDTCASHQRSFFRENQQITV

SEQ ID NO: 1544 - protein, 61 aa, Homo sapiens [sequence omitted]

SEQ ID NO: 1545 - protein, 96 aa, Homo sapiens
VCPATGRRGWEELWSRLCDAGPRGAAARPGLPDVSRYLCLTPEIIFQRKPTDHRLSASLGRPTPSASCIHLPVTVARIMIKECGSLCLGWDALLCT

SEQ ID NO: 1546 - protein, 54 aa, Homo sapiens [sequence omitted]

SEQ ID NO: 1547 - protein, 52 aa, Homo sapiens
SPAESLTLSSCALSFTVPPTQDPNFFYSILFPLVNRRAQYDLFSKEPAGIWF

SEQ ID NO: 1548 - protein, 62 aa, Homo sapiens
KKLGSWVGGTVKLRAHELKVSDSAGLHRESCAHHSVQVLSLPRQHRTPAPLLTWIIEFPPKI

SEQ ID NO: 1549 - protein, 62 aa, Homo sapiens
SEVGAALKKLPRRTNRHRSDRDFVIRTRFLPAPLKTGHIVLFCLQEETRWNKRNWDLGLEGQ

SEQ ID NO: 1550 - protein, 62 aa, Homo sapiens
SLEHMNSRLVTLQDFTERAVPIIQSKCFLCPDSTELQPRYLHGSSSFHLKYDSIYFESLLPN

SEQ ID NO: 1551 - protein, 64 aa, Homo sapiens; identical to SEQ ID NO: 1057
  variant (1)...(64): Xaa = Any amino acid

SEQ ID NO: 1552 - protein, 53 aa, Homo sapiens; identical to SEQ ID NO: 1058
  variant (1)...(53): Xaa = Any amino acid

SEQ ID NO: 1553 - protein, 51 aa, Homo sapiens; identical to SEQ ID NO: 1059
  variant (1)...(51): Xaa = Any amino acid

SEQ ID NO: 1554 - protein, 64 aa, Homo sapiens; identical to SEQ ID NO: 1060
  variant (1)...(64): Xaa = Any amino acid

SEQ ID NO: 1555 - protein, 94 aa, Homo sapiens [sequence omitted]

SEQ ID NO: 1556 - protein, 61 aa, Homo sapiens [sequence omitted]

SEQ ID NO: 1557 - protein, 58 aa, Homo sapiens; identical to SEQ ID NO: 1083
  variant (1)...(58): Xaa = Any amino acid

SEQ ID NO: 1558 - protein, 139 aa, Homo sapiens; identical to SEQ ID NO: 1084
  variant (1)...(139): Xaa = Any amino acid

SEQ ID NO: 1559 - protein, 66 aa, Homo sapiens; identical to SEQ ID NO: 1085
  variant (1)...(66): Xaa = Any amino acid

SEQ ID NO: 1560 - protein, 51 aa, Homo sapiens; identical to SEQ ID NO: 1086
  variant (1)...(51): Xaa = Any amino acid

SEQ ID NO: 1561 - protein, 52 aa, Homo sapiens; identical to SEQ ID NO: 1087
  variant (1)...(52): Xaa = Any amino acid

SEQ ID NO: 1562 - protein, 125 aa, Homo sapiens; identical to SEQ ID NO: 1088
  variant (1)...(125): Xaa = Any amino acid

SEQ ID NO: 1563 - protein, 89 aa, Homo sapiens; identical to SEQ ID NO: 1089
  variant (1)...(89): Xaa = Any amino acid

SEQ ID NO: 1564 - protein, 62 aa, Homo sapiens; identical to SEQ ID NO: 1090
  variant (1)...(62): Xaa = Any amino acid

SEQ ID NO: 1565 - protein, 64 aa, Homo sapiens; identical to SEQ ID NO: 1091
  variant (1)...(64): Xaa = Any amino acid

SEQ ID NO: 1566 - protein, 131 aa, Homo sapiens
  variant (1)...(131): Xaa = Any amino acid
LEKXKXXLKNVDENIRXLXGRDPNDXRPIQARLLALSGPXGXRGRGSXLLRRGFXXSXGGPXAXQRDLEGAVXXLGGERXTRRESRQESDPXDDDVKKPXLQXSVVATXKERTRXDXIQXQNMDEKGKQRN

SEQ ID NO: 1567 - protein, 55 aa, Homo sapiens
  variant (1)...(55): Xaa = Any amino acid
GVDSXIVXEDXQXNRETLKGQSXXWAGSXGPEENHARKATRXMMMLKSXHCXLQL

SEQ ID NO: 1568 - protein, 119 aa, Homo sapiens
  variant (1)...(119): Xaa = Any amino acid
XWIXSXRVRSLXVATTEXCNXGFLTSSXSGSLSWRDSLLVXRSPPSXXTAPSRSLCXAXGPPXLXXNPRLSNXLPRPXPXPGPERASNLAWMGLXSFGSRXVSXRMFSSTFLXLXXAFS

SEQ ID NO: 1569 - protein, 53 aa, Homo sapiens
  variant (1)...(53): Xaa = Any amino acid
LPLQGLSVXLXVLXHYXRIHASVIXYHVLXLXQDQKGPAIWLGWASXHSDPAX

SEQ ID NO: 1570 - protein, 73 aa, Homo sapiens [sequence omitted]

SEQ ID NO: 1571 - protein, 56 aa, Homo sapiens [sequence omitted]

SEQ ID NO: 1572 - protein, 194 aa, Homo sapiens; identical to SEQ ID NO: 1106

SEQ ID NO: 1573 - protein, 52 aa, Homo sapiens; identical to SEQ ID NO: 1107

SEQ ID NO: 1574 - protein, 55 aa, Homo sapiens; identical to SEQ ID NO: 1014

SEQ ID NO: 1575 - protein, 66 aa, Homo sapiens; identical to SEQ ID NO: 1109

SEQ ID NO: 1576 - protein, 59 aa, Homo sapiens; identical to SEQ ID NO: 1110

SEQ ID NO: 1577 - protein, 60 aa, Homo sapiens; identical to SEQ ID NO: 1111

SEQ ID NO: 1578 - protein, 85 aa, Homo sapiens
KVSNIKVRILIQLILILTTEKTNSREQQKNKKDLLFSQPKFSSLKVSTRRGVYSSNTFHFSVNIHKLKKKTSWSHLAHTFMQCSL

SEQ ID NO: 1579 - protein, 52 aa, Homo sapiens
TPLLVDTFREENLGWEKRRSFLFFCCSLLFVFSVVNININCINILTLILETF

SEQ ID NO: 1580 - protein, 54 aa, Homo sapiens [sequence omitted]

SEQ ID NO: 1581 - protein, 87 aa, Homo sapiens
QIQCVTLVLCSRQGFLNERHRLPAYGKVSSKGIEVRDRVELWVFIVFHAKPTKSKIEFKLNKLLLQNGRGKRLRKVYENELTYLVKS

SEQ ID NO: 1582 - protein, 85 aa, Homo sapiens; identical to SEQ ID NO: 1132
  variant (1)...(85): Xaa = Any amino acid

SEQ ID NO: 1583 - protein, 56 aa, Homo sapiens; identical to SEQ ID NO: 1133

SEQ ID NO: 1584 - protein, 70 aa, Homo sapiens; identical to SEQ ID NO: 1134
  variant (1)...(70): Xaa = Any amino acid

SEQ ID NO: 1585 - protein, 82 aa, Homo sapiens; identical to SEQ ID NO: 1135
  variant (1)...(82): Xaa = Any amino acid

SEQ ID NO: 1586 - protein, 56 aa, Homo sapiens; identical to SEQ ID NO: 1136

SEQ ID NO: 1587 - protein, 52 aa, Homo sapiens
SYRPAAGRWSPRTACPCPHSPPERGSCSREGNRHTQIVAEGRSTGRVCHRRS

SEQ ID NO: 1588 - protein, 99 aa, Homo sapiens
SVAAEDLFVHYGRDGQAVEAVSEGFPQFDVVASLALIVETIDAVDAGTLVVPTEQEEVLGVLDLIGQQQADGLQGLLAPVHIVPQKEVVALGRETAILK

SEQ ID NO: 1589 - protein, 145 aa, Homo sapiens
  variant (1)...(145): Xaa = Any amino acid
LTENEIRGLCLKSREIFLSQPILXELEAPLKICGDIHGQYYDLLRLFEYGGFPPESNYLFLGDYVDRGKQSLETICLLLAYKIKYPENFFLLRGNHECASINRIYGFYDECKRRYNIKLWKTFTDCFNCLPIAAIVDEKIFCCHG

SEQ ID NO: 1590 - protein, 116 aa, Homo sapiens
  variant (1)...(116): Xaa = Any amino acid
ASPFXWSWRHPSRSAVTYTASTTTFCDYLSMAVSLPRATTSFWGTMWTGASSPWRPSACCWPIRSSTPRTSSCSVGTTSVPASTASMVSTMSARDATTSNCGKPSLTASTACPSRP

SEQ ID NO: 1591 - protein, 62 aa, Homo sapiens; identical to SEQ ID NO: 1220

SEQ ID NO: 1592 - protein, 86 aa, Homo sapiens; identical to SEQ ID NO: 1221

SEQ ID NO: 1593 - protein, 97 aa, Homo sapiens
TKPLYVALAQRKEERQAHLTNQYMQRMASVRAVPNPVINPYQPAPPSGYFMAAIPQTQNRAAYYPPSQIAQLRPSPRWTAQGARPHPFQNMPGAIRP

SEQ ID NO: 1594 - protein, 57 aa, Homo sapiens; identical to SEQ ID NO: 1149

SEQ ID NO: 1595 - protein, 78 aa, Homo sapiens; identical to SEQ ID NO: 1150

SEQ ID NO: 1596 - protein, 130 aa, Homo sapiens
  variant (1)...(130): Xaa = Any amino acid
YKLFFFFFFFFFSTKVYXXETITSCCPXWHTXSPRRVFNSXPXIIFIPKXXPXTIXWLQHXPXNEVPQXAKFYIGXTGKFKXXDGXTIGSXIMSGGXKXWXGMVPSLSXNLLLTWXGSCRILPLGNXXSX

SEQ ID NO: 1597 - protein, 73 aa, Homo sapiens
  variant (1)...(73): Xaa = Any amino acid
TSFFFFFFFFFFPPKFIXXKQSPVAVXXGTLXAPGGSLTXFLXLYSSQKXXXGQXFGYSIXPXMRSPKXLSFT

SEQ ID NO: 1598 - protein, 57 aa, Homo sapiens
  variant (1)...(57): Xaa = Any amino acid
PXYCXRXXFWDEYNXRXGVKDPPGAXSVPXRTATGDCFXXINFGGKKKKKKKKKKLV

SEQ ID NO: 1599 - protein, 69 aa, Homo sapiens
  variant (1)...(69): Xaa = Any amino acid
LVXLXXLXPIIXXXGXFPRGRILQLXLQVRRRFXLNDGTMPXQXFXPPDIXLDPMVXPSXXLNFPXSPM

SEQ ID NO: 1600 - protein, 65 aa, Homo sapiens
MLQYLNMLCQTIPLCNRLHIVFMILIKLYVETECEVKSEHKKIMHDEIAYHFIGYLLCIYTLRPL

SEQ ID NO: 1601 - protein, 64 aa, Homo sapiens
LTHLFLLKRYCPLGGEWESLLHCCSHSERTFPCTYLSTCFNLINATFCIFQTSINSAIKRCSFF

SEQ ID NO: 1602 - protein, 174 aa, Homo sapiens; identical to SEQ ID NO: 1158

SEQ ID NO: 1603 - protein, 56 aa, Homo sapiens; identical to SEQ ID NO: 794

SEQ ID NO: 1604 - protein, 52 aa, Homo sapiens; identical to SEQ ID NO: 1160

SEQ ID NO: 1605 - protein, 54 aa, Homo sapiens; identical to SEQ ID NO: 1161

SEQ ID NO: 1606 - protein, 70 aa, Homo sapiens; identical to SEQ ID NO: 1162

SEQ ID NO: 1607 - protein, 50 aa, Homo sapiens; identical to SEQ ID NO: 1163

SEQ ID NO: 1608 - protein, 143 aa, Homo sapiens; identical to SEQ ID NO: 1164

SEQ ID NO: 1609 - protein, 79 aa, Homo sapiens
  variant (1)...(79): Xaa = Any amino acid
LKQRNTLKDGIIMIXTLLIIXXXIVPIFLLLDKDDSKAGMEEDHTYEGLDIDQTATYEDIVTLRTGEVKWSVGEHPGQE

SEQ ID NO: 1610 - protein, 87 aa, Homo sapiens; identical to SEQ ID NO: 1515

SEQ ID NO: 1611 - protein, 113 aa, Homo sapiens
  variant (1)...(113): Xaa = Any amino acid
WGVRERGWAMSQAAPKQSLRPGSLHPGHGATWLSLLAWVLTYRPLHFPCPQRHYVLIGGCLVNVQALVGVIFLHASLAVILVQQQEDRHDXXXDDQQRXDHDDTILQRVPLLQ

SEQ ID NO: 1612 - protein, 115 aa, Homo sapiens; identical to SEQ ID NO: 1143

SEQ ID NO: 1613 - protein, 55 aa, Homo sapiens; identical to SEQ ID NO: 1144

SEQ ID NO: 1614 - protein, 51 aa, Homo sapiens; identical to SEQ ID NO: 1145

SEQ ID NO: 1615 - protein, 136 aa, Homo sapiens
YLKVIVALGMPGQEDEGALWTQQSAEFRSGKPMVAGTPCFLPLLSACVTHINGNNFFQLLAEVGEAGSLHREGLSSLLLPASFCFGCREWFIHTLIPSPPLVDGGLAFSIPVFWCLPLSATLNHLPWSCCVMGTCL

SEQ ID NO: 1616 - protein, 79 aa, Homo sapiens
TRPTKARSMSPQVSSQSRLTLSSGRVYIAVFNTSRSLWLWGCRGRRTRVRCGHSSPRNSVLGSQWSPAPLASSLCCLPV

SEQ ID NO: 1617 - protein, 73 aa, Homo sapiens
HTSMAITSSNSSQKWERPAACTERGFPLSCSPLRSVLAAESGSSILSFPRLPLWTGVLPFQFLCFGVFPYLLP

SEQ ID NO: 1618 - protein, 57 aa, Homo sapiens
LYLIPQGHCGSGDAGAGGRGCAVDTAVRGIPFWEANGRRHPLLPPSVVCLCDTHQWQ

SEQ ID NO: 1619 - protein, 89 aa, Homo sapiens
LLPTPRRSGRGRQPAPRGAFLSLAPRFVLFWLQRVVHPYSHSLASPCGRGSCLFNSCVLVSSLICYPESPALVLLCDGNMLVNCVTNLL

SEQ ID NO: 1620 - protein, 124 aa, Homo sapiens
KGKTPVHKGRRGNESMDEPLSAAKTERSGEQERGKPLSVQAAGLSHFCEELEEVIAIDVCHTGRQQREEARGAGDHWLPRTEFRGLLCPQRTLVLLPRHPQSHNDLEVLNTAIYTRPELRVNLD

SEQ ID NO: 1621 - protein, 123 aa, Homo sapiens
FRVADKGRHQNTGIEKARPPSTRGGEGMRVWMNHSLQPKQNEAGSKREESPSRCRLPASPTSARSWKKLLPLMCVTQADNRGRKQGVPATIGFPERNSADCCVHSAPSSSCPGIPRATMTLRY

SEQ ID NO: 1622 - protein, 117 aa, Homo sapiens; identical to SEQ ID NO: 1170

SEQ ID NO: 1623 - protein, 117 aa, Homo sapiens; identical to SEQ ID NO: 1171

SEQ ID NO: 1624 - protein, 83 aa, Homo sapiens; identical to SEQ ID NO: 1172

SEQ ID NO: 1625 - protein, 67 aa, Homo sapiens
  variant (1)...(67): Xaa = Any amino acid
LKQRNTLKDGIIMIXTLLIILFIIVPIFLLLDKDDSKAGMEEDHXYEGLDIDQTATYEDIVTLRTGE

SEQ ID NO: 1626 - protein, 52 aa, Homo sapiens
  variant (1)...(52): Xaa = Any amino acid
ITNWVTLNELIKFQAIVHATNSQRPRKLLAEKVVYVGXWIPALLLTIXDFIF

SEQ ID NO: 1627 - protein, 102 aa, Homo sapiens
  variant (1)...(102): Xaa = Any amino acid
LQVLQDAFCXXXYYIHLIINFLLRLCRLGIFXXKEKIWPLLKVCACQNFKKIPHVKVPSASAGDSVLVLLSLDWRSLFPSSLVPVLQLLFLANRCANELPTG

SEQ ID NO: 1628 - protein, 86 aa, Homo sapiens
  variant (1)...(86): Xaa = Any amino acid
ISFSDSVGWAFSXSRKKFGPCSRSVHVKTLRRFPMLRYLQPVLVILSLSFYPWIGVPSFLVHLFQSFNFCFLLTGVQMNYQLGNLE

SEQ ID NO: 1629 - protein, 62 aa, Homo sapiens
  variant (1)...(62): Xaa = Any amino acid
RYLNMGNLLKVLTCTDLEQGPNFFLXXENAQPTESEKEIYNQVNVVXXXAEGILEDLQSYXG

SEQ ID NO: 1630 - protein, 99 aa, Homo sapiens; identical to SEQ ID NO: 1180

SEQ ID NO: 1631 - protein, 57 aa, Homo sapiens; identical to SEQ ID NO: 1181

SEQ ID NO: 1632 - protein, 87 aa, Homo sapiens; identical to SEQ ID NO: 1182

SEQ ID NO: 1633 - protein, 53 aa, Homo sapiens; identical to SEQ ID NO: 1183

SEQ ID NO: 1634 - protein, 59 aa, Homo sapiens; identical to SEQ ID NO: 1184

SEQ ID NO: 1635 - protein, 98 aa, Homo sapiens; identical to SEQ ID NO: 1188
  variant (1)...(98): Xaa = Any amino acid

SEQ ID NO: 1636 - protein, 66 aa, Homo sapiens
KDGIIMIQTLLIILFIIVPIFLLLDKDDSKAGMEEDHTYEGLDIDQTATYEDIVTLRTGEVKWFCR

SEQ ID NO: 1637 - protein, 84 aa, Homo sapiens
  variant (1)...(84): Xaa = Any amino acid
PAPRSWGDLALTPGLGXSPTEPLHFPCPQRHYVLIGGCLVNVQALVGVIFLHASLAVILVQQQEDRHDDEEDDQQRLDHDDTIL

SEQ ID NO: 1638 - protein, 64 aa, Homo sapiens
  variant (1)...(64): Xaa = Any amino acid
CTQVMGRPGSHSWPGCXTYRTTSLPLSAASLCPHRWLSGQCPGPRRCDLPPCQPCCHPCPAAGR

SEQ ID NO: 1639 - protein, 59 aa, Homo sapiens; identical to SEQ ID NO: 1069

SEQ ID NO: 1640 - protein, 51 aa, Homo sapiens
EQNDNTQKFSKWDFPGRANERPYCYAIWSKTTLQEDVFTGGPRAKLLHEGI

SEQ ID NO: 1641 - protein, 82 aa, Homo sapiens
  variant (1)...(82): Xaa = Any amino acid
DFGGCPDYEWALPHCPGGSSDDSSRDLCTHLCDCVVPSLGRHYVYYFRITPGSNGEKLQEVLGQRKNDNEFIXPXCCHFWND

SEQ ID NO: 1642 - protein, 155 aa, Homo sapiens
  variant (1)...(155): Xaa = Any amino acid
DCQKSCSCSPHFVICFIFRSFESKMTTPRNSVNGTFPAEPMKGPIAMQSGPKPLFRRMSSLVGPAQSFFMRESKTLGAVQIMNGLFHIALGGLLMIPAGIYAPICVTVWYPLWGGIMYIISGSLLAATEKNSRKCWVKGKMIMNSLXXFAAISGM

SEQ ID NO: 1643 - protein, 55 aa, Homo sapiens
  variant (1)...(55): Xaa = Any amino acid
IIPEMAAXRXNEFIIIFPLTQHFLEFFSVAARSDPEIIYIMPPQRGYHTVTQMGA

SEQ ID NO: 1644 - protein, 89 aa, Homo sapiens
IPAGIIRRPPRAMWKSPFIIWTAPKVLDSLMKKLCAGPTSEDILLKSGFGPDCIAIGPFIGSAGKVPFTEFLGVVILLSKLLKIKQITK

SEQ ID NO: 1645 - protein, 62 aa, Homo sapiens
SGNNIHNASPERVPHSHTDGCIDPCWNHQKTPQGNVEEPIHNLDSPQSLRFPHEEALRGAHQ

SEQ ID NO: 1646 - protein, 64 aa, Homo sapiens; identical to SEQ ID NO: 1072

SEQ ID NO: 1647 - protein, 58 aa, Homo sapiens
CPSAITIQQLQAGLADREYGRRTRSDENMHATIFTTEHTVFCDRNCRPCWGTRYSRPH

SEQ ID NO: 1648 - protein, 71 aa, Homo sapiens
KSRPTCSHWTDVQVQSPYSSYRQGWLIGSMGEGHAQMKTCMQRFSPLNTLFSVIETVGPAGGQDIHGLTSQ

SEQ ID NO: 1649 - protein, 73 aa, Homo sapiens
GREYLVPQQGRQFLSQKTVCSVVKIVACMFSSERVLLPYSLSASPACSCCMVIALGHQSNDCKSAWIFTCRGY

SEQ ID NO: 1650 - protein, 88 aa, Homo sapiens [sequence omitted]

SEQ ID NO: 1651 - protein, 69 aa, Homo sapiens
  variant (1)...(69): Xaa = Any amino acid
LLLPDTLHRLVDFGMSGLRLHARGCNTMYSKATLGVIDQTEILSRLXNADDIHESSXGRXYQFGPCHXF

SEQ ID NO: 1652 - protein, 57 aa, Homo sapiens [sequence omitted]

SEQ ID NO: 1653 - protein, 66 aa, Homo sapiens
  variant (1)...(66): Xaa = Any amino acid
IRRKFSPVLXMLMTSMNPAXVGXISSDLAIXFNEPLHANLLYFIXXQGILKSVPQENDEGETLSXL

SEQ ID NO: 1654 - protein, 67 aa, Homo sapiens
  variant (1)...(67): Xaa = Any amino acid
KXRECLPLIIFLRNRLKYALXXDEVKKICMQRFIKXDGKVRTDXTYXCWIHGCHQHXQDGREFPSDL

SEQ ID NO: 1655 - protein, 99 aa, Homo sapiens
  variant (1)...(99): Xaa = Any amino acid
RRFACSGSLKXMARSELIXPTXAGFMDVISIXKTGENFRLIYDTKGRFAVHRITPTSMKSEPRHSKIDKAMECVWKQKLYEPVVIPVGRLFRPNEKQVA

SEQ ID NO: 1656 - protein, 115 aa, Homo sapiens; identical to SEQ ID NO: 1194
  variant (1)...(115): Xaa = Any amino acid

SEQ ID NO: 1657 - protein, 70 aa, Homo sapiens; identical to SEQ ID NO: 1195
  variant (1)...(70): Xaa = Any amino acid

SEQ ID NO: 1658 - protein, 63 aa, Homo sapiens; identical to SEQ ID NO: 1196
  variant (1)...(63): Xaa = Any amino acid

SEQ ID NO: 1659 - protein, 50 aa, Homo sapiens; identical to SEQ ID NO: 1197
  variant (1)...(50): Xaa = Any amino acid

SEQ ID NO: 1660 - protein, 92 aa, Homo sapiens; identical to SEQ ID NO: 1198
  variant (1)...(92): Xaa = Any amino acid

SEQ ID NO: 1661 - protein, 55 aa, Homo sapiens; identical to SEQ ID NO: 1199
  variant (1)...(55): Xaa = Any amino acid

SEQ ID NO: 1662 - protein, 115 aa, Homo sapiens; identical to SEQ ID NO: 1143

SEQ ID NO: 1663 - protein, 51 aa, Homo sapiens; identical to SEQ ID NO: 1201
  variant (1)...(51): Xaa = Any amino acid

SEQ ID NO: 1664 - protein, 115 aa, Homo sapiens; identical to SEQ ID NO: 1143

SEQ ID NO: 1665 - protein, 55 aa, Homo sapiens; identical to SEQ ID NO: 1144

SEQ ID NO: 1666 - protein, 51 aa, Homo sapiens; identical to SEQ ID NO: 1145

SEQ ID NO: 1667 - protein, 62 aa, Homo sapiens
  variant (1)...(62): Xaa = Any amino acid
VFLSPWVKSESGSLCLSVLVYCWSESKFLIKXVDLALTVYADIGETIWLFQTSQDLSKKTWL

SEQ ID NO: 1668 - protein, 86 aa, Homo sapiens
  variant (1)...(86): Xaa = Any amino acid
EPSQQXLSRIYSLTSNKQALRDTESQIQILPMGIKRLRLXPHLEXYLHHKYIITGSLYEADTKCYRHSQNIILGNNVIKMPNXSQQ

SEQ ID NO: 1669 - protein, 70 aa, Homo sapiens
RDNVICTPYDISTFLATTSGRHSPKLEKKEIEDFCLCKVLKICSKLIKLSLCSFLQQMIQKKKKKKKKSL

SEQ ID NO: 1670 - protein, 50 aa, Homo sapiens
IICCRKEHKDSFINLEQILRTLHRQKSSISFFSNFGECLPLVVAKNVEIS

SEQ ID NO: 1671 - protein, 115 aa, Homo sapiens
YDEDRLFFFDFSQNTRVPCLPEFADWAQEQGDAPAILFDKEFCEWMIQQIGPKLDGKIPVSRGFPIAEVFTLKPLEFGKPNTLVCFVSNLFPPMLTVNWQHHSVPVEGFGPTFVS

SEQ ID NO: 1672 - protein, 65 aa, Homo sapiens [sequence omitted]

SEQ ID NO: 1673 - protein, 77 aa, Homo sapiens
DKSRPKSFHRDGMMLPVHCQHGWEEITDKTDQSVGLAKLQGLQREHFSDRKPSGHRDFPIKFWPYLLDHPLAELFVK

SEQ ID NO: 1674 - protein, 73 aa, Homo sapiens
CCQFTVSMGGKRLLTKQTKVLGLPNSRGFSVNTSAIGNPLDTGIFPSSFGPICWIIHSQNSLSNKMAGASPCS

SEQ ID NO: 1675 - protein, 199 aa, Homo sapiens; identical to SEQ ID NO: 1216

SEQ ID NO: 1676 - protein, 76 aa, Homo sapiens; identical to SEQ ID NO: 1217

SEQ ID NO: 1677 - protein, 122 aa, Homo sapiens; identical to SEQ ID NO: 1218

SEQ ID NO: 1678 - protein, 56 aa, Homo sapiens; identical to SEQ ID NO: 1219

SEQ ID NO: 1679 - protein, 87 aa, Homo sapiens; identical to SEQ ID NO: 1348

SEQ ID NO: 1680 - protein, 55 aa, Homo sapiens; identical to SEQ ID NO: 1349

SEQ ID NO: 1681 - protein, 123 aa, Homo sapiens
IRMTEKAPEPHVEEDDDDELDSKLNYKPPPQKSLKELQEMDKDDESLIKYKKTLLGDGPVVTDPKAPNVVVTRLTLVCESAPGPITMDLTGDLEALKKETIVLKEGSEYRVKIHFKVNRDIVS

SEQ ID NO: 1682 - protein, 191 aa, Homo sapiens; identical to SEQ ID NO: 1281

SEQ ID NO: 1683 - protein, 51 aa, Homo sapiens; identical to SEQ ID NO: 1282

SEQ ID NO: 1684 - protein, 51 aa, Homo sapiens; identical to SEQ ID NO: 1283

SEQ ID NO: 1685 - protein, 55 aa, Homo sapiens; identical to SEQ ID NO: 1284

SEQ ID NO: 1686 - protein, 62 aa, Homo sapiens; identical to SEQ ID NO: 1220

SEQ ID NO: 1687 - protein, 86 aa, Homo sapiens; identical to SEQ ID NO: 1221

SEQ ID NO: 1688 - protein, 95 aa, Homo sapiens; identical to SEQ ID NO: 1222
  variant (1)...(95): Xaa = Any amino acid

SEQ ID NO: 1689 - protein, 50 aa, Homo sapiens; identical to SEQ ID NO: 1232

SEQ ID NO: 1690 - protein, 94 aa, Homo sapiens; identical to SEQ ID NO: 1233

SEQ ID NO: 1691 - protein, 53 aa, Homo sapiens; identical to SEQ ID NO: 1234
  variant (1)...(53): Xaa = Any amino acid

SEQ ID NO: 1692 - protein, 59 aa, Homo sapiens; identical to SEQ ID NO: 1184

SEQ ID NO: 1693 - protein, 91 aa, Homo sapiens; identical to SEQ ID NO: 1236

SEQ ID NO: 1694 - protein, 55 aa, Homo sapiens; identical to SEQ ID NO: 1237

SEQ ID NO: 1695 - protein, 54 aa, Homo sapiens; identical to SEQ ID NO: 1238

SEQ ID NO: 1696 - protein, 147 aa, Homo sapiens; identical to SEQ ID NO: 1239

SEQ ID NO: 1697 - protein, 135 aa, Homo sapiens; identical to SEQ ID NO: 1240

SEQ ID NO: 1698 - protein, 151 aa, Homo sapiens; identical to SEQ ID NO: 1241

SEQ ID NO: 1699 - protein, 60 aa, Homo sapiens
PGFPLWEVLFLAGQLGREWRTEKRVEITCSLELSWGTSPHSVHKSLPLEMECSFYHGKRI

SEQ ID NO: 1700 - protein, 57 aa, Homo sapiens
VGHDSEQDRPKEVQGLWSGMETSSERTHGRSRCRRYTSSRITHRMDPLEVKTCGKTV

SEQ ID NO: 1701 - protein, 50 aa, Homo sapiens [sequence omitted]

SEQ ID NO: 1702 - protein, 53 aa, Homo sapiens
KWSVHFIMGKESEWDMIQNRTGPRKCRGCGVGWRQALKGHMGDLDVEGTQVVG

SEQ ID NO: 1703 - protein, 65 aa, Homo sapiens
HPGFQVLSNTVGPLKASSFLPLPQSHPYQDKGLLTVLSIAPTVTMFASLLSPTEQLPITLSYHMS

SEQ ID NO: 1704 - protein, 64 aa, Homo sapiens [sequence omitted]

SEQ ID NO: 1705 - protein, 52 aa, Homo sapiens
AWGIHLPRISILASRSSLIQWGLSRHPLSFLYLKATLIRIKGSSLSSPLPPR

SEQ ID NO: 1706 - protein, 67 aa, Homo sapiens
QCLLPYFLQLSSFLLHCLTTCLNLQWIHPVSYPTTCVPSTSRSPMCPFRACLHPTPQPLHFLGPVLF

SEQ ID NO: 1707 - protein, 115 aa, Homo sapiens; identical to SEQ ID NO: 1143

SEQ ID NO: 1708 - protein, 55 aa, Homo sapiens; identical to SEQ ID NO: 1144

SEQ ID NO: 1709 - protein, 51 aa, Homo sapiens; identical to SEQ ID NO: 1247
  variant (1)...(51): Xaa = Any amino acid

SEQ ID NO: 1710 - protein, 58 aa, Homo sapiens
LTRGLTPREFIQFLNVRSSLVSPSRAPQSMSWFSGLCRAGYLLKRLAIKAKFNLGFPR

SEQ ID NO: 1711 - protein, 76 aa, Homo sapiens; identical to SEQ ID NO: 1337

SEQ ID NO: 1712 - protein, 63 aa, Homo sapiens
VTVQMIDSRVNTQGVHPVPKCPLFSRLTFKSPPVNVLVLWFVQGRVSVKEVGNKSQVQLGVPS

SEQ ID NO: 1713 - protein, 156 aa, Homo sapiens
RGNPKLNLAFIANLFNRYPALHKPENQDIDWGALEGETREERTFRNWMNSLGVNPRVNHLYSDLSDALVIFQLYEKIKVPVDWNRVNKPPYPKLGGNMKKLENCNYAVELGKNQAKFSLVGIGGQDLNEGNRTLTLALIWQLMRRYTLNILEEIGG

SEQ ID NO: 1714 - protein, 62 aa, Homo sapiens; identical to SEQ ID NO: 1248
  variant (1)...(62): Xaa = Any amino acid

SEQ ID NO: 1715 - protein, 86 aa, Homo sapiens; identical to SEQ ID NO: 1249
  variant (1)...(86): Xaa = Any amino acid

SEQ ID NO: 1716 - protein, 69 aa, Homo sapiens [sequence omitted]

SEQ ID NO: 1717 - protein, 102 aa, Homo sapiens; identical to SEQ ID NO: 1251

SEQ ID NO: 1718 - protein, 77 aa, Homo sapiens [sequence omitted]

SEQ ID NO: 1719 - protein, 60 aa, Homo sapiens [sequence omitted]

SEQ ID NO: 1720 - protein, 115 aa, Homo sapiens; identical to SEQ ID NO: 1143

SEQ ID NO: 1721 - protein, 55 aa, Homo sapiens; identical to SEQ ID NO: 1255
  variant (1)...(55): Xaa = Any amino acid

SEQ ID NO: 1722 - protein, 51 aa, Homo sapiens; identical to SEQ ID NO: 1256
  variant (1)...(51): Xaa = Any amino acid

SEQ ID NO: 1723 - protein, 62 aa, Homo sapiens [sequence omitted]

SEQ ID NO: 1724 - protein, 62 aa, Homo sapiens
LKLEKGRMEESQNESLATLTIQGIRFEDNGIYFCQQKCNNTSEVYQGCGTELRVMGFSTLAQ

SEQ ID NO: 1725 - protein, 60 aa, Homo sapiens [sequence omitted]

SEQ ID NO: 1726 - protein, 88 aa, Homo sapiens; identical to SEQ ID NO: 1265

SEQ ID NO: 1727 - protein, 57 aa, Homo sapiens
  variant (1)...(57): Xaa = Any amino acid
IQGQNQQQXLQSSADIKYKLQGQFLFEGLFXFXEASMRCXHLPGANFYSQLTHAXNA

SEQ ID NO: 1728 - protein, 65 aa, Homo sapiens
RDNVICTPYDISTFLATTSGRHSPKLEKKEIEDFCLCKVLKICSKLIKLSLCSFLQKKKKKKKKR

SEQ ID NO: 1729 - protein, 56 aa, Homo sapiens
LFFFFFFFFCRKEHKDSFINLEQILRTLHRQKSSISFFSNFGECLPLVVAKNVEIS

SEQ ID NO: 1730 - protein, 73 aa, Homo sapiens
  variant (1)...(73): Xaa = Any amino acid
RSVLEPDANETQQMLFLRHNSLFXELRNPVYAXPXXTFLLLLCMKMPTPXMMSPSXKPPAPVNVLLRAXSDXA

SEQ ID NO: 1731 - protein, 52 aa, Homo sapiens
  variant (1)...(52): Xaa = Any amino acid
SFQXAQEPCLCXSSXNFLAPPVHEDAHSTXDEPQHXAPSSRQCLTPGXIRLX

SEQ ID NO: 1732 - protein, 64 aa, Homo sapiens
  variant (1)...(64): Xaa = Any amino acid
HLAPGQTFNFQIGYCCQXVAXKSVSIIXLFDSXHCXSHWASNHVPXFLXXQIXKTXKKKKKKKK

SEQ ID NO: 1733 - protein, 52 aa, Homo sapiens
  variant (1)...(52): Xaa = Any amino acid
TGFLSXLKRLLCLRKSICCVSLASGSRTDLQLPNWILLPXSCXEVSFYHXAL

SEQ ID NO: 1734 - protein, 59 aa, Homo sapiens
  variant (1)...(59): Xaa = Any amino acid
PCLXSKVTRKRPCLPSMTLMEEMLXXAFRCMTQGKTAKNLVLALLILLFVLFLGVXRAK

SEQ ID NO: 1735 - protein, 54 aa, Homo sapiens
  variant (1)...(54): Xaa = Any amino acid
EFXEQNDXTQKFSKWDFPGRTNERPYCYAIWXKTTLXEDVFTGGPHXKLLXEGI

SEQ ID NO: 1736 - protein, 119 aa, Homo sapiens
  variant (1)...(119): Xaa = Any amino acid
DCQKSCSCSPHFVICFIFRSXESKMXTPRNSVNGTFPAEPMKGPIAMQSGXKPLXXRMSSLVGPXQSFFXRESXTLGAXQIXNGLFHIALGGLXMIPXGIYAPICVTVWXPLWGGIMYI

SEQ ID NO: 1737 - protein, 59 aa, Homo sapiens
  variant (1)...(59): Xaa = Any amino acid
NIHNASPERXPHSHTDGCIDPXWDHXKTPQGNVEEPIXNLXSPQSXRFPXEEALXGAHQ

SEQ ID NO: 1738 - protein, 64 aa, Homo sapiens
  variant (1)...(64): Xaa = Any amino acid
ISGCXHFALXTPKNKTNNKMRRARTRFLAVLPCVMHLNXSXSISSMSVIEGRHGLFRVTLDXRQ

SEQ ID NO: 1739 - protein, 89 aa, Homo sapiens
  variant (1)...(89): Xaa = Any amino acid
IXXGIIXRPPRAMWKSPXIIWXAPKXLDSLXKKLXVGPTSEDILXKSGFXPDCIAIGPFIGSAGKVPFTEFLGXVILLXKLLKIKQITK

SEQ ID NO: 1740 - protein, 58 aa, Homo sapiens
  variant (1)...(58): Xaa = Any amino acid
LVHFLNFPHSEFQSLLLHHVCRNLVLFSVYLHITLKTLLFENFSISQINIHFHNLPLX

SEQ ID NO: 1741 - protein, 94 aa, Homo sapiens
  variant (1)...(94): Xaa = Any amino acid
QQKQNFRFQNLLLAKFILIIPASYGYITIKTEYHRVIALFENSXILQCTSPMKQXISILKIKRKQHREVKCGVAKLWGLLEGTNLNRLFLLSLE

SEQ ID NO: 1742 - protein, 93 aa, Homo sapiens
  variant (1)...(93): Xaa = Any amino acid
VNLYFHGYSKERRNNLLRLVPSSRPHNFATPHLTSLCCFLLIFKMEIXCFIGEVHCKMXEFSNNAITLWYSVLIVIYPYEAGIMRINFANNKF

SEQ ID NO: 1743 - protein, 62 aa, Homo sapiens
VFLSPWVKSESGSLCLSVLVYCWSESKFLIKAVDLAPTVYADIGETIWLFQTSQDLSKKTWL

SEQ ID NO: 1744 - protein, 116 aa, Homo sapiens
EPCFITRSSYSNPVMFEITKLSLQCLHKLWEPSQQLLSRIYSLTSNKQALRDTESQIQILPMGIKRLRLSPHLENYLHHKYIITGSLYEADTKCYRHSQNIILGNNVIKMPNLSQQ

SEQ ID NO: 1745 - protein, 87 aa, Homo sapiens; identical to SEQ ID NO: 1515

SEQ ID NO: 1746 - protein, 113 aa, Homo sapiens [sequence omitted]

SEQ ID NO: 1747 - protein, 79 aa, Homo sapiens; identical to SEQ ID NO: 1517

SEQ ID NO: 1748 - protein, 52 aa, Homo sapiens
RTIGGCRHVLLEQLPRTTLLRSGFQRPPNFVSFNSFRPDLLFGSVTGRQVST

SEQ ID NO: 1749 - protein, 115 aa, Homo sapiens
HMPDWLFATHLKDTTQSMEAFNRTALPISGLLADADMFYSSSYQGPLYCDQDSNDHLISYLSTLFDRTSYSEALQEDRSQLRDQITLSTLWDRCNLALQGSAPITSRPANTDLEV

SEQ ID NO: 1750 - protein, 52 aa, Homo sapiens
VETCLPVTLPNKRSGRKELKDTKLGGRWNPDRSKVVLGNCSSRTCLHPPIVR

SEQ ID NO: 1751 - protein, 56 aa, Homo sapiens
NMSASANSPLIGRAVRLKASIDWVVSFKWVAKSQSGICHEGFSDRLMVCCLTSLGK

SEQ ID NO: 1752 - protein, 86 aa, Homo sapiens; identical to SEQ ID NO: 1221

SEQ ID NO: 1753 - protein, 62 aa, Homo sapiens; identical to SEQ ID NO: 1220

SEQ ID NO: 1754 - protein, 191 aa, Homo sapiens; identical to SEQ ID NO: 1281

SEQ ID NO: 1755 - protein, 51 aa, Homo sapiens; identical to SEQ ID NO: 1282

SEQ ID NO: 1756 - protein, 51 aa, Homo sapiens; identical to SEQ ID NO: 1283

SEQ ID NO: 1757 - protein, 55 aa, Homo sapiens; identical to SEQ ID NO: 1284

SEQ ID NO: 1758 - protein, 87 aa, Homo sapiens; identical to SEQ ID NO: 1515

SEQ ID NO: 1759 - protein, 113 aa, Homo sapiens [sequence omitted]

SEQ ID NO: 1760 - protein, 79 aa, Homo sapiens; identical to SEQ ID NO: 1517

SEQ ID NO: 1761 - protein, 106 aa, Homo sapiens; identical to SEQ ID NO: 1289

SEQ ID NO: 1762 - protein, 53 aa, Homo sapiens; identical to SEQ ID NO: 1290

SEQ ID NO: 1763 - protein, 55 aa, Homo sapiens; identical to SEQ ID NO: 1144

SEQ ID NO: 1764 - protein, 51 aa, Homo sapiens; identical to SEQ ID NO: 1292

SEQ ID NO: 1765 - protein, 51 aa, Homo sapiens; identical to SEQ ID NO: 1145

SEQ ID NO: 1766 - protein, 101 aa, Homo sapiens
SHLLEGGQRGQDGAADPHGVLALRRSNDLDLHCAGCQGSDLLLHPVGNARVHGGAARQHCVGVQVFADVHVTLHDGVEGSFVDATGLHAQEGRLEECLRAA

SEQ ID NO: 1767 - protein, 124 aa, Homo sapiens
VIVRLEAFAVDDGGAGLVILLLADHICWKVDSEARMEPPIHTEYLRSGGAMILIFIVLGARAVISFCILSAMPGYMVVPPDSTVLAYRSLRMSTSHFMMELKVVSWMPQDSMPRKEGWKSASGQ

SEQ ID NO: 1768 - protein, 100 aa, Homo sapiens
RCPEALFQPSFLGMESCGIHETTFNSIMKCDVDIRKDLYANTVLSGGTTMYPGIADRMQKEITALAPSTMKIKIIAPPERKYSVWIGGSILASLSTFQQM

SEQ ID NO: 1769 - protein, 115 aa, Homo sapiens; identical to SEQ ID NO: 1297

SEQ ID NO: 1770 - protein, 53 aa, Homo sapiens; identical to SEQ ID NO: 1267

SEQ ID NO: 1771 - protein, 55 aa, Homo sapiens; identical to SEQ ID NO: 1299

SEQ ID NO: 1772 - protein, 53 aa, Homo sapiens [sequence omitted]

SEQ ID NO: 1773 - protein, 54 aa, Homo sapiens
LGQELCPVPAAFISTHVHSLLRPRPPGICPGLPHPTSIRSCPRCMSSIGRIARW

SEQ ID NO: 1774 - protein, 63 aa, Homo sapiens [sequence omitted]

SEQ ID NO: 1775 - protein, 68 aa, Homo sapiens
GERPRVGTGNLRRAGNGSLRFRKLLCKLRGWLGPKGCSARRASCELSKALGSQHPKSLWLQSCVCTTH

SEQ ID NO: 1776 - protein, 72 aa, Homo sapiens
GIRSQLSLNSQSPPWASLPNDLVALGAPEVNPEILPPSTLGSDLCPSLCHKEISVKRVGTGGFRPCSKATAR

SEQ ID NO: 1777 - protein, 52 aa, Homo sapiens
VLRQILSLLIQSEPDLTFSPPSNPAYAGHASWATPDGGGMREPGADTRRSGP

SEQ ID NO: 1778 - protein, 60 aa, Homo sapiens
SHRLLGCCEPRALLSSQLARRAEQPFGPSHPRSLHRSFLNLRDPFPALLKFPVPTLGLSP

SEQ ID NO: 1779 - protein, 52 aa, Homo sapiens
NTPSVNSGLRPLPFSVSQGNFGQEGGNRWFQTVQQSHCQVSFKANFISSYSV

SEQ ID NO: 1780 - protein, 78 aa, Homo sapiens; identical to SEQ ID NO: 1307

SEQ ID NO: 1781 - protein, 134 aa, Homo sapiens [sequence omitted]

SEQ ID NO: 1782 - protein, 66 aa, Homo sapiens; identical to SEQ ID NO: 1309

SEQ ID NO: 1783 - protein, 141 aa, Homo sapiens; identical to SEQ ID NO: 1310

SEQ ID NO: 1784 - protein, 53 aa, Homo sapiens
FFFLHRIGRGGRFGRKGVAINFVTEEDKRILRDIETFYNTTVEEMPMNVADLI

SEQ ID NO: 1785 - protein, 51 aa, Homo sapiens
  variant (1)...(51): Xaa = Any amino acid
KMGSVKSFFLRNLFPSSVEMXXLDVLYHLIIYLXTKRYKCXIKSANYVKLA

SEQ ID NO: 1786 - protein, 67 aa, Homo sapiens
SPIQQQRALHPKLSSQELNKVSHIHGHLLHCSIVESLNVTKNPLVFFSNKVYSHTFPPKSTPSANSV

SEQ ID NO: 1787 - protein, 58 aa, Homo sapiens
KVSMSRRILLSSSVTKFIATPFLPNRPPLPILCKKKNQNVTSHIMYKLLNMTIHLLTT

SEQ ID NO: 1788 - protein, 61 aa, Homo sapiens; identical to SEQ ID NO: 1311

SEQ ID NO: 1789 - protein, 51 aa, Homo sapiens; identical to SEQ ID NO: 1312

SEQ ID NO: 1790 - protein, 192 aa, Homo sapiens
LLWKGSFKPSEHVKPRAPGNLTVHTNVSDTLLLTWSNPYPPDNYLYNHLTYAVNIWSENDPADFRIYNVTYLEPSLRIAASTLKSGISYRARVRAWAQCYNTTWSEWSPSTKWHNSYREPFEQHLLLGVSASCIVILAVCLLCYVSITKIKKEWWDQIPNPARSRLVAIIIQDAQGSQWEKRSRGQEPAKCP

SEQ ID NO: 1791 - protein, 75 aa, Homo sapiens [sequence omitted]

SEQ ID NO: 1792 - protein, 64 aa, Homo sapiens
RPAGGAARRAPCRSCATWCWGSTHSRWCYSTEPRPSPVPCRKSQTSGCWLRCGGRVLGRSRYRF

SEQ ID NO: 1793 - protein, 104 aa, Homo sapiens [sequence omitted]

SEQ ID NO: 1794 - protein, 71 aa, Homo sapiens
VGHVIDSEICRVVFTPNVDCIGEMIIQVIVRGIRVAPGQQQSVGDIGVNCQVSWGPGFHMLAGLEGALPQQ

SEQ ID NO: 1795 - protein, 115 aa, Homo sapiens; identical to SEQ ID NO: 1143

SEQ ID NO: 1796 - protein, 55 aa, Homo sapiens; identical to SEQ ID NO: 1144

SEQ ID NO: 1797 - protein, 51 aa, Homo sapiens; identical to SEQ ID NO: 1145

SEQ ID NO: 1798 - protein, 54 aa, Homo sapiens
PVLRQIWGWGEHFGLKAQSSLPCFFCAYHSPLASTSVRWGGDKKRSKVKKKVEN

SEQ ID NO: 1799 - protein, 56 aa, Homo sapiens
DGGGTKREVKLRRKWKIKKKMSKFLHAYISAYAEDLPVCCTLNHTFRTPQKPSLSP

SEQ ID NO: 1800 - protein, 59 aa, Homo sapiens; identical to SEQ ID NO: 1321

SEQ ID NO: 1801 - protein, 64 aa, Homo sapiens; identical to SEQ ID NO: 1322

SEQ ID NO: 1802 - protein, 57 aa, Homo sapiens; identical to SEQ ID NO: 1323

SEQ ID NO: 1803 - protein, 51 aa, Homo sapiens; identical to SEQ ID NO: 1324

SEQ ID NO: 1804 - protein, 74 aa, Homo sapiens
MDRGPKRKRYLKTNGRNLEAHDPEPRKDRSLKTWGNPKMRTLNPTSFLLFTLLTLRYFQFSCLSLSLILLRCTF

SEQ ID NO: 1805 - protein, 77 aa, Homo sapiens
GSHLGISPGLQASILPGFWVMGLQIPAVSLEIPFSLGSSIHLGRLCDRGLPSLGCRSSSYNPGLILGRWPCVTSLSS

SEQ ID NO: 1806 - protein, 85 aa, Homo sapiens
YCQSKGNRQHQKVHLKRIRLKDKQENWKYLRVRSVNNRKEVGFRVLILGFPQVFKLLSFLGSGSWASRFRPLVLRYLFRLGPLSI

SEQ ID NO: 1807 - protein, 50 aa, Homo sapiens; identical to SEQ ID NO: 1332

SEQ ID NO: 1808 - protein, 51 aa, Homo sapiens; identical to SEQ ID NO: 1333

SEQ ID NO: 1809 - protein, 92 aa, Homo sapiens [sequence omitted]

SEQ ID NO: 1810 - protein, 50 aa, Homo sapiens
GVLNFNLRGPTVPSKTETTELLGWRLEAGAEGLIPVVGKLRQPPKVEVGE

SEQ ID NO: 1811 - protein, 66 aa, Homo sapiens
VTPFPFPEIGTSYSKGERRAQRDLYRTSLAHGDWRQRVGSWRGVQSLQQILRASKSSSWTFLLIWI

SEQ ID NO: 1812 - protein, 83 aa, Homo sapiens
KSRLRETSRKSSLKPSIFVGGTGLLSSSPPSASSHHVQERSCTDLSGLSFLLWNNLFLFQEREMVSLRPWTASPARLGPQVPL

SEQ ID NO: 1813 - protein, 82 aa, Homo sapiens
SPQYLLEGLDSSPAPHPLPPVTMCKRGPVQISLGSPFSFGITCSYFRKGKWCHSGPGLLLQPGWGHRSHSSEGQCLRIKAVF

SEQ ID NO: 1814 - protein, 53 aa, Homo sapiens
IQIKRNVQEELFEALNICWRDWTPLQLPTLCLQSPCAREVLYRSLWALLSPLE

SEQ ID NO: 1815 - protein, 116 aa, Homo sapiens
  variant (1)...(116): Xaa = Any amino acid
PKEVRQLAEDFLKDYIHINIGALELSANHNILQIVDVCHDXXKDEKLIXLMEEIMSEKENKTIVFVETKRRCDELTRKMRRDGWPAMGIHXDKSQQERDWALNESKHGKAPILIXT

SEQ ID NO: 1816 - protein, 51 aa, Homo sapiens
  variant (1)...(51): Xaa = Any amino acid
SPVTLLLTLVXMDTHGRPPISPHFSGKLITSSFGFHKNNGFILLLTHDLFH

SEQ ID NO: 1817 - protein, 55 aa, Homo sapiens
  variant (1)...(55): Xaa = Any amino acid
LLXPWIPMAGHPSLLIFLVSSSHLLLVSTKTMVLFSFSLMISSIRXISFSSFXXS

SEQ ID NO: 1818 - protein, 63 aa, Homo sapiens
  variant (1)...(63): Xaa = Any amino acid
GGKMAVQISKKRKFVADGIFKAELNEFLTRELAEDGYSGVEGASYTNQDRNHYLXHQNTXCSW

SEQ ID NO: 1819 - protein, 70 aa, Homo sapiens
  variant (1)...(70): Xaa = Any amino acid
MSFLLGSWLKMATLELRVRVTPTRTEIIILXTRTXNVLGEKGRRIRELTAVVQKRFGFPEGSVELYAXKV

SEQ ID NO: 1820 - protein, 76 aa, Homo sapiens
  variant (1)...(76): Xaa = Any amino acid
TTAVSSRIRRPFSPRTXCVLVXKIMISVLVGVTRTLNSRVAIFSQLPSKKLIQFSFEDAISDKLPLLGYLHCHLAA

SEQ ID NO: 1821 - protein, 70 aa, Homo sapiens
PMWLVFSLQLARFHTLTSLSQPQETMIGLLLLGEKRTQDTHSEWLSSWTVYLHTPRVFHSLMVLSRDPKT

SEQ ID NO: 1822 - protein, 70 aa, Homo sapiens
IVFGSRDKTIKLWNTLGVCKYTVQDESHSEWVSCVRFSPNSSNPIIVSCGWDKLVKVWNLANCKLKTNHI

SEQ ID NO: 1823 - protein, 64 aa, Homo sapiens
LFLDLEIKPSSYGIPWVCANTLSRMRATQSGCLVSASRPTAATLSSSPVAGTSWSRYGTWLTAS

SEQ ID NO: 1824 - protein, 74 aa, Homo sapiens; identical to SEQ ID NO: 1505

SEQ ID NO: 1825 - protein, 66 aa, Homo sapiens
LDDGLQPLSVLSVPHSTSISCCTPTQLRELVRTQPIHLSRTSETLDQWSHMVLRLHVNTPANAACR

SEQ ID NO: 1826 - protein, 76 aa, Homo sapiens
YGDSLWKSSFPSFVSLPTMQEASLAVLFYYHYISPICNKVLYRQVRSMLSSSLSPRRLRLRYRGNSPVQSLFMLTQ

SEQ ID NO: 1827 - protein, 60 aa, Homo sapiens; identical to SEQ ID NO: 1340

SEQ ID NO: 1828 - protein, 95 aa, Homo sapiens; identical to SEQ ID NO: 1341

SEQ ID NO: 1829 - protein, 50 aa, Homo sapiens; identical to SEQ ID NO: 1342

SEQ ID NO: 1830 - protein, 62 aa, Homo sapiens
VAVSSLRHGVCSPTDIGVLRKGGVIWQKCHFACCIQGSYSTRYCELCSHQLAQKQQTALCCQ

SEQ ID NO: 1831 - protein, 94 aa, Homo sapiens
WLSPLSAMACARPLISVYSEKGESSGKNVTLPAVFKAPIRPDIVNFVHTNLRKNNRQPYAVSELAGHQTSAESWGTGRAVARIPRVRGGGTHRS

SEQ ID NO: 1832 - protein, 102 aa, Homo sapiens [sequence omitted]

SEQ ID NO: 1833 - protein, 60 aa, Homo sapiens; identical to SEQ ID NO: 1340

SEQ ID NO: 1834 - protein, 50 aa, Homo sapiens; identical to SEQ ID NO: 1345

SEQ ID NO: 1835 - protein, 76 aa, Homo sapiens; identical to SEQ ID NO: 1346

SEQ ID NO: 1836 - protein, 68 aa, Homo sapiens; identical to SEQ ID NO: 1347

SEQ ID NO: 1837 - protein, 87 aa, Homo sapiens; identical to SEQ ID NO: 1348

SEQ ID NO: 1838 - protein, 55 aa, Homo sapiens; identical to SEQ ID NO: 1349

SEQ ID NO: 1839 - protein, 120 aa, Homo sapiens; identical to SEQ ID NO: 1350

SEQ ID NO: 1840 - protein, 75 aa, Homo sapiens [sequence omitted]

SEQ ID NO: 1841 - protein, 59 aa, Homo sapiens
VFSSVTHNIKNKNPVSLAKFGLKSEMFLWSCQQAGMYLIQFNLLLFLWLSSKPLSSCNS

SEQ ID NO: 1842 - protein, 51 aa, Homo sapiens [sequence omitted]

SEQ ID NO: 1843 - protein, 74 aa, Homo sapiens [sequence omitted]

SEQ ID NO: 1844 - protein, 50 aa, Homo sapiens [sequence omitted]

SEQ ID NO: 1845 - protein, 93 aa, Homo sapiens
  variant (1)...(93): Xaa = Any amino acid
GDXVGXGAQAATMAYHGLTVPLIVMSVFWGFVGFLVPWFIPKGPNRGVIITMLVTCSVCCYLFWLIAILAQLNPLFGPQLKNETIWYLKYHWP

SEQ ID NO: 1846 - protein, 56 aa, Homo sapiens
  variant (1)...(56): Xaa = Any amino acid
TGHQHGNDNSPVRTLRDEPRHQEADEAPEHAHHNERHSEAVIRHGRRLSAXPYXVA

SEQ ID NO: 1847 - protein, 64 aa, Homo sapiens
  variant (1)...(64): Xaa = Any amino acid
FXXFFXKXRILGXFXETKADIKSYKDFXFSFTKKVIHILHYTRYDINTGKYYVHCKEKGKIETY

SEQ ID NO: 1848 - protein, 53 aa, Homo sapiens
  variant (1)...(53): Xaa = Any amino acid
AKGGFIKXNQYWANPFXPFFSFSMXILFFXYSSSSCSKLKLGKESHFXLXVFL

SEQ ID NO: 1849 - protein, 54 aa, Homo sapiens
  variant (1)...(54): Xaa = Any amino acid
NXHRKREKGXKGIGPILIXFYKTSFGLEGMTLATIIXSMFKQVPLVVALNVIXL

SEQ ID NO: 1850 - protein, 188 aa, Homo sapiens
QVLDINLAAEPKVNRGKAGVKRSAAEMYGSVTEHPSPSPLLSSSFDLDYDFQRDYYDRMYSYPARVPPPPPIARAVVPSKRQRVSGNTSRRGKSGFNSKSGQRGSSKSGKLKGDDLQAIKKELTQIKQKVDSLLENLEKIEKEQSKQAVEMKNDKSEEEQSSSSVKKDETNVKMESEGGADDSAEEGD

SEQ ID NO: 1851 - protein, 50 aa, Homo sapiens
SHLSSRSCCSAPLLTYHSSSLLLVCSVPFQFFPGFPGENPLFVLSGSAPS

SEQ ID NO: 1852 - protein, 66 aa, Homo sapiens
LIILHLYCLFALFLFNFFQVFQERIHFLFYLGQLLLNGLKVISFQLSRLGRSPLSTLRIEATFAPS

SEQ ID NO: 1853 - protein, 71 aa, Homo sapiens
SPSSAESSAPPSDSIFTLVSSFFTELLLCSSSDLSFFISTACLLCSFSIFSRFSRRESTFCFIWVSSFLMA

SEQ ID NO: 1854 - protein, 80 aa, Homo sapiens
HRGRQEAIAGGHLSLDGSSLVHTVPKKGLPLGPRNPSQPSQAEPHPGFSQRGAQEDPSCPKSEEQQETASEVRHSSVLLP

SEQ ID NO: 1855 - protein, 112 aa, Homo sapiens
  variant (1)...(112): Xaa = Any amino acid
MEAPWSTQSQRKVCLWAHETHPSPHRLNLTLGFPREVPKKTQAAPSQRSSRKQPQKSVTLQYSSLRMSTSCLVTMATKRQWQCSACGMGELHLPWVHGEETPVTXRSGESHG

SEQ ID NO: 1856 - protein, 127 aa, Homo sapiens
  variant (1)...(127): Xaa = Any amino acid
PMALPASXGHWSLLPMYPRKMELPHPTRTALPLSFGCHGHQTGSGHSKGGVLKSDGLLRLFPAAPLTWGSLGLLGHLSGKTQGEVQPVRAGMGFVGPKADLSLGLCGPRSFHLVTSDPQLSPLAFPC

SEQ ID NO: 1857 - protein, 51 aa, Homo sapiens
  variant (1)...(51): Xaa = Any amino acid
PWLSPLLXVTGVSSPCTQGRWSSPIPHALHCHCLLVAMVTKQEVDILREEY

SEQ ID NO: 1858 - protein, 53 aa, Homo sapiens
TKDYLFKKSFEVKYFVYVIHRCTYKHTHIESQYFNTSLGSCTNSLTLRKKLRN

SEQ ID NO: 1859 - protein, 57 aa, Homo sapiens
YSVKLTDNLESLSSFIFLTLQKGKEDKHSLPFYLTNRRGTQFFSRLGTVRERWGKPF

SEQ ID NO: 1860 - protein, 62 aa, Homo sapiens; identical to SEQ ID NO: 1220

SEQ ID NO: 1861 - protein, 86 aa, Homo sapiens; identical to SEQ ID NO: 1221

SEQ ID NO: 1862 - protein, 58 aa, Homo sapiens [sequence omitted]

SEQ ID NO: 1863 - protein, 109 aa, Homo sapiens; identical to SEQ ID NO: 674

SEQ ID NO: 1864 - protein, 100 aa, Homo sapiens; identical to SEQ ID NO: 675

SEQ ID NO: 1865 - protein, 103 aa, Homo sapiens [sequence omitted]

SEQ ID NO: 1866 - protein, 88 aa, Homo sapiens; identical to SEQ ID NO: 1395

SEQ ID NO: 1867 - protein, 157 aa, Homo sapiens; identical to SEQ ID NO: 1396
  variant (1)...(157): Xaa = Any amino acid

SEQ ID NO: 1868 - protein, 156 aa, Homo sapiens; identical to SEQ ID NO: 1397
  variant (1)...(156): Xaa = Any amino acid

SEQ ID NO: 1869 - protein, 75 aa, Homo sapiens; identical to SEQ ID NO: 1398
  variant (1)...(75): Xaa = Any amino acid

SEQ ID NO: 1870 - protein, 111 aa, Homo sapiens; identical to SEQ ID NO: 1399
  variant (1)...(111): Xaa = Any amino acid

SEQ ID NO: 1871 - protein, 104 aa, Homo sapiens; identical to SEQ ID NO: 1400
  variant (1)...(104): Xaa = Any amino acid

SEQ ID NO: 1872 - protein, 53 aa, Homo sapiens [sequence omitted]

SEQ ID NO: 1873 - protein, 67 aa, Homo sapiens; identical to SEQ ID NO: 1402
  variant (1)...(67): Xaa = Any amino acid

SEQ ID NO: 1874 - protein, 56 aa, Homo sapiens; identical to SEQ ID NO: 712

SEQ ID NO: 1875 - protein, 56 aa, Homo sapiens; identical to SEQ ID NO: 713

SEQ ID NO: 1876 - protein, 56 aa, Homo sapiens; identical to SEQ ID NO: 714

SEQ ID NO: 1877 - protein, 51 aa, Homo sapiens
  variant (1)...(51): Xaa = Any amino acid
TNQSLLRNCYSLNWSIKTSHGSGYGVIWCPCFSPXGHLIXEPPXEFCGRHL

SEQ ID NO: 1878 - protein, 56 aa, Homo sapiens; identical to SEQ ID NO: 729

SEQ ID NO: 1879 - protein, 50 aa, Homo sapiens; identical to SEQ ID NO: 730

SEQ ID NO: 1880 - protein, 70 aa, Homo sapiens; identical to SEQ ID NO: 731

SEQ ID NO: 1881 - protein, 53 aa, Homo sapiens; identical to SEQ ID NO: 732

SEQ ID NO: 1882 - protein, 69 aa, Homo sapiens; identical to SEQ ID NO: 1414
  variant (1)...(69): Xaa = Any amino acid

SEQ ID NO: 1883 - protein, 64 aa, Homo sapiens; identical to SEQ ID NO: 1415
  variant (1)...(64): Xaa = Any amino acid

SEQ ID NO: 1884 - protein, 92 aa, Homo sapiens; identical to SEQ ID NO: 1416
  variant (1)...(92): Xaa = Any amino acid

SEQ ID NO: 1885 - protein, 77 aa, Homo sapiens; identical to SEQ ID NO: 1417
  variant (1)...(77): Xaa = Any amino acid

SEQ ID NO: 1886 - protein, 97 aa, Homo sapiens; identical to SEQ ID NO: 725

SEQ ID NO: 1887 - protein, 56 aa, Homo sapiens; identical to SEQ ID NO: 754

SEQ ID NO: 1888 - protein, 75 aa, Homo sapiens; identical to SEQ ID NO: 1418
  variant (1)...(75): Xaa = Any amino acid

SEQ ID NO: 1889 - protein, 74 aa, Homo sapiens; identical to SEQ ID NO: 1419
  variant (1)...(74): Xaa = Any amino acid

SEQ ID NO: 1890 - protein, 66 aa, Homo sapiens; identical to SEQ ID NO: 1420
  variant (1)...(66): Xaa = Any amino acid

SEQ ID NO: 1891 - protein, 55 aa, Homo sapiens; identical to SEQ ID NO: 1427

SEQ ID NO: 1892 - protein, 52 aa, Homo sapiens; identical to SEQ ID NO: 787
  variant (1)...(52): Xaa = Any amino acid

SEQ ID NO: 1893 - protein, 115 aa, Homo sapiens; identical to SEQ ID NO: 1443
  variant (1)...(115): Xaa = Any amino acid

SEQ ID NO: 1894 - protein, 50 aa, Homo sapiens; identical to SEQ ID NO: 1444

SEQ ID NO: 1895 - protein, 114 aa, Homo sapiens; identical to SEQ ID NO: 1445
  variant (1)...(114): Xaa = Any amino acid

SEQ ID NO: 1896 - protein, 74 aa, Homo sapiens; identical to SEQ ID NO: 1446
  variant (1)...(74): Xaa = Any amino acid

SEQ ID NO: 1897 - protein, 60 aa, Homo sapiens; identical to SEQ ID NO: 1447
  variant (1)...(60): Xaa = Any amino acid

SEQ ID NO: 1898 - protein, 60 aa, Homo sapiens; identical to SEQ ID NO: 1448
  variant (1)...(60): Xaa = Any amino acid

SEQ ID NO: 1899 - protein, 58 aa, Homo sapiens; identical to SEQ ID NO: 1449

SEQ ID NO: 1900 - protein, 146 aa, Homo sapiens; identical to SEQ ID NO: 1450

SEQ ID NO: 1901 - protein, 62 aa, Homo sapiens; identical to SEQ ID NO: 1451

SEQ ID NO: 1902 - protein, 109 aa, Homo sapiens; identical to SEQ ID NO: 1452
  variant (1)...(109): Xaa = Any amino acid

SEQ ID NO: 1903 - protein, 81 aa, Homo sapiens; identical to SEQ ID NO: 1453

SEQ ID NO: 1904 - protein, 59 aa, Homo sapiens; identical to SEQ ID NO: 1454
  variant (1)...(59): Xaa = Any amino acid

SEQ ID NO: 1905 - protein, 74 aa, Homo sapiens [sequence omitted]

SEQ ID NO: 1906 - protein, 66 aa, Homo sapiens; identical to SEQ ID NO: 822

SEQ ID NO: 1907 - protein, 75 aa, Homo sapiens; identical to SEQ ID NO: 823

SEQ ID NO: 1908 - protein, 59 aa, Homo sapiens; identical to SEQ ID NO: 824

SEQ ID NO: 1909 - protein, 65 aa, Homo sapiens; identical to SEQ ID NO: 1467

SEQ ID NO: 1910 - protein, 107 aa, Homo sapiens; identical to SEQ ID NO: 1468

SEQ ID NO: 1911 - protein, 74 aa, Homo sapiens; identical to SEQ ID NO: 1469

SEQ ID NO: 1912 - protein, 63 aa, Homo sapiens; identical to SEQ ID NO: 1470

SEQ ID NO: 1913 - protein, 181 aa, Homo sapiens; identical to SEQ ID NO: 1471

SEQ ID NO: 1914 - protein, 109 aa, Homo sapiens; identical to SEQ ID NO: 1472

SEQ ID NO: 1915 - protein, 100 aa, Homo sapiens [sequence omitted]

SEQ ID NO: 1916 - protein, 103 aa, Homo sapiens [sequence omitted]

SEQ ID NO: 1917 - protein, 58 aa, Homo sapiens [sequence omitted]

SEQ ID NO: 1918 - protein, 109 aa, Homo sapiens; identical to SEQ ID NO: 1476

SEQ ID NO: 1919 - protein, 78 aa, Homo sapiens
  variant (1)...(78): Xaa = Any amino acid
RGCMPXSTLELEELKQVLLHNERSFNPLEDDDDCQIKKRPASLNSKPSSLRRVTIASLPXNIGNAGMVAGMENNDPIX

SEQ ID NO: 1920 - protein, 103 aa, Homo sapiens
  variant (1)...(103): Xaa = Any amino acid
XIGSLFSIPATIPAFPIFXGKEAIVTLRREDGLEFREAGRFLIWQSSSSSRGLKDLSLCRRTCFSSSNSSVXFGIHPLQVXYVLNHHFNCFTNPAFLIDGSQH

SEQ ID NO: 1921 - protein, 60 aa, Homo sapiens; identical to SEQ ID NO: 1494
  variant (1)...(60): Xaa = Any amino acid

SEQ ID NO: 1922 - protein, 60 aa, Homo sapiens; identical to SEQ ID NO: 1495
  variant (1)...(60): Xaa = Any amino acid

SEQ ID NO: 1923 - protein, 60 aa, Homo sapiens; identical to SEQ ID NO: 1496
  variant (1)...(60): Xaa = Any amino acid

SEQ ID NO: 1924 - protein, 60 aa, Homo sapiens; identical to SEQ ID NO: 1497
  variant (1)...(60): Xaa = Any amino acid

SEQ ID NO: 1925 - protein, 53 aa, Homo sapiens; identical to SEQ ID NO: 1498
  variant (1)...(53): Xaa = Any amino acid

SEQ ID NO: 1926 - protein, 71 aa, Homo sapiens [sequence omitted]

SEQ ID NO: 1927 - protein, 73 aa, Homo sapiens; identical to SEQ ID NO: 882

SEQ ID NO: 1928 - protein, 63 aa, Homo sapiens; identical to SEQ ID NO: 1470

SEQ ID NO: 1929 - protein, 181 aa, Homo sapiens; identical to SEQ ID NO: 1471

SEQ ID NO: 1930 - protein, 109 aa, Homo sapiens; identical to SEQ ID NO: 1472

SEQ ID NO: 1931 - protein, 74 aa, Homo sapiens; identical to SEQ ID NO: 1505

SEQ ID NO: 1932 - protein, 66 aa, Homo sapiens; identical to SEQ ID NO: 1506

SEQ ID NO: 1933 - protein, 63 aa, Homo sapiens; identical to SEQ ID NO: 1470

SEQ ID NO: 1934 - protein, 169 aa, Homo sapiens
SRAEMLGAINQESRVSKAVEVMIQHVENLKRMYAKEHAELEELKQVLLQNERSFNPLEDDDDCQIKKRSASLNSKPSSLRRVTIASLPRNIGNAGMVAGMENNDRFSRRSSSWRILGSKQSEHRPSLPRFISTYSWADAEEEKCELKTKDDSEPSGEETVERTRKPSLS

SEQ ID NO: 1935 - protein, 109 aa, Homo sapiens; identical to SEQ ID NO: 1472

SEQ ID NO: 1936 - protein, 56 aa, Homo sapiens
DKSRPKSFHRDGMMLPVHCQHGWEEITDKTDQSVGLAKLQGLQREHFSDRKPWWGD

SEQ ID NO: 1937 - protein, 79 aa, Homo sapiens
  variant (1)...(79): Xaa = Any amino acid
FRWYLCVWRGHGIWRGGQRRTQWVRLWETEMSEELGSEGRSSSRQGLXLDVEAEPDPGYSGPLHHDFLQHFLSRAHIDV

SEQ ID NO: 1938 - protein, 114 aa, Homo sapiens
  variant (1)...(114): Xaa = Any amino acid
XQSLPGRRPPFRAQLLAHLCLPKPDPLCSSLPSPPYAMAPPNTEIPSKLVSFSPYTSIPPPGFPIAEVFTLKPLEFGKPNTLVCFVSNLFPPMLTVNWQHHSIPVEGFGPTFVS

SEQ ID NO: 1939 - protein, 58 aa, Homo sapiens
  variant (1)...(58): Xaa = Any amino acid
PGSGSASTSXCSPCLEEDLPSEPSSSLISVSQSLTHCVLLCPPLHMPWPLQTQRYHLN

SEQ ID NO: 1940 - protein, 150 aa, Homo sapiens; identical to SEQ ID NO: 983
  variant (1)...(150): Xaa = Any amino acid

SEQ ID NO: 1941 - protein, 101 aa, Homo sapiens; identical to SEQ ID NO: 930

SEQ ID NO: 1942 - protein, 87 aa, Homo sapiens; identical to SEQ ID NO: 1515

SEQ ID NO: 1943 - protein, 113 aa, Homo sapiens [sequence omitted]

SEQ ID NO: 1944 - protein, 79 aa, Homo sapiens; identical to SEQ ID NO: 1517

SEQ ID NO: 1945 - protein, 54 aa, Homo sapiens; identical to SEQ ID NO: 1535
  variant (1)...(54): Xaa = Any amino acid

SEQ ID NO: 1946 - protein, 55 aa, Homo sapiens; identical to SEQ ID NO: 1536
  variant (1)...(55): Xaa = Any amino acid

SEQ ID NO: 1947 - protein, 61 aa, Homo sapiens; identical to SEQ ID NO: 1537

SEQ ID NO: 1948 - protein, 96 aa, Homo sapiens; identical to SEQ ID NO: 1538
  variant (1)...(96): Xaa = Any amino acid

SEQ ID NO: 1949 - protein, 65 aa, Homo sapiens; identical to SEQ ID NO: 1467

SEQ ID NO: 1950 - protein, 107 aa, Homo sapiens; identical to SEQ ID NO: 1468

SEQ ID NO: 1951 - protein, 74 aa, Homo sapiens; identical to SEQ ID NO: 1469

SEQ ID NO: 1952 - protein, 94 aa, Homo sapiens [sequence omitted]

SEQ ID NO: 1953 - protein, 61 aa, Homo sapiens [sequence omitted]

SEQ ID NO: 1954 - protein, 58 aa, Homo sapiens; identical to SEQ ID NO: 1083
  variant (1)...(58): Xaa = Any amino acid

SEQ ID NO: 1955 - protein, 139 aa, Homo sapiens; identical to SEQ ID NO: 1084
  variant (1)...(139): Xaa = Any amino acid

SEQ ID NO: 1956 - protein, 62 aa, Homo sapiens; identical to SEQ ID NO: 1220

SEQ ID NO: 1957 - protein, 86 aa, Homo sapiens; identical to SEQ ID NO: 1221

SEQ ID NO: 1958 - protein, 97 aa, Homo sapiens; identical to SEQ ID NO: 1593

SEQ ID NO: 1959 - protein, 57 aa, Homo sapiens; identical to SEQ ID NO: 1149

SEQ ID NO: 1960 - protein, 78 aa, Homo sapiens; identical to SEQ ID NO: 1150

SEQ ID NO: 1961 - protein, 65 aa, Homo sapiens; identical to SEQ ID NO: 1600

SEQ ID NO: 1962 - protein, 64 aa, Homo sapiens; identical to SEQ ID NO: 1601

SEQ ID NO: 1963 - protein, 79 aa, Homo sapiens; identical to SEQ ID NO: 1609
  variant (1)...(79): Xaa = Any amino acid

SEQ ID NO: 1964 - protein, 87 aa, Homo sapiens; identical to SEQ ID NO: 1515

SEQ ID NO: 1965 - protein, 113 aa, Homo sapiens; identical to SEQ ID NO: 1611
  variant (1)...(113): Xaa = Any amino acid

SEQ ID NO: 1966 - protein, 117 aa, Homo sapiens; identical to SEQ ID NO: 1170

SEQ ID NO: 1967 - protein, 117 aa, Homo sapiens; identical to SEQ ID NO: 1171

SEQ ID NO: 1968 - protein, 83 aa, Homo sapiens; identical to SEQ ID NO: 1172

SEQ ID NO: 1969 - protein, 67 aa, Homo sapiens; identical to SEQ ID NO: 1625
  variant (1)...(67): Xaa = Any amino acid

SEQ ID NO: 1970 - protein, 74 aa, Homo sapiens
IYDSLAYWNWSASKTGWLHRRTRQSRLFLCTDSETVLSGRSSGLPGPDTCPRESPEAWTVLLCFHRSGRGESPW

SEQ ID NO: 1971 - protein, 101 aa, Homo sapiens
KTIYRQFFTSLIFTDSTSYGMAYGLPPKYTILWHIGIGQPQRPAGYIVARDSPAYSSARTRRRSSAGGAQVSLGQTRAPESPQKHGQFCSVSIAQAGERVR

SEQ ID NO: 1972 - protein, 101 aa, Homo sapiens
KQSTGSSLQVSYLQIAQAMAWRMASLLNIRFFGILELVSLKDRLATSSHETVPLIPLHGLGDGPQREELRSPWARHVPQRVPRSMDSSALFPSLRQGRESV

SEQ ID NO: 1973 - protein, 74 aa, Homo sapiens
HGLSPLPERWKQSRTVHASGDSLGHVSGPGRPELLPLRTVSESVQRNKRDCLVRRCSQPVFEADQFQYAKESYI

SEQ ID NO: 1974 - protein, 64 aa, Homo sapiens
GPSPSPCRGISGTVSCDDVASRSLRLTNSNMPKNRIFRREAIRHAIACAICKYETCKELPVDCF

SEQ ID NO: 1975 - protein, 98 aa, Homo sapiens; identical to SEQ ID NO: 1188
  variant (1)...(98): Xaa = Any amino acid

SEQ ID NO: 1976 - protein, 66 aa, Homo sapiens; identical to SEQ ID NO: 1636

SEQ ID NO: 1977 - protein, 84 aa, Homo sapiens; identical to SEQ ID NO: 1637
  variant (1)...(84): Xaa = Any amino acid

SEQ ID NO: 1978 - protein, 64 aa, Homo sapiens; identical to SEQ ID NO: 1638
  variant (1)...(64): Xaa = Any amino acid

SEQ ID NO: 1979 - protein, 69 aa, Homo sapiens; identical to SEQ ID NO: 1651
  variant (1)...(69): Xaa = Any amino acid

SEQ ID NO: 1980 - protein, 57 aa, Homo sapiens [sequence omitted]

SEQ ID NO: 1981 - protein, 66 aa, Homo sapiens; identical to SEQ ID NO: 1653
  variant (1)...(66): Xaa = Any amino acid

SEQ ID NO: 1982 - protein, 67 aa, Homo sapiens; identical to SEQ ID NO: 1654
  variant (1)...(67): Xaa = Any amino acid

SEQ ID NO: 1983 - protein, 99 aa, Homo sapiens; identical to SEQ ID NO: 1655
  variant (1)...(99): Xaa = Any amino acid

SEQ ID NO: 1984 - protein, 50 aa, Homo sapiens; identical to SEQ ID NO: 1205

SEQ ID NO: 1985 - protein, 134 aa, Homo sapiens; identical to SEQ ID NO: 1206

SEQ ID NO: 1986 - protein, 67 aa, Homo sapiens; identical to SEQ ID NO: 1207

SEQ ID NO: 1987 - protein, 60 aa, Homo sapiens; identical to SEQ ID NO: 1208

SEQ ID NO: 1988 - protein, 64 aa, Homo sapiens; identical to SEQ ID NO: 1209

SEQ ID NO: 1989 - protein, 53 aa, Homo sapiens; identical to SEQ ID NO: 1210

SEQ ID NO: 1990 - protein, 62 aa, Homo sapiens; identical to SEQ ID NO: 1667
  variant (1)...(62): Xaa = Any amino acid

SEQ ID NO: 1991 - protein, 86 aa, Homo sapiens; identical to SEQ ID NO: 1668
  variant (1)...(86): Xaa = Any amino acid

SEQ ID NO: 1992 - protein, 185 aa, Homo sapiens
FDDRRGRPVGFPMRGRGGFDRMPPGRGGRPMPPSRRDYDDMSPRRGPPPPPPGRGGRGGSRARNLPLPPPPPPRGGDLMAYDRRGRPGDRYDGMVGFSADETWDSAIDTWSPSEWQMAYEPQGGSGYDYSYAGGRGSYGDLGGPIITTQVTIPKDLAGSIIGKGGQRIKQIRHESGASIKIDEPL

SEQ ID NO: 1993 - protein, 65 aa, Homo sapiens
ALVEDHLPLLPDEAAGVVAELGIFLFLHHHHLEGETSWPMTEEGDLETVTTAWLVSVLMKLGTLQ

SEQ ID NO: 1994 - protein, 112 aa, Homo sapiens
WAPCIYCRVPSFISTETNHAVVTVSRSPSSVIGHEVSPSRWWWWRKRKIPSSATTPAASSGRRGRWSSTRAHIIIISSRWRHGTPTPTRRHSVKTTSSPHGKSHWASATVIK

SEQ ID NO: 1995 - protein, 87 aa, Homo sapiens; identical to SEQ ID NO: 1348

SEQ ID NO: 1996 - protein, 55 aa, Homo sapiens; identical to SEQ ID NO: 1349

SEQ ID NO: 1997 - protein, 123 aa, Homo sapiens; identical to SEQ ID NO: 1681

SEQ ID NO: 1998 - protein, 191 aa, Homo sapiens; identical to SEQ ID NO: 1281

SEQ ID NO: 1999 - protein, 51 aa, Homo sapiens; identical to SEQ ID NO: 1282

SEQ ID NO: 2000 - protein, 51 aa, Homo sapiens; identical to SEQ ID NO: 1283

SEQ ID NO: 2001 - protein, 55 aa, Homo sapiens; identical to SEQ ID NO: 1284

SEQ ID NO: 2002 - protein, 95 aa, Homo sapiens; identical to SEQ ID NO: 1222
  variant (1)...(95): Xaa = Any amino acid

SEQ ID NO: 2003 - protein, 60 aa, Homo sapiens; identical to SEQ ID NO: 1699

SEQ ID NO: 2004 - protein, 57 aa, Homo sapiens; identical to SEQ ID NO: 1700

SEQ ID NO: 2005 - protein, 50 aa, Homo sapiens [sequence omitted]

SEQ ID NO: 2006 - protein, 53 aa, Homo sapiens; identical to SEQ ID NO: 1702

SEQ ID NO: 2007 - protein, 65 aa, Homo sapiens; identical to SEQ ID NO: 1703

SEQ ID NO: 2008 - protein, 64 aa, Homo sapiens [sequence omitted]

SEQ ID NO: 2009 - protein, 52 aa, Homo sapiens; identical to SEQ ID NO: 1705

SEQ ID NO: 2010 - protein, 67 aa, Homo sapiens; identical to SEQ ID NO: 1706

SEQ ID NO: 2011 - protein, 58 aa, Homo sapiens; identical to SEQ ID NO: 1710

SEQ ID NO: 2012 - protein, 76 aa, Homo sapiens; identical to SEQ ID NO: 1337

SEQ ID NO: 2013 - protein, 63 aa, Homo sapiens; identical to SEQ ID NO: 1712

SEQ ID NO: 2014 - protein, 156 aa, Homo sapiens; identical to SEQ ID NO: 1713

SEQ ID NO: 2015 - protein, 62 aa, Homo sapiens; identical to SEQ ID NO: 1248
  variant (1)...(62): Xaa = Any amino acid

SEQ ID NO: 2016 - protein, 86 aa, Homo sapiens; identical to SEQ ID NO: 1249
  variant (1)...(86): Xaa = Any amino acid

SEQ ID NO: 2017 - protein, 69 aa, Homo sapiens [sequence omitted]

SEQ ID NO: 2018 - protein, 102 aa, Homo sapiens; identical to SEQ ID NO: 1251

SEQ ID NO: 2019 - protein, 77 aa, Homo sapiens [sequence omitted]

SEQ ID NO: 2020 - protein, 60 aa, Homo sapiens [sequence omitted]

SEQ ID NO: 2021 - protein, 115 aa, Homo sapiens
  variant (1)...(115): Xaa = Any amino acid
PMWLVFSLQLARFHTLTSLSQPQETMIGLLLLGEKRTQDTHSEWLSSWTVYLHTPRVFHSLMVLSRDPXTICRLSEEKATLXTSLAWPTNXXVVVPVVRSQRRRVPSQEPERANW

SEQ ID NO: 2022 - protein, 50 aa, Homo sapiens
  variant (1)...(50): Xaa = Any amino acid
LDGFISRSXDNLPVVRGEGHTXHILGMAHKSXXGGARCEIPEAQGSIPGA

SEQ ID NO: 2023 - protein, 114 aa, Homo sapiens
  variant (1)...(114): Xaa = Any amino acid
QFALSGSWDGTLRLWDLTTGTTXXRFVGHAKDVXSVAFSSDNRQIVXGSRDKTIKLWNTLGVCKYTVQDESHSEWVSCVRFSPNSSNPIIVSCGWDKLVKVWNLANCKLKTNHI

SEQ ID NO: 2024 - protein, 74 aa, Homo sapiens
  variant (1)...(74): Xaa = Any amino acid
VWPSPLTTGRLSXDLEIKPSSYGIPWVCANTLSRMRATQSGCLVSASRPTAATLSSSPVAGTSWSRYGTWLTAS

SEQ ID NO: 2025 - protein, 62 aa, Homo sapiens; identical to SEQ ID NO: 1743

SEQ ID NO: 2026 - protein, 116 aa, Homo sapiens; identical to SEQ ID NO: 1744

SEQ ID NO: 2027 - protein, 87 aa, Homo sapiens; identical to SEQ ID NO: 1515

SEQ ID NO: 2028 - protein, 113 aa, Homo sapiens [sequence omitted]

SEQ ID NO: 2029 - protein, 79 aa, Homo sapiens; identical to SEQ ID NO: 1517

SEQ ID NO: 2030 - protein, 52 aa, Homo sapiens; identical to SEQ ID NO: 1748

SEQ ID NO: 2031 - protein, 115 aa, Homo sapiens; identical to SEQ ID NO: 1749

SEQ ID NO: 2032 - protein, 52 aa, Homo sapiens; identical to SEQ ID NO: 1750

SEQ ID NO: 2033 - protein, 56 aa, Homo sapiens; identical to SEQ ID NO: 1751

SEQ ID NO: 2034 - protein, 86 aa, Homo sapiens; identical to SEQ ID NO: 1221

SEQ ID NO: 2035 - protein, 62 aa, Homo sapiens; identical to SEQ ID NO: 1220

SEQ ID NO: 2036 - protein, 191 aa, Homo sapiens; identical to SEQ ID NO: 1281

SEQ ID NO: 2037 - protein, 51 aa, Homo sapiens; identical to SEQ ID NO: 1282

SEQ ID NO: 2038 - protein, 51 aa, Homo sapiens; identical to SEQ ID NO: 1283

SEQ ID NO: 2039 - protein, 55 aa, Homo sapiens; identical to SEQ ID NO: 1284

SEQ ID NO: 2040 - protein, 87 aa, Homo sapiens; identical to SEQ ID NO: 1515

SEQ ID NO: 2041 - protein, 113 aa, Homo sapiens [sequence omitted]

SEQ ID NO: 2042 - protein, 79 aa, Homo sapiens; identical to SEQ ID NO: 1517

SEQ ID NO: 2043 - protein, 106 aa, Homo sapiens; identical to SEQ ID NO: 1289

SEQ ID NO: 2044 - protein, 53 aa, Homo sapiens; identical to SEQ ID NO: 1290

SEQ ID NO: 2045 - protein, 55 aa, Homo sapiens; identical to SEQ ID NO: 1144

SEQ ID NO: 2046 - protein, 51 aa, Homo sapiens; identical to SEQ ID NO: 1292

SEQ ID NO: 2047 - protein, 51 aa, Homo sapiens; identical to SEQ ID NO: 1145

SEQ ID NO: 2048 - protein, 78 aa, Homo sapiens; identical to SEQ ID NO: 1307

SEQ ID NO: 2049 - protein, 134 aa, Homo sapiens [sequence omitted]

SEQ ID NO: 2050 - protein, 66 aa, Homo sapiens; identical to SEQ ID NO: 1309

SEQ ID NO: 2051 - protein, 141 aa, Homo sapiens; identical to SEQ ID NO: 1310

SEQ ID NO: 2052 - protein, 61 aa, Homo sapiens; identical to SEQ ID NO: 1311

SEQ ID NO: 2053 - protein, 51 aa, Homo sapiens; identical to SEQ ID NO: 1312

SEQ ID NO: 2054 - protein, 192 aa, Homo sapiens; identical to SEQ ID NO: 1790

SEQ ID NO: 2055 - protein, 75 aa, Homo sapiens [sequence omitted]

SEQ ID NO: 2056 - protein, 64 aa, Homo sapiens; identical to SEQ ID NO: 1792

SEQ ID NO: 2057 - protein, 104 aa, Homo sapiens [sequence omitted]

SEQ ID NO: 2058 - protein, 71 aa, Homo sapiens; identical to SEQ ID NO: 1794

SEQ ID NO: 2059 - protein, 115 aa, Homo sapiens; identical to SEQ ID NO: 1143

SEQ ID NO: 2060 - protein, 55 aa, Homo sapiens; identical to SEQ ID NO: 1144

SEQ ID NO: 2061 - protein, 51 aa, Homo sapiens; identical to SEQ ID NO: 1145

SEQ ID NO: 2062 - protein, 59 aa, Homo sapiens; identical to SEQ ID NO: 1321

SEQ ID NO: 2063 - protein, 64 aa, Homo sapiens; identical to SEQ ID NO: 1322

SEQ ID NO: 2064 - protein, 57 aa, Homo sapiens; identical to SEQ ID NO: 1323

SEQ ID NO: 2065 - protein, 51 aa, Homo sapiens; identical to SEQ ID NO: 1324

SEQ ID NO: 2066 - protein, 50 aa, Homo sapiens; identical to SEQ ID NO: 1332

SEQ ID NO: 2067 - protein, 51 aa, Homo sapiens; identical to SEQ ID NO: 1333

SEQ ID NO: 2068 - protein, 66 aa, Homo sapiens; identical to SEQ ID NO: 1811

SEQ ID NO: 2069 - protein, 83 aa, Homo sapiens; identical to SEQ ID NO: 1812

SEQ ID NO: 2070 - protein, 82 aa, Homo sapiens; identical to SEQ ID NO: 1813

SEQ ID NO: 2071 - protein, 53 aa, Homo sapiens; identical to SEQ ID NO: 1814

SEQ ID NO: 2072 - protein, 63 aa, Homo sapiens; identical to SEQ ID NO: 1818
  variant (1)...(63): Xaa = Any amino acid

SEQ ID NO: 2073 - protein, 70 aa, Homo sapiens; identical to SEQ ID NO: 1819
  variant (1)...(70): Xaa = Any amino acid

SEQ ID NO: 2074 - protein, 76 aa, Homo sapiens; identical to SEQ ID NO: 1820
  variant (1)...(76): Xaa = Any amino acid

SEQ ID NO: 2075 - protein, 67 aa, Homo sapiens
  variant (1)...(67): Xaa = Any amino acid
EXSSQPTVPIVGIIAGLVLLGAVITGAVVAAVMWRRNSSDRKGGSYSQAASSDSAQGSDVSLTACKV

SEQ ID NO: 2076 - protein, 70 aa, Homo sapiens; identical to SEQ ID NO: 1821

SEQ ID NO: 2077 - protein, 70 aa, Homo sapiens; identical to SEQ ID NO: 1822

SEQ ID NO: 2078 - protein, 64 aa, Homo sapiens; identical to SEQ ID NO: 1823

SEQ ID NO: 2079 - protein, 90 aa, Homo sapiens; identical to SEQ ID NO: 1334

SEQ ID NO: 2080 - protein, 52 aa, Homo sapiens; identical to SEQ ID NO: 1335

SEQ ID NO: 2081 - protein, 74 aa, Homo sapiens; identical to SEQ ID NO: 1505

SEQ ID NO: 2082 - protein, 66 aa, Homo sapiens; identical to SEQ ID NO: 1825

SEQ ID NO: 2083 - protein, 60 aa, Homo sapiens; identical to SEQ ID NO: 1340

SEQ ID NO: 2084 - protein, 95 aa, Homo sapiens; identical to SEQ ID NO: 1341

SEQ ID NO: 2085 - protein, 50 aa, Homo sapiens; identical to SEQ ID NO: 1342

SEQ ID NO: 2086 - protein, 62 aa, Homo sapiens; identical to SEQ ID NO: 1830

SEQ ID NO: 2087 - protein, 94 aa, Homo sapiens; identical to SEQ ID NO: 1831

SEQ ID NO: 2088 - protein, 76 aa, Homo sapiens; identical to SEQ ID NO: 1346

SEQ ID NO: 2089 - protein, 68 aa, Homo sapiens; identical to SEQ ID NO: 1347

SEQ ID NO: 2090 - protein, 87 aa, Homo sapiens; identical to SEQ ID NO: 1348

SEQ ID NO: 2091 - protein, 55 aa, Homo sapiens; identical to SEQ ID NO: 1349

SEQ ID NO: 2092 - protein, 120 aa, Homo sapiens; identical to SEQ ID NO: 1350

SEQ ID NO: 2093 - protein, 50 aa, Homo sapiens; identical to SEQ ID NO: 1368

SEQ ID NO: 2094 - protein, 93 aa, Homo sapiens; identical to SEQ ID NO: 1369

SEQ ID NO: 2095 - protein, 65 aa, Homo sapiens; identical to SEQ ID NO: 1370

SEQ ID NO: 2096 - protein, 73 aa, Homo sapiens; identical to SEQ ID NO: 1375

SEQ ID NO: 2097 - protein, 52 aa, Homo sapiens; identical to SEQ ID NO: 1376

SEQ ID NO: 2098 - protein, 64 aa, Homo sapiens; identical to SEQ ID NO: 1377

SEQ ID NO: 2099 - protein, 55 aa, Homo sapiens; identical to SEQ ID NO: 1378

SEQ ID NO: 2100 - protein, 87 aa, Homo sapiens; identical to SEQ ID NO: 1348

SEQ ID NO: 2101 - protein, 55 aa, Homo sapiens; identical to SEQ ID NO: 1349

SEQ ID NO: 2102 - protein, 50 aa, Homo sapiens
TLIIFVHFLQLFQGLLWWRLIIELAVQLIIVILLHMWLWGFFSHSDLFIQ

SEQ ID NO: 2103 - protein, 123 aa, Homo sapiens; identical to SEQ ID NO: 1681

SEQ ID NO: 2104 - protein, 69 aa, Homo sapiens; identical to SEQ ID NO: 1379

SEQ ID NO: 2105 - protein, 66 aa, Homo sapiens; identical to SEQ ID NO: 1380

SEQ ID NO: 2106 - protein, 58 aa, Homo sapiens [sequence omitted]

SEQ ID NO: 2107 - protein, 109 aa, Homo sapiens; identical to SEQ ID NO: 674

SEQ ID NO: 2108 - protein, 100 aa, Homo sapiens; identical to SEQ ID NO: 675

SEQ ID NO: 2109 - protein, 103 aa, Homo sapiens [sequence omitted]

SEQ ID NO: 2110 - protein, 55 aa, Homo sapiens; identical to SEQ ID NO: 1385

SEQ ID NO: 2111 - protein, 97 aa, Homo sapiens; identical to SEQ ID NO: 1386

SEQ ID NO: 2112 - protein, 55 aa, Homo sapiens; identical to SEQ ID NO: 791

SEQ ID NO: 2113 - protein, 89 aa, Homo sapiens; identical to SEQ ID NO: 677

SEQ ID NO: 2114 - protein, 89 aa, Homo sapiens; identical to SEQ ID NO: 678

SEQ ID NO: 2115 - protein, 59 aa, Homo sapiens; identical to SEQ ID NO: 679

SEQ ID NO: 2116 - protein, 71 aa, Homo sapiens; identical to SEQ ID NO: 696
  variant (1)...(71): Xaa = Any amino acid

SEQ ID NO: 2117 - protein, 97 aa, Homo sapiens; identical to SEQ ID NO: 697
  variant (1)...(97): Xaa = Any amino acid

SEQ ID NO: 2118 - protein, 52 aa, Homo sapiens; identical to SEQ ID NO: 698
  variant (1)...(52): Xaa = Any amino acid

SEQ ID NO: 2119 - protein, 70 aa, Homo sapiens; identical to SEQ ID NO: 699

SEQ ID NO: 2120 - protein, 97 aa, Homo sapiens; identical to SEQ ID NO: 700
  variant (1)...(97): Xaa = Any amino acid

SEQ ID NO: 2121 - protein, 72 aa, Homo sapiens [sequence omitted]

SEQ ID NO: 2122 - protein, 51 aa, Homo sapiens; identical to SEQ ID NO: 702

SEQ ID NO: 2123 - protein, 53 aa, Homo sapiens [sequence omitted]

SEQ ID NO: 2124 - protein, 67 aa, Homo sapiens; identical to SEQ ID NO: 1402
  variant (1)...(67): Xaa = Any amino acid

SEQ ID NO: 2125 - protein, 56 aa, Homo sapiens; identical to SEQ ID NO: 712

SEQ ID NO: 2126 - protein, 56 aa, Homo sapiens; identical to SEQ ID NO: 713

SEQ ID NO: 2127 - protein, 56 aa, Homo sapiens; identical to SEQ ID NO: 714

SEQ ID NO: 2128 - protein, 56 aa, Homo sapiens; identical to SEQ ID NO: 729

SEQ ID NO: 2129 - protein, 50 aa, Homo sapiens; identical to SEQ ID NO: 730

SEQ ID NO: 2130 - protein, 70 aa, Homo sapiens; identical to SEQ ID NO: 731

SEQ ID NO: 2131 - protein, 53 aa, Homo sapiens; identical to SEQ ID NO: 732

SEQ ID NO: 2132 - protein, 56 aa, Homo sapiens; identical to SEQ ID NO: 792

SEQ ID NO: 2133 - protein, 177 aa, Homo sapiens; identical to SEQ ID NO: 793
  variant (1)...(177): Xaa = Any amino acid

SEQ ID NO: 2134 - protein, 56 aa, Homo sapiens; identical to SEQ ID NO: 794

SEQ ID NO: 2135 - protein, 70 aa, Homo sapiens [sequence omitted]

SEQ ID NO: 2136 - protein, 53 aa, Homo sapiens; identical to SEQ ID NO: 796

SEQ ID NO: 2137 - protein, 146 aa, Homo sapiens [sequence omitted]

SEQ ID NO: 2138 - protein, 58 aa, Homo sapiens; identical to SEQ ID NO: 798

SEQ ID NO: 2139 - protein, 110 aa, Homo sapiens; identical to SEQ ID NO: 799

SEQ ID NO: 2140 - protein, 110 aa, Homo sapiens; identical to SEQ ID NO: 800

SEQ ID NO: 2141 - protein, 70 aa, Homo sapiens; identical to SEQ ID NO: 801

SEQ ID NO: 2142 - protein, 71 aa, Homo sapiens; identical to SEQ ID NO: 813

SEQ ID NO: 2143 - protein, 124 aa, Homo sapiens; identical to SEQ ID NO: 814

SEQ ID NO: 2144 - protein, 51 aa, Homo sapiens [sequence omitted]

SEQ ID NO: 2145 - protein, 51 aa, Homo sapiens
PRLIASRGSPSADQLNTNFFLLFSTWFGKSHSFQAPSVWRKYILKHPQFTF

SEQ ID NO: 2146 - protein, 66 aa, Homo sapiens; identical to SEQ ID NO: 822

SEQ ID NO: 2147 - protein, 75 aa, Homo sapiens; identical to SEQ ID NO: 823

SEQ ID NO: 2148 - protein, 59 aa, Homo sapiens; identical to SEQ ID NO: 824

SEQ ID NO: 2149 - protein, 94 aa, Homo sapiens; identical to SEQ ID NO: 844
  variant (1)...(94): Xaa = Any amino acid

SEQ ID NO: 2150 - protein, 57 aa, Homo sapiens; identical to SEQ ID NO: 845

SEQ ID NO: 2151 - protein, 93 aa, Homo sapiens; identical to SEQ ID NO: 846
  variant (1)...(93): Xaa = Any amino acid

SEQ ID NO: 2152 - protein, 121 aa, Homo sapiens; identical to SEQ ID NO: 847
  variant (1)...(121): Xaa = Any amino acid

SEQ ID NO: 2153 - protein, 54 aa, Homo sapiens; identical to SEQ ID NO: 848
  variant (1)...(54): Xaa = Any amino acid

SEQ ID NO: 2154 - protein, 59 aa, Homo sapiens; identical to SEQ ID NO: 849

SEQ ID NO: 2155 - protein, 67 aa, Homo sapiens; identical to SEQ ID NO: 850
  variant (1)...(67): Xaa = Any amino acid

SEQ ID NO: 2156 - protein, 55 aa, Homo sapiens; identical to SEQ ID NO: 851
  variant (1)...(55): Xaa = Any amino acid

SEQ ID NO: 2157 - protein, 123 aa, Homo sapiens; identical to SEQ ID NO: 860

SEQ ID NO: 2158 - protein, 71 aa, Homo sapiens; identical to SEQ ID NO: 861

SEQ ID NO: 2159 - protein, 62 aa, Homo sapiens
  variant (1)...(62): Xaa = Any amino acid
DLLGGMAPPGSSTVFLLALTIIASTWALTPTHYLTKHDXERLKASLDPPFHKVGSXVFYSIX

SEQ ID NO: 2160 - protein, 53 aa, Homo sapiens
PWDGSSDHWGPGQARPGLGQQGPGQRGRASFGGVEGYILGWCLHPGVQQDLFQ

SEQ ID NO: 2161 - protein, 83 aa, Homo sapiens [sequence omitted]

SEQ ID NO: 2162 - protein, 115 aa, Homo sapiens [sequence omitted]

SEQ ID NO: 2163 - protein, 165 aa, Homo sapiens
  variant (1)...(165): Xaa = Any amino acid
WQPSSTAISRXVVHRDIKDEXILIDLRRGCAKLIDFGSGALLHDEPYTDFDGTRVYSPPEWISRHQYHALPATVWSLGILLYDMVCGDIPFERDQEILEAELHFPSPCFPQDCCALIRRCLAPKPSSRPSLEEILLDPWMQTPAEDVPLNPSKGGPAPLAWSLLP

SEQ ID NO: 2164 - protein, 91 aa, Homo sapiens [sequence omitted]

SEQ ID NO: 2165 - protein, 66 aa, Homo sapiens [sequence omitted]

SEQ ID NO: 2166 - protein, 82 aa, Homo sapiens [sequence omitted]

SEQ ID NO: 2167 - protein, 118 aa, Homo sapiens; identical to SEQ ID NO: 883

SEQ ID NO: 2168 - protein, 66 aa, Homo sapiens; identical to SEQ ID NO: 884

SEQ ID NO: 2169 - protein, 86 aa, Homo sapiens
  variant (1)...(86): Xaa = Any amino acid
QVVAXIQHCHSRGVVHRDIKDENILIDLRRGCAKLIDFGSGALLHDEPYTDFDGTRVYSPPEWISRHQYHALPATVWSLGIXLYDM

SEQ ID NO: 2170 - protein, 60 aa, Homo sapiens
  variant (1)...(60): Xaa = Any amino acid
TYAVAVPNSLILVLVPCFMMNPTLTLMGQGCTAPQSGSLDTSTMHSRPLSGHWASXSMTW

SEQ ID NO: 2171 - protein, 51 aa, Homo sapiens
  variant (1)...(51): Xaa = Any amino acid
PCHRXGCPVTRQWPGVHGTGVERSTLGGCTPLSHQSQCRVHHEAGHQNQNQ

SEQ ID NO: 2172 - protein, 121 aa, Homo sapiens; identical to SEQ ID NO: 926
  variant (1)...(121): Xaa = Any amino acid

SEQ ID NO: 2173 - protein, 71 aa, Homo sapiens; identical to SEQ ID NO: 927
  variant (1)...(71): Xaa = Any amino acid

SEQ ID NO: 2174 - protein, 122 aa, Homo sapiens; identical to SEQ ID NO: 985

SEQ ID NO: 2175 - protein, 69 aa, Homo sapiens; identical to SEQ ID NO: 986

SEQ ID NO: 2176 - protein, 64 aa, Homo sapiens
ETTWAPPVTPVSGAPTCVLRCRNCRWKLPTSSWVPLAVCLICLTGDTCPPNTSRCLYWMKLTKC

SEQ ID NO: 2177 - protein, 179 aa, Homo sapiens
LVLAPTRELAQQIQKVVMALGDYMGASCHACIGGTNVRAEVQKLQMEAPHIIVGTPGRVFDMLNRRYLSPKYIKMFVLDEADEMLSRGFKDQIYDIFQKLNSNTQVVLLSATMPSDVLEVTKKFMRDPIRILVKKEELTLEGIRQFYINVEREEWKLDTLCDLYETLTITQAVIFINTR

SEQ ID NO: 2178 - protein, 64 aa, Homo sapiens
HFVSFIQYKHLDVFGGQVSPVKHIKHTARGTHDDVGSFHLQFLHLSTHVGAPDTGVTGGAHVVS

SEQ ID NO: 2179 - protein, 52 aa, Homo sapiens
NWRIPSRVNSSFLTRIRMGSLMNFLVTSSTSEGIVADSKTTWVLLLSFWNMS

SEQ ID NO: 2180 - protein, 64 aa, Homo sapiens
IWSLNPRLNISSASSSTNILMYLGDRYLRLSISNTRPGVPTMMWGASICSFCTSARTLVPPIQA

SEQ ID NO: 2181 - protein, 134 aa, Homo sapiens
  variant (1)...(134): Xaa = Any amino acid
VIVRLEAFAVDDGGAGLVILLLADPHLLEGGQRGQDGAADPHGVLALRRSNDLDLHXAGCQGXDLLLHPVXNARVHGGAARQHXVGVQVFADVHVTLHDGVEGSFVDATGLHAQEGRLXXCLRAAEPLIANGDD

SEQ ID NO: 2182 - protein, 129 aa, Homo sapiens
  variant (1)...(129): Xaa = Any amino acid
KHLRWTMEGPDSSYSCLLIHICWKVDSEARMEPPIHTEYLRSGGAMILIFIXLGARAXISFCILSXMPGYMVVPPDSTXLAYRSLRMSTSHFMMELKVVSWMPQDSMPRKEGXXSASGQRNRSLPMVMT

SEQ ID NO: 2183 - protein, 129 aa, Homo sapiens
  variant (1)...(129): Xaa = Any amino acid
VITIGNERFRCPEAXXQPSFLGMESCGIHETTFNSIMKCDVDIRKDLYANXVLSGGTTMYPGIXDRMQKEIXALAPSXMKIKIIAPPERKYSVWIGGSILASLSTFQQMWISKQEYDESGPSIVHRKCF

SEQ ID NO: 2184 - protein, 55 aa, Homo sapiens
RSRSLLLLSASTPCGSAAPSWPRCPPSSRCGSASRSMTSPAPPSSTANASRRTMT

SEQ ID NO: 2185 - protein, 124 aa, Homo sapiens; identical to SEQ ID NO: 814

SEQ ID NO: 2186 - protein, 71 aa, Homo sapiens [sequence omitted]

SEQ ID NO: 2187 - protein, 64 aa, Homo sapiens; identical to SEQ ID NO: 1057
  variant (1)...(64): Xaa = Any amino acid

SEQ ID NO: 2188 - protein, 53 aa, Homo sapiens; identical to SEQ ID NO: 1058
  variant (1)...(53): Xaa = Any amino acid

SEQ ID NO: 2189 - protein, 51 aa, Homo sapiens; identical to SEQ ID NO: 1059
  variant (1)...(51): Xaa = Any amino acid

SEQ ID NO: 2190 - protein, 64 aa, Homo sapiens; identical to SEQ ID NO: 1060
  variant (1)...(64): Xaa = Any amino acid

SEQ ID NO: 2191 - protein, 94 aa, Homo sapiens [sequence omitted]

SEQ ID NO: 2192 - protein, 61 aa, Homo sapiens [sequence omitted]

SEQ ID NO: 2193 - protein, 58 aa, Homo sapiens; identical to SEQ ID NO: 1083
  variant (1)...(58): Xaa = Any amino acid

SEQ ID NO: 2194 - protein, 139 aa, Homo sapiens; identical to SEQ ID NO: 1084
  variant (1)...(139): Xaa = Any amino acid

SEQ ID NO: 2195 - protein, 123 aa, Homo sapiens; identical to SEQ ID NO: 1092

SEQ ID NO: 2196 - protein, 71 aa, Homo sapiens; identical to SEQ ID NO: 813

SEQ ID NO: 2197 - protein, 71 aa, Homo sapiens; identical to SEQ ID NO: 813

SEQ ID NO: 2198 - protein, 124 aa, Homo sapiens; identical to SEQ ID NO: 814

SEQ ID NO: 2199 - protein, 85 aa, Homo sapiens; identical to SEQ ID NO: 1132
  variant (1)...(85): Xaa = Any amino acid

SEQ ID NO: 2200 - protein, 56 aa, Homo sapiens; identical to SEQ ID NO: 1133

SEQ ID NO: 2201 - protein, 70 aa, Homo sapiens; identical to SEQ ID NO: 1134
  variant (1)...(70): Xaa = Any amino acid

SEQ ID NO: 2202 - protein, 82 aa, Homo sapiens; identical to SEQ ID NO: 1135
  variant (1)...(82): Xaa = Any amino acid

SEQ ID NO: 2203 - protein, 56 aa, Homo sapiens; identical to SEQ ID NO: 1136

SEQ ID NO: 2204 - protein, 57 aa, Homo sapiens; identical to SEQ ID NO: 1149

SEQ ID NO: 2205 - protein, 78 aa, Homo sapiens; identical to SEQ ID NO: 1150

SEQ ID NO: 2206 - protein, 63 aa, Homo sapiens
YCKGPLEFLKWLHRIEIISNNCKGTENLHRDEVGFPLGALKFDNKSSTSTGQYIDFGCLRPQD

SEQ ID NO: 2207 - protein, 87 aa, Homo sapiens
TLKYFIIGGNLWRLVASNLGASDTQNLYIDQWKLMICYQISKHLMETPLHLCEDFQFLYSYLKLFQFCGATSETPMGLCNIKMWRMH

SEQ ID NO: 2208 - protein, 174 aa, Homo sapiens; identical to SEQ ID NO: 1158

SEQ ID NO: 2209 - protein, 56 aa, Homo sapiens; identical to SEQ ID NO: 794

SEQ ID NO: 2210 - protein, 52 aa, Homo sapiens; identical to SEQ ID NO: 1160

SEQ ID NO: 2211 - protein, 54 aa, Homo sapiens; identical to SEQ ID NO: 1161

SEQ ID NO: 2212 - protein, 70 aa, Homo sapiens; identical to SEQ ID NO: 1162

SEQ ID NO: 2213 - protein, 50 aa, Homo sapiens; identical to SEQ ID NO: 1163

SEQ ID NO: 2214 - protein, 143 aa, Homo sapiens; identical to SEQ ID NO: 1164

SEQ ID NO: 2215 - protein, 115 aa, Homo sapiens; identical to SEQ ID NO: 1143

SEQ ID NO: 2216 - protein, 55 aa, Homo sapiens; identical to SEQ ID NO: 1144

SEQ ID NO: 2217 - protein, 51 aa, Homo sapiens; identical to SEQ ID NO: 1145

SEQ ID NO: 2218 - protein, 117 aa, Homo sapiens; identical to SEQ ID NO: 1170

SEQ ID NO: 2219 - protein, 117 aa, Homo sapiens; identical to SEQ ID NO: 1171

SEQ ID NO: 2220 - protein, 83 aa, Homo sapiens; identical to SEQ ID NO: 1172

SEQ ID NO: 2221 - protein, 70 aa, Homo sapiens; identical to SEQ ID NO: 1195
  variant (1)...(70): Xaa = Any amino acid

SEQ ID NO: 2222 - protein, 63 aa, Homo sapiens; identical to SEQ ID NO: 1196
  variant (1)...(63): Xaa = Any amino acid

SEQ ID NO: 2223 - protein, 50 aa, Homo sapiens; identical to SEQ ID NO: 1197
  variant (1)...(50): Xaa = Any amino acid

SEQ ID NO: 2224 - protein, 92 aa, Homo sapiens; identical to SEQ ID NO: 1198
  variant (1)...(92): Xaa = Any amino acid

SEQ ID NO: 2225 - protein, 50 aa, Homo sapiens; identical to SEQ ID NO: 1205

SEQ ID NO: 2226 - protein, 134 aa, Homo sapiens; identical to SEQ ID NO: 1206

SEQ ID NO: 2227 - protein, 67 aa, Homo sapiens; identical to SEQ ID NO: 1207

SEQ ID NO: 2228 - protein, 60 aa, Homo sapiens; identical to SEQ ID NO: 1208

SEQ ID NO: 2229 - protein, 64 aa, Homo sapiens; identical to SEQ ID NO: 1209

SEQ ID NO: 2230 - protein, 53 aa, Homo sapiens; identical to SEQ ID NO: 1210

SEQ ID NO: 2231 - protein, 185 aa, Homo sapiens; identical to SEQ ID NO: 1992

SEQ ID NO: 2232 - protein, 65 aa, Homo sapiens; identical to SEQ ID NO: 1993

SEQ ID NO: 2233 - protein, 112 aa, Homo sapiens; identical to SEQ ID NO: 1994

SEQ ID NO: 2234 - protein, 199 aa, Homo sapiens; identical to SEQ ID NO: 1216

SEQ ID NO: 2235 - protein, 76 aa, Homo sapiens; identical to SEQ ID NO: 1217

SEQ ID NO: 2236 - protein, 122 aa, Homo sapiens; identical to SEQ ID NO: 1218

SEQ ID NO: 2237 - protein, 56 aa, Homo sapiens; identical to SEQ ID NO: 1219

SEQ ID NO: 2238 - protein, 50 aa, Homo sapiens
LREGSGWVRGDGEGKGGVSIFILRIGVQSTSGVSAPPCPPVGLRRTGKRT

SEQ ID NO: 2239 - protein, 50 aa, Homo sapiens
RALTESSRNSGTVSRGPALHGPGPPPSPSPRPEPRATRSAAAAAWPGTIS

SEQ ID NO: 2240 - protein, 55 aa, Homo sapiens
  variant (1)...(55): Xaa = Any amino acid
SRPPALPGSTSPVHVLILHFAFYHKIFLWPGAFGPSASSCHQRGPSGSTWRPXVQ

SEQ ID NO: 2241 - protein, 75 aa, Homo sapiens
QRAAETLELFPEGLHCMDQGHHLLLHPGQNPVPPGLQPLQHGLEPSHDLVTKALPRLLGCGILNIRDRGSVASAP

SEQ ID NO: 2242 - protein, 103 aa, Homo sapiens
DWKEDMKSSDREQQKLWNCFQRACTAWTRATTFSFTQARTPCHQVCSRCSMAWNHLMTLSQKLSPGSSVAGSSTSGTGDLLPRHRNPSLSFSSRGVSSRCCSS

SEQ ID NO: 2243 - protein, 76 aa, Homo sapiens
QGHEMVPGHAAAAADLVARGSGLGEGEGGGPGPCSAGPLETVPEFLLLSVRALHVLFPVLRSPTGGQGGADTPEVL

SEQ ID NO: 2244 - protein, 194 aa, Homo sapiens
  variant (1)...(194): Xaa = Any amino acid
LEXLAAMCFPKVLSDDMKKLKARMHQAIERFYDKMQNAESGRGQVMSSLAELEDDFKEGYLETVAAYYEEQHLELTPLLEKERDGLRCRGNRSPVPDVEDPATEEPGESFCDKVMRWFQAMLQRLQTWWHGVLAWVKEKVVALVHAVQALWKQFQSFCCSLSELFMSSFQSYGAPRGDKEELTPQKCSEPQSSK

SEQ ID NO: 2245 - protein, 87 aa, Homo sapiens; identical to SEQ ID NO: 1348

SEQ ID NO: 2246 - protein, 55 aa, Homo sapiens; identical to SEQ ID NO: 1349

SEQ ID NO: 2247 - protein, 119 aa, Homo sapiens
EKAPEPHVEEDDDDELDSKLNYKPPPQKSLKELQEMDKDDESLIKYKKTLLGDGPVVTDPKAPNVVVTRLTLVCESAPGPITMDLTGDLEALKKETIVLKEGSEYRVKIHFKVNRDIVS

SEQ ID NO: 2248 - protein, 55 aa, Homo sapiens; identical to SEQ ID NO: 1237

SEQ ID NO: 2249 - protein, 54 aa, Homo sapiens; identical to SEQ ID NO: 1238

SEQ ID NO: 2250 - protein, 147 aa, Homo sapiens; identical to SEQ ID NO: 1239

SEQ ID NO: 2251 - protein, 135 aa, Homo sapiens; identical to SEQ ID NO: 1240

SEQ ID NO: 2252 - protein, 151 aa, Homo sapiens; identical to SEQ ID NO: 1241

SEQ ID NO: 2253 - protein, 60 aa, Homo sapiens [sequence omitted]

SEQ ID NO: 2254 - protein, 70 aa, Homo sapiens
  variant (1)...(70): Xaa = Any amino acid
GIRSQLSLNSQSPPWASLPNDLVALGASEVNPEILPPSTLGSDLCPSLXHKEISVKXVGTGGFRPCSKAT

SEQ ID NO: 2255 - protein, 77 aa, Homo sapiens
GERPRVGTGNLRRAGNGSLRFRKLLYKLRGWLGPKGCSARRASCELSKALGSQHPKSLWLQSCVCTTQSKGSFCFVF

SEQ ID NO: 2256 - protein, 115 aa, Homo sapiens; identical to SEQ ID NO: 1143

SEQ ID NO: 2257 - protein, 55 aa, Homo sapiens; identical to SEQ ID NO: 1144

SEQ ID NO: 2258 - protein, 51 aa, Homo sapiens; identical to SEQ ID NO: 1247
  variant (1)...(51): Xaa = Any amino acid

SEQ ID NO: 2259 - protein, 69 aa, Homo sapiens [sequence omitted]

SEQ ID NO: 2260 - protein, 102 aa, Homo sapiens; identical to SEQ ID NO: 1251

SEQ ID NO: 2261 - protein, 77 aa, Homo sapiens [sequence omitted]

SEQ ID NO: 2262 - protein, 60 aa, Homo sapiens [sequence omitted]

SEQ ID NO: 2263 - protein, 60 aa, Homo sapiens; identical to SEQ ID NO: 1778

SEQ ID NO: 2264 - protein, 55 aa, Homo sapiens
  variant (1)...(55): Xaa = Any amino acid
GIRSQLSLNSQSPPWASLPNDLVALGAPEXNPEILPPSTLGSDLCPSLCHKEISV

SEQ ID NO: 2265 - protein, 77 aa, Homo sapiens
  variant (1)...(77): Xaa = Any amino acid
GERPRVGTGNLRRAGNGSLRFRKLLCKLRGWLGPKGCSARRASCELSKALGSQHPKSLWLQSCVCXTHSKGSFCFVF

SEQ ID NO: 2266 - protein, 115 aa, Homo sapiens; identical to SEQ ID NO: 1143

SEQ ID NO: 2267 - protein, 55 aa, Homo sapiens; identical to SEQ ID NO: 1255
  variant (1)...(55): Xaa = Any amino acid

SEQ ID NO: 2268 - protein, 51 aa, Homo sapiens; identical to SEQ ID NO: 1256
  variant (1)...(51): Xaa = Any amino acid

SEQ ID NO: 2269 - protein, 101 aa, Homo sapiens; identical to SEQ ID NO: 1766

SEQ ID NO: 2270 - protein, 124 aa, Homo sapiens; identical to SEQ ID NO: 1767

SEQ ID NO: 2271 - protein, 100 aa, Homo sapiens; identical to SEQ ID NO: 1768

SEQ ID NO: 2272 - protein, 54 aa, Homo sapiens
RRTSQTDGTQAGWVLYPRSQEGRVSCTVVNRRAAWRQWLSQKVTQSSCLERESL

SEQ ID NO: 2273 - protein, 72 aa, Homo sapiens
LRIQRCWGEKSSIDSTFQDVHFGERSRWDPQENDGEHPRQMGLKQDGCYIQEAKKGEFRALWLTGGLPGGSG

SEQ ID NO: 2274 - protein, 55 aa, Homo sapiens
VPSVWDVLRHFLEGPTCSSPRNGHPGRWSLYCFSLPSNVESGVSLGSANNGCHLQ

SEQ ID NO: 2275 - protein, 74 aa, Homo sapiens
PQCTKLSLLGFLDIAPILLESHLSGMFSVIFLRVPPAPLPEMDILEGGVYTAFLSPATLNPESAWAPQTTAAIS

SEQ ID NO: 2276 - protein, 69 aa, Homo sapiens
  variant (1)...(69): Xaa = Any amino acid
SRWMEQKINLXLVRTPFWGCPLPSAKLVPLRRGSPCTATSLTWLATLKSSCQSRRSMSSMAVLMLATSW

SEQ ID NO: 2277 - protein, 120 aa, Homo sapiens
  variant (1)...(120): Xaa = Any amino acid
YEALELRDNDKTRYMGKGVSKAVEHINKTIAPALVSKKLNVTEQEKIDKLMIEMDGTENKSXFGANAILGVSLAVCKAGAVEKGVPLYRHIADLAGNSEVILPVPAFNVINGGSHAGNKL

SEQ ID NO: 2278 - protein, 100 aa, Homo sapiens
  variant (1)...(100): Xaa = Any amino acid
QLVASMRTAIDDIERRDWQDDFRVASQVSDVAVQGDPLLNGTSFADGKGHPQNGVRTKXRFIFCSIHLDHQFVNLLLFCDVQFLANQGRRNSFIDVLNSL

SEQ ID NO: 2279 - protein, 100 aa, Homo sapiens
  variant (1)...(100): Xaa = Any amino acid
EPPLMTLNAGTGRMTSELPAKSAMWRYRGTPFSTAPALQTARDTPRMAFAPXLDLFSVPSISIISLSIFSCSVTFSFLLTRAGAIVLLMCSTAFETPFPI

SEQ ID NO: 2280 - protein, 75 aa, Homo sapiens
LDNPGSGGGCKNLQKLEGAPQENKQQALFPLAHPPKNHPSHPSVWWCPVVSIFHSFPNYGSKVLLTRIRALGITE

SEQ ID NO: 2281 - protein, 51 aa, Homo sapiens
  variant (1)...(51): Xaa = Any amino acid
GPLTQKKKKKXSLGVTTGHYLPQNKESWAEAGKQLDPIWDPRLGERVPLLK

SEQ ID NO: 2282 - protein, 57 aa, Homo sapiens
NNPGRRREEGTLGTPLPTIRDYLHFSNWTIPAQEEVARICKSWRERPRRTNSKPYFP

SEQ ID NO: 2283 - protein, 68 aa, Homo sapiens
IIQAGEERRAHLELPSPQYVIIYILVIGQSRLRRRLQESAKVGGSAPGEQTASLISPSPSPKKPSIPS

SEQ ID NO: 2284 - protein, 66 aa, Homo sapiens
  variant (1)...(66): Xaa = Any amino acid
CVTPHWXLLLXPXKLSSYALTWARVLSFQYPSSFYFSKGTLSPSLGSHIGSSCLPASAQDSLFWGR

SEQ ID NO: 2285 - protein, 59 aa, Homo sapiens
FGKEWKMDTTGHHQTLGWDGWFFGGWARGNKACCLFSWGAPSNFCRFLQPPPEPGLSNY

SEQ ID NO: 2286 - protein, 50 aa, Homo sapiens
  variant (1)...(50): Xaa = Any amino acid
DSYSDDVSPHIGXSYYXHXNLVHMLLLGQGCFPSNTPVAFILVKGPFPLA

SEQ ID NO: 2287 - protein, 87 aa, Homo sapiens
  variant (1)...(87): Xaa = Any amino acid
PRVPYWVKLLTCLSPGFFILGEVMPCCYPKAXFFFFFLGEGTLLCYPKCSYSGEKNLTSIIWEGMEDGHHRTPPDTRMGWMVFWGMG

SEQ ID NO: 2288 - protein, 88 aa, Homo sapiens
TSVEPLSRGPWVPNTKIPTAERAADHLVRIPVAFISKINSPFLRLSESWVYALKKAELLDSLTSCHRVLNVSDHKGLHTFAVCSGATY

SEQ ID NO: 2289 - protein, 53 aa, Homo sapiens
VFLYWEPKVLCLVAQRLSTFPRLNACGALSTSTCSQGPPSLSSNAQDRVDLIG

SEQ ID NO: 2290 - protein, 51 aa, Homo sapiens
FSFFQGIDPRLRQPQERGVYFGYKGNRNPDQMVSSPLSSRYFCIGNPRSSA

SEQ ID NO: 2291 - protein, 81 aa, Homo sapiens
TQDSDNLKKGEFILDIKATGILTKWSAALSAVGIFVLGTQGPLLSGSTLVYLSKAQRLWSLVHKHLLPRASLPEFKRPRQS

SEQ ID NO: 2292 - protein, 125 aa, Homo sapiens; identical to SEQ ID NO: 1301

SEQ ID NO: 2293 - protein, 59 aa, Homo sapiens; identical to SEQ ID NO: 1302

SEQ ID NO: 2294 - protein, 100 aa, Homo sapiens; identical to SEQ ID NO: 1303

SEQ ID NO: 2295 - protein, 50 aa, Homo sapiens; identical to SEQ ID NO: 1304

SEQ ID NO: 2296 - protein, 131 aa, Homo sapiens; identical to SEQ ID NO: 1305

SEQ ID NO: 2297 - protein, 53 aa, Homo sapiens; identical to SEQ ID NO: 1306

SEQ ID NO: 2298 - protein, 78 aa, Homo sapiens; identical to SEQ ID NO: 1307

SEQ ID NO: 2299 - protein, 134 aa, Homo sapiens [sequence omitted]

SEQ ID NO: 2300 - protein, 66 aa, Homo sapiens; identical to SEQ ID NO: 1309

SEQ ID NO: 2301 - protein, 141 aa, Homo sapiens; identical to SEQ ID NO: 1310

SEQ ID NO: 2302 - protein, 50 aa, Homo sapiens; identical to SEQ ID NO: 2238

SEQ ID NO: 2303 - protein, 50 aa, Homo sapiens
RALTESSRNSGTVSRGPALHGPGPPPSPSPRPEPRATRPAAAAAWPGTIS

SEQ ID NO: 2304 - protein, 75 aa, Homo sapiens; identical to SEQ ID NO: 2241

SEQ ID NO: 2305 - protein, 60 aa, Homo sapiens [sequence omitted]

SEQ ID NO: 2306 - protein, 103 aa, Homo sapiens [sequence omitted]

SEQ ID NO: 2307 - protein, 177 aa, Homo sapiens
PWLLELLAAMCFPKVLSDDMKKLKARMVMSSLAELEDDFKEGYLETVAAYYEEQHPELTPLLEKERDGLRCRGNRSPVPDVEDPATEEPGESFCDKVMRWFQAMLQRLQAWWHGVLAWVKEKVVALVHAVQALWKQFQSFCCSLSELFMSSFQSYGAPRGDKEELTPQKCSEPQSSK

SEQ ID NO: 2308 - protein, 69 aa, Homo sapiens
CRAWQSWRTTSKRATWRQWRLIMRSSTQSSLLYLKKKEMDYGAEATDPLSRMLRIPQPRSLGRAFVTRS

SEQ ID NO: 2309 - protein, 76 aa, Homo sapiens
QGHEMVPGHAAAAAGLVARGSGLGEGEGGGPGPCSAGPLETVPEFLLLSVRALHVLFPVLRSPTGGQGGADTPEVL

SEQ ID NO: 2310 - protein, 50 aa, Homo sapiens; identical to SEQ ID NO: 1332

SEQ ID NO: 2311 - protein, 51 aa, Homo sapiens; identical to SEQ ID NO: 1333

SEQ ID NO: 2312 - protein, 63 aa, Homo sapiens; identical to SEQ ID NO: 1818
  variant (1)...(63): Xaa = Any amino acid

SEQ ID NO: 2313 - protein, 70 aa, Homo sapiens; identical to SEQ ID NO: 1819
  variant (1)...(70): Xaa = Any amino acid

SEQ ID NO: 2314 - protein, 76 aa, Homo sapiens; identical to SEQ ID NO: 1820
  variant (1)...(76): Xaa = Any amino acid

SEQ ID NO: 2315 - protein, 67 aa, Homo sapiens; identical to SEQ ID NO: 2075
  variant (1)...(67): Xaa = Any amino acid

SEQ ID NO: 2316 - protein, 62 aa, Homo sapiens; identical to SEQ ID NO: 1830

SEQ ID NO: 2317 - protein, 94 aa, Homo sapiens; identical to SEQ ID NO: 1831

SEQ ID NO: 2318 - protein, 76 aa, Homo sapiens; identical to SEQ ID NO: 1346

SEQ ID NO: 2319 - protein, 68 aa, Homo sapiens; identical to SEQ ID NO: 1347

SEQ ID NO: 2320 - protein, 59 aa, Homo sapiens; identical to SEQ ID NO: 1354

SEQ ID NO: 2321 - protein, 68 aa, Homo sapiens; identical to SEQ ID NO: 1355

SEQ ID NO: 2322 - protein, 58 aa, Homo sapiens
  variant (1)...(58): Xaa = Any amino acid
SATYGXQAGVVPWLSPXTSERPTLSSSPXINPETQAALIRGQDSTIAASEQQVAXXNS

SEQ ID NO: 2323 - protein, 60 aa, Homo sapiens
  variant (1)...(60): Xaa = Any amino acid
QHQNSKWXXRILDSXDXATVNPVEFNTEVATPPFSLLXTSNETXFLIGINEEXLEGXAIY

SEQ ID NO: 2324 - protein, 67 aa, Homo sapiens
  variant (1)...(67): Xaa = Any amino acid
IDCXAFQXLFINANQEXCFIRSXQKGKWWCCNLSIKFHRVYCCXIXGIKNSXXPLAVLMLLSWNPAL

SEQ ID NO: 2325 - protein, 158 aa, Homo sapiens; identical to SEQ ID NO: 1356
  variant (1)...(158): Xaa = Any amino acid

SEQ ID NO: 2326 - protein, 68 aa, Homo sapiens; identical to SEQ ID NO: 1357
  variant (1)...(68): Xaa = Any amino acid

SEQ ID NO: 2327 - protein, 64 aa, Homo sapiens; identical to SEQ ID NO: 1358
  variant (1)...(64): Xaa = Any amino acid

SEQ ID NO: 2328 - protein, 103 aa, Homo sapiens; identical to SEQ ID NO: 1359
  variant (1)...(103): Xaa = Any amino acid

SEQ ID NO: 2329 - protein, 123 aa, Homo sapiens; identical to SEQ ID NO: 1360
  variant (1)...(123): Xaa = Any amino acid

SEQ ID NO: 2330 - protein, 68 aa, Homo sapiens; identical to SEQ ID NO: 1347

SEQ ID NO: 2331 - protein, 64 aa, Homo sapiens; identical to SEQ ID NO: 1362
  variant (1)...(64): Xaa = Any amino acid

SEQ ID NO: 2332 - protein, 104 aa, Homo sapiens; identical to SEQ ID NO: 1363
  variant (1)...(104): Xaa = Any amino acid

SEQ ID NO: 2333 - protein, 73 aa, Homo sapiens [sequence omitted]

SEQ ID NO: 2334 - protein, 66 aa, Homo sapiens [sequence omitted]

SEQ ID NO: 2335 - protein, 59 aa, Homo sapiens
ALWADLPLTYYSRSAVTSWDLPLPASIPKSSPAITVGMSTQKLSQPHQDSCEKRGYVHT

SEQ ID NO: 2336 - protein, 68 aa, Homo sapiens
  variant (1)...(68): Xaa = Any amino acid
VEDXTPIPCRSIGRSKVSSMGRSTPYLLFQICSHFVGSAPPCFNTQILSSYNSRDEYPKAQPAPSGLL

SEQ ID NO: 2337 - protein, 58 aa, Homo sapiens
AQLGSECKKLSMVREACALIQVYSTLSGDQNPLLITPLQRGDWALPLFDKPLTQVLTP

SEQ ID NO: 2338 - protein, 68 aa, Homo sapiens; identical to SEQ ID NO: 1371
  variant (1)...(68): Xaa = Any amino acid

SEQ ID NO: 2339 - protein, 143 aa, Homo sapiens; identical to SEQ ID NO: 1372
  variant (1)...(143): Xaa = Any amino acid

SEQ ID NO: 2340 - protein, 64 aa, Homo sapiens; identical to SEQ ID NO: 1373
  variant (1)...(64): Xaa = Any amino acid

SEQ ID NO: 2341 - protein, 103 aa, Homo sapiens; identical to SEQ ID NO: 1374
  variant (1)...(103): Xaa = Any amino acid

SEQ ID NO: 2342 - protein, 162 aa, Homo sapiens
  variant (1)...(162): Xaa = Any amino acid
QMHLWAGGDLGLCWNWISELLLHLFSSHPGLFRAAVPSGASTGIYEALELRDNDKTRYMGKGVSKAVEHXNKTIAPALVSKKLNVTEQEKIDKLMIEMDGTENKSKFGANAILGVSLAVCKAGAVEKGVPLYRHIADLAGNSEVILPVPAFNVINGXSHAGN

SEQ ID NO: 2343 - protein, 55 aa, Homo sapiens
RKKQLPNDKCICGREGTWDCAGTGFLNCYYIFFPLIQVSSELLCPVVLQLVSMRP

SEQ ID NO: 2344 - protein, 66 aa, Homo sapiens
  variant (1)...(66): Xaa = Any amino acid
SRWMEQKINLSLVRTPFWGCPLPSAKLVPLRRGSPCTATSLTWLATLKSSCQSRRSMSSMAXLMLA

SEQ ID NO: 2345 - protein, 98 aa, Homo sapiens
  variant (1)...(98): Xaa = Any amino acid
VASMRXAIDDIERRDWQDDFRVASQVSDVAVQGDPLLNGTSFADGKGHPQNGVRTKLRFIFCSIHLDHQFVNLLLFCDVQFLANQGRRNSFIXVLNSL

SEQ ID NO: 2346 - protein, 100 aa, Homo sapiens
  variant (1)...(100): Xaa = Any amino acid
XPPLMTLNAGTGRMTSELPAKSAMWRYRGTPFSTAPALQTARDTPRMAFAPNLDLFSVPSISIISLSIFSCSVTFSFLLTRAGAIVLXMCSTAFETPFPI

SEQ ID NO: 2347 - protein, 73 aa, Homo sapiens; identical to SEQ ID NO: 1375

SEQ ID NO: 2348 - protein, 52 aa, Homo sapiens; identical to SEQ ID NO: 1376

SEQ ID NO: 2349 - protein, 64 aa, Homo sapiens; identical to SEQ ID NO: 1377

SEQ ID NO: 2350 - protein, 55 aa, Homo sapiens; identical to SEQ ID NO: 1378

SEQ ID NO: 2351 - protein, 87 aa, Homo sapiens; identical to SEQ ID NO: 1348

SEQ ID NO: 2352 - protein, 55 aa, Homo sapiens; identical to SEQ ID NO: 1349

SEQ ID NO: 2353 - protein, 50 aa, Homo sapiens; identical to SEQ ID NO: 2102

SEQ ID NO: 2354 - protein, 123 aa, Homo sapiens; identical to SEQ ID NO: 1681

SEQ ID NO: 2355 - protein, 69 aa, Homo sapiens; identical to SEQ ID NO: 1379

SEQ ID NO: 2356 - protein, 66 aa, Homo sapiens; identical to SEQ ID NO: 1380

SEQ ID NO: 2357 - protein, 156 aa, Homo sapiens
  variant (1)...(156): Xaa = Any amino acid
QKLLKCXRLVLALALILVLESSVQGYPTQRARYQWVRCNPDSNSANCLEEKGPMFELLPGESNKIPRLRTDLFPKTRIQDLNRIFPLSEDYSGSGFGSGSGSGSGSGSGFLTEMEQDYQLVDESDAFHDNLRSLDRNLPSDSQDLGQHGLEEDFML

SEQ ID NO: 2358 - protein, 67 aa, Homo sapiens
  variant (1)...(67): Xaa = Any amino acid
RSYSNXVGLSWLLPSSWFWNPQFKVILRREPGTNGCAAIQTVILQTALKKKDQCSNYFQVNPTRSPV

SEQ ID NO: 2359 - protein, 64 aa, Homo sapiens
SSESGKIRFKSWILVFGKRSVLRRGILLDSPGSSSNIGPFSSRQFAELLSGLQRTHWYLALCVG

SEQ ID NO: 2360 - protein, 103 aa, Homo sapiens
GCHGKHHFRLLVGNPVPFPLGSHSQILIQSRSRSRSLIQSSPQKVGRYDSSPGFSSLEKGQSSDGGSCWIHLEVVRTLVLFLQGSLQNYCLDCSAPIGTWLSA

SEQ ID NO: 2361 - protein, 180 aa, Homo sapiens
GNDGAQRSFCQSCFNELNDLFKAACLPLPGYRVREITENLMATGDLDQDGRISFDEFIKIFHGLKSTDVAKTFRKAINKKEGICAIGGTSEQSSVGTQHSYSEEEKYAFVNWINKALENDPDCRHVIPMNPNTNDLFNAVGDGIVLCKMINLSVPDTIDERTINKKKLTPFTIQENLNLA

SEQ ID NO: 2362 - protein, 72 aa, Homo sapiens
MVKGVSFFLLIVLSSIVSGTDRLIILQRTMPSPTALKRSFVFGFIGMTCRQSGSFSRALFIQLTKAYFSSSE

SEQ ID NO: 2363 - protein, 94 aa, Homo sapiens
ECWVPTLDCSEVPPIAQIPSFLLIAFLKVLATSVLFRPWKILINSSKLILPSWSRSPVAIRFSVISRTLYPGKGKQAALNKSFNSLKQLWQKLL

SEQ ID NO: 2364 - protein, 50 aa, Homo sapiens
QVDHFTKDNAISNSIKEIIRVWVHWDDMPTIRIIFQGFVYPVDKGILFFL

SEQ ID NO: 2365 - protein, 70 aa, Homo sapiens
AMENLDKLIKADPSILVQITCSHQVFCNFSYSIPRQRQASSLEQVIQLIEATLAKASLSSIISSSDTDPL

SEQ ID NO: 2366 - protein, 54 aa, Homo sapiens
NPDHHPGSHLHQHPEEGGLAHREDACSRFHCIRHAWRYGPKGTRRDYEGVSFWL

SEQ ID NO: 2367 - protein, 187 aa, Homo sapiens
QMEAPHIIVGTPGRVFDMLNRRYLSPKYIKMFVLDEADEMLSRGFKDQIYDIFQKLNSNTQVVLLSATMPSDVLEVTKKFMRDPIRILVKKEELTLEGIRQFYINVEREEWKLDTLCDLYETLTITQAVIFINTRRKVDWLTEKMHARDFTVSAMHGDMDQKERDVIMREFRSGSSRVLITTDLLDL

SEQ ID NO: 2368 - protein, 71 aa, Homo sapiens [sequence omitted]

SEQ ID NO: 2369 - protein, 84 aa, Homo sapiens
RSSRSVVIKTLLEPERNSLIITSRSFWSISPCMADTVKSRACIFSVSQSTFLRVLMKMTAWVMVRVSYKSHSVSSFHSSRSTLM

SEQ ID NO: 2370 - protein, 52 aa, Homo sapiens; identical to SEQ ID NO: 2179

SEQ ID NO: 2371 - protein, 54 aa, Homo sapiens [sequence omitted]

SEQ ID NO: 2372 - protein, 161 aa, Homo sapiens
QMPSDKTIGGGDDSFNTFFSETGAGKHVPRAVFVDLEPTVIDEVRTGTYRQLFHPEQLITGKEDAANNYARGHYTIGKEIIDLVLDRIRKLADQCTGLQGFLVFHSFGGGTGSGFTSLLMERLSVDYGKKSKLEFSIYPAPQVSTGEETRVCLECRLGGGR

SEQ ID NO: 2373 - protein, 132 aa, Homo sapiens
TWNPQSLMKFALALTASSSTLSNSSQARKMLPITMPEGTTPLARRSLTSCWTEFASWLTSAPVFRASWFSTALVGELVLGSPRCSWNVSQLIMARSPSWSSPFTRRPRFPQERRPESAWSADWEGADDWGGA

SEQ ID NO: 2374 - protein, 123 aa, Homo sapiens
ETFHEQRGEPRTSSPTKAVENQEALKTGALVSQLANSVQHEVNDLLANGVVPSGIVIGSIFLACDELLRVEELAVSASANFINDCGFQVYKHCPGYMLASTRFTEEGVEGIISSPNGLVTWHL

SEQ ID NO: 2375 - protein, 57 aa, Homo sapiens
DRIITPEISSCSTPVICPLPVCTPGRLWSPLLWKPGAPGKWRTPAWTSCHNQLRDVP

SEQ ID NO: 2376 - protein, 53 aa, Homo sapiens [sequence omitted]

SEQ ID NO: 2377 - protein, 67 aa, Homo sapiens; identical to SEQ ID NO: 1402
  variant (1)...(67): Xaa = Any amino acid

SEQ ID NO: 2378 - protein, 51 aa, Homo sapiens; identical to SEQ ID NO: 1877
  variant (1)...(51): Xaa = Any amino acid

SEQ ID NO: 2379 - protein, 60 aa, Homo sapiens; identical to SEQ ID NO: 767

SEQ ID NO: 2380 - protein, 51 aa, Homo sapiens; identical to SEQ ID NO: 783
  variant (1)...(51): Xaa = Any amino acid

SEQ ID NO: 2381 - protein, 59 aa, Homo sapiens; identical to SEQ ID NO: 784
  variant (1)...(59): Xaa = Any amino acid

SEQ ID NO: 2382 - protein, 59 aa, Homo sapiens; identical to SEQ ID NO: 785
  variant (1)...(59): Xaa = Any amino acid

SEQ ID NO: 2383 - protein, 58 aa, Homo sapiens; identical to SEQ ID NO: 786
  variant (1)...(58): Xaa = Any amino acid

SEQ ID NO: 2384 - protein, 135 aa, Homo sapiens
  variant (1)...(135): Xaa = Any amino acid
XRSSPKPVLCHQSKERKPSAEMNRITTKEATSSCPPKSPLGETRQKLWRSLKMLPERGQRVRQQLKSHLATVNLSSLLDVRRSTVISGPGTGKGSQDHSGDPTSGDRGYTDPCAATSXKSPSQPQAPKXXKVPTR

SEQ ID NO: 2385 - protein, 50 aa, Homo sapiens
  variant (1)...(50): Xaa = Any amino acid
SQALGPEKAAKITQGIPPRGTEATRIPVRPHXXKAPHSPRHQXTXRSPPG

SEQ ID NO: 2386 - protein, 134 aa, Homo sapiens
  variant (1)...(134): Xaa = Any amino acid
EVLPKASPVSPIKGKEAVSRDEQNNHQGSHFLLPPKIPSWRDPPETLEEPQNAPRERPEGPAAAKKPPRHCELVVTLGCPEIHGDLRPWDRKRQPRSLRGSHLGGQRLHGSLCGHIXXKPLTAPGTKXXKGPHQ

SEQ ID NO: 2387 - protein, 84 aa, Homo sapiens
  variant (1)...(84): Xaa = Any amino acid
SWWGPXCXLVPGAVRGFXXMWPHRDPCSLCPPRWDPLSDLGCLFRSQGLRSPWISGHPRVTTSSQWRGGFLAAAGPSGLSRGAF

SEQ ID NO: 2388 - protein, 50 aa, Homo sapiens [sequence omitted]

SEQ ID NO: 2389 - protein, 86 aa, Homo sapiens
SWLPFPVPGPEITVDLRTSKSDDKFTVARWLFSCCRTLWPLSGSILRLLQSFWRVSPRGDFGGQEEVASLVVILFISADGFLSFDW

SEQ ID NO: 2390 - protein, 78 aa, Homo sapiens [sequence omitted]

SEQ ID NO: 2391 - protein, 51 aa, Homo sapiens
EPIRNNRFSNQDHCSSWRNPWIPLSLYLHYHSLGSSLLSQVANLDSIHRCR

SEQ ID NO: 2392 - protein, 50 aa, Homo sapiens [sequence omitted]

SEQ ID NO: 2393 - protein, 82 aa, Homo sapiens
AKWQIWTVSIDADEPHPGTGEVEDIEQLNQCLIQHFHLIKTSLIFLCFLFHGIHENLLTVGVSKEAYLMTSVNGKNKTKMLY

SEQ ID NO: 2394 - protein, 78 aa, Homo sapiens [sequence omitted]

SEQ ID NO: 2395 - protein, 64 aa, Homo sapiens
KFILFYNTFRFIEKLGRWYKEFPYIPYPVSPNNILHWYIMVVTIKWANIDTLVLTKVHTLFRFH

SEQ ID NO: 2396 - protein, 57 aa, Homo sapiens
NLNKVWTLVNTNVSILAHLIVTTIIYQCKMLLGETGYGIYGNSLYHLPNFSINLKVL

SEQ ID NO: 2397 - protein, 74 aa, Homo sapiens
  variant (1)...(74): Xaa = Any amino acid
KSRRTAASIGSGLKKKICSQSVLEVTSPTKLTPYAVLRRWRHQAQKRKFXISHWESKVPPSQNDNCTVAEQTPP

SEQ ID NO: 2398 - protein, 57 aa, Homo sapiens
  variant (1)...(57): Xaa = Any amino acid
LKVKKDSSKHRLRIKEKNLLTVCSGGHITNKAHALCSSEKVEAPGSKEEIXNFSLGE

SEQ ID NO: 2399 - protein, 58 aa, Homo sapiens
  variant (1)...(58): Xaa = Any amino acid
LQQTGWGPPTLGWSLFCHCAVIILGWGYLTLPMRNXKFPLLSLVPPPSQNCIGRELCW

SEQ ID NO: 2400 - protein, 59 aa, Homo sapiens
  variant (1)...(59): Xaa = Any amino acid
LQDSREXANIQLADDFAGKQRKXVKACLPARKLDTKXRFGARKQTQKAHSKRRKKPQNL

SEQ ID NO: 2401 - protein, 50 aa, Homo sapiens
DLELGNKPKRLTASGEKNPKICNLYHKAFISFRYKELLDINKKNANTPEK

SEQ ID NO: 2402 - protein, 50 aa, Homo sapiens
  variant (1)...(50): Xaa = Any amino acid
YRLQILGFFSPLAVSLLGLFPSSKSXLGVKFPGWETSFYXLPLLASKVIC

SEQ ID NO: 2403 - protein, 60 aa, Homo sapiens
LHLVHVGTPSPFQSTTSSSNQYFLESLGNVLHAFKQSPFLEIHYRVTINSATLRFHHYGS

SEQ ID NO: 2404 - protein, 75 aa, Homo sapiens; identical to SEQ ID NO: 1407

SEQ ID NO: 2405 - protein, 63 aa, Homo sapiens; identical to SEQ ID NO: 1408

SEQ ID NO: 2406 - protein, 68 aa, Homo sapiens; identical to SEQ ID NO: 1409

SEQ ID NO: 2407 - protein, 69 aa, Homo sapiens; identical to SEQ ID NO: 1436
  variant (1)...(69): Xaa = Any amino acid

SEQ ID NO: 2408 - protein, 50 aa, Homo sapiens; identical to SEQ ID NO: 1437
  variant (1)...(50): Xaa = Any amino acid

SEQ ID NO: 2409 - protein, 59 aa, Homo sapiens; identical to SEQ ID NO: 1438
  variant (1)...(59): Xaa = Any amino acid

SEQ ID NO: 2410 - protein, 68 aa, Homo sapiens; identical to SEQ ID NO: 1439
  variant (1)...(68): Xaa = Any amino acid

SEQ ID NO: 2411 - protein, 54 aa, Homo sapiens; identical to SEQ ID NO: 1440
  variant (1)...(54): Xaa = Any amino acid

SEQ ID NO: 2412 - protein, 100 aa, Homo sapiens; identical to SEQ ID NO: 1441
  variant (1)...(100): Xaa = Any amino acid

SEQ ID NO: 2413 - protein, 72 aa, Homo sapiens; identical to SEQ ID NO: 1442
  variant (1)...(72): Xaa = Any amino acid

SEQ ID NO: 2414 - protein, 72 aa, Homo sapiens
PHFTIKKLRLKRIKEFFRGETALPYRRIPSNKCECSLSRRWHLIPLSWSLTSLSDWLLMNKMGKRKNSNSTV

SEQ ID NO: 2415 - protein, 76 aa, Homo sapiens
ELLWFFSRPAPSLKCKAVPLMGFWHSVSRPPFSSEGLSGEQRKNQPVSKLARLRDWGPLPPVKDADFTALQYSRVK

SEQ ID NO: 2416 - protein, 52 aa, Homo sapiens
VPPSGEGAFTFITWDPSVRKSCFSSKKLFNPFKPQFLNCEMGLIPVSNQGSS

SEQ ID NO: 2417 - protein, 79 aa, Homo sapiens
RSHLTLLYCSAVKSASFTGGKGPQSLRRASLETGWFFLCSPESPSDEKGGLETECQKPIKGTALHFREGAGLEKNQRSS

SEQ ID NO: 2418 - protein, 61 aa, Homo sapiens; identical to SEQ ID NO: 817

SEQ ID NO: 2419 - protein, 61 aa, Homo sapiens; identical to SEQ ID NO: 829

SEQ ID NO: 2420 - protein, 103 aa, Homo sapiens; identical to SEQ ID NO: 830

SEQ ID NO: 2421 - protein, 63 aa, Homo sapiens; identical to SEQ ID NO: 809
  variant (1)...(63): Xaa = Any amino acid

SEQ ID NO: 2422 - protein, 52 aa, Homo sapiens
  variant (1)...(52): Xaa = Any amino acid
CSRAAAXXXXKMLTTSPXIPAVVRPVLFLEVPVTLSVTTLLCWAPRPLSSLT

SEQ ID NO: 2423 - protein, 90 aa, Homo sapiens
  variant (1)...(90): Xaa = Any amino acid
GRXXXLTLTRTVTRCSSGRKSSWFPSGPGVMQQSSSXYXXXDVDHQPXDSRSGKACSVPGSSCNIECHHFTVLGPQAIVKPHMSSFQNXL

SEQ ID NO: 2424 - protein, 56 aa, Homo sapiens
  variant (1)...(56): Xaa = Any amino acid
SGDTQCYRNFQEQNRPYHCGNXGAGGQHLXXXXCCCSAALRQGPKETRRTFCHWNI

SEQ ID NO: 2425 - protein, 91 aa, Homo sapiens
  variant (1)...(91): Xaa = Any amino acid
LQXILETTHVRLDNGLGAQHSKVVTLNVTGTSRNRTGLTTAGIXGLVVNIXXXVXAAALLHYARARRKPGGLSATGTSSHSPSECQXXXSS

SEQ ID NO: 2426 - protein, 78 aa, Homo sapiens
  variant (1)...(78): Xaa = Any amino acid
SPLRNPGDVLGPGVGAPCHWIRKPASQGFNWETGDSPAGPCILVRLRMRTCETKASRYGLGQXKSSTSMLLLPKGNFA

SEQ ID NO: 2427 - protein, 64 aa, Homo sapiens
  variant (1)...(64): Xaa = Any amino acid
SGRFXLPQTISTGLCFTCPHSQSDQNAGPCWTVTCFPVKALTGRFSNPVARCSHSRAQHISWIP

SEQ ID NO: 2428 - protein, 51 aa, Homo sapiens
  variant (1)...(51): Xaa = Any amino acid
AKFPLGRSSIEVEDLXCPRPYLLAFVSHVLILSLTRMQGPAGLSPVSQLKP

SEQ ID NO: 2429 - protein, 79 aa, Homo sapiens
  variant (1)...(79): Xaa = Any amino acid
IXHWQGSLGAILGSCVNEQMNAQDRILAVTMMLEVTYPTVLLSFSPNPPLLPGKKPSSLCLITFSTQHLQGTYSAVGQC

SEQ ID NO: 2430 - protein, 67 aa, Homo sapiens [sequence omitted]

SEQ ID NO: 2431 - protein, 70 aa, Homo sapiens [sequence omitted]

SEQ ID NO: 2432 - protein, 56 aa, Homo sapiens
  variant (1)...(56): Xaa = Any amino acid
LHICSDDKCLQPCPLQGCTGLHTGSCLRCLVSSLKGWGSGVSPVYLGKXLTLGXMK

SEQ ID NO: 2433 - protein, 50 aa, Homo sapiens
KSGLGGNAFLLLHVYFSCISVVMTNASSLVLCKAALGCIQAPVSGVWFPP

SEQ ID NO: 2434 - protein, 58 aa, Homo sapiens
  variant (1)...(58): Xaa = Any amino acid
FHXSKCQXLAQIDRADSAAPTFQGGNQTPETGACMQPSAALQRTRLEAFVITTDMQLK

SEQ ID NO: 2435 - protein, 78 aa, Homo sapiens
YLPASLSFTAGISSSADRERWVFFPILVPVASLYQENVTFPVPPATEQSRISFCPSVTCPPGARISKLTLEMGIPRWI

SEQ ID NO: 2436 - protein, 50 aa, Homo sapiens
RTKTDPALLSGWGYRKCHILLVQRGHRNQYGKENPAFPVSRAGDPSCERE

SEQ ID NO: 2437 - protein, 117 aa, Homo sapiens
SSHLLSYIHLGIPISNVSLEIRAPGGQVTEGQKLILLCSVAGGTGNVTFSWYREATGTSMGKKTQRSLSAELEIPAVKESDAGKYYCRADNGHVPIQSKVVNIPVRRPDGYRRDLMT

SEQ ID NO: 2438 - protein, 54 aa, Homo sapiens [sequence omitted]

SEQ ID NO: 2439 - protein, 58 aa, Homo sapiens [sequence omitted]

SEQ ID NO: 2440 - protein, 70 aa, Homo sapiens
  variant (1)...(70): Xaa = Any amino acid
VRGEGGXTGLGISAVWEMRSISHHHHLCYXHVSACQRATLSLPQVGGFIXQSVFFMYRSFHSSTLXLXSL

SEQ ID NO: 2441 - protein, 111 aa, Homo sapiens
  variant (1)...(111): Xaa = Any amino acid
FGERVVXQGLGYRQCGKCEAFLIIIISATXMFLHVSERHCPCLRLEVLSXKVFFSCIVRSIHPLXXLXAFERLGCSQAAVLRDLKRDLVSLGAESIYLGTLFQERPCLHFH

SEQ ID NO: 2442 - protein, 53 aa, Homo sapiens
  variant (1)...(53): Xaa = Any amino acid
DNASCVCSGRSSKWNACCTXPXRVXAMRPXDHTWGTNHXLXHXALESPLDRVP

SEQ ID NO: 2443 - protein, 138 aa, Homo sapiens
  variant (1)...(138): Xaa = Any amino acid
SGRGWXHRAWDIGSVGNAKHFSSSSSLLQXCFCMSASDTVPASGWRFYXPKCFFHVSFVPFIHSXPXQPLKGLVAPRLLFSGTLKGTWLVLGQRVSTWALSSKKDLVSIFIRTMLLVCVLEDLLNGMLVALXPXEWXP

SEQ ID NO: 2444 - protein, 101 aa, Homo sapiens
  variant (1)...(101): Xaa = Any amino acid
GXVXKXMIGPPSVVXRSHGXHSXGXSATSIPFRRSSRTHTRSIVLMKMETRSFLEESAQVDTLCPKTNQVPFKVPENSSLGATKPFKGXQXXEWMNGTNDT

SEQ ID NO: 2445 - protein, 61 aa, Homo sapiens
  variant (1)...(61): Xaa = Any amino acid
MERTIHEKNTLXDKTSNLRQGQCRSLTCRNMXVAEMMMMRNASHFPHCRYPKPCXTTLSPN

SEQ ID NO: 2446 - protein, 196 aa, Homo sapiens
DNVHSPILSTWIRVTVRIPVSHPVLTFRAPRAHTVVGDLLELHCESLRGSPPILYRFYHEDVTLGNSSAPSGGGASFNLSLTAEHSGNYSCDADNGLGAQHSHGVSLRVTVPVSRPVLTLRAPGAQAVVGDPLELHCESLRGSFPILYWFYHEDDTLGNISAHSGGGASFNLSLTTEHSGNYSCEADNGLGPSTVK

SEQ ID NO: 2447 - protein, 114 aa, Homo sapiens [sequence omitted]

SEQ ID NO: 2448 - protein, 67 aa, Homo sapiens
AVPQGDILMIKSVQDRGRASQGLTVKLQQVPHHSVGPGSPEGEDRVRYRNSHGDSNPRAEDGAVNVI

SEQ ID NO: 2449 - protein, 65 aa, Homo sapiens
QSAGYIIGTKGLFQFLVNPLQQAPPDDVLIDALSGQSLAAHGKDIPLELRQLLFAAWLELAQHKR

SEQ ID NO: 2450 - protein, 50 aa, Homo sapiens
KDAETPASDEPPLRQPAVRFEFLQHAPPDSLQPLGSLVTVEGRRQTLVSQ

SEQ ID NO: 2451 - protein, 85 aa, Homo sapiens
MPSVVRAWLPTARTSPSNSGSSFLQPGSSWLSTKGKKMQRPQPRMNLLCANPLSDLNFFSTRPLTLSSLWAAWSQLRAVVRHWSA

SEQ ID NO: 2452 - protein, 116 aa, Homo sapiens
LADQCLTTALNCDQAAQRLERVRGRVLKKFKSDSGLAQRRFIRGWGLCIFLPFVLSQLEPGCKKELPEFEGDVLAVGSQALTTEGIYEDVIRGCLLQRIDQELKKTLGANDVSCTL

SEQ ID NO: 2453 - protein, 54 aa, Homo sapiens
PGCPEAGESQGARAEEIQIGQRVGAEEVHPRLGSLHLFTFCAEPTRARLQKGAA

SEQ ID NO: 2454 - protein, 50 aa, Homo sapiens
ISKSIVFEFVCSSLSLLVIVVFCFLFCFQCKCDVIFLFSLDQSWTGNCIV

SEQ ID NO: 2455 - protein, 53 aa, Homo sapiens
PLDGWGFTRETDTPGSILKTLSGFPGQQSSLILSSASEANLTSMCSSSSELVR

SEQ ID NO: 2456 - protein, 81 aa, Homo sapiens [sequence omitted]

SEQ ID NO: 2457 - protein, 50 aa, Homo sapiens
LCCQAVFRYWPQSVYVEQTGWYVAKVDSSLPHRWCNVRASAGVVCQSSSL

SEQ ID NO: 2458 - protein, 193 aa, Homo sapiens
  variant (1)...(193): Xaa = Any amino acid
PVAGPVNEVLIHSXQYLMEVTHDLRLRLKNYMMPAKGKKTDKQPLQKPSHCTIYVAKNYPPWQHTTLSVLRKHFEANNGKLPDNKVIASELSSMPELKKYMKKVMPFVAMIKENLEKMGPRILDLQLEFDEKAVLMENIVYLTNSLELEHIEVKFASEAEDKIREDCCPGKPLNVFRIEPGVSVSLVNPQPSN

SEQ ID NO: 2459 - protein, 58 aa, Homo sapiens
CQLKGRRLTNNPCRSPHIAPSMWQRTIHLGNIPPCLFYVNTLRPITENCLTTKSLLVN

SEQ ID NO: 2460 - protein, 109 aa, Homo sapiens
  variant (1)...(109): Xaa = Any amino acid
NGVAAKVASFSFFQNAQMHQFLNIHVKFENCTFGEIKFYIQLAIVQLCCSFSIKAKVFNMRKCDTFDTVWGGSGWAALGGTGPXTRLCPPRIHAGRREAEVSNXTSHQA

SEQ ID NO: 2461 - protein, 51 aa, Homo sapiens
  variant (1)...(51): Xaa = Any amino acid
PLGERXGLIPLPPSCQHGFWVDTALXKVQYHQELPIHSHPTLYQMYHIFSC

SEQ ID NO: 2462 - protein, 51 aa, Homo sapiens
LYIKFNLTECTVFKFHVYIKELMHLSILKERKRSYFSCHPILEKSLIFKLF

SEQ ID NO: 2463 - protein, 67 aa, Homo sapiens
  variant (1)...(67): Xaa = Any amino acid
EXWFDTSASLLPAWILGGHSLVXGPVPPRAAHPLPPHTVSNVSHFLMLNTLALIENEQQSWTIASCI

SEQ ID NO: 2464 - protein, 82 aa, Homo sapiens
  variant (1)...(82): Xaa = Any amino acid
ADSQNTFXIPEIRKINDKISVSQATNRCKIMKGVVGCAKFGKVVTASEKEAVRLNSWWLPSVTSRGSLQHRPRARRNTVAPM

SEQ ID NO: 2465 - protein, 65 aa, Homo sapiens
FLAFLSALLPSQEPGDAKHPECDGTRWGQGPHLPAEVRPGLLVPGQSPEPLCLVEQAPVCRIPTV

SEQ ID NO: 2466 - protein, 81 aa, Homo sapiens
HLCRKCVEFSVFFLCDFWPFYQHFSPPRSLGMPNIQNVMGQDGGRGLTSLQRSGQVSLSLDNLLSLSAWWSRHLCAEFPLW

SEQ ID NO: 2467 - protein, 79 aa, Homo sapiens
PQWEFCTQVPAPPSREAQEIVQGQGDLAGPLQGGEAPAPILSHHILDVWHPQAPGRGEVLIKRPKITQKEDRKLHALPT

SEQ ID NO: 2468 - protein, 50 aa, Homo sapiens
VLPYSYEHGACVEDSLWKLQKEATKSSASQPLSQMQSPLYQTWHIQPLLS

SEQ ID NO: 2469 - protein, 59 aa, Homo sapiens
HSGNSAHRCLLHQAERLRRLSRDKETWPDLCREVRPLPPSCPITFWMFGIPRLLGGEKC

SEQ ID NO: 2470 - protein, 107 aa, Homo sapiens
  variant (1)...(107): Xaa = Any amino acid
KGQKSHRKKTENSTHFLHRCYRIPTSTGPVLKTPSGSYRRKPPRVQPHSLFLRCSHHFTKLGTSNHSFHNFTPVCGLADRYFVIDLSNFRDXKCVLRICSALRDSVF

SEQ ID NO: 2471 - protein, 57 aa, Homo sapiens
GPCPHLVPSHSGCLASPGSWEGRSADKKAKNHTERRQKTPRTSYIGATVFLRARGLC

SEQ ID NO: 2472 - protein, 64 aa, Homo sapiens
  variant (1)...(64): Xaa = Any amino acid
RLPLEVTEGSHQEFSLTASFSDAVTTLPNLAHPTTPFIILHLFVAWLTDILSLIFLISGIXNVF

SEQ ID NO: 2473 - protein, 60 aa, Homo sapiens; identical to SEQ ID NO: 1146

SEQ ID NO: 2474 - protein, 74 aa, Homo sapiens; identical to SEQ ID NO: 1147

SEQ ID NO: 2475 - protein, 74 aa, Homo sapiens [sequence omitted]

SEQ ID NO: 2476 - protein, 60 aa, Homo sapiens
LLWPCPETTPNSWLVMRGGEYSAGLQMGRKREAAEALAQQCQAEGGRGDWGLSSAYRRNP

SEQ ID NO: 2477 - protein, 126 aa, Homo sapiens
SITTAWGPEGAITCCCLMEGPAWDTSQIIITGSQDGMVRVWKTEDVKMSVPGRPAGEEPLAQPPSPRGHKWEKNLALSRELDVSIALTGKPSKTSPAVTALAVSRNHTKLLVGDERGRIFCWSADG

SEQ ID NO: 2478 - protein, 97 aa, Homo sapiens
GGFFCRQSSGPSHLCHPQPGTVVPEPLLPLSSYPSADQQNILPLSSPTRSLVWFLDTARAVTAGLVLLGFPVKAMLTSSSRLKARFFSHLWPLGLGG

SEQ ID NO: 2479 - protein, 75 aa, Homo sapiens
GVSSVGRAQAPVTSATLSLALLCQSLCCLSLPTHLQTSRIFSPSHHQPGVWCGFWTRPEQSLRGWFCWASLSKQC

SEQ ID NO: 2480 - protein, 52 aa, Homo sapiens
RPALDSRPGSSPTCGLLGLEAEPGAPLLLAVQEQTSSHPQSSKPGPCRLDSR

SEQ ID NO: 2481 - protein, 153 aa, Homo sapiens
AELRPQSPLPPSAWHCCARASAASLFLPICRPAEYSPPLITNQEFGVVSGHGQSSHCGAGFAGLPCQSNANVQLSTQGQVLLPLVASWAWRLSQGLLSCWPSRNRHLHILSLPNPDHAVLTPGDDDLACVPCWALHQAATGYGSFWAPGCGDA

SEQ ID NO: 2482 - protein, 63 aa, Homo sapiens; identical to SEQ ID NO: 2206

SEQ ID NO: 2483 - protein, 87 aa, Homo sapiens; identical to SEQ ID NO: 2207

SEQ ID NO: 2484 - protein, 65 aa, Homo sapiens; identical to SEQ ID NO: 1600

SEQ ID NO: 2485 - protein, 64 aa, Homo sapiens; identical to SEQ ID NO: 1601

SEQ ID NO: 2486 - protein, 74 aa, Homo sapiens; identical to SEQ ID NO: 1970

SEQ ID NO: 2487 - protein, 101 aa, Homo sapiens; identical to SEQ ID NO: 1971

SEQ ID NO: 2488 - protein, 101 aa, Homo sapiens; identical to SEQ ID NO: 1972

SEQ ID NO: 2489 - protein, 74 aa, Homo sapiens; identical to SEQ ID NO: 1973

SEQ ID NO: 2490 - protein, 64 aa, Homo sapiens; identical to SEQ ID NO: 1974

SEQ ID NO: 2491 - protein, 136 aa, Homo sapiens; identical to SEQ ID NO: 1615

SEQ ID NO: 2492 - protein, 79 aa, Homo sapiens; identical to SEQ ID NO: 1616

SEQ ID NO: 2493 - protein, 73 aa, Homo sapiens; identical to SEQ ID NO: 1617

SEQ ID NO: 2494 - protein, 57 aa, Homo sapiens; identical to SEQ ID NO: 1618

SEQ ID NO: 2495 - protein, 89 aa, Homo sapiens; identical to SEQ ID NO: 1619

SEQ ID NO: 2496 - protein, 124 aa, Homo sapiens; identical to SEQ ID NO: 1620

SEQ ID NO: 2497 - protein, 123 aa, Homo sapiens; identical to SEQ ID NO: 1621

SEQ ID NO: 2498 - protein, 58 aa, Homo sapiens; identical to SEQ ID NO: 1647

SEQ ID NO: 2499 - protein, 71 aa, Homo sapiens; identical to SEQ ID NO: 1648

SEQ ID NO: 2500 - protein, 73 aa, Homo sapiens; identical to SEQ ID NO: 1649

SEQ ID NO: 2501 - protein, 88 aa, Homo sapiens [sequence omitted]

SEQ ID NO: 2502 - protein, 59 aa, Homo sapiens
SEVCSSGLSSPLLEQHKTNLIFYASGDICSANGKSGFNQPLPFLKTFCCTHRILSCTYL

SEQ ID NO: 2503 - protein, 171 aa, Homo sapiens
LLDSIWHQPIFNLLSIGQSLYAKAKELDRVKEIQEQLFHIKKLLKTCRFANSALKEFVGQVPGHLTDELHLFSLEDLVRIKKGLLAPLLKDILKASLAHVAGCELCQGKGFICEFCQNTTVIFPFQTATCRRCSACRACFHKQCFQSSECPRCARITARRKLLESVASAAT

SEQ ID NO: 2504 - protein, 100 aa, Homo sapiens
  variant (1)...(100): Xaa = Any amino acid
KLPLHMWLAVSCVKERALFVNFARIRLSSSHFRQQHVEDVQRAGLAFTNSASSPPSAPGVRGSQRGENFWKVWPLQQHDAPEYXEKDCSTCLMITPIXVY

SEQ ID NO: 2505 - protein, 55 aa, Homo sapiens
  variant (1)...(55): Xaa = Any amino acid
KMFSVQGLLSQTVLPVLRVPPVCEDHSEEKTSGKCGLCSNMMPLSTXKKTVQHAL

SEQ ID NO: 2506 - protein, 72 aa, Homo sapiens [sequence omitted]

SEQ ID NO: 2507 - protein, 58 aa, Homo sapiens
  variant (1)...(58): Xaa = Any amino acid
XQIGVIIRHVEQSFXQYSGASCCCRGHTFQKFSPRCDPRTPGALGGLEALFVKASPAR

SEQ ID NO: 2508 - protein, 53 aa, Homo sapiens
CTVSKPTGLQQLLDMEELLLNFLHSVQLLGFRIQALADAQQIENGLVPYAVEQ

SEQ ID NO: 2509 - protein, 52 aa, Homo sapiens; identical to SEQ ID NO: 1748

SEQ ID NO: 2510 - protein, 115 aa, Homo sapiens; identical to SEQ ID NO: 1749

SEQ ID NO: 2511 - protein, 52 aa, Homo sapiens; identical to SEQ ID NO: 1750

SEQ ID NO: 2512 - protein, 56 aa, Homo sapiens; identical to SEQ ID NO: 1751

SEQ ID NO: 2513 - protein, 57 aa, Homo sapiens
  variant (1)...(57): Xaa = Any amino acid
ATFINTDILELFTFLLFIFEFSVXYLVLIHCCIXNCTLISSSIKSIXLQFXGIIINL

SEQ ID NO: 2514 - protein, 75 aa, Homo sapiens
  variant (1)...(75): Xaa = Any amino acid
LIPPPVXHVYSRLADKALFGGPASVGSQKPNYCGLQRISRSFTKQTSLHPDCXFAXSGSQXMSXGAGSFWLLEKP

SEQ ID NO: 2515 - protein, 64 aa, Homo sapiens; identical to SEQ ID NO: 1325
  variant (1)...(64): Xaa = Any amino acid

SEQ ID NO: 2516 - protein, 100 aa, Homo sapiens; identical to SEQ ID NO: 1326

SEQ ID NO: 2517 - protein, 52 aa, Homo sapiens; identical to SEQ ID NO: 1327

SEQ ID NO: 2518 - protein, 50 aa, Homo sapiens; identical to SEQ ID NO: 1332

SEQ ID NO: 2519 - protein, 51 aa, Homo sapiens; identical to SEQ ID NO: 1333

SEQ ID NO: 2520 - protein, 87 aa, Homo sapiens; identical to SEQ ID NO: 1348

SEQ ID NO: 2521 - protein, 55 aa, Homo sapiens; identical to SEQ ID NO: 1349

SEQ ID NO: 2522 - protein, 120 aa, Homo sapiens; identical to SEQ ID NO: 1350

SEQ ID NO: 2523 - protein, 75 aa, Homo sapiens [sequence omitted]

SEQ ID NO: 2524 - protein, 59 aa, Homo sapiens; identical to SEQ ID NO: 1841

SEQ ID NO: 2525 - protein, 51 aa, Homo sapiens [sequence omitted]

SEQ ID NO: 2526 - protein, 72 aa, Homo sapiens
QMQKNKNKNTTQNATCKWWSMYLYITSPHTYIHSKQYYIIFLCEHTMSFWKNIQKLVTVANFRGESLIRVGR

SEQ ID NO: 2527 - protein, 52 aa, Homo sapiens
KDFSPFCKVGSTYLQKECISVLCVNIPLISKRFHEKIFEELHKHPLLCRQRW

SEQ ID NO: 2528 - protein, 75 aa, Homo sapiens
LLLPVFVCSSRRTLYVHIEKLYSIVLSVCMYVGMLCINTYSTIYMWHFVLCFCFCFFAFAIFICCSFKLCSVELE

SEQ ID NO: 2529 - protein, 93 aa, Homo sapiens
GFVPSHHLCLHSKGCLCNSSKIFSWNLLEINGIFTHNTEIHSFCKYVLPTLQKGLKSFHLPTLIKDSPLKLATVTSFCMFFQKDIVCSHRKII

SEQ ID NO: 2530 - protein, 53 aa, Homo sapiens
FFFLHRIGRGGRFGRKGVAINFVTEEDKRILRDIETFYNTTVEEMPMNVTDLI

SEQ ID NO: 2531 - protein, 58 aa, Homo sapiens; identical to SEQ ID NO: 1787

SEQ ID NO: 2532 - protein, 67 aa, Homo sapiens
  variant (1)...(67): Xaa = Any amino acid
XPIXQQRALHRKLSSQELNKVSHIHGHLLHCSIVESLNVTKNPLVFFSNKVYSHTFPPKSTPSANSV

SEQ ID NO: 2533 - DNA, 175 bp, Homo sapiens
  unsure (13): n=A,T,C or G
  unsure (15): n=A,T,C or G
  unsure (18): n=A,T,C or G
  unsure (19): n=A,T,C or G
cctcgggaggagntnttnngattcagattacagtgtgataaggaagacataggcttttgtcctgcctcgccatcggagctctcatgggccccaggaagtccagggacagctcccttatacctggcccacgtccttctcagcctgccctcgacaacagtgaccaacagacaggcag

SEQ ID NO: 2534 - DNA, 393 bp, Homo sapiens
  unsure (53): n=A,T,C or G
ccaaggccccagtgaaagcagctaccacccctacccggaagagttctagcagngaggattcctccagtgacgaggaagaggagcaaaaaaaacccatgaaaaataaaccaggtccctacagttcagtccccccgccttctgctcccccaccaaagaagtctctgggaacccagcctcccaagaaggctgtggagaagcagcagcctgtggaaagcagtgaagacagcagtgatgagtctgattcaagttctgaagaagagaagaaacccccaactaaggcagtagtctctaaagcaaccactaaaccacctccagcaaagaaagcaacagagagctcttcagacagctcagactctgacagctctgaggatgatgaagctccttctaagccag

SEQ ID NO: 2535 - DNA, 284 bp, Homo sapiens
  unsure (18): n=A,T,C or G
  unsure (23): n=A,T,C or G
  unsure (34): n=A,T,C or G
  unsure (41): n=A,T,C or G
  unsure (54): n=A,T,C or G
  unsure (84): n=A,T,C or G
  unsure (85): n=A,T,C or G
  unsure (89): n=A,T,C or G
  unsure (100): n=A,T,C or G
  unsure (183): n=A,T,C or G
ccgggcacgtaaggaagncgtgntggcccctaancctttgnttcatgctacagnactgaggggtatgtgtccccaatgcacacnnaccngcacacaactnaatgagcttcctgggaaacactattcccccacctccaccttaagtggctgccccagttttccaaccactggaatcagtccctnacctgctgcctctagtctccaccccaaaagttcagtcgtctctgtcttggagggcactgtcgggcccctcatgttgaagctcaacactcctcaatgagcag

SEQ ID NO: 2536 - DNA, 239 bp, Homo sapiens
  unsure (21): n=A,T,C or G
  unsure (22): n=A,T,C or G
  unsure (37): n=A,T,C or G
  unsure (67): n=A,T,C or G
  unsure (111): n=A,T,C or G
  unsure (113): n=A,T,C or G
  unsure (120): n=A,T,C or G
  unsure (123): n=A,T,C or G
  unsure (218): n=A,T,C or G
  unsure (236): n=A,T,C or G
cccagaagttaagtggaaagnngccccattatctatngagtcagagaagaaatccagactccccaangggtctccactgataccacaggggtcagaggtgaggcgctgctntnaatacanccntctctgacaccaccctggtggaggggggctttgggacacttctttacagcttggtaacagtagacatctaggctctctactcagtcttcgctggnggaggtgggatagggccntag

SEQ ID NO: 2537 - DNA, 297 bp, Homo sapiens
  unsure (15): n=A,T,C or G
aaaaataatccattntctagcttcatgtatcaggaatagccctacattaatggtaccaggagcctgggcctctgttgctgaaaggtcctggaccttttacctctaaaatttcatgatacttattttaacatgaaaagcctttattgaattgtgcattctttaatccccaccccttttgcctttcagcattaaactgaagaaaagatgtccctgtacgatgacctaggagtggagaccagtgactcaaaaacagaaggctggtccaaaaacttcaaacttctgcagtctcagcttcag

SEQ ID NO: 2538 - DNA, 283 bp, Homo sapiens
  unsure (52): n=A,T,C or G
cctgcccacacgttttgtttgagcgctcggaagtgaaggatcgccacctggnggctaagagactgactgaacatgtgcaagataaaagcaagctgcctatcctcatcttcccagaaggaacctgcatcaataatacatcggtgatgatgttcaaaaagggaagttttgaaattggagccacagtttaccctgttgctatcaagtatgaccctcaatttggcgatgccttctggaacagcagcaaatacgggatggtgacgtacctgctgcgaatgatgaccag

SEQ ID NO: 2539 - DNA, 390 bp, Homo sapiens
  unsure (13): n=A,T,C or G
  unsure (14): n=A,T,C or G
ctgtgtggatctnnagcccagctacagcagaatacattttaccagcaaacctaaggatgacaaacactatccacatctgaaaactaccacaccatatcagggatcataaattatgcatatctatgaattttccaacaaattcctacttcctgattggattggttttgccgctgatgttaaggcagccagcttcttagttcaaaaagaattctgagtttttcaaacactagtctagaggtggacattgtcaggggttctggaatgggaccaggggaccttttggtgcagtgggtgcctgtaactcattagacgtactgaggcagcacttctgcagggtgcataccctgattgttgtcatttgtaacaggtcacttccttttcactcagttt

SEQ ID NO: 2540 - DNA, 271 bp, Homo sapiens
  unsure (15): n=A,T,C or G
ggggaactggctgtnagccacagcagccccacacagacagtggtctctgaacttcaggaaagccatggacagaaaaaaaaataaaattcttttccatcattctattttcaaagaggtcttggcgttttcctacatcttttgtttagaggggaaaaaaaggtttcatttgctgccatttcagaaaggttatgctatcctgttttttccaagcagttgtgagtcaggaactgcctgggcagtgtgcatcaactttgtggccgaaccattacag

SEQ ID NO: 2541 - DNA, 297 bp, Homo sapiens
  unsure (92): n=A,T,C or G
  unsure (94): n=A,T,C or G
  unsure (95): n=A,T,C or G
ctcgcatgtgcaggtcaagtgtacagtagtgaaaacaacatgcaatgtcttcactgcagaatcataatacagctaggacattggtgttcttncnntcccaccccaaattaaaaactaattgctaaaaaaaattgcattgccaaacggcactggagtgaaagcttggcggtactctacgataaatgctcagtttccagtgcatgaaataaaactatagcaaatgggaggctttggtggcatccaaagaagaaaaaggcaaaccagggggaaagagctgcagtctaaagtttgatcttt

SEQ ID NO: 2542 - DNA, 273 bp, Homo sapiens
  unsure (20): n=A,T,C or G
  unsure (51): n=A,T,C or G
atgccccaagttgttcaacnaaggttcccatttgtcaactgttacctcgtncccaattgctttaattttttccaaagcatcaagaaaccatttttcggctgttttccattctccattctgaaatgcaaccacgccgacctcatgcataacaaaagggtcttccggtgcaatgctcagagcttggctgaagaacctttcagctagttttgagttattggtcaaaccatattctaatccaatatacagcataggcaaatgacaccctttcatcag

SEQ ID NO: 2543 - DNA, 256 bp, Homo sapiens
  unsure (34): n=A,T,C or G
  unsure (38): n=A,T,C or G
  unsure (192): n=A,T,C or G
  unsure (209): n=A,T,C or G
  unsure (225): n=A,T,C or G
  unsure (226): n=A,T,C or G
  unsure (229): n=A,T,C or G
aatgtagtatcgttgtgcctgaaatgaccattcngggntgtttagaatccagaatcatcaaaagccatgtggtatgaggaagtaataaatatcctcttgaatcttcttaccctattttgcacaaatggatggctgcatgaacagctcttgtaaattgctctgagtccacaccaatagaaacctgcactcatnctatagctgcagagggnttgttggcttaaggcnnctntatcatctcagcattaatttccctttt

SEQ ID NO: 2544 - DNA, 271 bp, Homo sapiens
gatcggtcagacccttcaccagattgtggaagggcagacgaactcctcgcaggatctcagctatgactcctccagtctggcagttgtaccctaactcctcctgtattgcggcaccaatcttgggatccccaactcccaagagtactttcttctttttggacggcaggtgggtctccaagagcaggcggaggtcctcatgaacaacccctcaggggaaagaacacagttcccactaacaggctgaaggacgatcaactctaacatccctcag

SEQ ID NO: 2545 - DNA, 236 bp, Homo sapiens
ggtgtaaccacctctcgcaaggccacggcttctccaactttccccaaaacatctgagcggtttcagaaactatcacttcctccagagagcacgtggctgcccgatgagtaaacagcagctttcccgggcctgcctccaggcggtaagtccacgagtctccaggctgcccgcaactccaagactcatccttatccatcactcatttgcatacacgtctgaaggccctagggagtcag

SEQ ID NO: 2546 - DNA, 324 bp, Homo sapiens
  unsure (145): n=A,T,C or G
  unsure (272): n=A,T,C or G
tctgtgccaaactagatatttcagatgaattgaggaaaaaaatctggacctgctttgaattctccataattcagtgtcctgaacttatgatggacagacatctggaccagttattaatgtgtgccatttatgtgatggcaaaggncacaaaagaagataagtccttccagaacattatgcgttgttataggactcagccgcaggcccggagccaggtgtatagaagtgttttgataaaagggaaaagaaaaagaagaaattctggcagcagngatagcagaagccatcagaattctccaacagaactaaacaaagatagaacca

SEQ ID NO: 2547 - DNA, 328 bp, Homo sapiens
  unsure (34): n=A,T,C or G
ctttacaacctccagccctatagtctaaggatanggggccctgggagacaccgagggaccaaggaaagaggccccctgtagaaagcaagcagaaattccttgtagacccactgaccagagttgctcgctgtccttgaccccaccgagaggggtgcaaccctgactcagcatcacctcctatctgtcatagcggggagagctttccccaaaggccagcaggggaaaacccaaccttacttggaggagccagggaagtatctcgcagatcccgcaaaaaggcacccacgtctacagctcggcgggctggaggtctgcgggccaagccagg

SEQ ID NO: 2548 - DNA, 158 bp, Homo sapiens
aaaccctggaccagtggtctcacatggtgctacgcctgcatgtaaacacgcctgcaaacgctgcctgccggtaaacacgcctgcaaacgctgcctgcccgtaaacacgcctgcaaacgctgcctgcccacacaggttcacgtgcagctcaaggaaagg

SEQ ID NO: 2549 - DNA, 191 bp, Homo sapiens
ggggccaccctgacctacacataccgccactgctagcctcacaagcccctggttactgcagatgaagctgggatggaggctctgaccccaccaccggccacccatctgtcacccttggacagcgcccacacccttctagcacctcctgacagcagtgagaagatctgcaccgtccagttggtgggtaacag

SEQ ID NO: 2550 - DNA, 413 bp, Homo sapiens
  unsure (66): n=A,T,C or G
gttttctcttcatgtaagtccttggaattaaagtgctaagaacatcaccttagaatcaattcctgncaaattttttgttctccccttctgccatcttaaatgtaagctgaaactggtctactgtgtctctagggttaagccaaaagacaaaaaaattttactacttttgagattgccccaatgtacaggattatataattctaacgcttaaatcatgtgaaagggttgctgctgtcagccttgcccactgtgacttcaaacccaaggaggaactcttgatcaagatgcccaaccctgtgatcagaacctccaaatactgccatgagaaactagagggcaggtcttcataaaagccctttgaacccccttcctgccctgtgttaggagatagggatattggcccctcactgcag

SEQ ID NO: 2551 - DNA, 286 bp, Homo sapiens
  unsure (34): n=A,T,C or G
  unsure (203): n=A,T,C or G
caagcatgagctctgtgttactttctggctcagncactgcctccaggcagccctcctgttaaccacagtgcacgaaactctcccttcttggcttcttggatatagcacccatcctgcttgagtcccatctgtctgggatgttctccgtcattttcttgagggtcccacctgctcctctccccgaaatggacatcctggaaggnggagtctatactgcttttctctccccagcaacgttgaatccggagtcagcctgggctccgcaaacaatggctgccatctccag

SEQ ID NO: 2552 - DNA, 139 bp, Homo sapiens
  unsure (64): n=A,T,C or G
  unsure (67): n=A,T,C or G
tatcaccatcccctcagtgcccagaattccagaggggaagtgataccgttttagagttaaaatnccnggcctcacgcgtgtaatcccagcactttgggaggccggatcacttgaagtcaggagcgtcagaccagcctgg

SEQ ID NO: 2553 - DNA, 303 bp, Homo sapiens
cctctaacctatgcaggtctccccattatgcatatagaaaatgctagtatgttttgttcacttcatatgtaacaggtgcccttatgttgtgctgtatcctgtgctttttctgtgggaccattccattcaggagcaaagagcaccatgattccaatcttgtgtgtgtttactaacccttccctgaggtttgcgtatgttggatattgtggtgttttagatcactgagtgtacagaagagagaaattcaaacaaaatattgctgttcttcagttttgtttgtggaatttgaaattactcaaattt

SEQ ID NO: 2554 - DNA, 274 bp, Homo sapiens
gcttcgcagccttgcttgttttctctgaacagcaacagaacagtgttcacagcgattcaaagggtggcattgggttggacgttctgggtacaagccaacctagtcccacgttgtacgtgaatgtttaatgtgctctcaaaacatggaaaataagtttagtgcacatagctaaatcacaaaacatccaatttctctgtttcctcaggaagtcattactgcgccaccacatcacatgaccttaacatgatcaatgtatttctctgccttgacattt

SEQ ID NO: 2555 - DNA, 152 bp, Homo sapiens
  unsure (67): n=A,T,C or G
  unsure (128): n=A,T,C or G
  unsure (133): n=A,T,C or G
gggcttcgcagccttgcttgttttctctgaacagcaacagaacagtgttcacagcgattcaaagggnggcattgggttggacgttctgggtacaagccaacctagtcccacgttgtacgtgaatgttnaatgngctctcaaaacatggaaaa

SEQ ID NO: 2556 - DNA, 439 bp, Homo sapiens
  unsure (65): n=A,T,C or G
cggccgcagtgtgctggaattcgcccttagcgtggtcgcggccgaggtaaatagaaccatgtttnccatttctgtaggtaaaaggacaaagaagaattacaaacactttgggtctttcccgaattctctcccctttctctggtcaactccacccaccttcactctcaaaggaaaggcacagggggaaggaagtgagtgagggggctcagaagagtctgtgtggctcctaccaccccaaacatattctggtttcccgaagataagaggcaaggcttgctctgatctttcccagttctcagagtccagcaggccgctgtgctggacacatacatggatccaccaacatacatcagtccttctgtgttctctcctgcatggtagaggctggaagcctaagagctatattcctcagaatttcctgccagccaggatttgcttt

SEQ ID NO: 2557 - DNA, 244 bp, Homo sapiens
  unsure (217): n=A,T,C or G
tacgcctgtctccttccacctccacgtatggtgacatcactttgatagcttgacgtcagccactgggggactatttacatcatggatatgggcaaaagacaccaatctgagcttttgtccttttcttttttttggagtgcctgcacacccgtgagcctttccaacctcgtaacctattattttcctgacgagatagttttttacagatgagaaagtngaggcacagagaattgaagggacttgg

SEQ ID NO: 2558 - DNA, 241 bp, Homo sapiens
  unsure (32): n=A,T,C or G
  unsure (33): n=A,T,C or G
  unsure (34): n=A,T,C or G
ccagggctctccccatgagagaatcagagggnnngcaggacgtggtctatggtgagccaacgacacagtgagaaggagcaggaagttgctgtttctcctctgaccagcccacactccaaaggaaacagacgccatcctacacctatcagccctgcctgccaggagaacagaacacactcctggtctggatggggctgctgcttgagtgcagagggctgcggtaggccctttgcaggagtca

SEQ ID NO: 2559 - DNA, 533 bp, Homo sapiens
cctcccacggtgaagctcctaatgctcctggtataaaaaattttgctagcttagtaaaacgaattggaaaacttgactatgatctggaacagataagcaagaaggaacacataagtaagctgctttgctgccaggaaaataaaaacgaagtagctactatcaggtctcctaactaccctagtctgtaaaggaaaaataaaagtctttataaaattaaaataaaaatgtaattgcctatatccttattgccttaacctattttatttttctatatttcctacagatataagtattattcatagttccaagcaatgaacataatgtattttctccaaataggaattgtttatattcataattattccgctctcttgctaaacacatagttccacttaggttttttcttcttgctacttgttttataaaaaatactatatttttgaagcaaaaaaaaaatttacaccagcagcattaggagccctggaaggaggctttgggagccaaggcccatttgggatgcatgcaggactggg

SEQ ID NO: 2560 - DNA, 494 bp, Homo sapiens
  unsure (451): n=A,T,C or G
  unsure (468): n=A,T,C or G
ctgggcttcctttgtcgagtaggggttcagaaagctgtgaaacactcatttcccgcatcaggacttacttcggtcctggatgaagagtactgaagatacatgcctaaaatattcctaacaccaggatttgtgcatgtgtttccttccccaagaaagctataaacagcaaaaattctgctgtaagcttccctgtgtcctctctccctctcttccttccccctcccctaaaactaaaaggaatgttaaaagaccctttttctgtgaccagcggaccttatctatgctcccaattccaattccttgtgaacatactttgtaaagtcctgtaaaatcctgtctcttttgccatgctgctgcaaggtcataaagtagataaaattagataaaacctaagttgcaattctgtttttcctcaaaatctaagacatgtcacaaaataatttactggccnttgtttctctctctggnaacatcttcccaccaccatgtatttc

SEQ ID NO: 2561 - DNA, 282 bp, Homo sapiens
  unsure (9): n=A,T,C or G
ctgcagagncctctgtttgcgagcccactcagtcactgcacaggtgcttagccgagaggcggcacagtcggggttggcacctgcacccataccagccctgcctcctgttcgctgtgtggcctgagtggctggacctcactgtatctcctggtgggattgctcagaggtctcagcaaggcttggtgtggttaggatgagttattagagcagtgctgagctgtggcaagcacccgacatcagccactgcttgtgatatactgagcacctcctctagagagaaat

SEQ ID NO: 2562 - DNA, 167 bp, Homo sapiens
  unsure (6): n=A,T,C or G
  unsure (117): n=A,T,C or G
  unsure (138): n=A,T,C or G
gccatntctggggatgtaaaaaggttgtggaaaatagaatgcccagacccgtctacaaaaggtttttagagttgaaatatgaaatgtgatgtgggtatggaaattgactgttacttnctttacagatctacagacagncaatgtggatgagaactaatcgctgatcg

SEQ ID NO: 2563 - DNA, 285 bp, Homo sapiens
  unsure (12): n=A,T,C or G
ctgagacccctnccctgtgagcccttctatccccacaagttgtcaggacaatcccttgtggttagggggaggggcggggagagagctctatttctcagccagtgccaagctaccctccctcctgggctgtgatttcatttgtgcaatgggggtgtgcaggagtcactagcttctcggggcctgtcccgcacatacacgcacttatgcgacatccagacatttgctacattttccaaagggcttggcctctcccctccagccttcaaaagggagggcaggacacat

SEQ ID NO: 2564 - DNA, 382 bp, Homo sapiens
ctgcagaccgtccctcaccaacccagagaacctgccttactttgcccagggacttcctccccatgtgaacatggggaacttcgggccctgcctggagtccttgaccgctctctgtgggccccacccactctgtcctgggaaatgaagaagcatcttccttaggtctgccctgcttgcaaatccactagcaccgaccccaccacctggttccggctctgcaccctttggggtgtggatgtcgagaggcaccacggcctcacccaggcatctgctttactctggaccataggaaacaagaccgtttggaggtttcatcaggattttgggtttttcacatttcacgctaaggagtagtggccctgacttccggtcggctggccag

SEQ ID NO: 2565 - DNA, 230 bp, Homo sapiens
cctcagtttacccatctgtaaaatgggtaagcatagccactggtgggatattttgggatgtcaaggggtggaggcagagcacaagtcacaccagaaactgctttttatacattttgtataaggacaactctggaaacaagcctatttcctccagccagtttcactgaatgctgcaccacatgctacaccagttcagcgtgagaattttctaataaatcttttctgatact

SEQ ID NO: 2566 - DNA, 293 bp, Homo sapiens
  unsure (11): n=A,T,C or G
  unsure (12): n=A,T,C or G
aaaagtcttannattgtgaaaacataaacaacaaacctggttgccacattctgttgaagtttgaatccccttggaaattcccatgattgtttggaccagattccattgtagacatatcttgtccatttggcatcattcctggtggttgttctaccatgctttgctgtcctgaagcttctctttgggcaatccaagcttgggccaatgcacccaatcaatctggcttggatcctgttggtgcttggaatgactgcatccattggtgctggttcaagggccactgctgcaagggc

SEQ ID NO: 2567 - DNA, 293 bp, Homo sapiens
aaaatctctggtatttaaggtcaacaggaagaaattgtcctgaaaccttccatccagctttaccaggccctaaccactctcgccaggcggcagcaggctcctgcccagccccaatccagcctcacagttatgatggagctgcagaaacacgagcccttttcaagggggcatttggagtggaaagccctgggaaggtaacgctcacactccaaggccacactcctccatctggacaaacacacaagcacccccaattgtattggaagtactgtcaagagctcaaaatgcccacc

SEQ ID NO: 2568 - DNA, 309 bp, Homo sapiens
  unsure (12): n=A,T,C or G
ctgctgctgccnttgaccatcctgaactctgggggagaggaggagtcagcctggcttgcagacggccgacccagaacatggctgtctgtggtcatttccttccttcacacccagtgggatgggcacagagcccagccttggtctcaccagctcccccaccctcctctgcatcagcatccagctcacacagctctccagaagagtttgatcttagctgcagccttggggtacatcactctacacccagtctcttccctgcgcttctttcaaccaacagaagcaaacatcaaaagcacccacacctactgg

SEQ ID NO: 2569 - DNA, 295 bp, Homo sapiens
  unsure (176): n=A,T,C or G
cctatgaggagtatgttttatctgttgggaatttagatgagcggatatttcttggagaggatgctgaggaggaaattgggactctctcaaggtgtctgaacgctggttcaggaacagagactgctgaaagggtgcagatgaaaaacatcttacagcagcattttgacaagtccaangcacttagaatctcccaccactaactggtgttaggtacattaaggagaatagcccttgtgtgactccagtttctacagctacgcatagcttgagtccgtcttcacaccatgctgacagg

SEQ ID NO: 2570 - DNA, 290 bp, Homo sapiens
cctttctactcaggctaatgacaaacacaataaaggcagatatgctagtttaacataattggctgattttatacagcacttatatcttttagtccacaagtatattattaaatgatagagaacatctaatacaaccatttctacagaactaggaaataaatttctaagaaagaaagattttacagaccccatcttttatacccaccccaacagtctaactctaaagaggataaagccaatgactttcctcacaagagctcacgactaacgtcggcttttgctatcaaaaa

SEQ ID NO: 2571 - DNA, 301 bp, Homo sapiens
ctgttaggtatgttaacctgtaattaaaaggctgtggcaacttcagttccatgacgacctccgactttaacacagtctcgaggaaatttgtccaattgttcatatgccagccgcccatcttctcccagagacaagagggtttctgagccacatttctgatttcttcagtatcagattgacacaatgtcaccagcattttaatgctttcagtagcctcaagggattttcagagcccagcaagcttgcttttcttggagcttggaggtttgtcttttgttagtgcttcacagtaatagaagca

SEQ ID NO: 2572 - DNA, 292 bp, Homo sapiens
  unsure (11): n=A,T,C or G
  unsure (233): n=A,T,C or G
  unsure (260): n=A,T,C or G
  unsure (266): n=A,T,C or G
  unsure (268): n=A,T,C or G
  unsure (271): n=A,T,C or G
aaatgaacacnttccagacaatgtaagacagtcaaaagacaaactcaaatccctgagaatggctgggaagggaagatggtggtaaaaattccaaatgagtgaaacttacaaagggcagtctcccctgcctgggctctgtcctagacagaagtgacagtgatgacttttggtgatgttctccccagtgcagaagacttgctttcagaaattagacaacctcagtgggcgaagtntttctcctgcctgcgtaagctgcagcnctgtcnanaanagcttgaaccagagccagcag

SEQ ID NO: 2573 - DNA, 307 bp, Homo sapiens
  unsure (58): n=A,T,C or G
  unsure (214): n=A,T,C or G
ctgcctctgtaacctaggccgagcatattgctgaggaacggggggtacaaggtgccanaggattgggtctggtggacaagaaacaagacttgtggtcacaattggcctctggccttggagaaagctgtaaatcttatctgaagcagagactataaagaagtttctccctgctgtcaagggtacattgttgacaagcaaatggtgtttcggttantaacggttctaagtgcaatgagttgtgttgaagcctccgtctcccatccttgcctgtagcccgtagtcacttgtgcagtgaggacatcttttt

SEQ ID NO: 2574 - DNA, 103 bp, Homo sapiens
  unsure (89): n=A,T,C or G
ctgttaattgcagttactctgcggaatttccacttctgctttgtacagttccttgtgtgaatttttacatcatgtattacttttgtagntggggaaaaagcaa

SEQ ID NO: 2575 - DNA, 306 bp, Homo sapiens
gagcttgaagaacagattgagggctgtacgcagcaccaggatcatgtgcacaggctgcaggtttgagtgggtgaaataggctgccatctcacagatgcgcttctgctgttctagagtctctttgggcagcttcttcctttctgtctccacggacaaacccacaatgtactcacggcaaatggtgatgagctgctgggcctctgcaatctcttgtttattgccacaacaagaagtggcacactgagaaggatggaacggaatttttccacagcctcctcaaatttgccaactgtggtgagctggtag

SEQ ID NO: 2576 - DNA, 311 bp, Homo sapiens
acttaatgtgtattttgcattgtgatatttaatcaagacattaacatgagtagaaggttgttgatttaagacaagtttgagatccactaaaattaattgttgtatgtttgtccttctggtggctgtggaagcttcatattttctttggacatcattagacgtcttagctcttgaagtacaactttaatgctatatgaattttgccattttgctaacactggtatgctccgggcatccaccatcccactggaattatttattccgttcatattaatttttgttacaaatctaactgacggaggagcttctgg

SEQ ID NO: 2577 - DNA, 263 bp, Homo sapiens
  unsure (13): n=A,T,C or G
aaaatgttcttantgctgtgttataagctttggtggatgtcactcctttaatcctcacaacaccctgtcgggtagtcatattttgcaagtatggaagctgaggcagggcaacatgaagtaacttacataactcatacagtaatttgtgcagttgggagatgttcagccttagtccctggctaattgcctgttcttttccagcctgattttttttcccacaggaagagcccacatgtagccctgaggtttccttcccaggacag

SEQ ID NO: 2578 - DNA, 217 bp, Homo sapiens
ctgcagattttcccacatgtcagagcgagacctgcaggagctgagcatccaggtggaggaggagaggcgagccagggagtggctactagatgctcctgagctccccgagggccatctggaggactggctggagaagagagccaagcggctgagctcagccccaagtagcagggctgaacccatcagaaccactgtcttccagtaccccgtgggctgg

SEQ ID NO: 2579 - DNA, 467 bp, Homo sapiens
ctggtacacggcagggtcagggttctggatatcaggtaaaacagtcaattgtgtcccagatccaaaggtcagttgccttgcagaaccagaagactccatgtcacccacgaggcagtagtacacagcagtgtcgctcagggaaacccggggcaggctcagagtgctggactttctgtcggcagggataaacagggaggccacttcgtttgtaacttttgtcttgtatccttgaataataaatcgtggtccttggctgggaaactgttggtaccacgtgatataatcatttgtagcaatgttgttgtggctacaggttatgttcacttcttgtccttcatatgagtccatggagatgggctgggtggtcttagcaaggctcaaagtactcagggtcaggaacacgatcactctcccacttgcctcatattctaggtgcaaactaggacccaggttctaggctcttttgc

SEQ ID NO: 2580 - DNA, 221 bp, Homo sapiens
ccatcttctggtgggtccacacagtcttctccatgtgtatccttccttcagtttcccttatagggacaccagtgatgtcagattagggatcgaacccaacaacctcatttgaagttactcacctgtttgaaaaccctatgtccaaatacagttatagtgtaaggaactaggacttagggcttacaaatatggagtggggcatcatccagaccataccattt

SEQ ID NO: 2581 - DNA, 231 bp, Homo sapiens
ctgggcctgcccggggaagtccttgcaggtgggaggccatacagagacccactgtgtgccactgagcgtcccactgctgctgggcaactggaggactgcagggggcgccaggtgactctctccttttatatcacagcagctcctgtgctgaccttcaagttacgttttggaactgtaatactaaaggaagaaataaactactaatttgtataatattctgcattgaaattc

SEQ ID NO: 2582 - DNA, 485 bp, Homo sapiens
gaatgaaccaactgcaacaaggaggtcacctgtgtgcactgctcatcgctcaggttggctctctcttgggtcaaactaggtgattcacttctgtctgccgccatgatgccagccatggtcacagcaccaataatcccaatgagcttgtacttgaatacggtgctagagagctgctttcttatcaccaagtgcatgtcatcctggatgtggctgctggcttcattctgtttgctaaatgccagtgtgctgagaacatagaagagttttcgtatttgctgaggggatatgttatccagataatctaaaatgccctttacaaagacagcattcatcatcatagcagatggatttaacactaccaactctagaagggacatctaaaggcagtatcaacttcagcttcattcccactgcagatatgggtcactaaggcaccaaccactttctgctggcagtacgtgtcaaaaaacttaaatgcatatttg

SEQ ID NO: 2583 - DNA, 247 bp, Homo sapiens
cctggaaggtgtgcaggagtttggtagaggagtgatctaggtgaggggaatggaaggtgcagagaccagagctgagagggcctgaggcactttccagagcgtggggaggggcctccaccaaggcgagaagggctgcaggtccagatcaccagcgtttgtagacagtagtgtggcgcttggagtttacctgagggccagtggagctccagggacctatcaggacggggacctgtggggactgggaagg

SEQ ID NO: 2584 - DNA, 234 bp, Homo sapiens
ccaggatggtctcaaactcctgacctcaagtgatccatctcagctcccaaagggctggggttataggtgtgagccactgcgcccagccagctattggtattgcctatctttttgacagacttccttgtggttttgatttgtatttccctgaagattaataattttgagaatcttcttgtgcttattggctgctaacttatctttttcagagaaatgtctgttcagatcctttgg

SEQ ID NO: 2585 - DNA, 237 bp, Homo sapiens
gcgtgggatggggattggggtgagatggatgggagccagctggagctcgtcttccctaacatagcctgggagaccaccccttgccacttgggccacttccgcctaccccacttttcattttgttccaaaatagttgcagatcctgacagaatcaaaactctctgcctcaaacacacatcctggcatcgcactgttagcatttaacttcttgttaggattcagggaaggaacagttgg

SEQ ID NO: 2586 - DNA, 138 bp, Homo sapiens
  unsure (36): n=A,T,C or G
ccatgttgaacaatacatgtaggttctttttccacncaatgtaagaacatgatatactgtacgttggaaagcatttaccttatttatatacctgaatgttcctactacacaaataaacatatattaaattctaaaaaa

SEQ ID NO: 2587 - DNA, 320 bp, Homo sapiens
ctgccacttcaggcacttacagtggtcacccaggattcaggagatgcatattataagtaactcagttctgtaagagctaggagttagttcacactgcttgggctctcactaagtaagcctgtgcaatgcaggcaggaagggggaaaatgcttacaaaaaagaaatgagtagattcttgccttaggaaagtcaacgggatacaattcctgatggaagagcagttgctattctaagagctaattaacaagaaacaatgctgcaaaaaacttgggagacaggacggcagaacacacccagatggcctgtgggaaattcccagg

SEQ ID NO: 2588 - DNA, 247 bp, Homo sapiens
ccttcccagtccccacaggtccccgtcctgataggtccctggagctccactggccctcaggtaaactccaagcgccacactactgtctacaaacgctggtgatctggacctgcagcccttctcgccttggtggaggcccctccccacgctctggaaagtgcctcaggccctctccgctctggtctctgcaccttccattcccctcacctagatcactcctctaccaaactcctgcacaccttccagg

SEQ ID NO: 2589 - DNA, 145 bp, Homo sapiens
  unsure (91): n=A,T,C or G
aaattgtgttttatttatccgtagaatttatatttatttcattcctttcatctcactgaaaactgtctgcaggccctttgatttggattanatgtgtgaagtactgtcttttgccaaaaacctcaaattacctgttcttttcaac

SEQ ID NO: 2590 - DNA, 174 bp, Homo sapiens
cctttccttgagctgcacgtgaacctgtgtgggcaggcagcgtttgcaggcgtgtttacgggcaggcagcgtttgcaggcgtgtttactggcaggcagcgtttgtaggcgtgtttacatgcaggcgtagcaccatgtgagaccactggtccagggtttcagaggtcctgctcag

SEQ ID NO: 2591 - DNA, 189 bp, Homo sapiens
ctgctggtggatcagatatacgagaacgccatgattgctgctggacttgttgacgaccctagggccatggtgggccgcttgaatgagctgcttgtcaaggccctggagcgacactgacagccggggggccagaaggactgacaccacagatgacagccccacctccttgagctttatttacctaaattt

SEQ ID NO: 2592 - DNA, 235 bp, Homo sapiens
ccggcttgcttgttctctctttcctagcccaggagtcgggtccttgggtctaaagcacagggccaagttctcaaggatcaacatcccagacagctcccatggtctggggcttggagctggtatgaagggtgaaccaggttccatcctggactgtttatggttggagggcctgggcccctggcaccaggacctcagctccctctcctagtaagagctgggatcacccacaggccag

SEQ ID NO: 2593 - DNA, 131 bp, Homo sapiens
atgaggacaccctcggcacgggaacccattcacttagcgtttgctccagtagctttccctctgctaccaatgcagataaacgcggcttgttttactcaggcaagagaatgtgaatagtgccaagaaaatcc

SEQ ID NO: 2594 - DNA, 271 bp, Homo sapiens
  unsure (5): n=A,T,C or G
  unsure (237): n=A,T,C or G
ctggnggccagtggagccaggatgaggctgaggccatgagtaatggatggaaccatgcaggcaggtctggggcacaacatcccctgcaggagggtgggcagcagtggctggaagtttctcttgattttgggatggacaacagaaaaaaacaaaaagccagtcacagggacccagagagaaggaagggagatgtgggcaggagacagacacagagcatgtgtatgggcaaggaagacncagggagactatgtgtgagcttcagaactgcaga

SEQ ID NO: 2595 - DNA, 136 bp, Homo sapiens
  unsure (99): n=A,T,C or G
aggcagttcctaccatgtacccctctcaggctgcctgcctgacaaggtcagcatcatttgctctcctgaatttatgaggtttatttatttttctctttnctactcctattaaagaacctcgtcccagtgaaaaaaa

SEQ ID NO: 2596 - DNA, 101 bp, Homo sapiens
aaactaaaagccttaattaaagtggtgcaattttgtataacttagcatcagtagttcaataaatttggattgccatgcaagggcttgcattataaaaaaaa

SEQ ID NO: 2597 - DNA, 101 bp, Homo sapiens
  unsure (77): n=A,T,C or G
  unsure (86): n=A,T,C or G
tggcttcatttcaggtttagttgatttctccaccaaatgcatgtcatgtattctcaataggctgtattcccagcagncaataaatnaacacccgtaaaaac

SEQ ID NO: 2598 - DNA, 109 bp, Homo sapiens
tgtttgctgatgggcagggacacccctgcagggtctcgggctctgagcccaggacattccctgccccttgctcaccttggctgtgggctgtgaacattccgggaccctg

SEQ ID NO: 2599 - DNA, 239 bp, Homo sapiens
ctggcctgtgggtgatcccagctcttactaggagagggagctgaggtcctggtgccaggggcccaggccctccaaccataaacagtccaggatggaacctggttcacccttcataccagctccaagccccagaccatgggagctgtctgggatgttgatccttgagaacttggccctgtgctttagacccaaggacccgactcctgggctaggaaagagagaacaagcaagccggggct

SEQ ID NO: 2600 - DNA, 96 bp, Homo sapiens
gagactccatctgccctgggcaggttcctgagccttgggggaccagttcaccctacatcccaggcttctgttgtcccttgcctgcctgtaaggaat

SEQ ID NO: 2601 - DNA, 506 bp, Homo sapiens
cctgaggagactgctcactgcaggaatgaaccaactgcaacaaggaggtcacctgtgtgcactgctcatcgctcaggttggctctctcttgggtcaaactaggtgattcacttctgtctgccgccatgatgccagccatggtcacagcaccaataatcccaatgagcttgtacttgaatacggtgctagagagctgctttcttatcaccaagtgcatgtcatcctggatgtggctgctggcttcattctgtttgctaaatgccagtgtgctgagaacatagaagagttttcgtatttgctgaggggatatgttatccagataatctaaaatgccctttacaaagacagcattcatcatcatagcagatggatttaacactaccaactctagaaggacatctaaggcagtatcaacttcagcttcattcccactgcagatatgggtcactaaggcaccaaccacttcctgctggcagtacgtgtcaaaaaacttaaatgcatatttg

SEQ ID NO: 2602 - DNA, 105 bp, Homo sapiens
ctgcggccactgcagcagccatgaagggcagtgggtagaggagtgcaggcaccctgaccagcagagattgctgcagaaataaagtctgcttggctcttgggaaaa

SEQ ID NO: 2603 - DNA, 190 bp, Homo sapiens
aaatttcaattaccatacattagtctattctaataatcttccaataatgcaaacttttactcaggatcttggtagaatatcaggaaaaccatttcctggtataatgattctctgtaatagagaaatcctatacatcgtgtagggtgaagggtagtttttatgtaatagttcactttgagctgtctagcag

SEQ ID NO: 2604 - DNA, 256 bp, Homo sapiens
ctgagagactctaaatccagtgacaagtctgtctgcctattcaccgattttgattctcaaacaaatgtgtcacaaagtaaggattctgatgtgtatatcacagacaaaactgtgctagacatgaggtctatggacttcaagagcaacagtgctgtggcctggagcaacaaatctgactttgcatgtgcaaacgccttcaacaacagcattattccagaagacaccttcttccccagcccagaaagttcctgtgatg

SEQ ID NO: 2605 - DNA, 349 bp, Homo sapiens
ctgcagatcctgcggaacgtcacccaccacgtttccgtgaccaagcagctcccaacctcagaagccgtggtgtctgctgtgagcgaggcgggggcgtctggaataacagaggcgcaagcacgtgccatcgtgaacagcgccttgaagctgtattcccaagataagaccgggatggtggactttgctctggaatctggtggtggcagcatcttgagtactcgctgttctgaaacttacgaaaccaaaacggcgctgatgaagtctgtttgggatcccgctgtggtacttctcgcagtccccgcgcgtggtcatccagcctgacatttaccccggtaactgctgggcattt

SEQ ID NO: 2606 - DNA, 463 bp, Homo sapiens
aaaacctgaactactgctggcaatagtctataaactgggctcaaacttttattgattttctgtgtctggttataaaaataggaagggtccaaggcaacaattttagaaaataaaaccagaaatcagttgggatattccagcccaaagactgccacctaatagactgttccccagtttttcaccattactaaagtgaatgcaaaactttcgtatcactgtattcttacctaaggcttcccactgcctataggataaagtataagccccattcagggagcatttacctactttcccagtcttatgacctgcaattccaagagtatcatcctcacagatactctttgctaacacctctccctttatctgctatgcagactcctctaaatcctaacactgctcaaaagttacctcttgtgtgaaatatccctggcttctctcctgtctcactgtgtcctctccttta

SEQ ID NO: 2607 - DNA, 218 bp, Homo sapiens
ccaacttccacctcaacgacctggaggcgccgcacgaggacgacgctgagggggagggggagtgggactgagcgtccgcagaggtgaccgaaaagccgtatgatgatgttcccgatttctctgttggtcggagtcggccagttgcctgaagtagggaagctgagtgtgtcgctccctggtccactgtttctcctataaatgtaaatgggtcaaaaaaa

SEQ ID NO: 2608 - DNA, 359 bp, Homo sapiens
  unsure (11): n=A,T,C or G
  unsure (12): n=A,T,C or G
ccacgggaagnnatgataactgcgcggcattctttgagggacccccattcaagttcaagttcacaattggcgaccacagccgctttgtcaactgtgtgcgattctctcctgatgggaacagatttgccacagccagtgctgacggccagatatacatctatgacgggaagactggggagaaggtgcgcgcgctgggcggaagcaaggcccacgacggtgggatttacgcaattagttggagtcccgacagcacccatttgctttctgcttctggggacaaaacttccaagatttgggacgtcagcgtgaactccgtggtcagcacatttcccatgggctccacggttctggaccagcag

SEQ ID NO: 2609 - DNA, 227 bp, Homo sapiens
  unsure (18): n=A,T,C or G
  unsure (39): n=A,T,C or G
  unsure (173): n=A,T,C or G
  unsure (182): n=A,T,C or G
cctctcctcctgctcgcnaagcctctccttttgcccacngttcaggagactgatgcactgattgttttccacctgagcctggagctctcctgccactctctccagctccttcctcaggtcttgcagctccacctcagaggacactgctggggcatccgggggcagtggctcanccatctggnttttgagtctggacaagctcctctccagctcctctacccgatgcg

SEQ ID NO: 2610 - DNA, 318 bp, Homo sapiens
  unsure (9): n=A,T,C or G
ctggctcanggaaagcacacggggagcgctcggtgctgcgagctgaaatagccgctgttttcacagaacgcccttttcacttgcaagagcgctggggaagctagttattcagtgttgggtatttggtagacgtctgattaaaaatgaatgatgtaagcctgtcacttcaaagaaaacaacacgactatttgctgccaatgatgccatctgagactttaagcaaaaatcagaattttggaaaacttacacttgccactgtgagcttgaaagagttctgatgctccaagccctccctgagagatcacaaatgcagatttt

SEQ ID NO: 2611 - DNA, 421 bp, Homo sapiens
ccaccaacagtcagaggccaaggaagctgttggctgaaaaggtggtctatgttggcgtctggatccctgccctcctgctgactattcccgacttcatctttgccaacgtcagtgaggcagatgacagatatatctgtgaccgcttctaccccaatgacttgtgggtggttgtgttccagtttcagcacatcatggttggccttatcctgcctggtattgtcatcctgtcctgctattgcattatcatctccaagctgtcacactccaagggccaccagaagcgcaaggccctcaagaccacagtcatcctcatcctggctttcttcgcctgttggctgccttactacattgggatcagcatcgactccttcatcctcctggaaatcatcaagcaagggtgtgagtttgagaacactgtgca

SEQ ID NO: 2612 - DNA, 323 bp, Homo sapiens
  unsure (10): n=A,T,C or G
  unsure (12): n=A,T,C or G
aaaggaaaantnttttgacatttacatgtcaagacagtagaatcccctacgtaagagatcaatggcttgtttttcccatgaagttcagggactttgaaattaaatgttcccctttgttccttttcctctcgaaagaaacaagaataacttcccatttgtttgctattaatgatggtgaacctgtattgggtatacaaggtgcttcctgttgcactgacaagataattattctcaagttgttcaccatcttttttccaagtcacatttactgcattcaaatccccagatgttgtgaactggcatgtgagatttacattagaagg

SEQ ID NO: 2613 - DNA, 269 bp, Homo sapiens
ctgagctgcggctggagagccctttacagtgcttctgtcctgccacgcacagccagtactccccacctctcacatcctgcccacctccgcccagcctcctggacagatgtcctagagccacagaggagagatgcccagcgtctcatcagcgtttccctcgtcctcccaggggagcctgtggtgcaggctggtgggatgctgcctgatggggagtgtagccccttgagaaagtattgagaccctaataaccccacaccctcaggaggcag

SEQ ID NO: 2614 - DNA, 533 bp, Homo sapiens
gtgaatgttttactttccaaagtgctctcctctgcaccagcagtaataaatacaatgccataatcccttaggtttgcctagtgcttttgcaattttcaaagcacttccataagcattccttccacctccttgataggcatttatggaaagcctgctacatgtcaatcatactgttaggcacaggggacctaaagacacataaaaggatggcattctgcctcataaattgcaaaacctaatgaaagtgactgcttggtaaacaaattattattatattataaaatgctataaaagagccatattgaaagtgccctgttggagacagggcaaatgccacaaaaatgatgtaaatttacatggaggaaaagtagaatctgcctggtttgtaggcagcagaagacatttttcatcagtgggcaggtgttctttaccttttgtagaaatgggagtcaagtctcaaataggaggctccacaaaatctcatgccaggtctctgataccttattcacagaagttctttgaagtatttattg

SEQ ID NO: 2615 - DNA, 441 bp, Homo sapiens
ccaaggcatcatggtgcgtggtccccttgagagacttgccgttgatggaaagaacctcattgcccttctgaatagtcccttcctgggaggccagcccatttggaaacactctgtgaaccgtaatcaccttgttttctagatctgctcctcctgccaagctgaacccaagaccagcaccttcctccttgtgtaagatggtgacatggatgccgtctaattgctttaatgttgcttcatccagaaccttcacctcctcgatgagttttttaattcttctgagctcagcagggagataacggactgaccagactgaagggaactgtggtccccatcatcgtcttccttggcttccgtgagaccctctgtatattctctcagccctgaaaggttgagcgagaaccctgtgtccaaggcagatgtttcaagcagaaccatttgcag

SEQ ID NO: 2616 - DNA, 302 bp, Homo sapiens
  unsure (88): n=A,T,C or G
  unsure (291): n=A,T,C or G
ctggaccacagccgcagcgtcatgagcagattaaacccggccactttcaggaggaggattcggaacccaatcactgacaggttttganagtttaggttcgtatctgtttcaaagcttttctcgaccagcttgacatcacaggaactttctgggctggggaagaaggtgtcttctggaataatgctgttgttgaaggcgtttgcacatgcaaagtcagatttgttgctccaggccacagcactgttgctcttgaagtccatagacctcatgtctagcacaagttttgtctgngatatacacat

SEQ ID NO: 2617 - DNA, 369 bp, Homo sapiens
cctgtggctgaccacagataccagccagcagtggggaaccaaacgctgtatctgtttgtgctcttatcaatcaactcaacatccacatttccttcaggccccagaaactgacgatttttataatcttcttcgatctcaaaacagactttagaagcataagaggaaactatttgattctcttctgagcaaatgtctcctgaatcttgtccctctgaagattcctgctcttctgatacactggaggttgggatccccatgttacaaaaagatgaaaaacatcaagaatcagttgatgaagatgaagacgatgttattgaaaactagagctgcactgtcccgtagagtagccgctacccggatatgctattt

SEQ ID NO: 2618 - DNA, 341 bp, Homo sapiens
cctggttcacccttgaaagaaaggatggctaggggtaaacaagacgagcaagtccctggaatgcagggagccaagaagggcagccgaggataaggctctgcctccccaccggcgagggtttcctttccttctggtcattaaaactgcacagcccccggggagatgttgaacatggcagggtcgaatcgctggcctcggaagggagaaccttcagcatcccaccccttcttcagcatctcatggactttcagctcatggctctgtggcttgccctgcagcttctggtggtaagtcaaaggtaagcctgtccaacaccgcctgttcctcctcatccacggtgg

SEQ ID NO: 2619 - DNA, 354 bp, Homo sapiens
ccatagtcattattctaactgatatgtctataaagttgcacccccagtccgttgagccttggtatttgttgtaaattctcctttcacagcgattgttaaatctattcgtgccctgagatgtatggctttatgctgaagattggctggatgcgtcctctgatgtgtgttgtaggaatttaatgtggttgtctcctgcttttattatactgtgacttgttaggaaaccctgggcctcatttggctctcccttgggagaggttgagggtgcacctttatgaacatggaaaggtttatcacagcaagttaacccccgcttgctcctcccctctataccaagctcttctggtttttcac

SEQ ID NO: 2620 - DNA, 211 bp, Homo sapiens
  unsure (50): n=A,T,C or G
  unsure (88): n=A,T,C or G
  unsure (120): n=A,T,C or G
  unsure (130): n=A,T,C or G
  unsure (133): n=A,T,C or G
ccagaggtcccggcccgtggatgcttctgtggatgaacccctcccagacnccccaggcccttttggaggaggactgtgtgcagctcangctcccggctccagccagccaccctcacgctnctatgctgtnaanacgtcctcagggtccaagctcaagtctttttgccccctactactctgtgccaggcatcattctaagtgcttgtttgtt

SEQ ID NO: 2621 - DNA, 358 bp, Homo sapiens
  unsure (25): n=A,T,C or G
ctgacagttctccatggcaactcantcctccagcagacccctgcatacataaaggtgcaaaccaacaagatggtgatgctgtcctgcgaggctaaaatctccctcagtaacatgcgcatctactggctgagacagcgccaggcaccgagcagtgacagtcaccacgagttcctggccctctgggattccgcaaaagggactatccacggtgaagaggtggaacaggagaagatagctgtgtttcgggatgcaagccggttcattctcaatctcacaagcgtgaagccggaagacagtggcatctacttctgcatgatcgtcgggagccccgagctgaccttcggggaagggaactcag

SEQ ID NO: 2622 - DNA, 352 bp, Homo sapiens
ccaggcacaccagtgtggccttttgggtgtgggagatctctgcttctgatggctcaaacacagcgacctcgggtgggaacacgtttttcaggtcctctgtgaccgtgagcctggtgcccggcccgaagtactgctcgtaccccgcgctggcacagaagtacacagatgtttgggagggagcagccgactccaaccccagcaggaaattctgtttttttaatctggagacattgtagccatcagggacctctcctttggcagttgtaccctcaccaactgagtaatgaatcagcctcagccccatgcctgggtcttgtcgataccagtacatgtattcatggttcatatcctg

SEQ ID NO: 2623 - DNA, 395 bp, Homo sapiens
ctgtcagcgtccagttgggaggagtgtgcagaatgatgggggaggtacttgaacagcctgacgtcgggcagggggagatacccggcgaagagcggcatcacttccatgtggaccctgtgagtggcccgagcagccactggcatggagatgacaccgcagcttttcccacacactgcccagttgctactgttgtcgacaacttcatacataagctttgtcgaaaaatgctcatcagattcagtcagtgcttcatctttatccacctccaagaggtctgagagccccgtgatcaaaacctccagggagcagagggagcctgttctgcaatactccattcccgaagggggaaagatctcagccttcacgttgtataatgtaaaaaaattttccacctt

SEQ ID NO: 2624 - DNA, 284 bp, Homo sapiens
ccatactctagccaaatgttaggacaaatgtaatccttcacggctttctcaaagaggtcatacacgtgctctctgtccaggccatcctgggccatgctgatctcgtcatgcagccactccagccagagctcttcagtcaagggaaagatttcactcatcttctggcgggccatcctcaccttggtaagctccccttccagcctgagcagtctgatcaagtccacatggcagttgtagtcatagacgttgatagacaactgctcctccagtctctcaatctccag

SEQ ID NO: 2625 - DNA, 326 bp, Homo sapiens
ccactgcatgaccagggctggcaagaagctgtgtaacagagggctgcctttagtttgtggcaggcgtcatcgttccatttgcctgcatctttgtttctcttgatatagatctccacgcagtcctccttgttcttcttgttgttgggctcaccatctccccagttctctgcttcttcagtaagagatttgttggttcccacccaccgtccatattcctcctatcttccggattcctatccaagtagtaagaacgactgaaaggcagagtcttctccagaaactcaatttccgccctgttttgtatggcaactaaatctgtgtaattg

SEQ ID NO: 2626 - DNA, 376 bp, Homo sapiens
aaatatcagtaatagttcattaagtaacatagtagctaagaacatggactatattttcacagcacagttcagcttaggcacacctttagtttggattattggcattctcttacgtaggaattatatcattgtagatatgtaattatggtaataagcaattttcataaccatgctcactcagactatatcatttgaaactaccatgtttccatttttgacaattcatgttcacaaaacaacaggaacaatttcctatttggtataaagagcaaaatttccaactttgccccaaaatgccatgggtggcatattgccatatgattatatcatatatttaatcatgtatgggaaagattttggattttttttcttattt

SEQ ID NO: 2627 - DNA, 266 bp, Homo sapiens
ttgacaacgacaacagtttgcaggtaaatgctcttgtctttcagtcttcctaatttctctaatattgccaaattttctttttcaattccttcatcctccaactttttcccactaatgggctctgctttcatctcgtagtgatctaagtcttctatatcctgtggagggggctggtgaaggagttttcagtcccgggcaccctgggctgtgctgaaagcctctgcgtcacactgccgtgagttagctgggaaagagagctcccactg

SEQ ID NO: 2628 - DNA, 179 bp, Homo sapiens
  unsure (25): n=A,T,C or G
  unsure (51): n=A,T,C or G
  unsure (115): n=A,T,C or G
  unsure (168): n=A,T,C or G
cctgaaggacccagggccctctggntggatgcgtttgcctatcaggacccnccaattacttacagacctgtttagggctaggcttggcctctttcttgagctcatctggaggggngtggcaacactcattcttcatccttattctccctggctgtgggcaacactggncctcagtgtca

SEQ ID NO: 2629 - DNA, 160 bp, Homo sapiens
  unsure (10): n=A,T,C or G
atgagaccgngacttgccagccccacagagccccgcccttgtccatcactggcatctggactccagcctgggttggggcaaagagggaaatgagatcatgtcctaaccctgatcctcttgtcccacagatatccagaaccctgaccctgccgtgtaccag

SEQ ID NO: 2630 - DNA, 338 bp, Homo sapiens
  unsure (25): n=A,T,C or G
aaaagctaagcttaccagaaagcanagagatttaatatgtcaacttgtccacaataatgccaagatgaaaaatgacaatgagtcttaattattttgagtcaaatatttcagttcaagaaaatacaactacaggatttcctacaccacacaccaatgggattcatattcattatgcaaactatggtgacagacactcagggctgtaaagtaatttgccttgagtgtttcagtgactttcaccaagtttttggatcctggagtaatcagtgcaaacaagccataaagcttcagtagcaaattactgtctcacagaaagacattttcaacttctgctccag

SEQ ID NO: 2631 - DNA, 167 bp, Homo sapiens
aaagcagccgcaaacatggtttccacaactgcattcctgaagcgcatacccagagttacttcttgtaacagcactttcttccagatgactgagatgcgtctgctggtgataagatcagattaacctatttcaacttgatagctagattctgacacactgaagaaaaa

SEQ ID NO: 2632 - DNA, 201 bp, Homo sapiens
  unsure (12): n=A,T,C or G
  unsure (50): n=A,T,C or G
  unsure (124): n=A,T,C or G
  unsure (145): n=A,T,C or G
  unsure (148): n=A,T,C or G
  unsure (195): n=A,T,C or G
ctggcgagcagnatctcttctgggaactgagatgccatttcaggaagaanccactttctttagtttgcatgtaacttacgagagtgtctctcaggctccactgagggcggaagcgctcctcggnttgggtttgggggttctttanttncaagattatcatttcgtgcagctctagcaggaaggcgtctaggccantctgat

SEQ ID NO: 2633 - DNA, 265 bp, Homo sapiens
ctgagcagcttttctccccccatatctgcgtgcacttcccagagcatcttgcatccaaacctgtaacctttcggcaaggacggtaacttggctgcatttgcctgtcatgcgcaactggagccagcaaccagcacatccatcagcaccccagtggaggagttcatggaagagttccctctttgtttctgcttcatttttctttcttttcttttctcctaaagcttttatttaacagtgcaaaaggatcgtttttttttgctttttt

SEQ ID NO: 2634 - DNA, 349 bp, Homo sapiens
ctgagatctgcaagattgtaagacagcctgtgctccctcgctccttcctctgcattgcccctcttctccctctccaaacagagggaactctcctacccccaaggaggtgaaagctgctaccacctctgtgcccccccggcaatgccaccaactggatcctacccgaatttatgattaagattgctgaagagctgccaaacactgctgccaccccctctgttcccttattgctgcttgtcactgcctgacattcacggcagaggcaaggctgctgcagcctcccctggctgtgcacattccctcctgctccccagagactgcctccgccatcccacagatgatggatctt

SEQ ID NO: 2635 - DNA, 283 bp, Homo sapiens
aaatttggattcaaagtacttagattttctggaatcccattctacaatcttctggtcgaaagtataaaaccaggttagttgtttgtagttctcaggcaggctctcagagatgttcagagtcacgttgctgccggagaccacggtcatatgtaccaagtgaccttgaatgctggtcaccaggagtgacagaggcagcagtagcaatcccagagccagacacgaatcccaacctctggagcacatgcttccttccagaacttcccagcaacgcaggagacagttg

SEQ ID NO: 2636 - DNA, 307 bp, Homo sapiens
cctgtcatgaataatcaccgttctcctttcgtctcgctcccctcgtacttctcgcctgtctgattctctaagttcatttcttggtggtggaggctcatttcttctggagtcactgaaatttttgggatatctttcgaagcttggatcttcccttcgtgcagtaggtcgtgcttttttcccctcactttgaccaacaaagcggtcccgcctttcaaaagatgaagactgtactgctgaactctcaggaaacctgcccctctctcggtgatcaaagtcattaaatctgttctgttggcgagagtagtcg

SEQ ID NO: 2637 - DNA, 177 bp, Homo sapiens
gaatacctttttcccctcagtttagtatattgactttgtactgtaaatttttctgcttttcttggataatctcaggattttcatgaggatagggggaactcaactttatttatgagacaaaatttccatacaaagctcaatctcctttatacacccacagacataatattagttttt

SEQ ID NO: 2638 - DNA, 233 bp, Homo sapiens
  unsure (12): n=A,T,C or G
  unsure (23): n=A,T,C or G
ctgaagagccangagcccaggcnggactttgccttctttgacaaccagccccaggccccttggggtacttgatggccccctcaagacctttggaatccagccaagtgatgcacccaaatgatccacctttcgcccactgggataaatgactcaggaaagaagagcctcggcagggcgctctgcactccacccaggaggaaggataccgtgtgtcctgctgcagtcctcaggga

SEQ ID NO: 2639 - DNA, 455 bp, Homo sapiens
  unsure (337): n=A,T,C or G
ctgttaacacattattgattaaataagtatatgcctaaatctggaagaacaaacgaaattatcatgacttctcggtaacactgtgaaaggaaatatcctttttcattttacattctgcactgtaaaaaattcaaaccagcaatgtttaatagctttcacatttgttaaccataaacacaaatttatcaaggtttaatagccaccacccatggcatggtgaatatgtccctggagtctacagaaccagatttgaattttatctctaggccacatgcaagtcacatgatctctgaatcttgctttcctagtccacaaatctaagtgagataggtacggngtctaagccaatgcctagcatgcagattatttcagtacatgtaaccctcccttcaatttacatgaatatgagacatattgctaaagatcaagtaccaactgggtatgactacagagag

SEQ ID NO: 2640 - DNA, 184 bp, Homo sapiens
  unsure (53): n=A,T,C or G
  unsure (85): n=A,T,C or G
  unsure (92): n=A,T,C or G
  unsure (93): n=A,T,C or G
  unsure (97): n=A,T,C or G
  unsure (107): n=A,T,C or G
ctggaccacagccgcagcgacatgagcagattaaacccggccactttcacgangaggattcggaacccaatcactgacaggtttngaaagtnnaggntcgtatctgnttcaaagcttttctcgaccagcttgacatcacaggaactttctgggctggggaagaaggtgtcttctggaataatgc

SEQ ID NO: 2641 - DNA, 172 bp, Homo sapiens
ccaggtagcggtccagactgatgaaggccaggatgaggacactgctgtagaggttgactgtgtagatgacatggactgccttgcataggaagttcccaaagtaccagtttgccacggcatcaactgcccagaagggaagcgtgatgacaaagaggaggtcggccactgacag

SEQ ID NO: 2642 - DNA, 230 bp, Homo sapiens
aaacagcatcttgctacagatttccaatccaataaataccaggaatgaaggacttttgccccaaagaagtatttcacatgaattctgaactttggatatggaaacttatagaaaaactgaagaccctgagacacatgcaagtaagagtcttctggcaaaaatacaatttaattttccagtttctctcctcccaaaaactccagaagatacctttagtaggcacagagttt

SEQ ID NO: 2643 - DNA, 389 bp, Homo sapiens
  unsure (171): n=A,T,C or G
  unsure (280): n=A,T,C or G
  unsure (357): n=A,T,C or G
  unsure (377): n=A,T,C or G
  unsure (382): n=A,T,C or G
ctggaccacagccgcagcgtcatgagcagattaaacccggccactttcaggaggaggattcggaacccaatcactgacaggttttgaaagtttaggttcgtatctgtttcaaagcttttctcgaccagcttgacatcacaggaactttctgggctggggaagaaggtgtcntctggaataatgctgttgttgaaggcgtttgcacatgcaaagtcagatttgttgctccaggccacagcactgttgctcttgaagtccatagacctcatgtctagcacanttttgtctgtgatatacacatcagaatccttactttgtgacacatttgtttgagaatcaaaatcggtgaatacgcanacagacttgtcactggattnacagnctctcaa

SEQ ID NO: 2644 - DNA, 186 bp, Homo sapiens
  unsure (8): n=A,T,C or G
  unsure (11): n=A,T,C or G
  unsure (23): n=A,T,C or G
  unsure (25): n=A,T,C or G
  unsure (50): n=A,T,C or G
  unsure (51): n=A,T,C or G
  unsure (83): n=A,T,C or G
  unsure (99): n=A,T,C or G
  unsure (109): n=A,T,C or G
  unsure (129): n=A,T,C or G
  unsure (132): n=A,T,C or G
  unsure (138): n=A,T,C or G
  unsure (170): n=A,T,C or G
  unsure (182): n=A,T,C or G
ctgacagnccnccatggcaactngnggcctccagcagacccctgcatacnnaaaggcgcaaaccaacaagatggtgatgctgncctgcgaggctaaaanctccctcagnaacatgcgcatctactggcnganacagcnccaggcaccgagcagggacagtcaccacgagnccctggccctcnggga

SEQ ID NO: 2645 - DNA, 263 bp, Homo sapiens
cctgagcctgcctctctgccttctcagcagagcggccggccgctgtgaccactgctctcaggagagtgggggatgagaggccagaggtgatgcaggctcagaccccggcttcaggagctcggggtggggtcgtgggaccgtgcgcgatagcatcagcccacaggggcaggcagaggcggtgtggagatgccacggggaagccacctgcccacgggggtccacgggagtccaggctacaggcagaaagccttgaactcaggcca

SEQ ID NO: 2646 - DNA, 254 bp, Homo sapiens
  unsure (10): n=A,T,C or G
  unsure (44): n=A,T,C or G
  unsure (45): n=A,T,C or G
  unsure (48): n=A,T,C or G
  unsure (82): n=A,T,C or G
  unsure (84): n=A,T,C or G
ccagtgtcangagggcaatgggctctggaaccccttgctgaagnntgncctcaatggccgttgcacccagcagcatcatgtngntctcaacctcctcatagatgctagccagcctgtcctcccggctgtcctgggccaggctggcctggaggcgtcgctcagcccactcctcgtagtactcttcatccagatccttgtaagccagcaccagggtcctcagcccttcccctgcgtactcattaaggtggtccatg

SEQ ID NO: 2647 - DNA, 195 bp, Homo sapiens
  unsure (23): n=A,T,C or G
  unsure (87): n=A,T,C or G
  unsure (113): n=A,T,C or G
ctggatcccagggaaatatcagncttgggcaactgcagtgaccaggggcaccggctgcccacagggaacacattcctttgctggggntcagcgcctctcctggggctggaagngccaaagcctggggcaaagctgtgtttcagccacactgaacccaattacacacagcgggagaacgcagtaaacagctttccc

SEQ ID NO: 2648 - DNA, 323 bp, Homo sapiens
  unsure (51): n=A,T,C or G
aaacttgacaatcattacactaaaacagatttgataatcttattcacagtngttattgtttacagaccatttaattaatatttcctctgtttattcctcctctccctcccattgcatggctcacacctctctgtctgttaaactgacgaccacggacaccttgtctcaatgttgtctgaagtcttactcgtctgaaaggctttggttgactactactagtatctacagatgagctggaaggaggatcctggctggtggaggggagatctgactcatcagatgcttgaaccggctcttcttcctgctggctatcgatttctagg

SEQ ID NO: 2649 - DNA, 441 bp, Homo sapiens
  unsure (327): n=A,T,C or G
  unsure (339): n=A,T,C or G
  unsure (367): n=A,T,C or G
  unsure (374): n=A,T,C or G
  unsure (390): n=A,T,C or G
  unsure (426): n=A,T,C or G
ccaaggcatcatggtgcgtgggccccttgagagacttgccgttgatggaaagaacctcattgcccttctgaatagtcccttcctgggaggccagcccatttggaaacactctgtgaaccgtaatcaccttgttttctagatctgctcctcctgccaagctgaacccaagaccagcaccttcctccttgtgtaagatggtgacatggatgccgtctaattgctttaatgttgcttcatccagaacctttacctcctcgatgagtttttttaattcttctgagctcagcagggagataacggactgaccagactgaagggaactgtggnccccatcatcgncttccttggcttccgtgagaccctctgnatattcnctcagctctgaaaggntgagcgagaaccctgtgtccaaggcagatgtttcancagaaccatttgcag

SEQ ID NO: 2650 - DNA, 432 bp, Homo sapiens
  unsure (24): n=A,T,C or G
  unsure (326): n=A,T,C or G
  unsure (396): n=A,T,C or G
aaaaacgaaacaaagttatggggntaatctcctacacaattcatttacttcatttgaatgttagagctactcatgattatttgtgtttctaatttatagtttaagtttatttgtaaaaagttaaaagagagtgggtctctgtgcctctcactgatgttcactctggcatcctttagcatttttcttttttcatttcataattgtaggtcattagcatgcatatcgagtttgcccttacgtggtgggagttcaaacacacaaagacccattctttgcacaaaactgttctcgctggtttggaataggctcccgtgcttttttaatgntattgcagcatggatgttcattacagaattcagataaaatttgctaatgctctgctatgatgtttgatcncatcttaatcacagggagctcttccatagctcaata

SEQ ID NO: 2651 - DNA, 245 bp, Homo sapiens
ccttgcacgtggcagtgtctatcctgtcagatttgggaggtcagctattaattagatcagctattaatcagactgttctcctaacactttaacttcatggatgtaccttccttcctttcctaatgccaactctgtttcccgggtaggtgtttcactgcctgaatgaaatcctagatctctgtcacagtttttgttcgctggtcagtcagaacctaggcccactggatgagcgtggagccgcccag

SEQ ID NO: 2652 - DNA, 191 bp, Homo sapiens
  unsure (22): n=A,T,C or G
ccatagatttgccttgtggtgntggatcaggtactgtgtctgctcataagtacttgtgtcatccagaatgttttgttttttaagaaaattgaattacttgtttcctgaaatattctgaggttaatatgttagttttcatagaacattgagaggcccctgccactttcaataaaggcctgacttggaaaaaa

SEQ ID NO: 2653 - DNA, 420 bp, Homo sapiens
  unsure (24): n=A,T,C or G
  unsure (49): n=A,T,C or G
  unsure (50): n=A,T,C or G
  unsure (159): n=A,T,C or G
  unsure (292): n=A,T,C or G
  unsure (370): n=A,T,C or G
aaatcttgaaacaaatcaagaaancttttgttaaccaaaccagaaaagnnccagcttactgggagacttctcaaatttgtcatttttccatgaattcagtttgtgctgtttaagaccttcctggtccacgaattcagtttgtgctgtttaagacctggntatttcccatgagccacacatgcttccaatctttcttgaagtagtgcacatgttccttcccagagctagtttctatttgcccatctcagttaagtccatatacatagaattgcattcattgacaccattccgnactttataaatgtataccaacttcaccatcctcagggcaatgttacatccctcttccagaattaaacattccggaggntgtctcccacacactcacacacacacaagccttgggacacaacgatcaaa

SEQ ID NO: 2654 - DNA, 226 bp, Homo sapiens
ccaagtaaactgtactgccaatagaattctggaattgtgagaaattgtatcattgaagttcagtaggatgtgtggcttaaaaatttatcaggaccacaaaaaagaaaacaaaaatatttggtactgaggttcattgccagggcaggaggtatttccagaaaatactcatgcctgtgttctgttccttgctttcccaaatactgcatgtgactttcctaagcggcag

SEQ ID NO: 2655 - DNA, 310 bp, Homo sapiens
  unsure (24): n=A,T,C or G
aaaaaaataataaaacgaacaaanctttacttgttgccacatcagataacacggaaaaagccttgaaattactccagatgtgcaccctccccttccctcagtgcctgagtctttttcttccagatcgaagtatttcagcccttttggggcgccgtttgcgaaacacagccccttttgagggacttcctcctcttgaaaagactcaccagttctcccttcctaggtgtttctgttcatgagaaattgtcagaatcaactggcacgttccagggtcttcctaaaggatggaaacctgtttggcttgcttttt

SEQ ID NO: 2656 - DNA, 389 bp, Homo sapiens
ctggaccacagccgcagcgtcatgagcagattaaacccggccactttcaggaggaggattcggaacccaatcactgacaggttttgaaagtttaggttcgtatctgtttcaaagcttttctcgaccagcttgacatcacaggaactttctgggctggggaagaaggtgtcttctggaataatgctgttgttgaaggcgtttgcacatgcaaagtcagatttgttgctccaggccacagcactgttgctcttgaagtccatagacctcatgtctagcacagttttgtctgtgatatacacatcagaatccttactttgtgacacatttgtttgagaatcaaaatcggtgaataggcagacagacttgtcactggatttagagtctctcag

SEQ ID NO: 2657 - DNA, 308 bp, Homo sapiens
  unsure (21): n=A,T,C or G
  unsure (24): n=A,T,C or G
  unsure (34): n=A,T,C or G
  unsure (48): n=A,T,C or G
  unsure (49): n=A,T,C or G
  unsure (51): n=A,T,C or G
  unsure (52): n=A,T,C or G
  unsure (54): n=A,T,C or G
  unsure (57): n=A,T,C or G
  unsure (78): n=A,T,C or G
  unsure (113): n=A,T,C or G
  unsure (125): n=A,T,C or G
  unsure (137): n=A,T,C or G
  unsure (241): n=A,T,C or G
ctgagagactctaaatccagnganaagtctgtcngcctattcaccganncnnanacncaaacaaatgtgtcacaaagnaaggattctgatgtgtatatcacagacaaaactgngctagacatgangactatggactncaagagcaacagtgctgtggcctggagcaacaaatctgactttgcatgtgcaaacgccttcaacaacagcattattccagaagacaccttcttccccagcccanaaagtgcctgtgatgtcaagctggtccgagaaaagctttgaaacagatacgaacctaaactttcaaa

SEQ ID NO: 2658 - DNA, 123 bp, Homo sapiens
  unsure (10): n=A,T,C or G
  unsure (54): n=A,T,C or G
  unsure (81): n=A,T,C or G
  unsure (84): n=A,T,C or G
aaaacctgcngactaaacagtaaggaatttatatttgtgaaaaatgccacccgncctagtgatttctgatgtaaataatgntgnttatatagtatgtattaaattttcctacattgtaaaaaa

SEQ ID NO: 2659 - DNA, 306 bp, Homo sapiens
ctgctgcacccagagctcctttgggtctgcacatagctctgcctgagagcgcttgcggggcaagaacaggatagctgggatggagcagcctaagcttggttcctgcttccggtagctgcggacaaccttggcgggaatcttcctttggctgtacttgaggcaacagtcctgagcccctccatcactgccttgggtcctggggatgccaaaggccagaaccaggataaggaggctcagagccagtgactgagccatgtctgtggtagagggtgagtcagaggccagagctgagggtgaggtgggcag

SEQ ID NO: 2660 - DNA, 240 bp, Homo sapiens
  unsure (51): n=A,T,C or G
  unsure (54): n=A,T,C or G
  unsure (72): n=A,T,C or G
  unsure (154): n=A,T,C or G
  unsure (174): n=A,T,C or G
  unsure (187): n=A,T,C or G
  unsure (210): n=A,T,C or G
cctgaaggacccagggccctctggggggatgcgtaagcctatcaggacccncanttacttacagacctgttnagggctaggcttggcctctttcttgagctcatctggaggggtgtggcaacactcattcttcatccttattctccctggctgngggcaacactggtcctcacngtcaccagatggncctcctctgggcccatgaccccncagcagccaaggctggccctgccagataaa

SEQ ID NO: 2661 - DNA, 280 bp, Homo sapiens
  unsure (17): n=A,T,C or G
  unsure (107): n=A,T,C or G
  unsure (167): n=A,T,C or G
  unsure (217): n=A,T,C or G
  unsure (238): n=A,T,C or G
  unsure (258): n=A,T,C or G
ctggaccacagcctttncgtcatgagcagattaaacccggccactttcaggaggaggattcagaacccaatcactgacaggttttgaaagtttaggttcgtatctgnttcaaagcttttctcgaccagcttgacatcacaggaactttctgggctggggaagaaggngtcttctggaataatgctgttgttgaaggcgtttgcacatgcaaagtcangatttgttgctccaggccacngcactgtttgctcttgaagnccatagacctcatgtctagcac

SEQ ID NO: 2662 - DNA, 192 bp, Homo sapiens
  unsure (189): n=A,T,C or G
aaagcttcttgtttttattaaaaacaagcacatattaacagccacatgtgaatgccaaatgattaaaacaaaaaacaaaaacaagagccatctacactgcagctagggaaagcaaacttcttggcttaagagaagtgagggatgtgtgtacgtgtgtgtgtgtgtgtgtgtgtgtgtgtgtgtgtgtgngtg

SEQ ID NO: 2663 - DNA, 504 bp, Homo sapiens
  unsure (15): n=A,T,C or G
  unsure (266): n=A,T,C or G
  unsure (394): n=A,T,C or G
  unsure (404): n=A,T,C or G
  unsure (440): n=A,T,C or G
ccaggccacctcctnaggagttagatcacttatccgtctctccctggcccacccttctctgtcacatggcttctttgctgaccgtgatacacaccacacttgtcttctctacctggaagttgtattccccatacccacatggctcacttcttcacttcattcaagtctctgctcagatattaacctcttcagagagcccttccttcacacactgtcttgcatagcagcctctcctacaagttgtcttctttctccttaacttttgngatggttaattttaggtgtcagcttgacttggattaaagaatacctagagaactggaaaggcattatttggtagtgtgtctgtgagggtatttccagaagagattgatatatgactgattgggctaanaggaaccatncgccctcaacgtgcagttggcttggaaacaaaaacngaagaaaggcaaattggtcttactctcttggagctggaataaccccttccattcctggcccttg

SEQ ID NO: 2664 - DNA, 389 bp, Homo sapiens
ctggagggtcagccaccaagctgggagctgagccagaacaggagtgatgtctctgcccttcctctagcctcttgtcacatgtggtgcacaaacctcaacctgacagctttcagacagcattcttgcacttcttagcaacagagagagacatgagtaagacccagattgctatttttattgttatttttaacatgaatctaaagtttatggttccagggactttttatttgacccaacaacacagtatcccaggatatggaggcaaggggaacaaagagcatgagtctttttccaagaaaactggtgagttaagtaagattagagtgagtgtgctctgttgctgtgatgttgtcagccacagcttcctgccgtagagaatgatagagcag

SEQ ID NO: 2665 - DNA, 492 bp, Homo sapiens
  unsure (388): n=A,T,C or G
  unsure (443): n=A,T,C or G
  unsure (450): n=A,T,C or G
  unsure (488): n=A,T,C or G
ctgcagtcaacagtttaaagaagtcatggcccaaatccagtgtgcacccctccccattcacagagcctttttcacaattccatttccagttcatctatggcagtccagccagctcctgggcagcttgagagggcaaacccaaaacctcatgacagccagagcctgtctttcagcattcagtccgcctggccggctccagtttccccatggggctgcgggacagaggaccattacaactagatcaaggagcccagaaaacctccagtagtggacaacaggttttcaccatagcctacgttaacccatttttgagccaagcttcaaccctcagccttgaaaaacaagtctttaatttaatttttgttttttgctaaatccaaagaaaaangggctgccgggccaggcgcggtggctcaccgcctgtaatcccagcactttggcanggccgangcaggtggatcacctgacgtcagtagtttgagaccagnctgg

SEQ ID NO: 2666 - DNA, 337 bp, Homo sapiens
  unsure (14): n=A,T,C or G
  unsure (15): n=A,T,C or G
ctgcataatgctcnnacatctgtagatagagccgctctagttccattgtgtattgtttggtgttgaacagagggctagatattctttgcttccagactttgccacgaactttcttcaggtattctagatcagttcccagcttcacagctatgtcttcatattcttgtctgtttttagcaataagctcaagacaacctaagcaagtgagctgggatgctgcaactcgagaagcaagagtctctcctggcatagtcaccatgggggtccctgcccagaggacatccatccctgtggtgtgcccattacagagtggagtgtccaagcagacatcagccag

SEQ ID NO: 2667 - DNA, 405 bp, Homo sapiens
  unsure (11): n=A,T,C or G
  unsure (12): n=A,T,C or G
aaaagtcgcannttctgacaatcaacaaataaactctaatgagaatcataaagcttgttcccagagaaccatgatacagggtgggacagtacgcaaataatgggctcctgttgtcagacttcatggtgattacgcttgtgctttctccagtatctttcttcctattgtactcctgaagcactcagaatgataaagataaatttctgatcattcctacaaagagtgcaggcaaagttaagatttaactgtgattgctggttgtttcatctcgaattcaaaatcctggatttccgaaacaatggagcttgatgtcacatttggctatcttgcctttgtctcctcttctggaaagaacaaatcatcttcctgaaaattacaggagacacttagtatgacaaaataagg

SEQ ID NO: 2668 - DNA, 332 bp, Homo sapiens
  unsure (6): n=A,T,C or G
  unsure (14): n=A,T,C or G
cgcggncgtaaggnttgaggatttttggtccgcacgctcctgctcctgactcaccgctgttcgctctcgccgaggaacaagtcggtcaggaagcccgcgcgcaacagccatggcttttaaggataccggaaaaacacccgtggagccggaggtggcaattcaccgaattccaatcaccctaacaagccgcaacgtaaaatccttggaaaaggtgtgtgctgacttgataagaggcgcaaaagaaaagaatctcaaagtgaaaggaccagttcgaatgcctaccaagactttgagaatcactacaagaaaaactccttgtggtgaagggtcta

SEQ ID NO: 2669 - DNA, 302 bp, Homo sapiens
  unsure (15): n=A,T,C or G
  unsure (16): n=A,T,C or G
  unsure (52): n=A,T,C or G
ccacctcaccctttnntctggcctcttactcaccctctaccacagacatggntcagtcactggctctgagcctccttatcctggttctggcctttggcatccccaggacccaaggcagtgatggaggggctcaggactgttgcctcaagtacagccaaaggaagattcccgccaaggttgtccgcagctaccggaagcaggaaccaagcttaggctgctccatcccagctatcctgttcttgccccgcaagcgctctcaggcagagctatgtgcagacccaaaggagctctgggtgcagcag

SEQ ID NO: 2670 - DNA, 398 bp, Homo sapiens
  unsure (15): n=A,T,C or G
ccactctgtctgcangatgttttagtggaatgttgtagccaaagttagatctgaagttggaagcttcttctcttgctatgtctgctaaagaacgagcatctgccaacaaacctgctactgccattccaacatgccgatcaacattaaaaagtcttttgttggaaccttcttcataaagtttagaaaggactaatttttctaccccaaagacaacaccatctttgcatctgattccaatagctgtactactattttccacagccttcatagcatattcaacttgaaaaactcttccgtcaggagagaatgtagaggctgacaggtcatacccagtgccgattgagctcatcgtgctaaacccaaagggacgcgtagggattccaggcccggagcgcttc

SEQ ID NO: 2671 - DNA, 352 bp, Homo sapiens
  unsure (331): n=A,T,C or G
cctgtgaggtgcagagtgcccagaactggactcaggatgcccagggccactctgcctctgcctgcattctgccgtgtgccctcgggcgagtcactgcctctccctagccctcagtttccctatctcgaacatggaactcattcctgcctgtctcctttgcaggctcatagggaagacctgctgagggaccagccaagagggctgcaaaagtgagggcttgtcattactagacggttcaccagcctctcttggtttccttccttggaagagaatgtctgatctaaatgtggagaaactgtagtctcaggacctagggatgttctggccctcncccctgccctgggatgtccac

SEQ ID NO: 2672 - DNA, 423 bp, Homo sapiens
ctagaacctgggtcctagtttgcacctagaatatgaggtactttgagccttgctaagaccacccagcccatctccatggactcatatgaaggacaagaagtgaacataacctgtagccacaacaacattgctacaaatgattatatcacgtggtaccaacagtttcccagccaaggaccacgatttattattcaaggatacaagacaaaagttacaaacgaagtggcctccctgtttatccctgccgacagaaagtccagcactctgagcctgccccgggtttccctgagcgacactgctgtgtactactgcctcgtgggtgacatggagtcttctggttctgcaaggcaactgacctttggatctgggacacaattgactgttttacctgatatccagaaccctgaccctgccgtgtaccag

SEQ ID NO: 2673 - DNA, 188 bp, Homo sapiens
  unsure (68): n=A,T,C or G
  unsure (153): n=A,T,C or G
  unsure (166): n=A,T,C or G
ttggtgagggtacaactgccaaaggagaggtccctgatggctacaatgtctccagattaaaaaaacanaatttcctgctggggttggagtcggctgctccctcccaaacatctgtgtacttctgtgccagcgcggggtacgagcagtacttcnggccgggcaccangctcacggtcacagaggacctg

SEQ ID NO: 2674 - DNA, 242 bp, Homo sapiens
ccaacatggtgaaaccccatctactaaaaataccaaaaaaattagccaggcgtggtggcaggcgcctgtagtcccacctactctggaggctgttgcagaattgcttgaacccgggaggcggaggttgcagtgaaccaagatcgcgccactgcactccagcctggcgacagagcaagactccatctcaaaaaaaaaaaaaagacttgaatagctacagaaagtcccttacctctgatcaaagg

SEQ ID NO: 2675 - DNA, 376 bp, Homo sapiens
gttttggtggcggtacagacacttttaactcacagtaaaagcaaaagcaacagctcaagcagcctccttggagaaaacctgaaaattcaacttgttcaagagaaggtcttgtacgtgcctaagttctagagcctcctgacgtgagcatggctgagagtgaggaccgctccctgaggatcgttctggtagggaaaactggaagtgggaaaagtgcaacagcgaacaccatccttggagaggaaatctttgattctagaattgctgcccaagctgttaccaagaactgtcaaaaagcatcccgggaatggcaggggagagaccttcttgttgtggacactccagggctctttgacaccaaggagagcctggacaccac

SEQ ID NO: 2676 - DNA, 284 bp, Homo sapiens
ctgtccggaaccaggaagggcaggaaagccatggaggcctttcaggcatctgggcagggtagggaggggccgtaaggtgctcacctgtcacacgaggtccccgagcgccgaggaagatggtggcgggcagcgggcggcagcagtggcgtgatctccgaagcccacagtacactcatccataaagtaggaaacactacaccctccagtgctgttagtagtgctttctactttatgggtgactgcactgtctgtctgcccgtcggcgtgtactcttcaggctgccc

SEQ ID NO: 2677 - DNA, 284 bp, Homo sapiens
  unsure (106): n=A,T,C or G
  unsure (260): n=A,T,C or G
cagaggacccctccatcctgcagttcctgccatgagcctcgggctcctgtgctgtggggccttttctctcctgtgggcaggtccagtgaatgctggtgtcactcanaccccaaaattccgggtcctgaagacaggacagagcatgacactgctgtgtgcccaggatatgaaccatgaatacatgtactggtatcgacaagacccaggcatggggctgaggctgattcattactcagttggtgagggtacaactgccaaangagaggtccctgatggctacaatg

SEQ ID NO: 2678 - DNA, 252 bp, Homo sapiens
cctggagccttcccctgcctcttccgacctgcatctcagcagccaccctacccagtgaccaggagtccttaggctacctggatgcaagtcttgcgggggtgacgggccacccccttccttcttctcccatccaatcccactggttcctggatcccaggccctcagctctgccctaaaggaactctgagcaatccatgatgagtgtgtgctacacacatcctttctctcttccaaataagggacttccccttt

SEQ ID NO: 2679 - DNA, 269 bp, Homo sapiens
ccaatttcttaacccccttcagcgtccgtttgtttgcacagtgaaatggaaacattaatacttaccttgccaggctggtgcgaggatgagatggggttgtgtatgagaagtcagcacagagctggcaggtggtgccatgcaggtgtcagcagagttaagggattgttgatgtagtagacgtggtccgctccactacaccttgccagaccacctgcagggcacctcagctccaattcacagacgcgcctacagcttcctgcaccaagcag

SEQ ID NO: 2680 - DNA, 322 bp, Homo sapiens
  unsure (207): n=A,T,C or G
  unsure (269): n=A,T,C or G
tgctcatcttcagcagacggaaaccaagcgtgatgacccctactgagggcctggatacgggagagatgagtaatagcacatcctcactcaagcggcagagactcggatcagagagggcggcttcccatgttgctcaggctaatctcaaactcctggacgtgagcaagatcttcccaattgctgagattgcagaggaaagctccccanaggtagtaccggtggaactcttgtgcgtgccttctcctgcctctcaaggggacctgcatacnaagcctttggggactgacgatgacttctggggccccacggggcctgtggctac

SEQ ID NO: 2681 - DNA, 151 bp, Homo sapiens
  unsure (138): n=A,T,C or G
ggcagccatcaccagccacagttaagccaagccccccaacatgtattccatcgtgctggtagaagagtctttgctgttgctcccgaaagccgtgctctccagcctggctgccagggagggtgggcctcttggttccangctcttgaaatag

SEQ ID NO: 2682 - DNA, 254 bp, Homo sapiens
  unsure (162): n=A,T,C or G
ctgagagactctaaatccagtgacaagtctgtctgcctattcaccgattttgattctcaaacaaatgtgtcacaaagtaaggattctgatgtgtatatcacagacaaaactgtgctagacatgaggtctatggacttcaagagcaacagtgctgtggcctgnagcaacaaatctgactttgcatgtgcaaacgccttcaacaacagcattattccagaagacaccttcttccccagcccagaaagttcctgtga

SEQ ID NO: 2683 - DNA, 252 bp, Homo sapiens
  unsure (251): n=A,T,C or G
cctttctcccagggtcttattgaagtttgggttttggcataagagatctaagggttgccctaggaggcagaggatggttccctgatcttaaaggctctcaacctctcctctctcctcccttcccccacagtgtgccacagctgtgtggagctggatccagccaccgtggctggcatcattgtcactgatgtcattgccactctgctccttgctttgggagtcttctgctttgctggacatgagactggaang

SEQ ID NO: 2684 - DNA, 356 bp, Homo sapiens
ctgatacctgatcaacttcgacatttgggcaatgccatcaaacaggttactatgaaaaaggattatcaacagcaaaagatggagaaggtgttgagtcttccaaaacccaccattattctcagtgcctaccagcgaaagtgcattcagtccatcctgaaagaggagggtgaacatataagggaaatggtgaagcaaatcaatgatatccgcaatcatgtaaacttctgacaccaccaggagctgactcacacctgaactgaacaccattgaaggcttaaacccatattgtaaaacaggtagaattatctaatttataaaaaggtgttttgatgacctttggtgtggttcatcttttt

SEQ ID NO: 2685 - DNA, 375 bp, Homo sapiens
aaaaactaatgtccattgtttttcccaatctgaatatgtttccatacatgtatgtatttgcaatttctattttccaatatgtaaaaagttggtagacaatgaagtagtgtgcaaatttttaggagagaaaacaatccctactggtttactaccaaactctcacagttatatagaatctattagcactataaactaactcaaaatgcaggcttcagaaaaactgcttcaatagcctccctatcaatctgtcgccttctatgaagtcttcacctgctattattccacaggctgagaattacttctgaaagaaatggtcaattttttcaacagcttggtatgttgacagcttagcaacggtacttcaatcacctcttt

SEQ ID NO: 2686 - DNA, 309 bp, Homo sapiens
agtggatccaaagcacctgataaaagttaataatctcttgttaggaaagctgtccattaataaggccagtcttcagcaaaactaaaaccattttgttcgtttagctttcctagtctgacaacgcaatactgttgaaccacagtcaaatataatgacaacattggatggatagatcagtaccattggttacagctgttaaacaggttcgttcttggcgccacataaaaacaagccaataacatcgaataaatcatggcttttttttctttatcacaattcactaagtgatgttaattatggtccttgtca

SEQ ID NO: 2687 - DNA, 320 bp, Homo sapiens
ctgcaggaactcaagggcaacatccgtgtattctgccgggtccgccctgtcctgccgggggagcccactccaccccctggcctcctcctgtttccctctggccctggtgggccctctgatcctccaacccgccttagcctctcccggtctgacgagcggcgtgggaccctgagtggggcaccagctcccccaactcgccatgatttttcctttgaccgggtattcccaccaggaagtggacaggatgaagtgtttgaagagattgccatgcttgtccagtcagccctggatggctatccagtatgcatctttgcctatgg

SEQ ID NO: 2688 - DNA, 171 bp, Homo sapiens
  unsure (1): n=A,T,C or G
  unsure (28): n=A,T,C or G
  unsure (39): n=A,T,C or G
  unsure (153): n=A,T,C or G
naaactcaacagtagtatttaccatggngtcaaattaancatttatcttgagttcacaaactgagttcactaattttgtctccgtttttcaaatttctagcatttatagactactataacaaccatactcttttaggctaagtgttggaaaanagtaatagatttctggct

SEQ ID NO: 2689 - DNA, 610 bp, Homo sapiens
aaaaaatgggaaattttaatattaagtatgtccatgattgaaagaatcattccagaaatggcagcaaagaggctcaatgaattcattatcatttttcctttgaccaaacacttcctggagtttttctccgttgctgccaggagtgatccggaaataatatacataatgcctccccagagagggtaccacacagtcacacagatgggtgcatagatccctgctgggatcatcagaagaccccccagggcaatgtggaagagcccattcataatctggacagcccccaaagtcttagattccctcatgaagaagctttgcgtggggcccaccagtgaagacatcctcctgaagagtggttttggaccagattgcatagcaatagggcctttcattggctctgccgggaaagtcccatttactgaatttctgggtgttgtcattttgctctcaaaactcctaaaaataaaacaaataacaaaatgaggagagcaagaacaagatttttggcagtcttaccttgtgtcatgcatctgaatgcttctctcagcatttcctccatgagtgtcattgagggtagacatggcctcttccgagtgaccttggatctgag

SEQ ID NO: 2690 - DNA, 357 bp, Homo sapiens
  unsure (5): n=A,T,C or G
  unsure (10): n=A,T,C or G
  unsure (12): n=A,T,C or G
  unsure (44): n=A,T,C or G
  unsure (47): n=A,T,C or G
  unsure (53): n=A,T,C or G
  unsure (69): n=A,T,C or G
  unsure (109): n=A,T,C or G
  unsure (117): n=A,T,C or G
  unsure (147): n=A,T,C or G
  unsure (180): n=A,T,C or G
  unsure (181): n=A,T,C or G
  unsure (212): n=A,T,C or G
  unsure (219): n=A,T,C or G
  unsure (298): n=A,T,C or G
  unsure (302): n=A,T,C or G
  unsure (348): n=A,T,C or G
  unsure (353): n=A,T,C or G
aaagngcctnangggtcccctgaaactaattttctatttctggnatnccctgnattcattatatgaganggtgacatgattagaggaattcttttttagtatgaaaatngtcccttntcttcttcactacttgcctccttgctggcnttgaattaacacagggacaaaatttggttaatnntttatttctaactctcccaacaaacccctgntgcccantatttgtttggtggcctttaaccacctgagggaaaaaatgagcttattcaagctgccaatatttatctatgggctgtancacntacactgaattgtactgtgccagggatattgagatgctctgggggngaatngtat

SEQ ID NO: 2691 - DNA, 320 bp, Homo sapiens
ctggagtagttggttgtgaatattaaaacctagtactattttccctcagtaacatgtaattgctacattttttataagaaggtatggttagaaaaaaatgtgaaagatcacttaaaccaaagccagttacaaggagtaatctctcctgttggtttaccttcacctcagaactacaagaatattacaatacatagtgaatagttgtctgtgacatttctaccagttgtttcagtagcatattggtcttggcatttcttggcactgtggttctgctgtattatttgtgatgtcttattgtttgtgagcttttgttttttttt

SEQ ID NO: 2692 - DNA, 357 bp, Homo sapiens
  unsure (342): n=A,T,C or G
  unsure (345): n=A,T,C or G
  unsure (351): n=A,T,C or G
  unsure (353): n=A,T,C or G
ctgctgccacatggggttggagcctccaacagcatcatccctgagtagacctggtccactgagtcccacaggtcggctctctgcagcctttccctgcaggtcaccaccctctacaggcaatggcaaggacgcgacatcacaggtagacagcccacatcctctcatccttccggtctcctggactggagttgtcccggtgccctggagacccagtcactgccgcctctcccctgcctggactcagcaggggaaagactggaggccctgctcctgccctttggctctgccagcacccccgaccagccctatatctcctcctccaccttcaagatcatccctganaanacctcnancccc

SEQ ID NO: 2693 - DNA, 197 bp, Homo sapiens
ctgtatccactttagcacaaagaaaaacaaggatgctaaatacgtatatactttatcaagcagtgatgtttcacaaagaatttcttaatgcctcttacactgaaggacaccataattcaatttatacaactggttaatagattcaagggaataaatcccaccttaggaaaatagtaccaatcgtgtcatttaagtgg

SEQ ID NO: 2694 - DNA, 223 bp, Homo sapiens
ctgagggtacagctctgagaattggcgctggaaacagttcttggactgtgatagccacaacagatgctgtttctgggatcccaggaccagggctctggaagatgccactgcagtggtagtgcccgctgtctgccttttgtaccacggtgatggagaattccctgttaggcccggggggacccagagctgagccgtctcggtagaaggtcacctgagtcagtgg

SEQ ID NO: 2695 - DNA, 484 bp, Homo sapiens
ctgccaggatgaccaccagcatgccacaggctgggcatattcaacaggacccagtcaccacaaacgtagtctgagaccactaagagaaacccaatatgcatacattgcaggcccaaaccttcctgctttcctgtagtggtgtacttttgacaggaggaaaaccacgtcaggcttagagatagcacacaaatagggaatgacaggaacagggccagaggtgacaaaccactggagatgagtcagaggccacgccgctggactggtctttgtggacttgggagtgcctactgatcaaaaaccccaaaacccacatgccacccgcttccccgcagccaggaacacaattgtttgtgactgtaatagcatttgtatccaataaatagtcttaaccataatggtggacttattttgcctcagagaccaaatgtgctgaattatggatgggagtgagcctcacctgcttccactcattgacacaaaaaat

SEQ ID NO: 2696 - DNA, 196 bp, Homo sapiens
  unsure (25): n=A,T,C or G
  unsure (71): n=A,T,C or G
  unsure (89): n=A,T,C or G
  unsure (98): n=A,T,C or G
  unsure (109): n=A,T,C or G
  unsure (125): n=A,T,C or G
  unsure (138): n=A,T,C or G
  unsure (151): n=A,T,C or G
  unsure (159): n=A,T,C or G
  unsure (189): n=A,T,C or G
  unsure (191): n=A,T,C or G
ctgctggctggctgggcccccgtanctggactggtttgacaaacccatgcctcctaacatttggctaccgnaagcaccaccgcttgctnctgctgtanaattcaagaanaattctacatatctgnggtgcatatttgntttgtcttttganatagctgncacaaacatcttcatgaattgccgaactcnanatctg

SEQ ID NO: 2697 - DNA, 342 bp, Homo sapiens
  unsure (46): n=A,T,C or G
  unsure (329): n=A,T,C or G
  unsure (340): n=A,T,C or G
aaatggatttcccaggcttcttcggcaaccaccttatctggccttncatctgcgtcttttaattgtatatatgggtttttcctaattctattcaaatcctcatgtaatccatctaataggaaagctaaccgttcttgacagtcttgctgctgatatccagagaactgaggtgcaaaacgtcctacctgtgtcttaaaggctcttggggtgacgtagctaaactttccagaccacatttgcttgatcagttcggcataagatttagctatttcacctctcattcctaagggattgtcaaaattcagttcttcttgatacttatcattgangaaatactcanta

SEQ ID NO: 2698 - DNA, 447 bp, Homo sapiens
  unsure (264): n=A,T,C or G
  unsure (392): n=A,T,C or G
  unsure (432): n=A,T,C or G
  unsure (442): n=A,T,C or G
aaattcatgagcatggagtgcctttttacttatttgcgttgtctctattttttttcagcagttttgtagttcttgttgtagagatattttacctccttgatttaatgtattactaggtacatatttttttgtttgtagctattgtaaatagaaccatgttctttttttctcagcttgaatattattggtgcacagaaatgctactcatttgtgtatgttgattttgtatggtgagactttgctgaagtcattatttaggcttanaaatcttttggtgaaatctttttcggtgaagtttcccaggtagagaattatatcaccagtgaagataatttgacttcctctttttctatttgaatacattttattgctttatcttgttaaattgctgnggctacgactttcaggactatgttgaatagaagtgtttanagtggatacncttgt

SEQ ID NO: 2699 - DNA, 356 bp, Homo sapiens
  unsure (226): n=A,T,C or G
aaaaattggcttttttaggattctttttctccccctcccatcttagtcttaccttgagggaacagtcatatgagaaggaactttgtcacatctaagctgtggtgtcttccccatgtgtgtgtacaacactggtgactccaggaaccattttcacctattaccagtgttccctggggactcctcttaatgtttccaaatgggaaggacagttgatttccaacatgangttttttgttttttatccagaaatattttcagcaaaactttccaactgagtggagtctgattaaggatttatttgaaaatggtgggattcattggcccataggtacattggaaaatgtatatctcttcaa

SEQ ID NO: 2700 - DNA, 225 bp, Homo sapiens
ccatacgtcgtcataccttagacaaacggagaacgggatggcaggtccatgctagagcgcttctctggaaaggcagcttggctaacaaagtctgacgccctcagacggtgatggaagctggagacccccaagtgagatgatggcaggttccagccagtttactacagtccccagggaagggcagactgccatgatgagaagactccagattattatcatgcccag

SEQ ID NO: 2701 - DNA, 180 bp, Homo sapiens
ctgtttgatagctctactgagatgaagaaagaaagagaatacctgctcagctccagagacacgtaaagggacagagattgggggacagaaggaagtgcattaattccttccacgacccctgaagagcagcggtgggtctgagcatcctatctccaggaagcaggccagcaggcaagccag

SEQ ID NO: 2702 - DNA, 411 bp, Homo sapiens
  unsure (49): n=A,T,C or G
  unsure (205): n=A,T,C or G
  unsure (232): n=A,T,C or G
  unsure (233): n=A,T,C or G
  unsure (254): n=A,T,C or G
  unsure (256): n=A,T,C or G
  unsure (259): n=A,T,C or G
  unsure (264): n=A,T,C or G
  unsure (372): n=A,T,C or G
  unsure (373): n=A,T,C or G
  unsure (404): n=A,T,C or G
aaagtgcacatgtcacctaacgacaacgactgagatgactggaattganagaagacgcagtctccttccaggaagctcactcgattctggaaatctgggggctctggataggaactccatctttcccccaaaacttaagcacagtttcatgcacgtgatttctttagcttgatggataacatggtgtcccggcgtggaaacagtntggggaattcagtccgagtcaccccannaaaacaaccccttctcatgtnanatnaaccnagacagggccattagatccagcaactagagcactgtcaagggcatgagcaaaagcacaggcagccgccatcccaggtaaatccccaggacaggaacaaatccccctgnngacaacttccaaggggggaagagagatgacnaaggtct

SEQ ID NO: 2703 - DNA, 423 bp, Homo sapiens
  unsure (142): n=A,T,C or G
  unsure (149): n=A,T,C or G
  unsure (181): n=A,T,C or G
  unsure (213): n=A,T,C or G
  unsure (220): n=A,T,C or G
  unsure (272): n=A,T,C or G
  unsure (316): n=A,T,C or G
  unsure (330): n=A,T,C or G
  unsure (352): n=A,T,C or G
  unsure (354): n=A,T,C or G
  unsure (369): n=A,T,C or G
  unsure (388): n=A,T,C or G
  unsure (411): n=A,T,C or G
  unsure (421): n=A,T,C or G
  unsure (422): n=A,T,C or G
gtgatttaacaaatcaattgatgagccttacctaacaactcttgttctcatggtggtatttgtaggccacttatgctgaacagatttctgtaaacacccataaatatatctcaatgtcctgccaaaataacacaatcatctnaacacanaaagcaagtgaaaacactgatctcctagcagncaaaagcttaatttacccaaatataccacagntcaatanaactggccttttacccaaaaaagtattttgccacaggtaatgaggcatttancaaggggtaaggaaaactttatccactaagtttatcatcaattnattcagttaacctnctgacatttactttcagatatngngaacgaaccagaccntgcccgggccggacgctcnaatggtaaagttctgcacatatncatcacactnnc

SEQ ID NO: 2704 - DNA, 280 bp, Homo sapiens
  unsure (176): n=A,T,C or G
  unsure (210): n=A,T,C or G
  unsure (237): n=A,T,C or G
  unsure (243): n=A,T,C or G
  unsure (253): n=A,T,C or G
  unsure (274): n=A,T,C or G
ccagcatcaggagccccgcgttgccggctctggtcatcgcctttctttttgtggcctgaaacgatgtcatcaattcgcagtagcagaactgccgtctccactgctgtcttataagtctgcagcttcacagccaatggctcccatatgcccaagtttccttcatgtccacccaaagnacccgtctcaccatttacaccccaggtctcacangttctccttgggtgtgcttgcccgaanggaggnaagtaatacngatggtgctggccccacattntctgga

SEQ ID NO: 2705 - DNA, 146 bp, Homo sapiens
ctgattgtggtggctgaaagtctgtgtgataagcttctctgccatcccttcttctcctccaatgaaaaagtctgttttgcgtcgaaggaagctgaagaaggtgttcacaagctcctgcacgccgccctcgtgctgctgagccatgg

SEQ ID NO: 2706 - DNA, 336 bp, Homo sapiens
  unsure (154): n=A,T,C or G
  unsure (166): n=A,T,C or G
  unsure (196): n=A,T,C or G
  unsure (204): n=A,T,C or G
  unsure (249): n=A,T,C or G
  unsure (287): n=A,T,C or G
  unsure (316): n=A,T,C or G
  unsure (332): n=A,T,C or G
  unsure (336): n=A,T,C or G
cacatagcgttcccctagggctctttccccggggagaatgtaggatacaggcccagcctcctggcctttctccatcagggactcagttgtctgggcccccccgtcactttatctgctagggtcccagaagtccagggtccccagctctgtcctnctcagggggcgntgaggtctccacagtctcctgatcccctanaacccaanagtccaggtacctcttcccttcctttctcctctagggcccaccanctctgagcagatcatgaagacaggggcccttttgcttnagggtttcatccatgatcgagcaggggcnaatgggggggggaggntccn

SEQ ID NO: 2707 - DNA, 347 bp, Homo sapiens
ccttgctgcgggggcactgctgctctactgctggctctcgagaaaagcagggagaaagcctgcctctgaccccgccaggagcccttcagactcggactcccaagagcccacctatcacaatgtaccagcctgggaagagctgcaaccagtgtacactaatgcaaatcctagaggagaaaatgtggtttactcagaagtacggatcatccaagagaaaaagaaacatgcagtggcctctgaccccaggcatctcaggaacaagggttcccctatcatctactctgaagttaaggtggcgtcaaccccggtttccggatccctgttcttggcttcctcagctcctcaca

SEQ ID NO: 2708 - DNA, 221 bp, Homo sapiens
  unsure (156): n=A,T,C or G
  unsure (214): n=A,T,C or G
ctggtgctcccgagcttgggagagggcagcctgggcattcagagcgggattatctttatccacgtctgagtcgagttcctgacaagccacgcagtagattttccgctgtttgtcttggaggaggatcgtcccgcagtccgcacacgtctcgcccancatgcggtaaccgcgcagcagatagtcgcccatgagccgggagatgcgatcttgccgnatcccgt

SEQ ID NO: 2709 - DNA, 113 bp, Homo sapiens
ccactcgtgctgtacactggctaagaaactttatactcttctccagcttcttaatgatttcctgtgcctggttgtcatcttcacacagaggtgttaaagactctaatagtttt

SEQ ID NO: 2710 - DNA, 200 bp, Homo sapiens
ggcattaatactaacacagaatacttccttgaacattctgcaaaagtaggtgcagagacagaattacttcttcatttccagattaccagtatctataggactattttgagaaaagctgggaggcggagcacctcccctccccaatgtcattttctttgtcaaagcagaagagtcgaaggggtttaggtggaggagggcag

SEQ ID NO: 2711 - DNA, 254 bp, Homo sapiens
cttgaaaccttggaggaacccatgctacaatcaattgctaactaaaagcaattgtacatgtatttaacattttaccagtttctgcttctaaatttaatatagtaattccaaccaaaaaaatagtatctctgtaacattttatctatgtccactgcaagctgcagagtctctgttgccaagatttcttgacacatttaatgttttacctaaaattgtggtcagattgagcaatatcattatcctaaattatgttt

SEQ ID NO: 2712 - DNA, 243 bp, Homo sapiens
  unsure (14): n=A,T,C or G
  unsure (15): n=A,T,C or G
  unsure (173): n=A,T,C or G
  unsure (227): n=A,T,C or G
  unsure (237): n=A,T,C or G
ctgtagcttctgtnngacttccactgctcaggcgtcaggctcagatagctgctggccgcgtacttgttgttgctttgtttggagggtgtggtggtctccactcccgccttgacggggctgctatctgccttccaggccactgtcacggctcccgggtagaagtcacttatganacacaccagtgtggccttgttggcttgaagctcctcacaggagggcgggaacanagtgaccgangggggc

SEQ ID NO: 2713 - DNA, 344 bp, Homo sapiens
ggtgcaaagcacaagaagtcagtctaaactgcagtgaaaacacaaagattttagaaagggtttcctgaagatagatagatagatagatagttaaaccttggaaggttaccttctcttcccagttctactgaggaacatcagaaactcagcccataagccctacccagcatggtaggtctttctcatagatgagaaactcctaggttttctctccagatatgagttgagtagttagttgagtaaaaggagggggcaaaggttctgaaggcccagagagctgcccacctcacaagcccctgggctccagaaccagccagttctcagtgaccatctgcacatcctgg

SEQ ID NO: 2714 - DNA, 368 bp, Homo sapiens
aaaccattaaagtaaaatccataattttctacagagtacaacacaagttcacacaaaaaagacattttcttttgcaaatcaaaacaggaaagaaaggaaaagctcaaacaagataaaggaaaagcatttctacggctgaatcacgactgagttgattgaatcccgttgttgctgcagaacagactgtgcgtttggtcatagtggcaatttttttttctcttcacattgtgaaatcactttacattgttttctagtagaaaaggcaaaaaactgtacaaaacccctagtgttaaatacaacgtttgtaccaataaaaaactcacacaggtttgtctccaaaatgtaaagtttcttttttttttcttttt

SEQ ID NO: 2715 - DNA, 356 bp, Homo sapiens
  unsure (13): n=A,T,C or G
atgagggtccccnctcagctcctggggctcctgctgctctggctcccaggtgccaaatgtgacatccagatgacccaatctccttccaccctgtctgcatctgtcggagatacagttacaataagttgtcgggcctctcagaatatagatcggtggttggcctggcatcaacagaaaccaggcaaagcccctaatgtcctaatttatgcgacttccagtttagaagaaggggtctcattaagatttactggcagtggatctgggacacaattcaatttaaccatcaccagtctgcagcctgacgattcagcaacttattattgtcaacattattctgcatctcttcgcagttttgg

SEQ ID NO: 2716 - DNA, 396 bp, Homo sapiens
  unsure (16): n=A,T,C or G
  unsure (363): n=A,T,C or G
ccaacaatttttttanaagtagcatcccaagcagcgtgcctaaacattacattgcatatggaaataaaagaatcaaacgtctaatgccttattatttctgatttcctttttcattttaagtggtgtggagattccagcactcccaggacagtggagtcagcagtaagccctgggacaggtggcaagggtgggtcccttgacctttgcacgcctcctcaggaaccccctttcccgggtgagcccctctctgaagagactgtccttgggcctcctctggaagcagcacccccagaggacagggctcctcctgcttgcctcagggctgcctgacttgaatggcgttggacctcggggattactggnagataatatgctctggtctcgcctggcggtgag

SEQ ID NO: 2717 - DNA, 352 bp, Homo sapiens
  unsure (158): n=A,T,C or G
  unsure (169): n=A,T,C or G
  unsure (342): n=A,T,C or G
  unsure (347): n=A,T,C or G
  unsure (352): n=A,T,C or G
ccttaggacaatgggggctgtggcatgcgtcaggttacctgccttgatatgggatcgtgacaggcccctccctatgtgcaggagacaagcagcccaaggaacaggagaaaaacccagtgttggtgtccccagagtttgtggatgaagctctgtgcgcntgcgaaggagnaccttagcaacttggcccacatggacatcgacaaggacctggaggccccgctgtacctcacccccgagggctggtccctcttcctccagcgctactaccaagtggtccacgaaggggcagaactcaggcacctcgacactcaggtccagcgctgtgaggacatcctgcagcanacctnggccn

SEQ ID NO: 2718 - DNA, 484 bp, Homo sapiens
  unsure (335): n=A,T,C or G
  unsure (466): n=A,T,C or G
ctgagtaaatggattactgcagtttagacctggtgaatcaagaaggtggcattcagtagtgagacttttattatcaaatagttctgactgagaaattttagtttccccttcttctaagatgctattttgtgaagctgtatttttttcagggctactcatcaaaacatcctgtgatgtaattgaagaattcagttccattccttccacaacatctgaaattccttcttttttgttagtattaatatcatctgctactccaccagcaagaagaggcaaactcattctctcactggataaacaatccaccttcaagtctgtcttatttacaacatggntttcttcaattaaatctggtaatccaggacactgagcatcttctatgctgctcctgctttcaggaatactcaaaaacaaagtcttcttcacatgttcacttttcgtattctgaggaccggcattttctggnggatgtagtttgttgtgg

SEQ ID NO: 2719 - DNA, 244 bp, Homo sapiens
  unsure (1): n=A,T,C or G
  unsure (15): n=A,T,C or G
  unsure (17): n=A,T,C or G
  unsure (53): n=A,T,C or G
  unsure (54): n=A,T,C or G
nctgtgcgtgctgtncngaaagcctcccgccctccctgcagctccccgccctnngtggcccagggctttgttgaagtggaactccccacttccaacctggtatggctccttctgcgaagggaagctgatcccagcctcctgagctgaatccttcaaaggcacagcaggcagaatgagggccacaggcaggagtggtgtgggcacactgcttaggagtcaacatcttcatcattgggctttcttt

SEQ ID NO: 2720 - DNA, 287 bp, Homo sapiens
  unsure (11): n=A,T,C or G
  unsure (13): n=A,T,C or G
ccatgtccccntntttgaagccagagaatcgctcagatatccctgagggccggtcgttatcaaaagagatgattaggacaggggcctggcctggcttctggtaataccagtgtacattgttactcccaatattgtttcccccacaggtaatcttggccgtctttcctggggccactgacactgagggtgtctgagtcaacacataggaggtcacagagtctgtgcagtgagagaggaggccgaggaggagaacggtccaggccatggctgaggcaccaccagtgctg

SEQ ID NO: 2721 - DNA, 523 bp, Homo sapiens
  unsure (15): n=A,T,C or G
  unsure (502): n=A,T,C or G
ctgagtttccttccnagactcctcctacccccaggtgtgcccccttagcctccggaggcgggggctgggcctgtatctcagaagggaggggcacagctacacactcaccaaaggcccccctgcacattgtatctctgatcttgggctgtctgcactgtcacaggtgcacacactcgctcatgctcacactgcccctgctgagatcttccctgggcctctgccctggcctgcttcccagcacacacttctttggcctaagggcttctctctcaggacctctaatttgaccacaaccaacctgggcttcagccacatcagtgggcactggagctggggtgcacatggggcctgctcaccatgcccacacatctccagccagccagggccctgcccagcttcaatttacagacctgactctcctcaccttcccccctgctgtccagagctgaacatagacttgcacttggatgtcacctggagtgtcacatgggagtgttatggnagcatcataccaaggacctgc

SEQ ID NO: 2722 - DNA, 284 bp, Homo sapiens
ctgggcagactgtcgggaatccataggtgagctggggacccatgtacccatggctgctggggctggggcagggaaggtggcggtgaggagaaggaagggccagcctggaagaccacgcccactccatctcgggagcaagtcttggaagggcagcagttaagggagagaccttcgtgctgagtgtccaccctggggcttccaacaagggcaggaagtgctctcactactcctaaaaagtgctgggaagcaaaatggatatatcagggagaaaagctgaaaagcac

SEQ ID NO: 2723 - DNA, 423 bp, Homo sapiens
ctggtggaggaggaagaacctatgaatctctaaggctctggaaccatctgcccgcccaccatgcccttgggacctggttctcttctaacccctggcaatagcccccattcctgggtctttagagatcctgtgggcaagtagttggaaccagagaacagcctgcctgctttgacagttatcccagggagcgtgagaaaatccctgggtctagaatgggaactggagaggaccctgagaggagacgggctgggcggcgacccccacagggctctcgagaacagattctcccctccagtatgggccctggctgtggcccccattcctcaggactgcacagaggaggactggctccggctccgtcgggctcacccttaaccactattcctggctctgcaaaccccagactttgcacacagccccagg

SEQ ID NO: 2724 - DNA, 301 bp, Homo sapiens
  unsure (14): n=A,T,C or G
aaaggaagtctttntgaaggaatgaaagttgagcaggaatcttcgtctgatgataaccttgaagactttgatgtagaggaagaagatgaagaagccctaatagaacagagaagaatccaaaggcaggcaattgttcagaaatataaataccttgctgaagatagcaacatgtctgtgccatctgaaccaagcagcccccagagcagtacgagaacacgatcaccatctccagatgacattctggagcgagtagctgctgatgttaaagagtatgaacgggaaaatgttgatacatttgagg

SEQ ID NO: 2725 - DNA, 149 bp, Homo sapiens
cgaacttccgcttggtgaacgtcacctgccgattcctttggtccaggatgcgggagatctggatttttttcctccccatcgtcccaggctgagtggaatgatctttgtctgctcggcctgggccctgggacgctgggcgcacggacccg

SEQ ID NO: 2726 - DNA, 591 bp, Homo sapiens
ctgatggggtggtgccatgaagaaaaagagacgcttcaacagtattgataggttgatgagttgataacattctccagggcatgacttgatcagatgagccactatggtgacatggtgtgcacacagttcagcagtcccatatcgagcaaggaagcaccatgcatccatagctaacaaagaggtgatcatattagcactaagtacagcattcagcagagcagcatccagttcagcaaacagtgagggatgaaaggaagtaataaatgtacacagatgaacacaaacatgctgatacaaggtgacagccacctcagctttccccttactctttaatccctgtaaatgaacaggtagagagagttcaccagaacactgctcaaaactgtagaaaacggctttgagtagagatatcctggttgtccgtttctgagacctggctgtctgtgcaccacagggtttgcacttccttagctgagatggcagcttatccatgacaacaaccagaagaagacattgtggaaaccgcagttcacatggcaggtctaatttactgtccaaaaccacctgcatgaaaggctgaaatgtgagcag

SEQ ID NO: 2727 - DNA, 420 bp, Homo sapiens
ctgagaaccatgggttaagacccaaatagaaagtttaataaaatgttaaaataaacacctagccaaaccctgcattcagtattccagcaaagctatggtcatgctatcatcaatcctgcctgtccaacgtctcatgacatttctccctcttctgttaataacacaaacagattcaatacaaactgccaaaataccatttttagccacgagggctgagccctgtgctctttgccaatagcagcaataaagctgggcagaagctaagcccaggactgcatggaatattggctatctgtggtagtagcacaaaataagatgtataactgaatagtctatcattttgacaaatctggacttcaaaaaggatgctgggttttttttctcttaaaaagatttattatcaaaaagtttgctcccttt

SEQ ID NO: 2728 - DNA, 298 bp, Homo sapiens
  unsure (15): n=A,T,C or G
ccgatgagttacagnctgttagtaacatgaggggacattttggtgagaaatgggacttaactccttccagtgtccttagaacattttaattcatcccaactgtctttttttccctaccattcagtgattactgtcaaggctgcttagaatccaaacttggatttttgactctggcaaagcttttagaaatactgcaagaaaatgatgtgtacccaaacgtgagcataggaggcttctgttgacgtactccaacagaagaactgtgtttcaagttcaatcccacctgttttgtggtcag

SEQ ID NO: 2729 - DNA, 476 bp, Homo sapiens
ccatagctgtcacttcctgttgcatcgtgtaagcaggtacataatgtctgatggtcctcctttctgtgatcttaagattggttggtgggtccaggggtggtcagcctaatccctccattatgcagtccctgggtgccttattcttgatctgtaaaatgtgactagattaagcacaggggtctctactccacagggatcttatgtgaatgaaatggtataacagattagaaagcactttgttttaaggagcccatagcaatcagaccaattctggacttctgctatagagtcagatctgaagggcacaccttttcctctaaggtccacagctttttttcactgttgactttctaaccatcatcattttgggggtttggcttttagctgcagtgttgtggtataaatggcacgagtgattggaccaagtggcccaccagcatcttgcccctcagatcgaaaagtggaggtaattttgt

SEQ ID NO: 2730 - DNA, 196 bp, Homo sapiens
  unsure (18): n=A,T,C or G
  unsure (28): n=A,T,C or G
  unsure (36): n=A,T,C or G
  unsure (134): n=A,T,C or G
ggtccaggctgtgttggnctatatcctncatactgntgaccttgtccctgtgggtagttaggatactgaggacctggaccaccctgtgaaggaccgtagccctgctgctgtcctgggtaaccttgctgccctgngtactgctgctgctggggtggatatcccatgttgtggaggtggtccctggtatgcatcttgc

SEQ ID NO: 2731 - DNA, 284 bp, Homo sapiens
ctgtggtagagtgctgatcttagcatgcttcgatgtggcatacttgttcttgacagtcatgtgctttgtaagtccttgatttaccatgactacattcttagccaggtgctgcataactggaagaagagattcttcagtatatgacaggtaatgttgtagagttggtgtccattcaccattatccagaattttcagtgctaagcaaaaagctcctgctgcaatttgagaaggaggaaagtgcaccatgtcatagtccaacatagttagttccatcaggtatttgg

SEQ ID NO: 2732 - DNA, 115 bp, Homo sapiens
aaaaacatcaaacatactcaaaaacaggcaagctggaaagataaacaacatgacaggattcccagtttaagtcaaattcctcaataaaacaataaatgcccacgtgtttaactgg

SEQ ID NO: 2733 - DNA, 144 bp, Homo sapiens
  unsure (12): n=A,T,C or G
gccgccgtggantccaaaatttcgggagctgtgaccctttcctcatgtaaaacgagtagtcttggacggtgagcggacagttgccttcaacttttgggaagagctgccggttcggtggaaaagctgtggctgggaatcaggagg

SEQ ID NO: 2734 - DNA, 202 bp, Homo sapiens
  unsure (17): n=A,T,C or G
  unsure (19): n=A,T,C or G
ctcaactgtggttgatntntctgtgcccggaaagtttggcatcattcgtccaggctgtgccctggaaagtactacagccatcctccaacagaagtacggactgctcccctcacatgcgtcctacctgtgaaactctgggaagcaggaaggcccaagacctggtgctggatactatgtgtctgtccactgacgactgtcaagg

SEQ ID NO: 2735 - DNA, 356 bp, Homo sapiens
ccactcttcaggaggatgtcttcactggtgggccccacgcaaagcttcttcatgagggaatctaagactttgggggctgtccagattatgaatgggctcttccacattgccctggagggtcttctgatgatcccagcagggatctatgcacccatctgtgtgactgtgtggtaccctctctggggaggcattatgtatattatttccggatcactcctggcagcaacggagaaaaactccaggaagtgtttggtcaaaggaaaaatgataatgaattcattgagcctctttgctgccatttctggaatgattctttcaatcatggacatacttaatattaaaatttcccatttttt

SEQ ID NO: 2736 - DNA, 332 bp, Homo sapiens
aaagaactaatttgtaaattatgacacaaaattttattaacaaggaaatatccattaattgactactacagtaaaaactttataatgcttgtatcacgaagaaagaccttccttttccttatatattaattgaactacataggcttgctgtacattttgttattcatgttataagaattctagattccattgcttttgaaatatgtttctttttaggaactaaaagtcaacttatagtttgatttctgttttatttgtactgtgtttctgattttgtgggtttctaaataaaaagatcaaacccaccactttcaatatactgttttctattt

SEQ ID NO: 2737 - DNA, 354 bp, Homo sapiens
ctggctggcaagatcacgggcatgctgctggagattgacaactcagagctgttgctcatgctggagtctccaggatccctccatgccaagatagacgaggcagtggccgtgctgcaggcacaccaggctatggagcagccgaaggcgtacatgcactgaaaccagaaaaggaaatcctcgcttccatggctgccaaaaggacagtgtttctggctctcagccctaaggccctgcaaactctaacttatttcccaattagtctgtatctatacttgggctctgtatgtgaatgaaggttggtcacccatccagcctattaccttttgctttgtgtattaaaagtgctgcaaaatc

SEQ ID NO: 2738 - DNA, 119 bp, Homo sapiens
  unsure (16): n=A,T,C or G
ctgtatgctctggganccctcaaccaccttggggagctcaccacgtctggtcgaaagatggcagagctgccggtggaccccatgctgtccaaaatgatcttagcctctgagaagtacag

SEQ ID NO: 2739 - DNA, 438 bp, Homo sapiens
  unsure (424): n=A,T,C or G
cttctacaggcccaagggtcgagaggaggagagtgatcaaatccgggagaagttcgctgttcctgagagcgatcatttgacctacctgaatgtttacctgcagtggaagaacaataattactccaccatctggtgtaacgatcatttcatccatgctaaggccatgcggaaggtccgggaggtgcgagctcaactcaaggacatcatggtgcagcagcggatgagcctggcctcgtgtggcactgactgggacatcgtcaggaagtgcatctgtgctgcctatttccaccaagcagccaagctcaagggaatcggggagtacgtgaacatccgcacagggatgccctgtcacttgcaccccaccagctccctttttggaatgggctacaccccagattacatagtgtatcacgagttggtcatnaccaccaaggagta

SEQ ID NO: 2740 - DNA, 332 bp, Homo sapiens
aaaggtccactttcatgaattgttttaagtcctcactttattttcttcaataattaaagatcatatgcatatttattggtaaaatacagtttgggtagtcaataaactcaccctggagttcccaaatgacattaaattcaaatctattcaggaaagaatctgggaatacaaccttcccatattcagaggttcaactatgctagattaaggtctactagaagcatctctagtaacccaagtaaaatgctatcacaaacaccaatttctaataagtttattacaagaacataaattgatctgtgcatatgatctttaatttatatcccagattt

SEQ ID NO: 2741 - DNA, 492 bp, Homo sapiens
ccacaagatatgttctagagacgtccatgagtcctcttgctgtgtgggagcggcatccacagacttctggaataattggcctgtgaggaagctcatcaaagctgcaaacagtacaatgaatgcaatagagagccagagggccttattagcctttctgatggaggacttgagatttgttgcccaggaagctattgtgtcataaactgaagagacatcccactttgatggattatttttcttttcagaaagacttggcttccttgtcctttctactgtttcttctccagatggctctgagtcatctttagtttttagttcacatttttcttcttcagcatctgcccaggaataggtgctaataaatcgaggtaatgagggacggtgttcactctgctttgaccccaaaatacgccaactgcttgaccttctactgaatcgatcattattttccatcccagccaccattcctgcatttccaatatttctgggtaa

SEQ ID NO: 2742 - DNA, 495 bp, Homo sapiens
  unsure (15): n=A,T,C or G
  unsure (465): n=A,T,C or G
ctgcgtttctgtggnctctaaccgaagggcaatgcagccctcgccataggattcgtcgctgtcagaggacttgatgctgatgaggatgtgctggtctagcaggtactcagggtcagagataatgggcttcagctttggaagagtctcaccaaacttcaccaccagctccccctcacttccttcttcattttctccttcctgactcttgacaaaactctccaagcagctcgagtggaactccaggtagaatttggtctgggacttggtcttcaatgtggcatagcacctgagaaactcaatctgtccttggctgtcaacagtcccgggaccgttcttggagacaaactgggaagtgactcctgcctcaaatgtggcaaagacagggctgtggtcactcgtcatgatgtcgctggtactgccataagactgacacaccacgtgcaccaggggataagacttccagangactcggtcacaccaggaaggcaagttgta

SEQ ID NO: 2743 - DNA, 275 bp, Homo sapiens
  unsure (14): n=A,T,C or G
  unsure (28): n=A,T,C or G
  unsure (236): n=A,T,C or G
ctggagggaagaantcttttgttgcctntgagtccctgcctccccttctgatggggtcctggctgtgaggctgtcaagctgcttctgcaacttgtaccttcgggcggctaacagaggtagctggatctgcgggtccaccaggccctgcagctccatgtagacttgagccgtgtcactgagtggagcctgggcccagccggagggagctgctgcgcctgggggtaacaggcccacanccccacagtagcccagggtgcccaggggctccaagaagg

SEQ ID NO: 2744 - DNA, 257 bp, Homo sapiens
  unsure (158): n=A,T,C or G
ctttcatactcacggcagcaagatggaaacgtgctgtgaatctgctccatgacctccgtgagatccgtgctggtgtcgtgcggtggggccagcaggtcctctcccgctgcctggtggaactgtgggccggaggcatctggatcaagcgagtagctcantgcagaatgctgaggagaagcccatggggaaacaccattgattcgggaatcagattcaggctgctccatcagacctgcccgggcgagcgctcggagccc

SEQ ID NO: 2745 - DNA, 288 bp, Homo sapiens
ctgctgggaggctctggccccactagtccctcatggccctactgaactggctgggaggctgctggaatggcccttggtccacagctctccacaggcaagaggtcaactgctgcttgaaagaggtagacaaaagttaggttgatggcgaaatgtctctgggttacccagtcttctggagcagcaagctgagctttaatgggctaagcattagggtgttacagaaaatttcaaatgcagccatctcccttggggcagatctacctagttcatgacagtatgtgcggctgg

SEQ ID NO: 2746 - DNA, 175 bp, Homo sapiens
  unsure (14): n=A,T,C or G
aaaaattgattcanaaaaacttgacacctgtcatgtaggccacaaaatagtagcgaactatactaagtggtatagcccactgtggagtgtggtcttttactcttccaaatagcccaagttggcaaaggttacttaaaaacctgccccccaaaaagctaacttttggtagattttt

SEQ ID NO: 2747 - DNA, 448 bp, Homo sapiens
aaataaaaagaaaacctctaaattggtaattgaattacctccctgtagctttatagtttgtgacatttcttgaccttgctagttctttcattagatctgcgcaagatctagtcatctggttaaggattttaagcagatgcaactataaacccaagaaactgtattactattactgttggtcatactaaacctgtctatttcctgaagtatatgacccacaaggatgtggaataactaggagaaactgtttttgtacactgtacatccttagtatttttacacgtatatgatagggatgaacatgattttccttcgtacagacagcttaaataaagcactatgtcaatctgctacttctctgtttattgttgttggatgtggttctataatccccccaaattaaatcttctttaatgaaaacatgatttttaatagccccagacctcgc

SEQ ID NO: 2748 - DNA, 145 bp, Homo sapiens
  unsure (88): n=A,T,C or G
  unsure (107): n=A,T,C or G
  unsure (126): n=A,T,C or G
cagtatgagggggagaagggtgggttctcatggatcgaagtgaccttcaagaaccccctggtatgggttcacgcatcccctgaacacntggtggtgactcggaaccnaagaagctctgcgtacaanttggaaggagaccctattc

SEQ ID NO: 2749 - DNA, 274 bp, Homo sapiens
ccagtgacacttttgcctgaatttttgtcatacatgtggaaagaatgaaatatgcagccatgtggaggataaacaagacaaagtctaatttcattaaacattagagcatctcagaggagacccccagtgagtacctcctctctgtaggcaagtagactggttgagtgttcagctctaagcagagagggtagctcctccctacagccggtcgtcctgtggtcttcccatttctcaggagagagggtagcttctccctgcagctagtcgtcctgtc

SEQ ID NO: 2750 - DNA, 405 bp, Homo sapiens
  unsure (342): n=A,T,C or G
  unsure (360): n=A,T,C or G
  unsure (364): n=A,T,C or G
  unsure (372): n=A,T,C or G
taatattaagtatgtccatgattgaaagaatcattccagaaatggcagcaaagaggctcaatgaattcattatcatttttcctttgaccaaacacttcctggagtttttctccgttgctgccaggagtgatccggaaataatatacataatgcctccccagagagggtaccacacagtcacacagatgggtgcatagatccctgctgggatcatcagaagaccccccagggcaatgtggaagagcccattcataatctggacagcccccaaagtcttagattccctcatgaagaagctttgcgtggggcccaccagtgaagacatcctcctgaagagtggcnttggaccacattgcattncaanagggcctntcattggctctgccgggaaagtcccattttact

SEQ ID NO: 2751 - DNA, 448 bp, Homo sapiens
ttttgtgtaccttgatgggcatgtttctagagtcagaactatatcacactgtgtcagggggagaattgcaaaaaaagaaaaaaaaccctacacaatattcacacaggggcagcttctttgacacttgagtgtctccctgagctaaaggaagcctcacttcaaaaacacctgagtcctgtcacaaaatcagctatacccagggaacacccagcactttcacggttttgtctgattctttatttacatatgcataattctatagtgttaatctgcatgatcacagtaagcacactgaaaacagcacctcagagtgagggctagatttggggtcgggtgtccagcctgtaccctcctgtcaccttctgtggtgcccccgtgccctgctcctcagcttgtcactagggagtcagcctgcggctccgctcctgacccatggagcgtcaatcag

SEQ ID NO: 2752 - DNA, 331 bp, Homo sapiens
  unsure (14): n=A,T,C or G
ccagtgatcattgnaaatgttagccatacagacttttaatgcaagtagtgctagtctcaacagacttgagagcttcccactccaactgccccgttgggatgccaattgtagactctttctgtaacacatctctgcagctctcatcattccttgggattgatacacatgtgccagccactgccaagctggaacagaggttgagttggacatgactgttttttgtagttcttcaagtacagcgtctgggagtggcttttgtgactccaggagtggtttacactgaacttgtctcaaaagtaagataacggctggctgatcagggttacttttt

SEQ ID NO: 2753 - DNA, 233 bp, Homo sapiens
  unsure (1): n=A,T,C or G
ngagctctaggagggaccacattggaaattccatccacccactcatccacccatctgatcattcaatcatctgtttatccaatcattcatccattcatccatccacccacccattttctgggctccaattttctgctaggccctggaaacaaaacacacaaaacccccaaacaaacaaaaaaacaaaagagtaaaagcctcatagaaaaaaagctgtttagtgaccagcctgg

SEQ ID NO: 2754 - DNA, 434 bp, Homo sapiens
  unsure (412): n=A,T,C or G
ctgcccctcctgggccgcttggtgagaggtttggtttgatacctctgcctccctcctgccagcatggattctgggtggacacagcctcgtggaaggtccagtaccaccaagagctgctcatccactcccaccccacactgtatcaaatgtatcacattttctcatgttgaacactttagccttaattgaaaatgagcaacaaagctggacaattgctagttgtatataaaatttaatctcaccgaatgtacagttttcaaatttcacgtgtatattaaggaactgatgcatctgagcattctgaaagaaagaaaaagaagctactttagctgccaccccattctagaaaagtctcttattttcaagctgttctaaatagcttcgtctcagtttccccaaaaggggtacccangcccctcctctgtgtgccccag

SEQ ID NO: 2755 - DNA, 293 bp, Homo sapiens
  unsure (36): n=A,T,C or G
  unsure (288): n=A,T,C or G
actccctcagtgactccaaatcccgctttcccttgnactgatccacctggccgagacacgggcacgcggctgagtgagtccactgaggtgttctgaatcacttaagccttcctgcaacccctgcttgcccgggtcagagctcccagatgtcttagcggtggtgcaaagtctgcatgttcatatttagacgggaatgtagagaggataactgaatgcctcggctttggtgagagaactgtacaggcccctcttccctccacggggttacacatcacagaagtctggggnagagg

SEQ ID NO: 2756 - DNA, 344 bp, Homo sapiens
gggaagtcagttcgttctctcctctcctctcttcttgtttgaacatggtgcggactaaagcagacagtgttccaggcacttacagaaaagtggtggctgctcgagcccccagaaaggtgcttggttcttccacctctgccactaattcgacatcagtttcatcgaggaaagagcatgtcctttgcaacctgatcacacaaatgatgaaaaagaatagaactttctcattcatctttgaataacgtctccttgtttaccctggtattctagaatgtaaatttacataaatgtgtttgttccaattagctttgttgaacaggcatttaattaaaaaatttaggttt

SEQ ID NO: 2757 - DNA, 105 bp, Homo sapiens
  unsure (13): n=A,T,C or G
  unsure (50): n=A,T,C or G
  unsure (82): n=A,T,C or G
  unsure (85): n=A,T,C or G
  unsure (100): n=A,T,C or G
ctggaactgcacntagtcccagctctcctcggccgcggtctcctcggggntggtgccgtacttttggatggttttctctacnacntcccgcaagcttccntccag

SEQ ID NO: 2758 - DNA, 492 bp, Homo sapiens
  unsure (413): n=A,T,C or G
cctagcattttgttagggaccatgggagatgtgaaggaagttatctcacacatgatatgtcttcaaggagctaaaaatgccagtggataaaagcaaaacacatggaaaaacaaagtacaaataataatccgtgtatattgtcaaaaggaacattttatcaaaaggtaggattgtagctaaggttggcttgccttcttccctcttttattcaacaaacatttaatgaaggcccactatgtgccaagcacttggtacatgatggtgaataaaacaaacaaggtttctgccctcatttacagcctggtaggggagacagaaatgaacaagtaaaagtagcatatatataaactgcaataaatgcaatgaggggaaaagacaagatgtggtgacagacacagaagtagactgctcanggactgaagggcccgggaattgtcaagacttgaggaagaaggacaccacctgagtcaagagtggtgggggtggagagct

SEQ ID NO: 2759 - DNA, 209 bp, Homo sapiens
  unsure (1): n=A,T,C or G
natcggtggttggcctggcatcaacagaaaccaggcaaagcccctaatgtcctaatttatgcgacttccagtttagaagaaggggtctcattaagatttactggcagtggatctgggacacaattcaatttaaccatcaccagtctgcagcctgacgattcagcaacttattattgtcaacattattctgcatctcttcgcagttttgg

SEQ ID NO: 2760 - DNA, 231 bp, Homo sapiens
  unsure (39): n=A,T,C or G
  unsure (57): n=A,T,C or G
  unsure (58): n=A,T,C or G
  unsure (61): n=A,T,C or G
  unsure (96): n=A,T,C or G
  unsure (186): n=A,T,C or G
  unsure (189): n=A,T,C or G
  unsure (213): n=A,T,C or G
cattatcatttttcctttgaccaaacacttcctggagtntttctccgttgctgccannagngatccggaaataatatacatactgcctccccaganagggtaccacacatgcacacagatgggtgcatagatccctgctgggatcatcaagaagaccccccagggcaatgtggaagagcccattcntantctggacagcccccaaagccttanattccctcatgaagaagc

SEQ ID NO: 2761 - DNA, 408 bp, Homo sapiens
  unsure (12): n=A,T,C or G
ctgtctcatatntccagcaccgggcaacgttacgaatggtgtaaccaccgcctcccagcatcagcataggcaggttaaagctcttgacaaattccacacacttggcgtgtcctttgatagttagattgaagcaacctaaccgatccccagatagggagtctgagccacactgtaagaccaccgcactaggctggaacatctccattactttggacatgacctaaaatgatacatcctggtcaccaccaacctcaagaaagcaatacgaggtttggagtggaaaggctgggtgcaacactttcccacccactcctacctttccactctccctcatgctatgtgggagagaaaagggagtgctaggctggagcccttgcttgcccacttgggatttcaattttccaattt

SEQ ID NO: 2762 - DNA, 277 bp, Homo sapiens
  unsure (248): n=A,T,C or G
ggtgcctcagccatggcctggaccgttctcctcctcggcctcctctctcactgcacagactctgtgacctcctatgtgttgactcagacaccctcagtgtcagtggccccaggaaagacggccaagattacctgtgggggaaacaatattgggagtaacaatgtacactggtattaccagaagccaggccaggcccctgtcctaatcatctcttttgataacgaccggccctcagggatatctgaacnattctctggcttcaattctggggacatgg

SEQ ID NO: 2763 - DNA, 370 bp, Homo sapiens
  unsure (330): n=A,T,C or G
  unsure (346): n=A,T,C or G
caagtcacagtttccagcgtgctgctcagccctccgagtgtgtgtgctcatccttttcatagaagtcccatcggccatggagagggttgggctgcagagctgtgattgccagaggcccttccttgagaactgtggggaaggaggccctgggggtttcttctgtaggcagagctcaggccccagtcacctctgccaccctcagcctggcactgttgtgccagagcctctgctgcctctctcttcctacccatctgcagaccagcagaatattctccccctctcatcaccaaccaggagtttggtgtggtttctggacaccggccagagcantcactgcggggctggntttgctgggcttccctgtcaaagc

SEQ ID NO: 2764 - DNA, 198 bp, Homo sapiens
  unsure (24): n=A,T,C or G
  unsure (34): n=A,T,C or G
  unsure (104): n=A,T,C or G
  unsure (146): n=A,T,C or G
  unsure (152): n=A,T,C or G
  unsure (154): n=A,T,C or G
  unsure (161): n=A,T,C or G
  unsure (170): n=A,T,C or G
  unsure (184): n=A,T,C or G
  unsure (186): n=A,T,C or G
  unsure (191): n=A,T,C or G
gatgaagccttcctggcccgtggncagggactgngccttccaccactcgccgctctgctccaggatgcggagctgttcccccttctcaaagcccagatctccgncgtgagagggctcatagctgtgcagagcgataaccaggttgncttgcngnggggaanccggcggantggagccttcgaangnaaccnggggggg

SEQ ID NO: 2765 - DNA, 411 bp, Homo sapiens
acattatggagcagcgtccctgaactgcaggaggagaacctgcaggactcctgggtaggattgcacttttgcaataatggaaatgggagcaatgtttcagcctaagtttctatttataatggtgacaaaaaaatactgctggattcccattatgggtctcgatagagtgccaaagagttctcattgtgacagcccaactcactcagaaacaccatgagacacttttgggtgtcccttctgaagacagacactgaaagcattgaagagaaaaacagctctcagtctgaataaaattgtattacgaggttaaaagcatctgaaagagaaattcagactacatataatattagccaagtcgaccagaaaatactcccctgagaaagtttctctctaaatacccaaaatgcacag

SEQ ID NO: 2766 - DNA, 458 bp, Homo sapiens
tatgttgggagccatcaatcaggaaagccgggttagtaaagcagttgaagtgatgattcagcacgtagaaaacttgaagaggatgtatgccaaagagcacgctgaattagaagaactgaaacaggttcttctgcagaatgaaaggtctttcaatcctcttgaagatgatgatgactgccaaattaaaaaacgttcagcttctctaaactccaagccatcttctctacgaagagtgactattgcctctttacccagaaatattggaaatgcaggaatggtggctgggatggaaaataatgatcgattcagtagaaggtcaagcagttggcgtattttggggtcaaagcagagtgaacaccgtccctcattacctcgatttattagcacctattcctgggcagatgctgaagaagaaaaatgtgaactaaaaactaaagatgactcagagccatctggag

SEQ ID NO: 2767 - DNA, 372 bp, Homo sapiens
  unsure (1): n=A,T,C or G
ntcacgtggaccttggtcaatgttggaggtagattcagacatcaaaggctctccagttttagtggatacctgaggatcttgagactgtacattattctgaaatgatgaaggtctaggcaacagcatgtcttcagtaagaccagaataatcctcttcaataaagagtccaggaatagaagggaaaatccagtatcgtctatacatgcggtcgcgacccaagggaaagatattggtacaggctatggcactttggattttttctaagagctctttctcttttcgttggtgttcctgttttaatgcttcttcctcatcagcagtaagaggctctcttgttacacagttgatctgttcttgccttgtaaattcttt

SEQ ID NO: 2768 - DNA, 375 bp, Homo sapiens
  unsure (1): n=A,T,C or G
  unsure (342): n=A,T,C or G
nactggcagaagaggctgggaagagctgtggagccggctctgtgatgcaggcccccgaggagccgccgccagaccaggtcttccggatgtttccagatatttgtgcctcacaccagagatcatttttcagagaaaaccaacagatcaccgtctaagtgcgtcgcttgggcgccccaccccgtctgcgtcctgcatccatctccctgttacagtggcccgcatcatgattaaagaatgtggatccctctgtctggggtgggatgccttactttgcacttaatttaataagggcattctcggaggagtagacgtttaatacgaagtggcggcatagccctgccnagatgtcggtgatggcctggatgctgtaaccac

SEQ ID NO: 2769 - DNA, 290 bp, Homo sapiens
ccatgtccccttaattgaagccagagaatcgctcagatatccctgagggccggtcgttatcaaaagagatgattaggacaggggcctggcctggcttctggtaataccagtgtacattgttactcccaatattgtttcccccacaggtaatcttggccgtctttcctggggccactgacactgagggtgtctgagtcaacacataggaggtcacagagtctgtgcagtgagagaggaggccgaggaggagaacggtccaggccatggctgaggcaccaccagtgctgctt

SEQ ID NO: 2770 - DNA, 504 bp, Homo sapiens
aaaagcccagattctactcataaaaatatgaatggagaaaagcaagtagtgtctgtgcaacacagtgcagtatattgtacagaatatttttaaggccatggcagtctataaattaaaactgatattcattaaaagaacttactgttgactacactctgagtgctcaacacatttggaaatgcagtctacataagtgctgcttaacaaaagaaacaaaatcacacacagtgtgaggcaacacataagcaggtgtaccatagagttttatctactacagtggtctatatgaataataatttacaaatgaaccagtattaatatgtccctttatgtatacggaagtcgctaaactacaaaacatgtccatttgaagtttttagacatctctgtatcatagaagcaaacaaacagcatcagttcctcagttctctgtgtgactgattattaaacaacctgtagacattgagcatgattacattagataaagcaggcaggtctagagtt

SEQ ID NO: 2771 - DNA, 189 bp, Homo sapiens
ttatcttcatttgagttaacagcacacaggtaagagtcagagacatttctaggtctttgtaggtgtgcacgtgtgacatgtcttatcaatgcagacccaccatgtgtgcaggggtggcctgggccccgctggttgggtgtccagctccttgcttttccctctttctgttttccccctgcgtccttccag

SEQ ID NO: 2772 - DNA, 272 bp, Homo sapiens
  unsure (196): n=A,T,C or G
  unsure (212): n=A,T,C or G
  unsure (229): n=A,T,C or G
  unsure (245): n=A,T,C or G
tgaagccagagaatcgctcagatatccctgagggccggtcgttatcaaaagagatgattaggacaggggcctggcctggcttctggtaataccagtgtacattgtgactcccaatattgtttcccccacaggtaatcttggccgtctttcctggggccactgacactgagggtgtctgagtcaacacataggaggncacagagtctgtgcantgagtgaggaggccgangaggagaacggtccangccatggctgaggcaccaccagtgctg

SEQ ID NO: 2773 - DNA, 299 bp, Homo sapiens
  unsure (1): n=A,T,C or G
  unsure (42): n=A,T,C or G
  unsure (45): n=A,T,C or G
  unsure (59): n=A,T,C or G
  unsure (90): n=A,T,C or G
  unsure (121): n=A,T,C or G
  unsure (173): n=A,T,C or G
  unsure (176): n=A,T,C or G
  unsure (192): n=A,T,C or G
  unsure (203): n=A,T,C or G
  unsure (205): n=A,T,C or G
  unsure (230): n=A,T,C or G
  unsure (237): n=A,T,C or G
  unsure (238): n=A,T,C or G
  unsure (242): n=A,T,C or G
  unsure (252): n=A,T,C or G
  unsure (269): n=A,T,C or G
  unsure (270): n=A,T,C or G
  unsure (291): n=A,T,C or G
nagccctaaattttttccagtattggtcaacactgagggtanaanggttgggtgaacanaatattaacaaggtaaatgatctctaatcangaaggaaatgatcatcccagatgctgaattntccttgctataatactacatcctatcttctccaaaaatcacttttgaaaaangcncaccccctagattagnacttgcatacnanacttgaggacctgcccgggcggccnctctaannggcnaattctgcanatattcatcacactggnngccgctcgagcatgcatctanagggccca

SEQ ID NO: 2774 - DNA, 203 bp, Homo sapiens
  unsure (199): n=A,T,C or G
tcacgctggaccttctgcactaacatgtgatttcttatgattgaaggatcgtgcaagattctcttggtgtaatgcttagtctgagagctgacagatttcacaagcttatcttttttactactaaagtcatacatgctaattgtagaatatttggggtaaaaaaagaaaaaaattacattaataacatggtctttccagncttt

SEQ ID NO: 2775 - DNA, 368 bp, Homo sapiens
atgggtctcagtacagcggctccagggtggagactccggtgtcctacgtcggggaggacgacgaggaggacgatgacttcaacgagaatgacgaggacgactgacgtcctccccacttcagattcggcttcaggaaaacgtttagcgaaaagaaacttttttttaatgtgggttttctgtttccttttggcctactcccaagaagatattggtaagctattgaatttagatatgcacctctgataagcaaggattgtttcccgtaggattaggacgtgctgtggatgtgtgttttgataccagtgtgctgatgcagagcgtttatttacttgttaggattttgtgttttcatttgctatttttcttta

SEQ ID NO: 2776 - DNA, 271 bp, Homo sapiens
  unsure (36): n=A,T,C or G
  unsure (233): n=A,T,C or G
tcacgtggaccttggtcaatgttggaggtagattcngacatcaaaggctctccagttttagtggatacctgaggatcttgagactgtacattattctgaaatgatgaaggtctaggcaacagcatgtcttcagtaagaccagaataatcctcttcaataaagagtccaggaatagaagggaaaatccagtatcgtctatacatgcggtcgcgacccaagggaaagatattggnacaggctatggcactttggattttttctaagagctctt

SEQ ID NO: 2777 - DNA, 398 bp, Homo sapiens
agctagcaaaccctcccttgccacctatgattctagaagggattcctcggtcacatcaactaaagtagctaagctactgtaatgatttgaaagtttgttatgagagaattatgctttgtcaagccaactataaggcagctttctacaacagttctgcaaaatgtttccaccacattgagcaaagctgacactagacactagctacacgtgggaataggaagatgggccagactcagagccgccgcaaaggatgaagtccactcagatttgaggcaatcctggggcaaagcactgagcaaagcaacttctctggtaatctcctcctcagccattctctacccaggatttcagaacacagaacagaagaaactgcaaaagccctgcaggatatatcacag

SEQ ID NO: 2778 - DNA, 214 bp, Homo sapiens
tttcttagaacatgtggaagaaggaaaaagacaaaaaaggaaatctggattctgaggaccacgtctcacccagggtgacatcaggaatggtgctagcctctgcaacacgacacccagtctgaagagctctatacaggtactaagactagcaggggacaccaagactctgcacaaccagattgcttgtgcagagggccacaataaaatataaaac

SEQ ID NO: 2779 - DNA, 215 bp, Homo sapiens
  unsure (66): n=A,T,C or G
  unsure (149): n=A,T,C or G
  unsure (169): n=A,T,C or G
  unsure (215): n=A,T,C or G
cttcagaatatttgtaaatctacttctagatgtactacacatgatctgcttttaaactggatttgngtctatggaataaacttaagtcccaaagatagatttcagtgattccctcaatttgagcccttaggatttaggtgtttttttgntttgttttgttttgttttgntttttttttttgagcaaatgaacttatgatttggatttctgagcan

SEQ ID NO: 2780 - DNA, 445 bp, Homo sapiens
  unsure (368): n=A,T,C or G
ctgaagaactgagacaggaggtggcactgctctgacaccatcctttgaaggtgacagagcatctcagggcttgggggacgccagccggactttgagaggagacagaagaggtgcttgcagaggtatttcacaaagatcagggtctcggcccaaaagttgacttctgctttttcaaacaggtagtcttcttccacctaaatcagatgaaaaagccgaaagtcagtcttacagggaatggtgacaagccccagtccagaccaagcagtaccctgccagatgcaagaggggtttcccttcccccacctgacagagggtgcactcttgcctgtcaacatccatgtacacacaccacttgcagccttgaaggncaccttctattttcactcactgtatttctccaccagagaggaattttttccccagacttaacatgaccttggataaa

SEQ ID NO: 2781 - DNA, 270 bp, Homo sapiens
  unsure (64): n=A,T,C or G
  unsure (149): n=A,T,C or G
  unsure (185): n=A,T,C or G
  unsure (188): n=A,T,C or G
  unsure (190): n=A,T,C or G
  unsure (209): n=A,T,C or G
  unsure (225): n=A,T,C or G
  unsure (227): n=A,T,C or G
  unsure (234): n=A,T,C or G
  unsure (265): n=A,T,C or G
  unsure (266): n=A,T,C or G
cccatcctcagcacgtggattcgagtcaccgtgagaattccggtatctcaccctgtcctcaccntcagggctcccagggcccacactgtggggggggacctgctggagcttcactgtgagtccctgaaaggctctcccccgatcctgtnccgattttatcatgaggatgtcaccctggggaacanctnancccccctctggaggaggancctccttcaacctctntntgactgnagaacattctggaaactactcctgtgatgcnnacaa

SEQ ID NO: 2782 - DNA, 310 bp, Homo sapiens
  unsure (36): n=A,T,C or G
tgctcagtctgggcctaaggaagcagcactggtggngcctcagccatggcctggaccgttctcctcctcggcctcctctctcactgcacagactctgtgacctcctatgtgttgactcagacaccctcagtgtcagtggccccaggaaagacggccaagattacctgtgggggaaacaatattgggagtaacaatgtacactggtattaccagaagccaggccaggcccctgtcctaatcatctcttttgataacgaccggccctcagggatatctgagcgattctctggcttcaattctggggacatgg

SEQ ID NO: 2783 - DNA, 478 bp, Homo sapiens
  unsure (11): n=A,T,C or G
  unsure (49): n=A,T,C or G
ccaaatctttntttttttcttggagctgtaagatcttttcttctactgntccctcacaaacaaatctgtgtatgacaacatctttctgctgccctactcggtaaattcggtcacaagcttgatcttcaagtgatggattccagtgcatgtccaaaagaaagaggtgatttcctccagtcaggtttagaccaacacctccggccaagagagagattagcattacctgagggcctctggagtggttaaatgcctctaccaagtccattctctgcttgggattgacagagccatcgatggtggcataagtcagtccatgcttcttcaggtgcaatgctacaactttcagcatgttggtccactgagagacaatgacactcttttgggatgctgaatttctttgaattgcctccaattctgccaacagagatgaaatcttggtgctctctcgcatgccttcaaaaagctccatcttgaagaa

SEQ ID NO: 2784 - DNA, 337 bp, Homo sapiens
  unsure (19): n=A,T,C or G
cgaggtccaaaccaggtcntcaggcatcccaggatttccaggcatcagatggagggtgagggctgcccagaaaatgtcagtgtgtgtcaacatttactgcaggttcagagctccctccggggtccctgagtacatcatgtgctcctgagagttttaagggaaagccaagtaaagacgtgatgatgttctaaacccaagcaattaataaacgccacggaaatcagtcattcacttaccaagtatttctctgctttctgccatgtcacgggcccatgatcccctggagattgagggaaataagatcacaggagctcccagtctgagtgagaaaaggcag

SEQ ID NO: 2785 - DNA, 295 bp, Homo sapiens
tttgaggaacaagaggtggacatggaagcgttcctcacactgactgacggtgacttgaaggagctgggaattaagacagatgggtccaggcagcagattctggcagcgatttctgaactgaacgcaggcaagggacgcgagagacaaattttacaggaaaccattcacaactttcactcttcctttgagagcagtgccagcaacaccagggcccctggcaacagcccctgtgcgtgatcctccttcccgcagccaccagcgtgagctctctgaatcccgggaccccttcacgtgg

SEQ ID NO: 2786 - DNA, 179 bp, Homo sapiens
gtgttggcaatcgttttcgtaagagtcagaaaaattaggccggtttcacaatatagagtgtcctttctggtcaacagtattgcttcaggacagaagagcatttcacagatctttcctgtaacttctagaaaagtcatccagccagatttaggctcaagcttctttacaaagccattttc

SEQ ID NO: 2787 - DNA, 238 bp, Homo sapiens
  unsure (34): n=A,T,C or G
  unsure (157): n=A,T,C or G
  unsure (171): n=A,T,C or G
gcccaagcacagccctgactaggatgacagcagnacaaaagaccacctttctcccctgagaggagcttctgctactctgcatcactgatgacactcagcagggtgatgcacagcagtctgcctcccctatgggactcccttctaccaagcacatganctctctaacagggngggggctacccccagacctgctcctacactgatattgaagaacctggagaggatccttcagttctgg

SEQ ID NO: 2788 - DNA, 333 bp, Homo sapiens
  unsure (257): n=A,T,C or G
  unsure (273): n=A,T,C or G
  unsure (298): n=A,T,C or G
  unsure (311): n=A,T,C or G
  unsure (332): n=A,T,C or G
caagtatgtccatgattgaaagaatcattccagaaatggcagcaaagaggctcaatgaattcattatcatttttcctttgaccaaacacttcctggagtttttctccgttgctgccaggagtgatccggaaataatatacataatgcctccccagagagggtaccacacagtcacacagatgggtgcatagatccctgctgggatcatcagaagaccccccagggcaatgtggaagaccccattcataatctggacngcccccaaagtcttanattccctcatgaagaagctttgcgnggggcccaccagngaagacatcctcctgaagagng

SEQ ID NO: 2789 - DNA, 449 bp, Homo sapiens
cgaggtctgagctcctctggttcttctctagacctgctccctctctgaaatgcaaggccgtgcctttaatgggcttttggcattctgtctccagacctcccttctcatctgaagggctctcaggagaacagagaaaaaaccagcctgtctccaaactggcccgtctcagggactgggggcctttacccccagtgaaagatgcagactttacagcgctgcagtacagtagagtcaagtgactccttcagatagttggatgggtctctcgatcattcctgataataacattttgcctatgttaagtgctttccacctatcatgttaccttctaactactcccttggttggatacaggtattagccccatttcacaattaagaaattgaggcttaaaaggattaaagagttttttagaggagaaacagctcttccttacagaaggatcccaa

SEQ ID NO: 2790 - DNA, 219 bp, Homo sapiens
  unsure (215): n=A,T,C or G
tacagggtcgaagccggcgatgaggccgactattactgtcaagtgtgggatcgtaataatgaccatgtcgtcttcggcggagggaccaaactggccgtcctaggtcagcccaaggctgccccctcggtcactctgttcccgccctcctctgaggagcttcaagccaacaaggccacactggtgtgtctcataagtgacttctacccgggagccgngaca

SEQ ID NO: 2791 - DNA, 374 bp, Homo sapiens
ccaccctgaccatttacagggtcgaagccggcgatgaggccgactattactgtcaagtgtgggatcgtaataatgaccatgtcgtcttcggcggagggaccaaactggccgtcctaggtcagcccaaggctgccccctcggtcactctgttcccgccctcctctgaggagcttcaagccaacaaggccacactggtgtgtctcataagtgacttctacccgggagccgtgacagtggcctggaaggcagatagcagccccgtcaaggcgggagtggagaccaccacaccctccaaacaaagcaacaacaagtacgcggccagcagctatctgagcctgacgcctgagcaagtggaagtcccacagaagctacag

SEQ ID NO: 2792 - DNA, 316 bp, Homo sapiens
  unsure (13): n=A,T,C or G
aaaaagtgaggtntttcttaaaagtttagtatacaaacaaaatgaaggtaccttcacattttactacagatgtgcagatagttttcttggtgcacagagataaggcagaattaagtcagaataaacgttctaaaactgacctccggaagaactagtcttagtcatttctttgcagagtatgtgaaccaagattcgggtttggtctttggtgttagcactgtgtcaaggatcagatagaaagtacaaatggaggggcccctttctgaggccaggccccactgttggggcatgtggggtgaccaaaggccaataccag

SEQ ID NO: 2793 - DNA, 429 bp, Homo sapiens
aaaaaagttaaatggagatcttctgggaaaccaagccatgaatgcgagtttgtactaacctagccctctggaggccacatctgtagcaatcagaataggagcttttccatgtttgaattcatttagaacccagtcacgctcttgttgactcttgtcaccatggatacccatggcaggccacccatctctcctcatttttctggtaagctcatcacatcttcttttggtttccacaaaaacaatggttttattctccttctcactcatgatctcttccattagacgaataagtttttcatccttttctacgtcatgacacacatccacaatctgaagaatgttgtggtttgcactcagttcaagtgcaccaatgtttatatgaatatagtctttcaggaaatcttcagcaagctgtcttacttcttttgg

SEQ ID NO: 2794 - DNA, 216 bp, Homo sapiens
  unsure (1): n=A,T,C or G
ntcaagaagctaagaagaaagaatctgttagaaatgctgaagcaaagattacaaaacttacagaacagcttcaagcgactgaaaaaattcttaatgttaacagaatgtttttgaagaagcttcaggaacaaattcacagagttcaacagcgtgttacaattaagaaagctttgactctaaaatatggagaagagcttgctcgggcaaaggcagtgg

SEQ ID NO: 2795 - DNA, 44 bp, Homo sapiens
  unsure (44): n=A,T,C or G
tcaagtccagtgtgtctgcctgtgactcctgcctgggggcccan

SEQ ID NO: 2796 - DNA, 347 bp, Homo sapiens
  unsure (13): n=A,T,C or G
ccaccatttcccntgcatcgtctctcctacgtaatcagtccctgatgaactctcttcccataaaaatccctgtgtcctaaagtcatggcgtgctctatttcatggtcatttgtagagcacagcagcactgtgcctgtcaggaaaagtgtgtgctaactgcaataagcatgatgactgccatcacggttttgttattctctgtccacctccatggtctctaaatcagacaatctttaatctgaaaaggcagtgtccttattcctccaggaaactggatagaaacgctcctcatctaatgaagtcagccctgtcatcttactgattctttcccagaccacagtgaaagg

SEQ ID NO: 2797 - DNA, 155 bp, Homo sapiens
  unsure (53): n=A,T,C or G
  unsure (83): n=A,T,C or G
  unsure (113): n=A,T,C or G
  unsure (116): n=A,T,C or G
  unsure (122): n=A,T,C or G
  unsure (132): n=A,T,C or G
  unsure (139): n=A,T,C or G
  unsure (140): n=A,T,C or G
ccatgaggaccagccgcctgtccagctcatgaatacgctcattcttcatctcnatgacaaagtgtaagctctccagctcctgntcccagaactggctggggctcccataatcntgnatatgnttcttatagnttgggcnnagaatggactcctcc

SEQ ID NO: 2798 - DNA, 294 bp, Homo sapiens
  unsure (267): n=A,T,C or G
aaagctatctgacgctaatgacttgtacaatctggtttgcaaactctgagagacagtatcaaataagcactgtcaaagactactcccagctaatctttactgccatttttctttgaaattgtctttgggactggctatgttctcactgtagcttccgtttatcccacagcacaaaccctaaagtccatgtgcagtctccatgttcaagtataaaagtctgtttcaggacaaccctgggttgctgtagtgtttctctctctgtagtgnctacttggtgtcatgcccttggacagg

SEQ ID NO: 2799 - DNA, 311 bp, Homo sapiens
aaatccaagtctcttgaggaccagagaagcactgctacctttttctttattcaacacagataccacagaatcagcagggtgagaaacaattgcacaaaagactccagctatgtaacctgctacaaatgttacaaccagttagtgatcaggtgagggttctttgaacctggttctatcagtcgaattaatccttcatgatgggccactttgtccttccagctcttggtcttattagttgccatctccagcttctttttaacttcctcgtactgctcaagtgcttgcttccgttctaactcaagctgctccag

SEQ ID NO: 2800 - DNA, 373 bp, Homo sapiens; identical to SEQ ID NO: 142

SEQ ID NO: 2801 - DNA, 287 bp, Homo sapiens
aaaattcccaaaaggattatacaaggcagccaaaaattcacaatctgaaaaatgatcaaacacattattaacccgtccatgtgacttggcagtgaggtggcgctgaatgatttggtgcagcatctctctgcattcatttaacagcctggataacacattccggtcaaaggtataatccacctgatggaaactgaccacggtcatagcaagctgatgaactttcttcttaaatttctccatcaatgctagctcatcttgattaaactgattatccctataaagaatgg

SEQ ID NO: 2802 - DNA, 424 bp, Homo sapiens
gcgttgtgaggggtgtcagctcagtgcatcccaggcagctcttagtgtggagcagtgaactgtgtgtggttccttctacttggggatcatgcagagagcttcgcgtctgaagagagagctgcacatgttagccacagagccacccccaggcatcacatgttggcaagataaagaccaaatggatgacctgcgagctcaaatattaggtggagccaacacaccttatgagaaaggtgtttttaagctagaagttatcattcctgagaggtacccatttgaacctcctcagatccgatttctcactccaatttatcatccaaacattgattctgctggaaggatttgtctggatgttctcaaattgccaccaaaaggtgcttggagaccatccctcaacatcgcaactgtgttgacctctattcag

SEQ ID NO: 2803 - DNA, 493 bp, Homo sapiens
ccagtgtaaaaaactctctccgggtcagggatatactcagtactgagctcatgcttgggcaccagtccctgcacattgttgtagaacttcacaatgcagccatagtccttgaccctgatgatgaagccatgtgtctgcagaccaggcttggcatcggcatagcaggtaatgacaggtagtttggactcaatcagggtttttttcagggtcatcatcagcttcttggcttcagggtcacaaagcaaaacccggcacttgacctcatccccgatgtggtacttcttctctggattcttcatcaggatgtcagccaggtgcatgggaggtaccaggcccctcatctgctcgcccaccttcaccagcatcccatatgactttatggttagcactgtgccctttaccactgccccaggttcgatgtcatgatatctaaggtactgagcttcaataatagacgttcgtagagagagcaaggccagttcatccatttggc

SEQ ID NO: 2804 - DNA, 398 bp, Homo sapiens
ccatgtaagagtagggtggccgctcagacacagagttctgccaggacgctgatggtctcgaaggctcctcaaccttaacctgtcgctgctccaggtgacaattctccttttcctccatctcttgcttgatgctgcgggagcccagtccatcagaactcatctttcgaagccactggatgttggataggctattgttgatagtgcagcctgctgcctcaccatctgcacaggtctcccgtttctgctcgcaaagggctccaggtggtctaggaagattcacatccctagctgcaggttttggtcccaaggtctccagggtcacttctgtccttttggcatcatagctggtttggatttgaggccggagtcctggaggctgagttggggctcccccacag

SEQ ID NO: 2805 - DNA, 250 bp, Homo sapiens
  unsure (1): n=A,T,C or G
  unsure (30): n=A,T,C or G
  unsure (92): n=A,T,C or G
  unsure (130): n=A,T,C or G
  unsure (150): n=A,T,C or G
  unsure (171): n=A,T,C or G
  unsure (182): n=A,T,C or G
  unsure (195): n=A,T,C or G
  unsure (206): n=A,T,C or G
  unsure (208): n=A,T,C or G
  unsure (211): n=A,T,C or G
  unsure (223): n=A,T,C or G
  unsure (229): n=A,T,C or G
  unsure (242): n=A,T,C or G
  unsure (244): n=A,T,C or G
  unsure (246): n=A,T,C or G
ntcgaggtccaccctgaccatcaacagggncgaagccggcgatgaggccgactattactgtcaagtgtgggatcgtaataatgaccatgtcntcttcggcggagggaccaaactggccgtcctaggtcancccaaggctgccccctcggncactctgttcccgccctcctntgaggagcttnaagccaacaaggncacactggtgngnatnataactgacttntacccnggagccgatgacncngncctg

SEQ ID NO: 2806 - DNA, 615 bp, Homo sapiens
  unsure (615): n=A,T,C or G
ccagtacacccatgaatttgatggagatgagcagttctacgtggacctggggaggaaggagactgtctggtgtttgcctgttctcagacaatttagatttgacccgcaatttgcactgacaaacatcgctgtcctaaaacataacttgaacagtctgattaaacgctccaactctaccgctgctaccaatgtgctgtttcctcaccacagaggttcctgaggtcacagtgttttccaagtctcccgtgacactgggtcagcccaacatcctcatctgtcttgtggacaacatctttcctcctgtggtcaacatcacatggctgagcaatgggccctcagtcacagaaggtgtttctgagaccagcttcctctccaagagtgatcattccttcttcaagatcagttacctcaccctcctcccttctgctgaggagagttatgactgcaaggtggagcactggggactggacaagcctcttctgaaacactgggagcctgagattccagcccctatgtcagagctcacagagactgtggtctgcgccctggggttgtctgtggggccctcgtggggcattgtgggtggggcactgtcttcatcatccgaggacctcn

SEQ ID NO: 2807 - DNA, 456 bp, Homo sapiens
ccatcttgaacttggaagggactatgtccagaataagtgggctcatggaactaactggttctaaagcctcaagatagggggcaatcagatttgaggctgagagaggtaaaccaagattttctttgaaggtacgggctttaagaaagcaaaagtggctgagcgtgttggctcacacctgtaatgccaaggcaggaggatcacttgagcctaggatttcgagggcagcctgggcaaccgcgagacctcgtctctgcaaaaaattaaatattagttgggcacggtggcatgtgcctgtagtcccagctacttgggaagctggggttgggaggatggctcgaacctgggaggtcaaggctgcagtgagctgtcatccttgccactgcactgtagcttgggcaacagagcaagagtctgtcttggaaagagcaaaagtaagttgctgtttgtatttccagg

SEQ ID NO: 2808 - DNA, 308 bp, Homo sapiens
aaatcacaacattctggtcgatataacagatagaaattcctgatctagacagcagaattctgttgtgttaagagagaatacacaattatagctaaactctaattctcactttatataaatttatttacactcacctaactacattattctaacaaaacactgggacaacttgtaaaagtacttatgcatatgtgcaggacaggaagagaaaataaagaatcagatttattggggtggttaagtgagatcatggatgaactgtttacttctattcagcagtagcctttgtggtcccaggcttccggtgg

SEQ ID NO: 2809 - DNA, 101 bp, Homo sapiens
ccaagggaataagcaagaggagacatttcctccctgccccagcactctgtcccaatccgagaagttccgaggctttcccggggcagtctgtgtcacgctgg

SEQ ID NO: 2810 - DNA, 436 bp, Homo sapiens
aaaaggcttccttttctgttaagttctgagacttaataaatgagataaaaacagtttcttacacctaagaaactgggttatgaaagctgtgcctaggatgttggggagagcacactgggagaaggcattcttgctggtaccttgagttcaggaatctacgttgaggcttcctcatccaccatgatcacagccccaggggatgctgggcttgttagcattcaagctctgggacctgattggcctctctgtctcctctaagtaaggacaactgatggggacagtctcccactctctgaggcttcgatgttccacgcatggctttcctcttccagaaactcccctccctggctctcccatgcagccctagtcagcagcagctcacaggtccgtggacagcgagtctgggatctgtttgccttcttcagccgatttgctg

SEQ ID NO: 2811 - DNA, 472 bp, Homo sapiens
ccactcccctttcttcttaggcagattctgccccatgtaagcaaaatgcctcagatcctggcaaagcagcgttgggggtacctcttcttcccaaagtcctggtcagttccccagaaaggaccagtcatggctgtgccagggtgactgccctcccccaggtcagccctgtcgacaaaggcaggggcttggttgtcatttccaccaagtgggaagacagtattaatagatggagaaccctctgcagtgggaagatttcagcaatgggcaagctggatagagccgtggttaggatggagttgtttgcttgttgcacttggagctctttatgaagcaagggctctgcctcccagcctgagacccagaccctggtttggacccagtagaactcttgtgggccctgggttggtgtctctgagcaaatccccaaagcaggagagtccctagcaccgtgagctctgtcagaacctcccag

SEQ ID NO: 2812 - DNA, 347 bp, Homo sapiens
ctgaatctgtctttcattcgaccccctgaaaaccctgctttgctgttaatcaccatcactgccaccaacttctcagagggtgatgtcacccatttcatctgccaggctgctgtgcccaaggtttgtaaagatcagagttcagaggtggcctggggactccaggagaaaaggccactaagtggaggaggtgggtgggagacagtgtgagatgggattgagtcatctggagatcagcacttggggagttacaggaaaagggtgtggagccactgagtatagaggggctgcctgagccctacctactgccatactgtgctctgttaaactcctgtgttcagagtctccag

SEQ ID NO: 2813 - DNA, 264 bp, Homo sapiens
  unsure (1): n=A,T,C or G
  unsure (97): n=A,T,C or G
  unsure (174): n=A,T,C or G
  unsure (236): n=A,T,C or G
  unsure (249): n=A,T,C or G
  unsure (254): n=A,T,C or G
  unsure (263): n=A,T,C or G
ncgaggtccaccctgaccatcaacagggtcgaagccggcgatgaggccgactattactgtcaagtgtgggatcgtaataatgaccatgtcgtcttcngcggagggaccaaactggccgtcctaggtcagcccaaggctgccccctcggtcactctgttcccgccctcctctgangagcttcaagccaacaaggccacactggtgtgtctcataagtgacttctacccgggagccgngacagcggcctgnaaggnagatagcant

SEQ ID NO: 2814 - DNA, 218 bp, Homo sapiens
  unsure (9): n=A,T,C or G
  unsure (12): n=A,T,C or G
  unsure (18): n=A,T,C or G
  unsure (23): n=A,T,C or G
  unsure (27): n=A,T,C or G
  unsure (30): n=A,T,C or G
  unsure (40): n=A,T,C or G
  unsure (46): n=A,T,C or G
  unsure (47): n=A,T,C or G
  unsure (51): n=A,T,C or G
  unsure (54): n=A,T,C or G
  unsure (57): n=A,T,C or G
  unsure (75): n=A,T,C or G
  unsure (79): n=A,T,C or G
  unsure (81): n=A,T,C or G
  unsure (83): n=A,T,C or G
  unsure (84): n=A,T,C or G
  unsure (85): n=A,T,C or G
  unsure (87): n=A,T,C or G
  unsure (89): n=A,T,C or G
  unsure (90): n=A,T,C or G
  unsure (100): n=A,T,C or G
  unsure (105): n=A,T,C or G
  unsure (107): n=A,T,C or G
  unsure (108): n=A,T,C or G
  unsure (110): n=A,T,C or G
  unsure (115): n=A,T,C or G
  unsure (119): n=A,T,C or G
  unsure (120): n=A,T,C or G
  unsure (129): n=A,T,C or G
  unsure (137): n=A,T,C or G
  unsure (139): n=A,T,C or G
  unsure (155): n=A,T,C or G
  unsure (160): n=A,T,C or G
  unsure (164): n=A,T,C or G
  unsure (170): n=A,T,C or G
  unsure (171): n=A,T,C or G
  unsure (184): n=A,T,C or G
  unsure (192): n=A,T,C or G
  unsure (195): n=A,T,C or G
  unsure (201): n=A,T,C or G
  unsure (205): n=A,T,C or G
ctgctccangcnctgcancatcntcanacncagggcttgnaacttnntggncantgngattatttctctttcttnctcntntnnnantnnttcaacaaanctgtncnncnccggnattnnaaacttaangtactgancnacttcatgggggactnccacncccnagtcannttccatcacgaanatcctggngancgactnacanggaccatgcagga

SEQ ID NO: 2815 - DNA, 385 bp, Homo sapiens
  unsure (334): n=A,T,C or G
  unsure (337): n=A,T,C or G
  unsure (371): n=A,T,C or G
caagcctcatcaataactgtatccaaaaggagacgctgcttggggtgtacccagagaaaacaccaagctttcctggcttcccggtcctccctctccccattagtctttggggtgcatacataagtgttgtgtgaagtctcttggggtttagaagatcttgcactcattgatggagaagagcctccttctgtttcgtctcctggcctggttgacggcagttcggacggcgcactcaaacacctgctgtactccccgattgctaagggctgagcactccaggtagcccttggctctgacatcctgggccagtttcttcccttccatggcattgacncangaggccctgaggggccccatctccccctggtcangtctgggtggaccc

SEQ ID NO: 2816 - DNA, 367 bp, Homo sapiens
ccaaaactgcgaagagatgcagaataatgttgacaataataagttgctgaatcgtcaggctgcagactggtgatggttaaattgaattgtgtcccagatccactgccagtaaatcttaatgagaccccttcttctaaactggaagtcgcataaattaggacattaggggctttgcctggtttctgttgatgccaggccaaccaccgatctatattctgagaggcccgacaacttattgtaactgtatctccgacagatgcagacagggtggaaggagattgggtcatctggatgtcacatttggcacctgggagccagagcagcaggagccccaggagctgagcggggaccctcatgtccatgctgt

SEQ ID NO: 2817 - DNA, 373 bp, Homo sapiens
  unsure (29): n=A,T,C or G
  unsure (67): n=A,T,C or G
  unsure (297): n=A,T,C or G
  unsure (310): n=A,T,C or G
  unsure (341): n=A,T,C or G
  unsure (363): n=A,T,C or G
  unsure (370): n=A,T,C or G
tcgaggtctggacttctttaagcgactcnttcaactgtgtcacgtgtcctttcagtagtatctgctnccgtatggactgctctaactgccgcttgagaagtgctttactgcggctcgagaacccatccggcttcttcttctgtgtggcggcgacagcacagagagaccactctaactctcctatacgctgcgatgaacgttgcaggcggccggccagatccttggactcttcttcaaagtatctgagagaatgtttcatgtgatacaggtccgtatttagtttctttttctctatgntcaatctctgganttgaccctctagctccctttcagctttctgnttctcattgtctgctttctttncttcttncag

SEQ ID NO: 2818 - DNA, 226 bp, Homo sapiens
  unsure (22): n=A,T,C or G
  unsure (23): n=A,T,C or G
  unsure (24): n=A,T,C or G
  unsure (147): n=A,T,C or G
  unsure (164): n=A,T,C or G
  unsure (187): n=A,T,C or G
cctgtcctcttaggactcaaannnagaccctggactgattttccagtccccaccgtcctgcgggacagccagcgtatgctaatgttgcaaacccatgataatgtatgtggaatatcctgccattggggttttacattaaaaccccanaatggctgcagaggggngaacaggccccaatatttggggngctgtgatacccctcttctacccacaaggagccctctcg

SEQ ID NO: 2819 - DNA, 436 bp, Homo sapiens
  unsure (14): n=A,T,C or G
  unsure (20): n=A,T,C or G
  unsure (278): n=A,T,C or G
  unsure (392): n=A,T,C or G
cctaaaaaagcggnctcggngggaatgcatttctcttgctccacgtctattttagttgcatatctgtagtgatgacaaatgcctccagccttgtcctctgcaaggctgcactgggctgcatacaggctcctgtctcaggtgtctggtttcctccttgaaaggttggggcagcagagtcagccctgtctatctgggcaaggccctgacacttggaagcatgaaaagccatggttcaggtggagtgagcttccaatgcccttggaaggattttatttcanggccgtggggcttaaaagtcatcactgtacaatccactgggagcaaagatcaagataacatgtgatggatatcataaaagcggaacagaacatcccattgctcagagatggganaacaactctgaatggagagggctcaggttatatacattcaccct

SEQ ID NO: 2820 - DNA, 294 bp, Homo sapiens
ctgaatctgtcgtgactttcctgagatctacccggggcttggctgtctgttctgggcactggctccgagttcccctcctgggatttgcaggagggcagtactgaacctgcattcttctccttgtaaatgtaggccgggtgcccctgttctccgggtttggaacaatacgaggttggtgctgatgggatttacttgcgtacgtgctcttcacaaaaacaccgtggatgctgaagttagagcacgtcgccacagagcttgacatcaatgttagagtgtctcttactccccgcccag

SEQ ID NO: 2821 - DNA, 277 bp, Homo sapiens
ctggtggtatctgagttgacttgacagaacactgtcttgaagacaatggcttactccaggagacccacaggtatgaccttctaggaagctccagttcgatgggcccaattcttacaaacatgtggttaatgccatggacagaagaaggcagcaggtggcagaatggggtgcatgaaggtttctgaaaattaacactgcttgtgtttttaactcaatattttccatgaaaatgcaacaacatgtataatatttttaattaaataaaaatctgtggtgg

SEQ ID NO: 2822 - DNA, 246 bp, Homo sapiens
  unsure (50): n=A,T,C or G
  unsure (133): n=A,T,C or G
  unsure (149): n=A,T,C or G
  unsure (207): n=A,T,C or G
  unsure (223): n=A,T,C or G
  unsure (224): n=A,T,C or G
  unsure (246): n=A,T,C or G
aaaacgaccaccacagatttttatttaattaaaaatattatacatgttgntgcattttcatggaaaaaatttgagttaaaaacacaagcagtgttaatttcaaaaacccttctgccccccattctgcccctgntggctttttttggccnatgggcatttaccacctggtttggaaagaaattgggcccatcgaactgggaactttcnaaaaaggcattacttnngggcttcctggaagtaaggccn

SEQ ID NO: 2823 - DNA, 341 bp, Homo sapiens
  unsure (9): n=A,T,C or G
  unsure (27): n=A,T,C or G
  unsure (40): n=A,T,C or G
  unsure (45): n=A,T,C or G
  unsure (49): n=A,T,C or G
  unsure (131): n=A,T,C or G
  unsure (162): n=A,T,C or G
  unsure (170): n=A,T,C or G
  unsure (190): n=A,T,C or G
  unsure (209): n=A,T,C or G
  unsure (213): n=A,T,C or G
ttttttgantcaatttcctttaatgantacttgttacagnaaaanaggnataaagtcctgttcccaagtccaaaccactttttaacttaaatcttgagtttttctgaattactcaatttgaagtaattctntttatatctgaaaaatggttttattgaaacntttgaaantaaaaaatatgcattgcaanaagcatatgacaaacattntganagtacaaaattagttgtaaaaaataacataatttaccagtaaacccactcatataaaaatgtgcaaagccttttgatataaaaagttttgtcaccaagcacctatttttataacttaacttcccatgg

SEQ ID NO: 2824 - DNA, 521 bp, Homo sapiens
cttacaccctttttcatcttgacattaaaagttctggctaactttggaatccattagagaaaaatccttgtcaccagattcattacaattcaaatcgaagagttgtgaactgttatcccattgaaaagaccgagccttgtatgtatgttatggatacataaaatgcacgcaagccattatctctccatgggaagctaagttataaaaataggtgcttggtgtacaaaactttttatatcaaaaggctttgcacatttctatatgagtgggtttactggtaaattatgttattttttacaactaattttgtactctcagaatgtttgtcatatgcttcttgcaatgcatattttttaatctcaaacgtttcaataaaaccatttttcagatataaagagaattacttcaaattgagtaattcagaaaaactcagaattaagttaaaaagtgggttggacttgggaacaggactttatcctcttttactggaacaagactcattaaaggaaatggataaaaaa

SEQ ID NO: 2825 - DNA, 152 bp, Homo sapiens
  unsure (11): n=A,T,C or G
  unsure (16): n=A,T,C or G
  unsure (103): n=A,T,C or G
tcacatattanacacnataatttttattatggaaattaatctttacatacaaaatcagctacgtaattttacttacaaaacaataaaaactggtctttactgnggcaacaaaagaagcattttgacaaatgaaaaaaattaatgcaaacaaa

SEQ ID NO: 2826 - DNA, 285 bp, Homo sapiens
  unsure (283): n=A,T,C or G
ctgtctcatcagccctcccctccatttattcctatttttctgtagttaagaatactgtaaaaatgtgactattccttaatatcagaaaagaatgcacaggctgagtcttccggtcaaaagttaaatactgatggaatcaagtattttgtatgaagttctcatttgttatctctaacgctattttgtgttttgcatatagtattatagtatgtgtatatcactttttgtatagagtaagcaattgaataatttgttaataaaaataataccacattgactgatnaa

SEQ ID NO: 2827 - DNA, 456 bp, Homo sapiens
  unsure (31): n=A,T,C or G
  unsure (49): n=A,T,C or G
  unsure (88): n=A,T,C or G
  unsure (191): n=A,T,C or G
  unsure (193): n=A,T,C or G
  unsure (220): n=A,T,C or G
  unsure (248): n=A,T,C or G
  unsure (253): n=A,T,C or G
  unsure (257): n=A,T,C or G
  unsure (264): n=A,T,C or G
  unsure (290): n=A,T,C or G
  unsure (313): n=A,T,C or G
  unsure (321): n=A,T,C or G
  unsure (328): n=A,T,C or G
  unsure (330): n=A,T,C or G
  unsure (357): n=A,T,C or G
  unsure (399): n=A,T,C or G
  unsure (418): n=A,T,C or G
  unsure (452): n=A,T,C or G
  unsure (456): n=A,T,C or G
tttttccagttttatgatttatttaacttgnggaacaaaaataaaccanattaaccacaaccatgccttactttatcaaatgtataanaagtaaatatgaatcttatatgacaaaatgtttcattcattataacaaatttccaataatcctgtcaattatatttctaaattttcccccaaattctaagcanantatgtaaattggaagttaacttatgcncccttaactatcttaacaagctttgagngcaanaaantgaaaanttcaaatctgaccaaaaagttgatgntggaaaaaaaaattcttcaatcncttgcctntaaacanangatgtaaaatggaagttaacttatgcncccttaactatcttaacaagcttttagtgccaaaaaatgaanagtcaatctgaccaaaagntgatgttggataaaaaaatctctgcttcccactntaan

SEQ ID NO: 2828 - DNA, 317 bp, Homo sapiens
  unsure (316): n=A,T,C or G
gaacaagaggcttaaaaccgggctttcacccaacctgctccctctgatcctccatcagggccagatcttccacgtctccatctcagtacacaatcatttaatatttccctgtcttacccctattcaagcaactagaggccagaaaatgggcaaattatcactaacaggtctttgactcaggttccagtagttcattctaatgcctagattcttttgtggttgttgctggcccaatgagtccctagtcacattccctgccagagggagttcttcttttgtgagagacactgtaaaccgacacaagagaacaagaatna

SEQ ID NO: 2829 - DNA, 120 bp, Homo sapiens
  unsure (32): n=A,T,C or G
  unsure (75): n=A,T,C or G
  unsure (96): n=A,T,C or G
caggcataacacagaggcaatcagattccaanaataggggttgcactccagggagacaccatctggctggaccangaaagggccatgctctgtgangagcccatctaaagagctgcagcc

SEQ ID NO: 2830 - DNA, 260 bp, Homo sapiens
  unsure (35): n=A,T,C or G
  unsure (71): n=A,T,C or G
  unsure (140): n=A,T,C or G
  unsure (143): n=A,T,C or G
  unsure (192): n=A,T,C or G
  unsure (229): n=A,T,C or G
ttttttttttttttttttttttttttactttaaanatttttatttctccaaatttgttatttatcaggagngactgaaataaaaaatacaattgagtcccatcatcatcatcatggaaatggctttaaaaaaaaactggncanatgaatattattgcttcccattttcaaccagtaaatagttgccactganaaactgacagccaggagtctgtcaaaaaatgctcaanatatgttatataatacaacatgcctgttcac

SEQ ID NO: 2831 - DNA, 368 bp, Homo sapiens
  unsure (183): n=A,T,C or G
  unsure (274): n=A,T,C or G
  unsure (362): n=A,T,C or G
ctttatctgtggaaacttcagactctcccctattactttaatttcagtgagacattattaaatataagtgggcttacacatttgttttgctttactgacaaataatacacaacttggaggctttttttcctttctattcttcctctaaatgttcaacacttttctgattttgtgatttgaggntgtttaatagcttcctgaggctccattgagaccgtatatacgtgacacttaacagtctagccttcctcggtacatatagatatatgatggnggctttgcctgtagtaaattcatgccaaaacataggctttcagtgcctattacatatggctttcagctctctctactgagggatgtangagttt

SEQ ID NO: 2832 - DNA, 111 bp, Homo sapiens
  unsure (76): n=A,T,C or G
  unsure (78): n=A,T,C or G
  unsure (83): n=A,T,C or G
  unsure (99): n=A,T,C or G
  unsure (100): n=A,T,C or G
  unsure (105): n=A,T,C or G
cctagacactctcatgctttcaatgtggaatacgtagcctaatatgcatagaagcatgaatggcaaacttgaagancnatatnataactatttttctanntattngaagca

SEQ ID NO: 2833 - DNA, 347 bp, Homo sapiens
aaatcctcatagtcaaaaaattctccagatggacttttaatttgtaagatttgaactgtgacttgtatacatctgtttagaatcaattatatttgaaaagctgcctgtgttttaacagtcaagtgtgctaaagtttgtcaatttaagctgcttttgatttcagctaccaagatcacaggtgcactctacacataacactgacagacccataacattacatacatcttagtgaattctatcacatggtaaaatgaacagctttctttgtaactcataaaattctcttaggacatttttataaagtcacctgtttatagttctatcttttcagattccatttcttttta

SEQ ID NO: 2834 - DNA, 278 bp, Homo sapiens
  unsure (192): n=A,T,C or G
  unsure (232): n=A,T,C or G
  unsure (236): n=A,T,C or G
cctactatgtgccaaggaggggtaaggcagctagctctcacagacacaccccacagtgaaaatcacacacacacacacacaccccggcatctgtgctcactcacaggcagactgctcactttcttgcacctttcttgccatcacctcggcacacccacattcctccaataggcttgggaaccagcatggaangggcaagtgtcataaaaaaaaccccctacctaccctactnccanacttcatgccaaaaggttaactccacttcccttctggttgcc

SEQ ID NO: 2835 - DNA, 143 bp, Homo sapiens
  unsure (59): n=A,T,C or G
  unsure (99): n=A,T,C or G
  unsure (131): n=A,T,C or G
atgccttctggtgaatttgcacgtatatgccgagatctcagccatattggagatgctgntgtaatttcctgtgcaaaagacggagtgaaattttctgcnagtggagaacttggaaatggaaacattaaatngtcacagacaag

SEQ ID NO: 2836 - DNA, 226 bp, Homo sapiens
ccatttttttagttttattgttaaatggtatttttctatgtttaattataatagatctggctttttctggatagcataaagatcactgaactatatatatataagaaacaagagttctattttagcacaaaggcattttatattatttattgaatccataagtttgttttcgtcaaaaacattccatattatttctgctcctttttatttgtatagtttgttattt

SEQ ID NO: 2837 - DNA, 379 bp, Homo sapiens
ttttaactatatatcatattcatttattatcaatccacaggaaaatctgattgctacatgagctcataaaagcttttttcacctttacaaaattaaaaaaaaaaatgtgccacaaggatgtaataacaactgctgataaacaagaaaaggaatcttaaaattataaatttgctgtagaaaagataaaaaacaattatattttatttagaattttaccttgaataaaatattcccctgtataaaaaataaaaaagcttgctctggttagaattagagtatttttgtcttcaaatctgggaatttgcataatatttccatgatactttttcctttgtaccgcgtggcattcaagcatagcagattagaagggatttttttt

SEQ ID NO: 2838 - DNA, 506 bp, Homo sapiens
  unsure (317): n=A,T,C or G
aaaaaaaaaagttacagaaatactataacatatgtacataaattgcataaagcataagtatacagttcaataaacttaactttaactgaacaatggccctgtagccagcacctgtaagaaacagagcagtaccagcgctctaaaagcacctccttgtcactttattactcccagaacaacaactatcctgacttctaatatcattcactagctttgcctggttttgtcttttatgtagatagaatcaatcagtatgtattcttttgtgcctggcttctttctctcagccttacatttgtgagattcctctgtattgngctgattgtggatcttttcattctcattgcagaataatgttctattgtgggacttattacaatttgtccatcctattgttgatgggcacttgagaactttccattttggcgctattacaaatagtgcaactatgaatgtactgcatgttaccatcttacttgagcctttaatggacttatctcttcaaa

SEQ ID NO: 2839 - DNA, 469 bp, Homo sapiens
aaaaaaaaaagttacagaaatactataacatatgtacataaattgcataaagcataagtatacagttcaataaacttaactttaactgaacaatggccctgtagccagcacctgtaagaaacagagcagtaccagcgcgctaaaagcacctccttgtcactttattactcccagaacaacaactatcctgacttctaatatcattcactagctttgcctggttttgtcttttatgcagatagaatcaatcagtatgtattcttttgtgcctggcttctttctctcagccttacatttgtgagattcctctgtattgtgctgattgtggatcttttcattctcattgcagaataatgttctattgtgggacttattacaatttgttcatcctattgttgatgggcacttgagaactttccattttggcgctattacaaatagtgcaactatgaatgtactgcatgttacc

SEQ ID NO: 2840 - DNA, 483 bp, Homo sapiens
aaatgtaagtattttaatgagtaaatagaattaaccttttttacaaatgaaatgataggcatctatgtaaagtgggaaaaatatgtttcgtaaatatttgcatctttaatattgttagtaagtagtaaacaggtgttttgctgattgaaaggaagttatcttggtaaattgagactcaaagtgaaatacaaaaatgaaaatatttataataggactcgacttggagaaattgctattcttcctgttgtccaaaccataaatctgaggataacctgggcttttctctttcctcttctcctaaccagtttttcaccaagtcctgtgccatttcacctcctaacgtctgtcagctatccttttgcctttacctcaccactattaccctagagaagactttcattatttctcatctggattaccagctcgatctctaatctgcttcagttcatccttcttgctacttctaggctaaacatcaaaaac

SEQ ID NO: 2841 - DNA, 395 bp, Homo sapiens
  unsure (157): n=A,T,C or G
  unsure (331): n=A,T,C or G
  unsure (348): n=A,T,C or G
aaagattctgaaaaacacaatttttaacgcttatgtagtccgccatcaaaacatcaatgtactgaagattttaagcagcatgaggcaccatcacgtttttgtttcttccccctcatttccccgcccctaccagatctgtttttgatgtttagcctanaagtagcaagaaggatgaactgaagcagattagagatcgagctggtaatccagatgagaaataatgaaagtcttctctagggtaatagtggtgaggtaaaggcaaaaggatagctgacagacgttaggaggtgaaatggcacaggacttggtgaaaaactggttaggagaagangaaagagaaaagcccangttatcctcagatttatggtttggacaacaggaagaatagcaatttc

SEQ ID NO: 2842 - DNA, 428 bp, Homo sapiens
  unsure (182): n=A,T,C or G
  unsure (375): n=A,T,C or G
  unsure (425): n=A,T,C or G
aaacattaaacaacaagtatataatcaaaataatcctgtattacttataactgaataactattttcaaagaaactttcctccctgatgaataagaatgcaaactccaagtgtatatagggtgctgtgagtgaagaagcttgagtttgccccatcagcttctgcaaggttatttttacatagnctcatgcttatttgtatggggaagttctttttcctggaaaagatttaactaagcacaaaactaaaatccagagcagggataagggaagaatgcaggtgttcttagtggaaatatcagcatcagggaatctttctcttaaacactggaactggtagagttgaagaacttctttttctcaatacttccatcattntttgtatccattcagcttgagggtccacacacacaattgacttgttcttnttc

SEQ ID NO: 2843 - DNA, 212 bp, Homo sapiens
aaacattaaacaacaagtatataatcaaaataatcctgtattacttataactgaataactattttcaaagaaactttcctccctgatgaataagaatgcaaactccaagtgtatatagggtgctgtgagtgaagaagcttgagtttgccccatcagcttctgcaaggttatttttacatagtctcatgcttatttgtatggggaagttcttt

SEQ ID NO: 2844 - DNA, 366 bp, Homo sapiens
  unsure (161): n=A,T,C or G
  unsure (256): n=A,T,C or G
tttttttttgttgtcccagatttattgaaaataatacagcactacagaaaaaattcaaacaggtccccgaggcgttttgaaattcatcccaactgtaggctgagtgacctgaaggttggacagactgccgaagtccaaaagcttcagcatttccttagtgncaggatctacttcaataatctcctgatccaaggctgagacctcaggaacataattgtctctcctttctctctcctcctcctgcagcttgatgganatacctcttactgggcctctctgaattcgcttcatcagatgcggtgacataacctgctatcttgttgcggagctttttgctggggataatggcgatctcctcgcacacgc

SEQ ID NO: 2845 - DNA, 337 bp, Homo sapiens
  unsure (117): n=A,T,C or G
  unsure (166): n=A,T,C or G
  unsure (186): n=A,T,C or G
ttttttttttgttgtcccagatttattgaaaataatacagcactacagaaaaaattcaaacaggtccccgaggcgttttgaaattcatcccaactgtaggctgagtgacctgaaggntggacagactgccgaagtccaaaaagcttcagcatttccttagtgtcanggatctacttcaataatctnctgatccaaggctgaaaacctcgggaaccataaatgggcttctcctttcttttttcctcctcctgcagctttgatgggagaataccctctttactggggcctcttcttgaaattcgctttcatcagaatgcggtgacataaccctgctatc

SEQ ID NO: 2846 - DNA, 263 bp, Homo sapiens
atttgaactcttcaatctcttgcactcaaagcttgttaagatagttaagcgtgcataagttaacttccaatttacatactctgcttagaatttgggggaaaatttagaaatataattgacaggattattggaaatttgttataatgaatgaaacattttgtcatataagattcatatttacttcttatacatttgataaagtaaggcatggttgtggttaatctggtttatttttgttccacaaggttaaataaatcataaaa

SEQ ID NO: 2847 - DNA, 163 bp, Homo sapiens
ccttcagcaatctatattaccagcgctggatcctttgacagagagtggtccctaaacttaaatttcaagacggtataggcttgatctgtcttgcttattgttgccccctgcgcctagcacaattctgacacacaattggaacttactaaaaatttttttttac

SEQ ID NO: 2848 - DNA, 139 bp, Homo sapiens
  unsure (20): n=A,T,C or G
ctgtttgcccttaggccagnacacagaattaaagtgggggagatggcagacgctttctgggacctgcccaagatatgtattctctgacactcttatttggtcataaaacaataaatggtgtcaatttcaaaaaaaaaaa

SEQ ID NO: 2849 - DNA, 106 bp, Homo sapiens
aaaactcttctaactgccatagcaccagcctccacaaaatacttcagacacatatcatcaattccaccagtggttagaataacattggcaccagcttttttttttt

SEQ ID NO: 2850 - DNA, 271 bp, Homo sapiens
  unsure (27): n=A,T,C or G
  unsure (61): n=A,T,C or G
  unsure (107): n=A,T,C or G
  unsure (121): n=A,T,C or G
  unsure (125): n=A,T,C or G
  unsure (142): n=A,T,C or G
  unsure (149): n=A,T,C or G
  unsure (163): n=A,T,C or G
  unsure (172): n=A,T,C or G
  unsure (194): n=A,T,C or G
  unsure (196): n=A,T,C or G
  unsure (220): n=A,T,C or G
tttattgatataccacattacatacanaaacattcatgtaaagctttttggattataacanataatttacataactgaggaataaaaccagctttactcctacccanaaaataaatttctncctncctccctggccaaaggnaaacaanatcctgagctaacnttgtaaacnaatattgtgcatttatacaaangnttttaaagacataaaaataaaatntatagacctgcccccagcttcaactactaatcatggaccacttccgcttca

SEQ ID NO: 2851 - DNA, 226 bp, Homo sapiens
  unsure (51): n=A,T,C or G
  unsure (53): n=A,T,C or G
  unsure (62): n=A,T,C or G
  unsure (76): n=A,T,C or G
  unsure (113): n=A,T,C or G
  unsure (138): n=A,T,C or G
  unsure (141): n=A,T,C or G
  unsure (167): n=A,T,C or G
  unsure (169): n=A,T,C or G
  unsure (172): n=A,T,C or G
  unsure (205): n=A,T,C or G
  unsure (212): n=A,T,C or G
  unsure (219): n=A,T,C or G
  unsure (226): n=A,T,C or G
ttttttttttttttttttttcgtttttcttcatgttatttattttccaatnanaaatgacanattcattatcaaanacatcatttaccattttctcctttgtacttcttattngcatacttcttatctcgcccattanagnaaaagcatcttaagtataccttaaangncanatttatcttggtatgccccacagcaacttactnatagtanatacttnaatattn

SEQ ID NO: 2852 - DNA, 153 bp, Homo sapiens
cctagaagtatcacacatgacttgaagttgggcaacttcagtgttttaattaaattcagacagaaagcaatccccaagatatcctgtaaaatccaagcccacctgtcttcatttcgaaacacagcccaaacaacagctactgctatgcacagt

SEQ ID NO: 2853 - DNA, 401 bp, Homo sapiens
  unsure (1): n=A,T,C or G
nccaatgggtttaagtctcatctcattcgtctgattggaaatctgtgttacaagaataaagataaccaagacaaggtaaatgagctggatggtatcccgttgatcctggacaactgcaacatcagtgacagtaacccctttctgacccagtgggtgatatatgccatccgaaaccttaccgaagacaacagccaaaaccaagatttgattgcaaagatggaggaacaggggctggcggatgcatccctacttaaaaaagtgggttttgaagttgaaaagaaaggcgaaaagctgatcctgaaatctactagagacacccctaagccatgaatgaactacatccaaatacctgaatttttggaatctgtttcatggatttttcatcttctaccgtatgtgaa

SEQ ID NO: 2854 - DNA, 154 bp, Homo sapiens
ctgttatggatacagtctatacaaaatgagatcctttcataagcttgaagattggggtttcacgctcatgtgtgagatgtccctctctcaaaccttactatgaagtcagcaccactgggcacattacttgtctgacatgaaggggaaaaaagaa

SEQ ID NO: 2855 - DNA, 164 bp, Homo sapiens
  unsure (164): n=A,T,C or G
aaagaattgggtgaccacgtgaccaacttgcgcaagatgggagcgcccgaatctggcttggcggaatatctctttgacaagcacaccctgggagacagtgataatgaaagctaagcctcgggctaatttccccatagccgtggggtgacttccctggcaccaan

SEQ ID NO: 2856 - DNA, 339 bp, Homo sapiens
ctggtatttgggtgaatgttgttgctctgtgcctgttgaatgtccatgctacaagaagttatgagccttgttctaagtacagatgaaccttgtatttgtgtaatctcccaagggagagctatggtttacattcaattttttggtctttctgctatgaaacgtgtttattttgcctctgtcaatgtgtttgcaaccttaagtaaggaaagggaaaaaaaaaatagccctctgaactctgatcttttgccgcttctgtagattttgattgtgaagttgggagtgaggacattcaaaagcccatggtgaatgcatatgcctttagaatattgtgcctgtttt

SEQ ID NO: 2857 - DNA, 174 bp, Homo sapiens
ctggcctccagatccacatcaccactcttccactcgattgttcccagatcctccctgcctggcctgctcagaggttccctgttggtaacctggctttatcaaattctcatccctttcccacacccacttctctcctatcaccttcccccaagattacctgaacagggtccatgg

SEQ ID NO: 2858 - DNA, 359 bp, Homo sapiens
  unsure (303): n=A,T,C or G
  unsure (357): n=A,T,C or G
ctgtggaacacaaggggagtctcagcatctggtccttgatttggttttttcattgtttccttggcccctgtatccagatattggacttactgctatacttgtgatactgggtagcccagactttgaaggtgctttgtgaggtttggactcatgctgagaaacccacaggaaagcactgtccaggtaggattagaggcttcccacttaaaactatttctgagaaatcttaggttttatcactgctatggtttcccatatttacttgggactgttctgactttctttttccagcccttagcttgngttagaaaagtggacatgtaagtgaacaatgcattacttctaccttaggtttanga

SEQ ID NO: 2859 - DNA, 374 bp, Homo sapiens
  unsure (373): n=A,T,C or G
aaattttaatattctacatgaaaacttacattgggaaatatgcagacaagtgattatattccaaattttacccttattttaatatctaaaatattgggtatgatgcaaattatactatagaatatttatctgaaatatgacttactggggtattctgttaatactatatataaatattcagaatttttttcaaaagtagaaaaattcccctctaaaagtacagccagatagattttcatccatattgaggaacttagctttttcaacaagcttcagaatctgaagtctgtagaatctaaaatacagaaatatccagaaatcagacaataaattgaaagtttagacatcatgagtattaaatagctttacctcnc

SEQ ID NO: 2860 - DNA, 308 bp, Homo sapiens
aaaaatcctattatgtaaaccttaacataagagggtagttaagataatactacaagtttcagggcgtttccacagacttctagaccttatgtacacacagactatcagactctagatatgcggcctgcttacccttaagggggtgcactgggagcccgatcatgggcgccccctagtggggttaccatcgctcctccattcaaaaagactcgcttctctaagaagtcggtgtcaggtgagtaagcgttctacctgacggctaagccagggatgaagagaggccaacattcttcttaggatgagtcctg

SEQ ID NO: 2861 - DNA, 454 bp, Homo sapiens
  unsure (453): n=A,T,C or G
gtgcccagcaagcccattgaccacagcaccatcacttcctgggtatcacctgattttgatacagcagcaggaagcttgttcccagcctaccagaaacaccaaaactgggcgagacactcaagtcgaaaacctaccacctccaagtttccacatctaacttttgagagtccgcaatcttccagttcagagacattggggatccccttaatccgagagtgccccagtgaatcagaaaaggatgtttccagaagacccttagttccagtgctcagtccccaaagctgtgggaacatgtcagtgcaggcacttcagagcttaccttatgtgttcattccacctgatatccagaccccagagtcatcgtctgtgaaggaagaactcattccccaagatcagaaggaaaacagccttctaagctgcactcttcacactggcactcctaataacccaganc

SEQ ID NO: 2862 - DNA, 194 bp, Homo sapiens
aaaagtttttatttacctaaaaacataaatttatcaaacatatcaatttgctttacagagcaatttacataaaaattcatgatgtataccaacgacagcatagcattatctacctcagtttgtgaagcatcctttcctacagatctcagcaaaacgcagagccagtaggggaaattcaagctttcatttggggg

SEQ ID NO: 2863 - DNA, 233 bp, Homo sapiens
  unsure (158): n=A,T,C or G
ttgaggaacgggaacaaagattatgatagctttccgaccaccaccaacttcaatttccttagctgccgtaatattcagctccctgagctgagccttgaggtccgagttcatctccagctccagaagagcctgggagatgccggactcgaactcgtccngcttctcgccattgggcttcacgatcttggcgctcgaactgaacatggctttctcctgggagaacttgccgagcg

SEQ ID NO: 2864 - DNA, 243 bp, Homo sapiens
  unsure (137): n=A,T,C or G
  unsure (195): n=A,T,C or G
  unsure (211): n=A,T,C or G
  unsure (217): n=A,T,C or G
  unsure (241): n=A,T,C or G
ctggtgtgggaagtttcttgctcgcctccaaatccccagtgcctgtcacataggggctgacttgaaccaggtgctaattatagacccccgttgggtgaatgagccctggtcagaaaacactgccttcctccatgcanatgggccctggaggctgcatccctggggtacctgactttgaggtgccaccgggcagancccatcactggtgcangagcanagggaggggatccagggtacctgnga

SEQ ID NO: 2865 - DNA, 403 bp, Homo sapiens
aaaaaatataaattatatgaaaatacaagttggaaaatagtcaaacacaatataacatctttttcatccctatacttctcagcttaaaaaaaaagtattcttaaaaaaaaaagttcaataactgaggcagtattcctgataattttattttaatatatatattttatatatgtatatgtatacatatatttatggttccttgaaacttctttggaatgtaggtaagagttcaacaaatttatatagaccccaacagagtaagcggcatgcacagcatgactagaagagagatggtgtatttctcaccatgaaggttaggcaggttaatgctgtaaaacccagagtgttcatctccaaagtgaggaaaagcacatctgatctttgaatgctacctccaatcccc

SEQ ID NO: 2866 - DNA, 236 bp, Homo sapiens
  unsure (148): n=A,T,C or G
  unsure (181): n=A,T,C or G
  unsure (199): n=A,T,C or G
aaactttttatttgcatattaaaaaaattgtgcattccaataattaaaatcatttgaacaaaaaaaaaaaaatggcactctgattaaactgcattacagcctgcaggacaccttgggccagcttgattttactctagatttcactgtncgtcccaccccacttcttccaccccacttcttncttcaccaacatgcaagntctttccttccctgccagccagatagatagacagatg

SEQ ID NO: 2867 - DNA, 328 bp, Homo sapiens
aaattacaaagtaataaaaagctttgctctttaattaaaaaaaaaaaggaaaaaggggaaacagaggtaaataaattaggaaaacacacacacggagaaaacaaacaaaaataaaataaaataaaaacaaaaaggtgttaactaggaaggatgggttaatccaaaacccagccctgactccaggctcctcctcagaaaggtggaaccagggagaggggggaccccaggtgactgtcaggaccagggaagtaatttataactcagagccagatgccttctggaagcagtctccatggattctgccctaaaaccaggaatggaagatgga

SEQ ID NO: 2868 - DNA, 430 bp, Homo sapiens
  unsure (405): n=A,T,C or G
  unsure (422): n=A,T,C or G
aaaaattatacatattgtacattttcaaaacctgcacatgagtaaaaccatggcaatattgtcctaaagctacctaactgtgactatggaaattgctactttgcattcagtgttgtgggatttgcacgggcagtactcattttccctcatacttcggattgaccacagttgttacggcactcttataaataggattttcacccgtgtcccatttggcattcattttctccttttcaaatttagcaaactcccttctgtcatgaattatcattaaaagcttccatatcagcagtaatgcaaggccaataagaacaattccagcaaccacaccagctacaattggaatgatgtctggaccagtgggacactctggattctccacaacatgaaccatgacctcgttgntcccattcctgaatacngtaaaata

SEQ ID NO: 2869 - DNA, 405 bp, Homo sapiens
ccatcttatctctgtcttcaagcattcctcagctttctctttccagaacaggattatgaaccgacaccatacagaggtatttgtaagaaagaaggtggatgccggaatcctttcttcaaacagaagcttaccagtaagtgcagactaatacaacaggcggtaaagagaagaacagagaaagcatcctgccccagccctgccccagagctaaacgtcattctagagaatgaaaaattccatctccacccagtgggttctcagaattccagagagattggaactacagcaaaggtatgaacaggtgtcacggggacacagaagaaagagcagttactcttccggaaggttggagaagattttgtgaaggtggggatgtttgatttgaaccttgaagaacaagcagag

SEQ ID NO: 2870 - DNA, 403 bp, Homo sapiens
cctggagcctgcctcccgggctgagggctcagctctggcctccggctggatgccgtctagagtcctatgtgctcataggtctttttctttcagtaaacagtataaaacattactattttcctttgattgtaaacttcaacagaaaataacatacttaaagaattttgctacaaagagtactatgatttttattgcctcaccacctttagaacatttccacttcacaagtttctgatttgcttcactttcttacttggcgatggcgccctggcagcatcatccacacataccagtgcgtatggagaaatgggctgtaggcccttcctgcgtggtccatggctctgccttcatggaacaggctgagtcatgtctctgctcaagctcaaaccatctactctcaagt

SEQ ID NO: 2871 - DNA, 451 bp, Homo sapiens
aaataactttcttaaccctgcccattaagatcacagtaaacatacaataatttttattatggaaattaatctttacatacaaaatcagctacgtaattttacttacaaaacaataaaaactgttctttactgtggcaacaaaagaagcattttgacaaatgaaaaaaattaatgcaaacaaattaaaacaatgcttttctttttacttgcttcactgtctcttctatttattttctatgatcatttgacacaaacatggattactttgatatctactgaaacataaatgataaggttcttaaaggttgaattaaaagtctgggtgttcaatattttagaagctgaataaacaaaacgaaattggggtttgtgattacagaggatttatcattttttccctttgcccatatgaaaatatataatagaaaattacccacgggaaaacattttt

SEQ ID NO: 2872 - DNA, 265 bp, Homo sapiens
  unsure (180): n=A,T,C or G
  unsure (257): n=A,T,C or G
aaacttgatccaacctctttgcatcttacaaagttaaacagctaaaagaagtaaaataagaaggcaatgcttgtggaatgtacagtgcatattggcggcgcacgcctcattacgattcgcctgcttgcttctcctgttcaatcgtttctttggaaggcaggtggatttttctcttgcgtntctgtcttcttcagtttcgacttatcgaatttctcgatctcagccatatctgggtttgtcaagacatggttgcggangaaaagcg

SEQ ID NO: 2873 - DNA, 436 bp, Homo sapiens
cctcagaggaattcgggaatgacacgtcttctgatcccatgagacagaacaaagaacaggaagcttggttcctgttgttcctggcaacagaatttgaatatctaggataggatgatcacctccagtccttcggacttaaacctgcctacctgagtcaaacacctaaggataacatcatttccagcatgtggttcaaataatattttccaatccacttcaggccaaaacatgctaaagataacacaccagcacattgactctctctttgataactaagcaaatggaattatggttgacagagagtttatgatccggaagacaaccacttctctccttttagaaagcagcaggattgacttattgagaaataatgcagtgtgttggttacatgtgtaagtctctggagttggatgggcccatcctgatacaagtttga

SEQ ID NO: 2874 - DNA, 328 bp, Homo sapiens
aaattatttgctgtttctggctcagatttcaaccttttttccccctttttaagacaaaaataagtgtgactttctggtcagggtgattgtagaggaagggtcatgatactgaaataggacttggttaaaataaagagttgagagtaagagactaaagacatatgccaaatgtttgtaataaaattaaagagaaaatataaatatatacaaaatccaaaatgtcaggataatgaaatcaaagcatttttagtattatcactttgggtactttagtagaattgcactcgtttatgattttgaagtttgttttacaaataacatccaattt

SEQ ID NO: 2875 - DNA, 294 bp, Homo sapiens
  unsure (191): n=A,T,C or G
  unsure (212): n=A,T,C or G
  unsure (279): n=A,T,C or G
  unsure (293): n=A,T,C or G
cctctccaacttccgaagcttcaccttcttgagcttcttgcctggtcggccttcctcacccctcattaactccctgtgattccaatagctctgcttgaacaggtcgtaatcctggatctccacatcctcactctcccaagaagcctgatcgtaaggtaagtcccgccacttgatcaagtagtggacgtggnccttcttgtccacactgtggntgaggattcggtggatcatcatccactcgggttttatcccatagcgatagaagcgttcctccatctntgcaaatttagggnc

SEQ ID NO: 2876 - DNA, 334 bp, Homo sapiens
aaaaagcaacccccatgtatgcctatatgtgtattgtatactttttttacataattggagtcatactgtaaacagttttataagtagatctttttcattgcaaaattgccacattttcttatggcattaaaaattttacaaaaacataattttaatggctatattatattccatttaatggatgcaactcagtttatttaaccattcccatgttgttaactatttaggttgtttctaattttcattattataaagttgcagaaatttggtgtacataaaactgtctccatataattgattattaggatatattcccatgaaggattcttttttt

SEQ ID NO: 2877 - DNA, 408 bp, Homo sapiens
aaaagccctttccaaaggtttcaactgtaaaatacttctttttacaatgtatcaacatatttttatttaaggggaattaacaattgccagggaaaccagccaacccaagtttattatatcattaaccttatcataaattcaaacctaagttgctggaccctggtgtgaggacataaatcttccaaagttttgcctatcctaagagctgcatttttctactgctctttaccttgcattttagctaatttaggagttttgagaatgtattggatacgctccagtacataaggagttgccgcatattatatcagactgctttgagaaatctcatccctagtctattgcagttgtttctattagcttactgattaactcagtcctgacacaccttttgggaaatgctgattt

SEQ ID NO: 2878 - DNA, 426 bp, Homo sapiens
  unsure (151): n=A,T,C or G
  unsure (322): n=A,T,C or G
  unsure (339): n=A,T,C or G
  unsure (346): n=A,T,C or G
  unsure (425): n=A,T,C or G
ctgggataattctgcctttgctttccatatggatgctccaattcatcagtatggggacactcatgaatcacagagctatgttcctgataattctgggtctgcaagaggatctgggagtaaataacaatcaattttcttaaagatatgctanaaagtagttagtacttccaatttctcatccaaatcccaaaaagggccagccctgagaagcttacctgaaatatttctttccttctctcatggaagtccataaaagccacccctcctccttatcctttcaactgggcaactatagagtgagggagattctaattgtattagncactttccctcactagntagatgntgacttttcctctaaaactccattttcagattccccctcacagccagcagaaagatgactaccttgcttgactatggtng

SEQ ID NO: 2879 - DNA, 443 bp, Homo sapiens
  unsure (23): n=A,T,C or G
  unsure (94): n=A,T,C or G
  unsure (120): n=A,T,C or G
  unsure (145): n=A,T,C or G
  unsure (169): n=A,T,C or G
  unsure (260): n=A,T,C or G
  unsure (314): n=A,T,C or G
  unsure (362): n=A,T,C or G
  unsure (365): n=A,T,C or G
  unsure (380): n=A,T,C or G
  unsure (428): n=A,T,C or G
tttttttttttttttttttttgncaagttaaccaattttaatggaaccaagtaattacacaataaaattttatattcatccacaaaaaaacatnttgcaacctttggaaattgtagaaanaaaaccgtggggagcatatccttgnggagcatctctggttgtaactagngattagcattttggtcttttgacttcaaccccatcagcttccatcttcttcctcttctcaatgattgcactaatcttcttccactggcgancaagctctgctttgtcattggtttccttgaagcgcctggttttccgcccttcanacattttgataccatactggaatgcagccttgggcaaagcttctttgntgntcatatactcgctgnattcttcctgggtatcaaagtcccaacggcctaaaggccccttcttgntaccctgggccattt

SEQ ID NO: 2880 - DNA, 383 bp, Homo sapiens
cacagtgcttgatatttcagagtcagtcattggttatacatgtgtagttccaaagcacataagctagaagaagaaatatttctaggagcactaccatctgttttcaacatgaaatgccacacacatagaactccaacatcaatttcattgcacagactgactgtagttaattttgtcacagaatctatggactgaatctaatgcttccaaaaatgttgtttgtttgcaaatatcaaacattgttatgcaagaaattattaattacaaaatgaagatttataccattgtggtttaagctgtactgaactaaatctgtggaatgcattgtgaactgtaaaagcaaagtatcaataaagcttatagacgcaaaaaaaaaaaaaaaa

SEQ ID NO: 2881 - DNA, 326 bp, Homo sapiens
  unsure (89): n=A,T,C or G
  unsure (92): n=A,T,C or G
  unsure (136): n=A,T,C or G
  unsure (144): n=A,T,C or G
  unsure (153): n=A,T,C or G
  unsure (161): n=A,T,C or G
  unsure (168): n=A,T,C or G
  unsure (172): n=A,T,C or G
  unsure (202): n=A,T,C or G
  unsure (206): n=A,T,C or G
  unsure (278): n=A,T,C or G
  unsure (287): n=A,T,C or G
  unsure (301): n=A,T,C or G
  unsure (322): n=A,T,C or G
ctggactgctgtacatcaaggacagattaactggaaaacatatgttccttatgtgtgattgagagccattcacaaaagacttcctttgngtncagcctatacttttccatatggtataccttgaaaaaaattagcncaccatgnttattcttntacctttnataaaanacanagcctgtttactcatttagaagatacaganaatnggtctaaaattgaacatcctagattcacactcccaactcacttaaggagattcgatggtgaggaaaatgatntgacaaagnccaacaatgatctncggaatcacattttccaacanacca

SEQ ID NO: 2882 - DNA, 460 bp, Homo sapiens
aaacctggtacaagttaaacaacatctttctcatacccacatgattaagtatgtattctgacaggatataaagaagatgaaacacaagctggtgggtctcagaattagaaactctaatgcaggaccagatcccaaaagctatgttttctatcacttttgtgacatttaggaaacatttaccttgcataaaatataaaagcttttccttttaattatactgtttgtacaaaaaatcactattgagggaaaggtccaccatggctgtatttatctataattcactgtagtatatataaagttcacttggaagttggaaatgtggaaactataatgaataaacaagctgagctgtaattgtgaattttttactgctaatttagaatgtccaactcactcctacagatattacaacttacaatacatgacacacacaaaaaacatgtcaaactttgctgtagag

SEQ ID NO: 2883 - DNA, 502 bp, Homo sapiens
aaaaataaagaaaaaaataccacgactctttgctaatggcttttaagatttgcagacacagctaaatactcatctaacaaagtatccaggctatccaactatattgccatgaattcataagacagtaacacacatttataatataaaagtagtcaaaaaaataaaaagaaacagccacaggtaatttagggctaaaatgagtcctaataagggttacatgagaaataacatataagaccccaaataaattttagatacaaaattaaatgatgtggctttgttcaaacatacctaaaattcaaaatcaagttaaatacctaggctggcttttttatatcaccagctttcattagggctttaatcgctcttgccctcatctcaagttctagcagctccagttgctgtgcagaaggttgaacatcttctggtggaggaacagccagggtggctgctttgggttcgtttgggctagactctgccagtcctagaatctcattccact

SEQ ID NO: 2884 - DNA, 302 bp, Homo sapiens
ccattagctcctgtagctagttcctgtcttttccaaaacctgttttttttttggctttttggtagatgctgtggctctcttatggcctccaataaacataagtgaggcagagttggtttctattgtttgcaaccaacgaacttaatggattctgtattagaaagaactggtatatttctttaagcaaagactaggactctatggggctcaacaaactctgtaatcgcctttccactcccctggacaaaataaatatattgtctactgctgaaacgcaaattatccccaaaccaagtagcttt

SEQ ID NO: 2885 - DNA, 271 bp, Homo sapiens
  unsure (164): n=A,T,C or G
  unsure (172): n=A,T,C or G
  unsure (221): n=A,T,C or G
  unsure (231): n=A,T,C or G
  unsure (237): n=A,T,C or G
ccatcatgtttaagttgaggaaaactcagttcttaaattatctgggaagggtctggattctctatttttgagattgactttatcacaatatgattcttacatctttataccatttacaattgtgttttagatctacagagttagaaattcgaaaactattccangactaatncttaatcgggcattatttatacaagaggtcaaggaacatttactaaccncaatactgcncttgtnaatgaattataaacgctccttctggaatatattt

SEQ ID NO: 2886 - DNA, 308 bp, Homo sapiens
  unsure (76): n=A,T,C or G
aaagatcagatttatttggagaaaacaaaaaacccacaacccaaaggatgggattttacatcaagacatctcccangtaataagtctacagattacaaatcattttcatagaagatatttttgtacaaattttacatgtattcaggagcgggacattaatcaatccctgtttctattttaataggggggacaaggtaggggagagggaaaaacagttttggatataactatttggaaggagagtagacatgaagagggcaaaccctagcttttcattatctacaatcaatagtttgtttttctttttt

SEQ ID NO: 2887 - DNA, 148 bp, Homo sapiens
  unsure (80): n=A,T,C or G
  unsure (113): n=A,T,C or G
  unsure (122): n=A,T,C or G
aaaatgttagtaacaccaggttcaaatccttttccaatgaaaactcctggtgtcaggtgataaagaatgatgttttgaanagcatttttgtcccgtatcagaatttctttttnttcactagncattcccttaaaagcatcattggttg

SEQ ID NO: 2888 - DNA, 196 bp, Homo sapiens
  unsure (23): n=A,T,C or G
  unsure (24): n=A,T,C or G
  unsure (31): n=A,T,C or G
  unsure (32): n=A,T,C or G
  unsure (38): n=A,T,C or G
  unsure (49): n=A,T,C or G
  unsure (64): n=A,T,C or G
  unsure (127): n=A,T,C or G
  unsure (133): n=A,T,C or G
  unsure (134): n=A,T,C or G
  unsure (137): n=A,T,C or G
  unsure (187): n=A,T,C or G
ccatggatgtgccccaatacagnncacattnnttgganaaatgtgtttncagatcatttaatgnaatctttgaagtatctttgactctaactttgacttggtggtggaccttccttggtttttatancacctnncanatatcctttagaattacatgtattttagcataaggaaatcgaaaaagtanaacatactg

SEQ ID NO: 2889 - DNA, 303 bp, Homo sapiens
  unsure (158): n=A,T,C or G
cgagccttgtatgtatgttatggatacataaaatgcacgcaagccattatctctccatgggaagctaagttataaaaataggtgcttggtgtacaaaactttttatatcaaaaggctttgcacatttctatatgagtgggtttactggtaaattatgntattttttacaactaattttgtactctcagaatgtttgtcatatgcttcttgcaatgcatattttttaatctcaaacgtttcaataaaaccatttttcagatataaagagaattacttcaaattgagtaattcagaaaaactcaa

SEQ ID NO: 2890 - DNA, 317 bp, Homo sapiens
  unsure (315): n=A,T,C or G
agtccaccttggcacaaaagccttgtggtatagaaaaacaaatttgtttttatgtcctcttctccctttccatctttcagcatagacttaactcccttaagcccagacatctgttgagacctgacccctagtcattggttaccagtgtgtcaggcaatctggactttccagtgatgccactgagatggcacctgtcaaaagagcagtggttccatttctagattgtggatcttcagataaattctgccattttcatttcacttcctgaaagtcagggtcggcttgtgaaaagttgttaaacaacatgctaaatgnga

SEQ ID NO: 2891 - DNA, 364 bp, Homo sapiens
  unsure (1): n=A,T,C or G
  unsure (5): n=A,T,C or G
nggcnggtaaatatagcaaagcagtgtcttcttgcacagcaaagtgaagaaagtttctacagagaaatagaagttttacatttgtaaaatctttttcacattctaatcatctagcttaagatccaatgccaggagttttcagcttccttatttactatgtatttcttgtgcgcatgatggttaatacagaaattatgttgatgcattactagttatccttctagttaaaggaaagggtaaaacatgtattgttcttgtagaacaaacccctgatttagtctataacaaaatggacataattgggctcaaaagatggagttttgattgggaccacctgtgtacacacaacagtgacttccactcg

SEQ ID NO: 2892 - DNA, 359 bp, Homo sapiens
cctgttctctctttacatcttcagacttaaattctgtagaaggtaacagctttgtattaagacagaagcttagtggtcacaaacaaaaaataacactgaaatacaattcggaaattaatgatactgtgtgtctcaaagaatacctgaactatacattcactaataatttggcaatgagattccatgctgttcaacttttgtcttttatacccacacgtagaaaaaaaattcatgatttaccccaaggttattattaaatatcattttgtgatatgaactttagtaatagaaattaataacatttcccataccaacagaaagtaagttgctagaataaaggaatcatttttcccatcagg

SEQ ID NO: 2893 - DNA, 362 bp, Homo sapiens
  unsure (318): n=A,T,C or G
ctgaggcaacagaataaatgcagaggcattacaatgaatcccacttaatataaagaactatacagaccaacacttctctacaaaatttttttttcctcattgccagttaaatacagagttttactttcatagcttaacaatgaagggtcatacactgaagccaatacatatacctagcatttcagtctaagcttgtgcacgtacatagctgaagtcaattacaaggtttggcctagaaatgctaggggaacttctttgtagtttttacaggtattaaacttcatcttgcacactgaagtcatcatacatacagggcanaatcagagcttttatatttgcgtttattcttcatttaacttttt

SEQ ID NO: 2894 - DNA, 385 bp, Homo sapiens
  unsure (383): n=A,T,C or G
aaagaatttattaagcctgttataccacacagtatgttttatacactgacatacaactccctaataagataaagcaaagacaaaaaagtttatcttattagaaacaagatacaccaccacttattgtcttcaaacattattgcactttaactttcttaatttgacaaagcattcaagaaacatctgcggactagttttaacagacaaataacacctgtaagcagacatgactgtcctaaattgtttattaagtatgaattttacaaactttacttatattagcggtaacggtggagctggagagtattgcgccttctccaagctgcccggcgagagccaccaatagtgtggtggaacttgtggccctttccaaggccaccggntc

SEQ ID NO: 2895 - DNA, 338 bp, Homo sapiens
  unsure (7): n=A,T,C or G
  unsure (22): n=A,T,C or G
  unsure (26): n=A,T,C or G
  unsure (35): n=A,T,C or G
  unsure (43): n=A,T,C or G
  unsure (157): n=A,T,C or G
  unsure (166): n=A,T,C or G
  unsure (181): n=A,T,C or G
  unsure (195): n=A,T,C or G
  unsure (209): n=A,T,C or G
  unsure (259): n=A,T,C or G
  unsure (297): n=A,T,C or G
  unsure (302): n=A,T,C or G
  unsure (304): n=A,T,C or G
  unsure (311): n=A,T,C or G
  unsure (320): n=A,T,C or G
ctgtcangtggcccaataacgnaatnggactccgnccccttgncagtgccactggctgttcctggctctagttcccaggggagcctcaaactggggcctagcccagaaagccaccggctagcatcacatagcttctccagctcaaatagcccaaggngtggcatgnctgcccgacctccanagaataaccggcantcaccgtgcccagncaacacatgctcgtgctatggggagaagcctctgctgggtgacccaccanccaaccctgggcgcaattttaattttagataaaatgcntcaangntcaaacngccacaggnaaacccctgatgtaacac

SEQ ID NO: 2896 - DNA, 241 bp, Homo sapiens
agagcccagaggtaacagaacagcttcaggttatcgaaataacaatgttaaggaaactcttatctcagtcatgcataaatatgcagtgatatggcagaagacaccagagcagatgcagagagccattttgtgaatggattggattatttaataacattaccttactgtggaggaaggattgtaaaaaaaaatgcctttgagacagtttcttagctttttaattgttgtttctttctagtgg

SEQ ID NO: 2897 - DNA, 156 bp, Homo sapiens
  unsure (4): n=A,T,C or G
  unsure (28): n=A,T,C or G
  unsure (29): n=A,T,C or G
  unsure (45): n=A,T,C or G
aaancattcctttctttaattttgtaannctttactgtggaatanctcaaaatgtcagttctgttttaagtaacagaattgataactgagcaaggaaacgtaatttggattataaaattcttgctttaataaaaattccttaaacagtgaaaaaaa

SEQ ID NO: 2898 - DNA, 50 bp, Homo sapiens
ataaagtaaggcatggttgtggttaatctggtttatttttgttccacaag

SEQ ID NO: 2899 - DNA, 267 bp, Homo sapiens
aaactctagatcagaattgttgacttgcattcagaacataaatgcacaaaatctgtacatgtctcccatcagaaagattcattggcatgccacaggggattctcctccttcatcctgtaaaggtcaacaataaaaaccaaattatggggctgcttttgtcacactagcatagagaatgtgttgaaatttaactttgtaagcttgtatgtggttgttgatctttttttttccttacagacacccataataaaatatcatattaaaatt

SEQ ID NO: 2900 - DNA, 262 bp, Homo sapiens
cctttttcttgggatgattttctagtcttaaggtttggggacattataaacttgagtacatttgttgtacacagttgatattccaaattgtatggatgggagggagaggtgtcttaagctgtaggcttttctttgtactgcatttatagagatttagctttaatattttttagagatgtaaaacattctgctttcttagtcttacctagtctgaaacatttttattcaataaagattttaattaaaatttgaacttttcaaa

SEQ ID NO: 2901 - DNA, 427 bp, Homo sapiens
ctgtagctttttcattcagaaactggagaccatcttttcactgagttgttattccttcctcttcccttagcttagggatatgttgaaaaaggcttttcaacaagtattttattttttacaagttgctatgaaattaaaatttatatatatatcttaagtgtttataaagcactcaaaattgtagcttacatgtatatgacttctgaaaataaaaatcacacttctaacataatctttctgctctgcaaaaatattctacatacatgcatatgatcaaaacaatcttttcatgtttggggtatttcttacacatagtaaaagaaaagtcaacaattgtatcagtacttcccctgttaagataactgagtgccacctagtgttcaatttctgcaactactaagcttacaaattcaatactgctattaaa

SEQ ID NO: 2902 - DNA, 432 bp, Homo sapiens
aaaaatacttacacagcttaaaaaaacaaaaacattaaagtcgtagagaccaattattaagcgtataggaacatgatattcatgtatcattaaaacgtagagaccaattattaagcgtataggaacatgatattcatgtatcattaaaataaggattctttcaagatctgtttcctatctcagtctaaatcaggggtctggagttgtggccttaaaaaactagcctcaaacggctccatgcatgcataatagctttatatgtgttccctttgttggtccagttacctgatttataattcttccttacctgaatgactttagaaaacacattaatattgccttaggaattaaatcaattaaacactgatgatcagctacatttatcgtgtaatttaatctgcttttttgtatattagcttttacatatagaag

SEQ ID NO: 2903 - DNA, 243 bp, Homo sapiens
ctggtgaagaggatacagcagaaaaagatgagttgtagacactgatctgctagtgctgtaatattgtaaatactggactcaggaacttttgttaggaaaaaattgaaagaacttaagtctcgaatgtaattggaatcttcacctcagagtggagttgaaactgctatagcctaagcggctgtttactgcttttcattagcagctgctcacatgtctttgggtgggggggagaagaagaattgg

SEQ ID NO: 2904 - DNA, 415 bp, Homo sapiens
  unsure (411): n=A,T,C or G
cggggactaactgcaacggagagactcaagatgattccctttttacccatgttttctctactattgctgcttattgttaaccctataaacgccaacaatcattatgacaagatcttggctcatagtcgtatcaggggtcgggaccaaggcccaaatgtctgtgcccttcaacagattttgggcaccaaaaagaaatacttcagcacttgtaagaactggtataaaaagtccatctgtggacagaaaacgactgtgttatatgaatgttgccctggttatatgagaatggaaggaatgaaaggctgcccagcagttttgcccattgaccatgtttatggcactctgggcatcgtgggagccaccacaacgcagcgctattctgacgcctcaaaactgagggaggagatcganggaa

SEQ ID NO: 2905 - DNA, 199 bp, Homo sapiens
ccatggagaagggcaggcatatggagtatgaatgcccctacttggtatatgtgcccgtggtcgccttccgcttggagcccaaggatgggaaaggtgtgtttgcagtggatggggaattgatggttagcgaggccgtgcagggccaggtgcacccaaactacttctggatggtcagtggttgcgtggagcccccgcccag

SEQ ID NO: 2906 - DNA, 327 bp, Homo sapiens
ctttttggttgttatttggctatacagttttatgctttaaaacaaatgataaagttaatttccaattcaatagtgaaatattaacaatctaactatagccagatcaaagacacctgaacacagaaaacctttatttgctggtgctgccattgcacaggctgtacaatgaaatagatttgaaaagctgattgattttcccgcacataaattctggatgtcaatttccaaccaaactccaatccagctatgtggcatgaagagttacaggagggagggaggaaaatagccctatgttagtcatgtttgcatacagaggatcaaagtagg

SEQ ID NO: 2907 - DNA, 414 bp, Homo sapiens
cctggatatggtgaacagagaaactgcacatgaaagggaaatgcaaacggcaatgcagataagccaatcatgggatgagagcttgagcctgagtgacagtgattttgacaagccggagaaattatattctcctaagagaattgacttcactccagtttctccagcaccttcacccaccaggggattcggaaagatgttcgtgagcagcagtggattgccaccaagtccagttcccagtccaagacgattttcaaggagaagtcagagtccagtcaagtgcattagacccagtgttcttggtcctcttaaaagaaaaggtgaaatggagacagaaagtcagcccaagagactcttccaaggcactaccaatatgttatctccagatgccgcgcaactgtctgatctcagttcatg

SEQ ID NO: 2908 - DNA, 422 bp, Homo sapiens
ccatggatgtgccccaatacagtacacattttttggttaaatttgttttcagatcatttcatggaatctttgaagtatctttgactctaactttgacttggtggtggaccttccttggtttttataacacctaagagatatcctttagaattacatgtattttagcataaggaaattgaaaaagtaaaacatactggtttttttcaacaagaccatatgtaaattaaatagtgaaatgtgtatgagtttcagtagaactgtaccatcaacaatgtttccataaatatgcagagttctttcttttgtattgttatttacaatattgttaaattgaatgcatttgcaatttctaggattctaaagaattgagtacagaaagtagcaattttattatttgatgataatatgagaattactgtgcc

SEQ ID NO: 2909 - DNA, 352 bp, Homo sapiens
tcaagacccacggactcctggtctgagcccaataaagactgttaattcctcatgcgttgcctgcccttcctccattgttgccctggaatgtacgggacccaggggcagcagcagtccaggtgccacaggcagccctgggacataggaagctgggagcaaggaaagggtcttagtcactgcctcccgaagttgcttgaaagcactcggagaattgtgcaggtgtcatttatctatgaccaataggaagagcaaccagttactatgagtgaaagggagccagaagactgattggagggccctatcttgtgagtggggcatctgttggactttccacctggtcatatactctgca

SEQ ID NO: 2910 - DNA, 151 bp, Homo sapiens
ccatgtatgtgcatgcatatacactctacagtgctgttagaccttttggctgcagtttcatgttagggtcttacagtgtgaatgacggtgcgcaactctacatgattgacccatcaggtgtttcatacggttattggggctgtgccatcgg

SEQ ID NO: 2911 - DNA, 373 bp, Homo sapiens
  unsure (338): n=A,T,C or G
aaaagatcattctgttctttcaaggagaaataagcctaaaagaagaaaaacaaaaaaaattctgtataaaactgtaatcctttgtattcatgtttacagtgctattactataattcaaaattatgtatgtgacttagagttatataatcataatttatgtttatttcaaatatctaagtttattgcttggatttctagtgagagctgttgaatttggtgatgtcaaatgtttctagggtttttttagtttgtttttattgaaaaatttaattatttatgctataggtgatattctctttgaataaacctataatagaaaatagcagacaacataaacntctttgtaaatatcaaacctaatacatttcttgtc

SEQ ID NO: 2912 - DNA, 187 bp, Homo sapiens
aaaaaagtcataggtactgtgagttctgtataaactggtggacagtaagttagttcctttgttttaacttataagcctcaacttcaccgcagaataaagaatgtaggccaaagaaagcataatcggtcactcgtatagaacagtattgtttctataatttgaagctttctgaatggacgggttcagg

SEQ ID NO: 2913 - DNA, 309 bp, Homo sapiens
  unsure (242): n=A,T,C or G
  unsure (273): n=A,T,C or G
  unsure (296): n=A,T,C or G
ataaaaataggtgcttggtgtacaaaactttttatatcaaaaggctttgcacatttctatatgagtgggtttactggtaaattatgttattttttacaactaattttgtactctcagaatgtttgtcatatgcttcttgcaatgcatattttttaatctcaaacgtttcaataaaaccatttttcagatataaagagaattacttcaaattgagtaattcagaaaaactcaagatttaagtnaaaaagtggtttggacttgggaacaggactntatacctcttttactgtaacaantactcattaaagg

SEQ ID NO: 2914 - DNA, 270 bp, Homo sapiens
ccagagggaaggcccaagagacgtctctgaagccaccgttcctgattattcagaggcagggtccacagtgagtgactcggtggggctggaggaacccagggtgacccagagggggctctggagcgggtccctaacatctgaaaaagtcctcccagggaactcggagctggaacttccaggcagcttcgggggtgacatttgtatccggccagccgagcggggaaaggagaccttgtgtcctggcaacagggagagccgggactgggatgg

SEQ ID NO: 2915 - DNA, 288 bp, Homo sapiens
ccaattatttccaatttttattttattcttaaaacttaagcatggtaaaatgttaagctgttttcatccactgatattattctactataaaaagcccttcttgagcagatttgatgataaaaaggagaacatttctaaggtataattagagaagctgttgcatgagaaatcatgtctccatctccattttgctatgcgttatctgaggattgtttctgaaagagatctatttaggcagtgtatgtatgtgtcagcatgtaaaaagtaaagaactgaaaatagacaaac

SEQ ID NO: 2916 - DNA, 419 bp, Homo sapiens
aaattaaattaatagttacaaggtaggttggctcttaggtgaatttagccatgtcaactaatagcttttatatggtatgtaacaaatctgaattatgttatgctgtgaattattcagtgcattataagaaatcttagttaatcatgcttttgggcttcattagtcaatgtgattggccttttattttctttccataacttatctgctattattagtttcttattccttattattaatctgttagctcattatcattagcttactaacttgaaagttagattaatatcaaaataagaatagcagcactatgaagagttaataaaatgcaatttcatgttagagctagaataaaagtaattgagcagtcatttgcaaatgcttcattataacatttatgtgcttaagatttctaaggtttt

SEQ ID NO: 2917 - DNA, 269 bp, Homo sapiens
ctgcctcctgagggtgtggggttattagggtctcaatactttctcaaggggctacactccccattaggcagcatcccaccagcctgcaccacaggctcccctgggaggacgagggaaacgctgatgagacgctgggcatctctcctctgtggctctaggacatctgtccaggaggctgggcggaggtgggcaggatgtgagaggtggggagtactggctgtgcgtggcaggacagaagcactgtaaagggctctccagccgcagctcag

SEQ ID NO: 2918 - DNA, 302 bp, Homo sapiens
aaacaagtgggattaagttcttgaagcatttctttgaaaaactgtaacaggagatgtaacatgccttcaccagtgtgatcctgaatactaagtgcaatccaagcaatcgttaccgagaggtggcagtggtccagtcaaagcaaaagtggattggtcaagagcaaacgtcattgcaacagatttttgagatgctcaaggcatattccttggtaactttatggaaggacaatgaataattacatattttgttatgaaagtgttttgagaaatttgccaaagacttagaaaaacaccaaggaagg

SEQ ID NO: 2919 - DNA, 331 bp, Homo sapiens
ggaaaaacagatgttgttgacagatagagtgataggcaaattctgtgtggactttagtcccaaaaggaaactttagttcacttgcagtatgcttatccttgactgcacatgagaatgccttgtgcagagttatttggagattatgtctttttcttaaacaccatggctgtcacacttcagttcaattaaatcagaatgtctgaggagtgagacacaggcatcaacactctcaaatgattcacatgttcagccaaagttgagaaccatcgagcctgtggaagttctttctcgtggctcagaatcttaggtaggtgcttaactcttgtggtgg

SEQ ID NO: 2920 - DNA, 207 bp, Homo sapiens
cggatacaaatgtcacccccgaagctgcctggaagttccagctccgagttccctgggaggactttttcagatgttagggacccgctccagagccccctctgggtcaccctgggttcctccagccccaccgagtcactcactgtggaccctgcctctgaataatcaggaacggtggcttcagagacgtctcttgggccttccctctgg

SEQ ID NO: 2921 - DNA, 212 bp, Homo sapiens
ctgtccagtgttggtgattccagtggactgtatctctgtgaaaaacacaattttgcctttttgtaattctatttgagcaagttggaagtttaattagctttccaaccaaccaaatttctgcattcgagtcttaaccatatttaagtgttactgtggcttcaaagaagctattgattctgaagtagtgggttttgattgagttgactgttttt

SEQ ID NO: 2922 - DNA, 247 bp, Homo sapiens
ccttcccagtccccacaggtccccgtcctgataggtccctggagctccactggccctcaggtaaactccaagcgccacactactgtctacaaacgctggtgatctggacctgcagcccttctcgccttggtggaggcccctccccacgctctggaaagtgcctcaggccctctcagctctggtctctgcaccttccattcccctcacctagatcactcctctaccaaactcctgcacaccttccagg

SEQ ID NO: 2923 - DNA, 316 bp, Homo sapiens
ccaccacaccacacccctttacaacctccagccctatagtctaaggatatggggccctgggagacaccgagggaccaaggaaagaggccccctgtagaaagcaagcagaaattccttgtagacccactgaccagagttgctcgctgtccttgaccccaccgagaggggtgcaaccctgactcagcatcacctcctatctgtcatagcggggagagctttccccaaaggccagcaggggaaaacccaaccttacttggaggagccagggaagtatctcgcagatcccgcaaaaaggcacccacgtctacagctcggc

SEQ ID NO: 2924 - DNA, 316 bp, Homo sapiens; identical to SEQ ID NO: 2923

SEQ ID NO: 2925 - DNA, 269 bp, Homo sapiens
  unsure (193): n=A,T,C or G
ctgcctcctgagggtgtggggttattagggtctcaatactttctcaaggggctacactccccatcaggcagcatcccaccagcctgcaccacaggctcccctgggaggacgagggaaacgctgatgagacgctgggcatctctcctctgtggctctaggacatctgtccaggaggctgggcggaggtgggcangatgtgagaggtggggagtactggctgtgcgtggcaggacagaagcactgtaaagggctctccagccgcagctcag

SEQ ID NO: 2926 - DNA, 207 bp, Homo sapiens
ctgggaggctattcccaatgccaggatcgagctgcaggagtgggagcatgtgacctgcatgaagacagtgtctctgcgcagtgaggagaccgtgtcgggcctcaaaggctacgtggtcgccgggacctgcctcatgcagggggaggaggtcacgtgccgagggcggatcttgatcatggatgtgattgaggtggtgcccgagcctgg

SEQ ID NO: 2927 - DNA, 346 bp, Homo sapiens
  unsure (244): n=A,T,C or G
  unsure (248): n=A,T,C or G
  unsure (277): n=A,T,C or G
  unsure (290): n=A,T,C or G
  unsure (314): n=A,T,C or G
  unsure (318): n=A,T,C or G
  unsure (340): n=A,T,C or G
ccacgagaccaccccgagcgccaagcctgtatctgcagatccctctctgctcaggaaccaccacgtcctgtgttctcgccaatggagaccaagacctggggttggttctgggctcctgacagttctcttgatgttaagagtgcagctctgtcaacactcagcataccaaaagctctggagcagcttatggcacacctttccctggtgccatctcttcagacacgatgtgagctcattacaaccncatnagtaaatggagctaccatgtatattttantgaaaatacatangcacccgtgtccccatggggtctnacanggctaggctggggacactgctngggggg

SEQ ID NO: 2928 - DNA, 314 bp, Homo sapiens
ttgtcctttggacaaatctataactttcttttcctagccaattatactcaaagaactaggggattatagagaggttaggcatattttgttgggtgtcaggagatgctgaacagagggcttgtatatctgtacattgctctttctccactgtgaggtccatcctgccttaatttgggttcctgcagcctcagggcattctagggctctcttagatcctgctggactgagtcccctctagaaaagaagcaggaacaggctaaccaacagcagactgttagaagttggtggagggcactgacaggagtaccagccag

SEQ ID NO: 2929 - DNA, 269 bp, Homo sapiens
  unsure (107): n=A,T,C or G
  unsure (121): n=A,T,C or G
  unsure (138): n=A,T,C or G
  unsure (226): n=A,T,C or G
  unsure (231): n=A,T,C or G
  unsure (244): n=A,T,C or G
  unsure (261): n=A,T,C or G
  unsure (268): n=A,T,C or G
aaaagatactttggattcaattaagaagagtttttaagaaaaaagaggaaggttctggcatggggagctctgcaacccactgctgggtgccacaagcgatgcttaanaacggaagatgaanatggcaccatgtgtctntaaaccacaaatggaaccactgatttctatgtgtatttgcatttgctgtaatgtgtgggaaatctgaaggttacacagcacaactgtncacancagatggcccttnaaggggatgaggtttanagccatnc

SEQ ID NO: 2930 - DNA, 175 bp, Homo sapiens
ccctcccctgctcagaatctgataccaaagagacagggcccgggcccaggcagagagcgaccagcaggctcctcagccctctcttgccaaaaagcacaagatgttgaggtgagcagggcaggcccccggggaggggccagagttttctatgaatctatttttcttcagactgagg

SEQ ID NO: 2931 - DNA, 216 bp, Homo sapiens
  unsure (10): n=A,T,C or G
  unsure (26): n=A,T,C or G
  unsure (32): n=A,T,C or G
  unsure (64): n=A,T,C or G
  unsure (78): n=A,T,C or G
  unsure (90): n=A,T,C or G
  unsure (95): n=A,T,C or G
  unsure (112): n=A,T,C or G
  unsure (122): n=A,T,C or G
  unsure (129): n=A,T,C or G
  unsure (151): n=A,T,C or G
  unsure (178): n=A,T,C or G
ccagcccacngggtactggaagacantggttntgatgggttcagccctgctacttggggctganctcagacgcttggntctcttctccanccagncctccagatggccctcngggagctcangagcatntagtaaccactccctggctcgnctctcctcctccacctggatgctcagntcctgcaggtctcgctctgacatgtgggaaaatctgca

SEQ ID NO: 2932 - DNA, 186 bp, Homo sapiens
  unsure (6): n=A,T,C or G
  unsure (9): n=A,T,C or G
  unsure (10): n=A,T,C or G
  unsure (18): n=A,T,C or G
  unsure (21): n=A,T,C or G
  unsure (26): n=A,T,C or G
  unsure (35): n=A,T,C or G
  unsure (44): n=A,T,C or G
  unsure (47): n=A,T,C or G
  unsure (52): n=A,T,C or G
  unsure (140): n=A,T,C or G
tccganctnngtaccaanctnggagnaatcatggncatagctgnttnctgtnaatgccccacggagacttagcaggttccaggagtgagcgagggcagcggaaaggagttcttccgggggacacgaattgcctggctgantatcaagaaagacacactcttaaatttcttggttcagagcaggaaa

SEQ ID NO: 2933 - DNA, 444 bp, Homo sapiens
ccacctgagtgcaggtgacaaggacctgacagagcccatgcagggctttagatttggacacacaagagttgataacttcctcatgaactccttgcctgatctaaactcatattatgggttctgactgtttgagtaatcatcttcaaggttaaacctcttggcagttacccttttcacaaagtgcacagtgggaatcgggaatcgatagggttaattttggagcagtggcttataccattcacctctgtttttttgtgattatttcacagataatgagaccttaataacaaataggcgtaaaaaaattttcacatcgaaatgatagaaacatttgatgtaataaaacttggttggcttgatattttaaggaattgaaacctagcaatcttattggagagacaaaaattggtctccaggggctggaggtctgcgggccaagccagg

SEQ ID NO: 2934 - DNA, 236 bp, Homo sapiens
aaaactattattctagaagaaatgggcagttttgtaatttggtggtggctgagaccccatagaagttttactatgtaaataatttggagagtgaataaggagattgtgctatgaaatcctgacagcgctctttaggaggcagacttgacagtcctaggaaggttgacataaaaataccaaccttcagtaaagctctagtacaaaaaagggtaaatgtcatcattcttatttttagg

SEQ ID NO: 2935 - DNA, 347 bp, Homo sapiens
ctgaacaactgtggagacccatcctgcctcctgactctaagctgcttttaagctaattttctggctctttgcctactgtgtatgtgtgataggactgttttccttggtatgttcccagatattctctgggatatttgggttctcagggatacctgcttcttggctgggcaccatgcccttggcttaccccccagccttcagggttcaagcagtggacatacacccttacataacctggtgaaggacctgtcacactacagcagctttataaaaagatataaaaagataaagtattataccctaacaatatttgacattttacctttagcttcagttattattctttt

SEQ ID NO: 2936 - DNA, 234 bp, Homo sapiens
ctggaccagaaatgtgaacagcaggggacccaggaagttgaccagggcgatgacccaagggggcaggtactggagcagcagaaacagggactcctccttgttgtcctgtgagtacttggtagcccagaagatggcgctgatggccccaaccaccaggagcccgttgagtacgttgacccgcaggtaggagagcaggcggcaggccgtctgggcccgggtctgctgctgcatcag

SEQ ID NO: 2937 - DNA, 401 bp, Homo sapiens
  unsure (13): n=A,T,C or G
gatgatggacagngaaactggtcgatccaagggatatggatttattacattttctgactcagaatgtgccaaaaaggctttggaacaacttaatggatttgaactagcaggaagaccaatgaaagttggtcatgttactgaacgtactgatgcttcgagtgctagttcatttttggacagtgatgaactggaaaggactggaattgatttgggaacaactggtcgtcttcagttaatggcaagacttgcagagggtacaggtttgcagattccgccagcagcacagcaagctctacagatgagtggctctttggcatttggtgctgtggcagaattctcttttgttatagatttgcaaacaagactttcccagcagactgaagcttcagctttagctgcag

SEQ ID NO: 2938 - DNA, 250 bp, Homo sapiens
ctgcatcagtgacatgaaaacagaaaccagggaggtcctgaccccaacgagcacttctgacaatgagaccagagactcctcaattattgatccaggaactgagcaagatcttccttcccctgaaaatagttctgttaaagaataccgaatggaagttccatcttcgttttcagaagacatgtcaaatatcaggtcacagcatgcagaagaacagtccaacaatggtagatatgacgattgtaaagaattt

SEQ ID NO: 2939 - DNA, 338 bp, Homo sapiens
ccagcatagcagggtggagtccatgtccctggctgacagagggaaccctggaaatattacttcgcgcttgatggagaaggagaaggccagagattgcctgattcctatggggatagcctctgagaatgtggctgagcggtttggcatttcacgggagaagcaggatacctttgccctggcttcccagcagaaggcagcaagagcccagagcaagggctgtttccaagctgagattgtgcctgtgaccaccacggcccaggatgacaagggcaccaagaggagcatcactgtgacccaggatgagggtatccgccccagcaccaccatggagggcctgg

SEQ ID NO: 2940 - DNA, 352 bp, Homo sapiens
ctggcttgcctgctggcctgcttcctggagataggatgctcagacccaccgctgctcttcaggggtcgtggaaggaattaatgcacttccttctgtcccccaatctctgtccctttacgtgtctctggagctgagcaggtattctttttctttcttcatctcagtagagccataaaacagggacctctgacgcttcacattatcaggtaagaaatgtttcttgcccagcagcccccagaggatgaacagctccctccaccttttacttttatccagcatttcttagctcggttggcaaactggatatttatgcacctgcatttcacaatccatctccaccgattattcctgg

SEQ ID NO: 2941 - DNA, 196 bp, Homo sapiens
ttgagtattctatagtgtcacctaaatagcttggcgtaatcatggtcatagctgtttcctgtgtgaaattgttatccgctcacaattccacacaacatacgagccggaagcataaagtgtaaagcctggggtgcctaatgagtgagctaactcacattaattgcgttgcgctcactgcccgctttccagtcgggaa

SEQ ID NO: 2942 - DNA, 307 bp, Homo sapiens
  unsure (1): n=A,T,C or G
  unsure (7): n=A,T,C or G
  unsure (30): n=A,T,C or G
  unsure (141): n=A,T,C or G
  unsure (147): n=A,T,C or G
  unsure (149): n=A,T,C or G
  unsure (177): n=A,T,C or G
  unsure (206): n=A,T,C or G
  unsure (279): n=A,T,C or G
  unsure (297): n=A,T,C or G
nggcggncgaggtccaggcaagtggcaganccagacctgggtcttcacacacttccctcttcttgactgtactggcgcaggtgcttaagatttgggggaaggtgggtgggtatctggcctcttctttgggactcaaattgngatatntntctgagaacccacaggctccctctttanggctgaggtgagaagttctgaaagtcaancagacacatccaggcatttgggcaagaaacttcttccttccaaatcaaaggtgaaatgaaaacgattatgagnccaccgggggatgaacanaggtgaatgg

SEQ ID NO: 2943 - DNA, 357 bp, Homo sapiens
ctgacagttctccatggcaactcagtcctccagcagacccctgcatacataaaggtgcaaaccaacaagatggtgatgctgtcctgcggggctaaaatctccctcagtaacatgcgcatctactggctgagacagcgccaggcaccgagcagtgacagtcaccacgagttcctggccctctgggattccgcaaaagggactatccacggtgaagaggtggaacaggagaagatagctgtgtttcgggatgcaagccggttcattctcaatctcacaagcgtgaagccggaagacagtggcatctacttctgcatgatcgtcgggagccccgagctgaccttcgggaagggaactcag

SEQ ID NO: 2944 - DNA, 205 bp, Homo sapiens
  unsure (104): n=A,T,C or G
  unsure (160): n=A,T,C or G
  unsure (198): n=A,T,C or G
ctggcctgggtcacagtgacctgacctcaaaccagcttaaggctttaagtcctctctcagaacttggcatttccaacttcttcctttccgggtgagagaagaancggagaagggttcagtgtagccactctgggctcatagggacacttggtcactccanagtttttaatagctcccaggaggtgatattattttcantgctcag

SEQ ID NO: 2945 - DNA, 138 bp, Homo sapiens
gtgaatgctggtgtcactcagaccccaaaattccgggtcctgaagacaagggcgaattccagcacactggcggccgttactagtggatccgagctcggtaccaagcttggcgtaatcatggtcatagcttgttcctgt

SEQ ID NO: 2946 - DNA, 250 bp, Homo sapiens
  unsure (123): n=A,T,C or G
ctgctatactaatgggattctggggcaggtctcagtaattatgaaacatctactgataaaataggtattcaccaaccctaagagtagactgcgattcactagatgtgagcattctaagtaganccaacccagggaaaactatgcaaggggcccctgacagggaaagggctgcaaagcaccaggcaaggtgactctcatgcgctttccagctctgcttttgtttctctatgatcctagaacttaattatta

SEQ ID NO: 2947 - DNA, 214 bp, Homo sapiens
  unsure (126): n=A,T,C or G
ctgcacgtaggcgaccttgtagtccggcttcttgatcctcacgtttctgtgatctcttctcttgttagagccatgctgcacccgtgtccgcacagcagccacgggcacgttatagatgccctcganggaaattcctgaggtccacccttgtcatttccatggggatccggaactgcacggtgtcctcgggctgggccacaccgggccgcaccag

SEQ ID NO: 2948 - DNA, 134 bp, Homo sapiens
  unsure (129): n=A,T,C or G
cctcatcatccatgaaggctcctctgtctaccgcatcttcaagcgctggcaggcagtgaaccagcagtggaaggtcctaaattatgacaagaccaaggacataggaggagatgcaaggggagggacggnaggga

SEQ ID NO: 2949 - DNA, 233 bp, Homo sapiens
aaagggtgtaatgtgttggtcacatcacaaccagtaagaaacgcttggtaggttatccacatcttttgctgactgtttccatatacaattctggtcaccatattttccaaagctaaaatctgaggcgtgggcttgatggtttttgaaatcaggattaccccaggaagaaccaggtcctattactaattttcctgattctgaggctctgaaggcttgtctgagacacattccgg

SEQ ID NO: 2950 - DNA, 169 bp, Homo sapiens
ccatagggcgctacgacgggactcacccgtgcctggcggccgccacccaaacgggcaaggtttttattcataatcctcatacacggaaccagcatgtcagtgcatccagggtcttccagaaccccctggaatctgatgtttctcttctcaacattaaccaggcagtcag

SEQ ID NO: 2951 - DNA, 360 bp, Homo sapiens
ccatgttcccccgtttgccttcacaaaaaccttgtgaataatacaagccatatggactctgatttacagtttagaagatgagcagaggtgggtgtgagttgcccagtcatgttgctagttgttgaagaaactaggattgttctcaggtcttgggctcctggcccatagaccagtggctctgtgttctgatggggtattggggaggatttttacaaatgcagattcctgagattgttcctggaacatctccgagtgggtgtgggttgtggccctgcgtgtgtgattttgcctatcccagctccggggtaccaccaaccactttttgtctctgtgggtttacctactctggatattttgttt

SEQ ID NO: 2952 - DNA, 238 bp, Homo sapiens
ctggagacactttagaactctttccccatcctccaccatagtgcaaacttcacgcttctctgagcacctccaaggtatgcccttgaagtaaaacagaaaagggaagaaagggggctttttcttttccatttctgaccaaacagaggtctgaaatagcagtgtattatgaaattctcattccctgcaacagtcagccaccacttggaaaatggctatttttgccataaactagattttt

SEQ ID NO: 2953 - DNA, 349 bp, Homo sapiens
ccaacattggagaccacttctgtcaaatggtgatttctgaaaaggaagctatgtcaactattgagccacacagacaggttgcttggaagcgagctgtcaaaggtgttcgagaaatgtgtgatgtgtgcgacaccaccatcttcaacctgcactgggtgtgtcctcggtgtgggtttggagtatgtgtggactgctaccggatgaagagaaagaattgccaacagggtgctgcttacaagactttctcttggctaaaatgtgtgaagggcgaattccagcacactggcggccgttactagtggatccgagctcggtaccaagcttggcgtaatcatggtcatagctgttt

SEQ ID NO: 2954 - DNA, 286 bp, Homo sapiens
  unsure (1): n=A,T,C or G
  unsure (21): n=A,T,C or G
  unsure (33): n=A,T,C or G
nctgtgtcctgccctcccttntggaggctggangggagaggccaagcccttggaaaatgtagcaaatgtctggatgtcgcataagtgcgtgtatgtgcgggacaggccccgagaagctagtgacttcttgcacacccccattgcacaaatgaaatcacagcccaggagggagggtagcttggcactggctgagaaatagagctctctccccgcccctccccctaaccacaagggattgtcctgacaacttgtggggatagaagggctcacagggcaggggtctcag

SEQ ID NO: 2955 - DNA, 286 bp, Homo sapiens
  unsure (122): n=A,T,C or G
ccagagaacaagatgctcccttgctgagctcctgggagcgtggaaggagatgctaggccctggcacagtgttatgtggactgggccacgatagggtggagtgagctagtgaagaaggcaganggagactttgcttctggtctcagctatgcctgttttgtgaccttgattgagttgcttgggctttacttctgcctacaaatcaggggtaaaaatacctgttgggaggagaaatgagaacatagaggaaagcctcttggaggaaaggtgcttggaccaagtctcag

SEQ ID NO: 2956 - DNA, 125 bp, Homo sapiens
taaaagatactttggattcaattaagaagagtttttaagaaaaaagaggaaggttctggcatggggagctctgcaacccactgctgggtgccagaagcgagctgtggagcggaagattaagatgg

SEQ ID NO: 2957 - DNA, 309 bp, Homo sapiens
  unsure (128): n=A,T,C or G
  unsure (144): n=A,T,C or G
ccagtaggtgtgggtgcttttgatgtttgcttctggtggttgaaagaagcgcagggaagagactgggtgtagagtgatgtaccccaaggctgcagctaagatcaaattcttctggagagctgtgtganctggatgctgatgcanaggagggtgggggagctggtgagaccaaggctgggctctgtgcccatcccactgggtgtgaaggaaggaaatgaccacagacagccatgttctgggtcggccgtctgcaagccaggctgactcctcctctcccccagagttcaggatggtcaacggcagcagcag

SEQ ID NO: 2958 - DNA, 290 bp, Homo sapiens
  unsure (143): n=A,T,C or G
cctgtgaccaagtttacagtcatctagtttctctcacaatttcaaaatgtcagatcagaagaatctttggcgattaatccactctccattttatgcgtgagaaaaccaaggccctgatggtgtccctggtcccaagtccagtngcccttcacaatgaggcttttggctcttaccctctgaagtggggcagtggctcactgtgaggggagagggtcagatcttgttagtttgatcttaaggcactcacaaaatgccctgatttttcttgtctttgtgagaagacaaaaaac

SEQ ID NO: 2959 - DNA, 122 bp, Homo sapiens
aaacagctctaagtgtcagtactcatagtggcatattacaaagtaataaacagtgcacacttgagggcaaaccgcatattgagctatggaagagctcactgtgattaagatgacatcaaacc

SEQ ID NO: 2960 - DNA, 377 bp, Homo sapiens
  unsure (53): n=A,T,C or G
  unsure (79): n=A,T,C or G
  unsure (132): n=A,T,C or G
  unsure (169): n=A,T,C or G
  unsure (174): n=A,T,C or G
  unsure (256): n=A,T,C or G
  unsure (290): n=A,T,C or G
  unsure (343): n=A,T,C or G
  unsure (344): n=A,T,C or G
  unsure (347): n=A,T,C or G
  unsure (349): n=A,T,C or G
  unsure (369): n=A,T,C or G
ctgagattgtgtgtgtgtgtgtgtgtgtgtgtgtgtaggggaggactggctangaaagcaagcagagtgcctctgcttnttctgccaactctatctcagcactgatccagaccccaccagccaagcattttntgggacccgcacactttgctctggagctttctaatancctgnattaatccacccctgtgcttcatgcctttgccaccaggagaaccagtgcaactgaagtttccactgcctgctgctctcctgnggcatccacatcctgaataggcaggagggtgcancccacctggtgcacagggaggaggaggaacgtcccctctgatataccacatgnnagnanaccacctcttcccagaccanatctcggt

SEQ ID NO: 2961 - DNA, 401 bp, Homo sapiens
cctgaaagctgagggcataactgaccattttttggaaaccctctcctccctcctccacaccttgagtgatgaccacaccaatcactgtattttatagctttttttttcatgtaggtttttagttaaaacatctcctgcctaaaatgcattgaatattttaagataacagatatactggctggaggtttgtttaacactatctatatttaagcttatacaaaatgggcaaaatatagaatatttgtgattggaagcagtcacctggggtttctgggggtggacagttcctcgccacccagcagcaccctgggactgcggcctttcccagctttatggaagcagaatggtggaacttgtgccggaggtacactgctgaaggtgcgtggcggtggaccagccag

SEQ ID NO: 2962 - DNA, 207 bp, Homo sapiens
ccttgtcctacggccagaagccctacaagaagatgaaagggccggaggtcatggccttcatcgagcagggcaagcggatggagtgcccaccagagtgtccacccgaactgtgcgcactcatgagtgactgctggatctacaagtgggaggatcgccccgacttcctgaccgtggagcagcgcatgcgagcctgttactacagcctgg

SEQ ID NO: 2963 - DNA, 375 bp, Homo sapiens
  unsure (165): n=A,T,C or G
  unsure (242): n=A,T,C or G
  unsure (287): n=A,T,C or G
ctgagagactctaaatccagtgacaagtctgtctgcctattcaccgactttgattctcaaacaaatgtgtcacaaagtaaggattctgatgtgtatatcacagacaaaactgtgctagacatgagggtctatggacttcaagagcaacagtgctgtggcctggancaacaaatctgactttgcatgtgcaaacgccttcaacaacagcattattccagaagacaccttcttccccagcccanaaagttcctgtgatgtcaagctggtcgagaaaagctttgaaacanatacgaacctaaactttcaaaacctgtcagtgattgggttccgaatcctcctcctgaaagtggccgggtttaatctgctcatgacgct

SEQ ID NO: 2964 - DNA, 424 bp, Homo sapiens
  unsure (257): n=A,T,C or G
aaatcaatagcaaaacaggattaagataaatgtgggcataattaggtgtattgacatgcctttgatgtatcaaactgagggggaacccactaaatccagtcaagcagtttcataagatcttcacaaaatgcctctacttacggaatcatgttgattttagtcctgctgatgtgtgtaccgttagcactttggtttatcaatatttgactggctcaaatgatggatagaagggtggcctggttataggcagtaggcanaaggaggcagagggttacagtaatgtaagatcaagaccggaaaatgatagctatagaattacaagcccggtaccaccaggtaccacatcacataagaaaaaaggttctaatgttttcttaacttaacagcaaaccagtccagctacgggggcccagccagccagcag

SEQ ID NO: 2965 - DNA, 318 bp, Homo sapiens
  unsure (8): n=A,T,C or G
ctcattantcctgatggttctcgtaaaaaccccgctagaaactgcagagacctgaaattctgccatcctgaactcaagagtggagaatactgggttgaccctaaccaaggatgcaaattggatgctatcaaggtattctgtaatatggaaactggggaaacatgcataagtgccaatcctttgaatgttccacggaaacactggtggacagattctagtgctgagaagaaacacgtttggtttggagagtccatggatggtggttttcagtttagctacggcaatcctgaacttcctgaagatgtccttgatgtgcag

SEQ ID NO: 2966 - DNA, 459 bp, Homo sapiens
ctgtttcccaagcgcacagggaagccattgaaaagcatgcccgcttccggcagatgtgcaacagtttcttcgtagacctggtgtccaccatttgcttcaaggacaacgctccgcctgagaaggaagtgattgagagcctgctctctctcctcttcgtccaaaaggggcgcttaagagatgctgcccagagacactgtgaacacacaaaatctctctctccattcaatgatgttgtggataagactcctgtcatccgctcagtgatactgaaactgcttttgaagtacagctttcatgatgtaaaagattatattcaggaatatttgaccctgttaaaaaagaaagcattcataactgaagataaaactgaactgtacatgctcttcatcaactgcctggaggtaagtgaactctctcttccctgaatttcttttggaaactatctgaaccacatggttt

SEQ ID NO: 2967 - DNA, 286 bp, Homo sapiens
gtgtacatggacatcaagattgggaacaagccggctggccgcatccagatgctcctgcgttctgatgtcgtgcccatgacagcagagaatttccgctgcctgtgcactcatgaaaagggctttggctttaagggaagcagcttccaccgcatcatcccccagttcatgtgccagggcggtgatttcacaaaccacaatggcactgggggcaagtccatctatgggaagaagttcgatgatgaaaactttatcctcaagcatacgggaccaggtctactatccatgg

SEQ ID NO: 2968 - DNA, 237 bp, Homo sapiens
aaatacagaaagcacaagaataaaccaatggtaacatgtagaatctagatcgtcggggcaatttagaaggtagactttcaaaaagtctgaggcacaattacaagtgagtaaaagttcttgtgcaacctacataaacgcagcaaagaaacttaagacataaaaacatgggaaagctcactgtaaaaatattatcaaaatatttctacataagatattttgctttcatttttagatcag

SEQ ID NO: 2969 - DNA, 135 bp, Homo sapiens
  unsure (9): n=A,T,C or G
ggtccaagncgtagtggggtctgatatcaccagcataaccgagcggtataggatatattctgttaaagatggaaaaaatggaaaatctctgccatttatgttgtgtgacactatggggctatatggggcagaagg

SEQ ID NO: 2970 - DNA, 371 bp, Homo sapiens
ctgcattgtgaggggcttgctcctgcccttaggtataagcaggttcatcactccaatttgtgagtttggctactacccattcatgctcaagtgcagtagtagatgattttacaaaatatgctgtgatgcactggaaaccaaagaccaattcaggtctcaaatcgtattatctagcaacaaaacatttacagttgtgcaagaacaaggattccattttcataaccaaataacaaaataaaacattttatgtgtaagataacttacatctttggactgctggaaaatactttttaattatgaacatgttaaaaataaaaaacagcagaagccctgatattacctctttttcctcatttcttatactacctttt

SEQ ID NO: 2971 - DNA, 210 bp, Homo sapiens
ctgcctgactatggggctaaaggggtaagacccagacagacaaaaacttgctctctgccaacccgtcacccaccgctgcccagggcagcctggctgcttaggctcaaattccagctccacctgggtgggtgactttaaggggagttgcttagtgattctgcctctgtgagcctccatttcctcatgtgtaaaagctggtcacgcatgttc

SEQ ID NO: 2972 - DNA, 359 bp, Homo sapiens
aaaagcagagagcatgtgtaggttccctgtggtgggaggaaataaggtgccatcaaggaactaaagggcctggagtgtaggggaggataagatgaacagaagccagattgtgcagtatcttacaagctgtgtttaagtctttggactttggttcttagagtaatggaaaactcattggagggttttaagcaagagggtttgtgattaaatttgtgttttgaaaagatatttctagctatattgtaaacatgttcacagcagggggtaggatggaagcggggaatcagtgggaacagttaggatgcttttgcatttgtccagttgagagatgatagtggcttggcctaggatgatggtgg

SEQ ID NO: 2973 - DNA, 322 bp, Homo sapiens
aaaaagaaaaatgcaaatatagagcaaatccctaaacttgaaccatttcctagtgccttgctagacaaacataaaggggcagggttgtggggaggggaacgtttttggtggtgtgtgcagttcctactggatgagtgtgtgtttcttaatgtctcatttcaagcaggagatgttgggtctggagcaagatctgagactgagatgtcccccaagggtgacaggtcagatttatttcagtcagtgcaagtcacactccaaactaaaggctgggcagtgcgtttagtctgtggcctagaagacctcatcagcccccgagaggagg

SEQ ID NO: 2974 - DNA, 259 bp, Homo sapiens
ctgtacaaacagcgagcttcctgccttgtccaaagacgacaagatgatattaaagatgaatcttcggagttttcaagccattcaagtcagtccatcttgaagacaaagctctgatggcaccaaatcttgactcctttggacgcgatcgggcactgtatcaggagcatgcaaaacgtcgcattgcagagcgggaggccaggaggactcgtcgtagacaagccagagaacaaaccggtaagatgacagatcaccttgaagg

SEQ ID NO: 2975 - DNA, 344 bp, Homo sapiens
aaagacccaagcagtcattttgagttatatctataaaaattataaaaggatttttgaaagtataaacaaattgtcagtgaaataaatgagattttggaataaagtgagaataggagaagggatatgttgtgagcatataccttcacagttcttaatacctgttttgtaatcatgatattcagtcaaggcattatggtttttaatcttgaaacttagagaaccctttgaatatttgcttttactggtgtacagtatgagtggaatataaactgtacacataattatcatgttgatataaatcataatttcaactagatcaagacatgttaaccttttataaattt

SEQ ID NO: 2976 - DNA, 353 bp, Homo sapiens
  unsure (183): n=A,T,C or G
  unsure (244): n=A,T,C or G
  unsure (323): n=A,T,C or G
tctgaattttccctgaggagagtcagttcaaccttattacagcagcttttacaaatctatctctaaagtctccctgccgactcaagtttccactgacttgtccccctgcatgcgatgccatgaccttcacaccaacatccaaccacatgtctctcctttggaatctgtgtgccccaccaccangaacctgttaggcaaaggtggcaccatctccctctgtaaggctgcagcgggtgtctgtcancatctgacaggggccctttgcgtgctgtgtgttgaatgttgcacttgctgaatgcatgcagttcccgtgagcctgtggntgagctgaaactgacagcgctctgcaggcc

SEQ ID NO: 2977 - DNA, 157 bp, Homo sapiens
tggctgagggactcggaggtccacagcagcttagacctggagtcatctgttttggtcttagttctgacactttaatgggcttgggaccctggagcaaaagttctcctctgtgaggcaaggatttcaggagcgaggatttcaggactgaggcagcctg

SEQ ID NO: 2978 - DNA, 176 bp, Homo sapiens
cccctttctcaggcttactgtcaccagtctgtctgtgttaggggaggggggagtccgctctgtcctgaaggcccagagatggaaggacaagtggtaggccgggtgttcaggctcttccaacgccgactgcttcaactccgagcaggaccaccccaggacaattcaggggaagcttt

SEQ ID NO: 2979 - DNA, 433 bp, Homo sapiens
ccatctctctcaaagcaatgaagaaggaggtgaagattggggcctattacacaagataaacagtgtcagcatgctttaccagagagaacattttcatcaccccactactgaaagccatgtataatccgccaccacctgttttttgggggacctgggacacatgaaacacagagaggaaatttcatgggtactggatgaaataaggaaggaaatgtttttgctcacctgagtcacagggagaatgagaggtttatagagtttaataccatgttttttctggtaaagtgccatctccgaggaagccttgtaatactcaatatggtctcctgctaacttggcctctctgattcgactggaaaacttctggatctctggcaagtgattgtggatcctggctgcctctcgctggcccgtcacgatgagaggaaaaatc

SEQ ID NO: 2980 - DNA, 405 bp, Homo sapiens
gccaggcaccgcaagaccggccagaaggtggctctgaagaaggtgctgatggaaaacgagaaggaggggttccccattacagccttgcgggagatcaagatccttcagcttctaaaacacgagaatgtggtcaacttgattgagatttgtcgaaccaaagcttccccctataaccgctgcaagggtagtatatacctggtgttcgacttctgcgagcatgaccttgctgggctgctgagcaatgttttggtcaagttcacgctgtctgagatcaagagggtgatgcagatgctgcttaacggcctctactacatccacagaaacaagatcctgcatagggacatgaaggctgctaatgtgcttatcactcgtgatggggtcctgaagctggcagactttgggctg

SEQ ID NO: 2981 - DNA, 345 bp, Homo sapiens
  unsure (12): n=A,T,C or G
  unsure (286): n=A,T,C or G
taacaggtcacncagtgggaagcgcatatgctcctactgcaataacattctgggcaaaggagccgccatgatcatcgagtccctgggtctttgttatcatttgcattgttttaagtgtgttgcctgtgagtgtgacctcggaggctcttcctcaggagctgaagtcaggatcagaaaccaccaactgtactgcaacgactgctatctcagattcaaatctggacggccaaccgccatgtgatgtaagcctccatacgaaagcactgttgcagatagaagaagaggnggttgctgctcatgtagatctataaatatgtgttgtatgtcttttttgctttttttttt

SEQ ID NO: 2982 - DNA, 102 bp, Homo sapiens
  unsure (11): n=A,T,C or G
tcctccagcanacccctgcatacataaaggtgcaaaccaacaagatggtgatgctgtcctgcgaggctaaaatctccctcagtaacatgcgcatctactggc

SEQ ID NO: 2983 - DNA, 269 bp, Homo sapiens; identical to SEQ ID NO: 2613

SEQ ID NO: 2984 - DNA, 111 bp, Homo sapiens
  unsure (6): n=A,T,C or G
gtctgncaggtgtaatttttcaagtgtcaaagatcccaagtgatccctgacacccaccccttcctactcttacattcatgcgtctgtaagatagctgcctacaacaggtca

SEQ ID NO: 2985 - DNA, 286 bp, Homo sapiens
ccacgtcgatctgcttcttgcgcatgcggtacacgccctggcgcactgagccaaagttgccgcagccaagttcaatgtcagctatgaggaggttatcgcgcttcaggaagagcttcttgtccttgagctcctctgggtcgctgtaggggctctcatacacgctcgtgtccatgggcatcggccgcggtttgtctggggacgttatgcgtgctggctcaggggtgtatccatctgagttgagggtgtcgattcgtctctgaggctaaaggccacagggtcagcaagg

SEQ ID NO: 2986 - DNA, 269 bp, Homo sapiens
ctccctccttgaaggctaccccttgggaaggctggtgccccatgccccattacaggctcacacccagtctgatcaggctgagttttgtatgtatctatctgttaatgcttgttacttttaactaatcagatctttttacagtatccatttattatgtaatgcttcttagaaaagaatcttatagtacatgttaatatatgcaaccaattaaaatgtataaattagtgtaagaaattcttggattatgtgtttaagtcctgtaatgcagg

SEQ ID NO: 2987 - DNA, 240 bp, Homo sapiens
ctgcaggaacatctaaaatgaaagcaaaacgcactgaagtgagctgaagtgcatatgtcctgcttgaaatgttcacattgtggcatctgaacaggtttcactgtttgtctaacatgtttgtgggaggcatatttgttacaccattcttttccatactgtaactctggattctttccattaaaggttcgggatgagtatcggcaggactacgatgctgggagaggaggctatggaaaactg

SEQ ID NO: 2988 - DNA, 244 bp, Homo sapiens
aaaaaaagaaaagaagaaaacagaagaaaaaataaactgaaatagggctgccaattgctaccaacagagtgggtttggctattacatttatttagctctactgaacaccttacaagggcggagaagccactatgtgttacaggcaattcacagagaagccacttaccagacaagctgtctcagaaaaagaaggcttctttttatgtcattatttcaaacttttccagaactttcaattttattt

SEQ ID NO: 2989 - DNA, 331 bp, Homo sapiens
ccagaatgtatcatttcttgatctgagtctggttacagagatgtattcactttgccaatatcaatgatgttacatactcatgatttgtgtacttttctttatgtatgtgtgagcaaagagttaatagcaggtctgtaccatttttctcccagaactatgcctgcttgggaaattttaggtttgtcttatcccagcacgagtttcttgtaaatgacccaaattaagataaatttggaatattgggtaccagggacagacatccattttgtgcactgtgaaacctacaatctatgggacagtacatggggctgggagacctgggaaccgtagg

SEQ ID NO: 2990 - DNA, 163 bp, Homo sapiens
ctgactgctaagacttcctcatctctgtccacctgcactgctctgctctcaccacctgttcagctctgcaaggccagtttcaatgcctcctgctctgtgataagggtggtttcccttcaatttgtggtggcgatggagacattcttgacacaggttctagagg

SEQ ID NO: 2991 - DNA, 323 bp, Homo sapiens
cctgagctacacacagatgccagggacatgacttctctgagccctggaggacagccccaccttctgccaccagggaattgcgagtgctggacctcctcggctacccaggactggtcctcagtgtccctcacgttcacatgcagaactttctggactccatggggtgaagagcagagtggagaggagggttttagccgagagctctagctggcaggaagcacatctggcggccctgttaaaactggaactctcagcagaaaagttttggtctgtggtcagcctgtgaggcacacacgtgcgtacacatacacacacacatacag

SEQ ID NO: 2992 - DNA, 358 bp, Homo sapiens
ccaagcatcagaactacatggcctaaccaaacaggatggaaatgtgagagggtccctcccttgtggaaggggtggatgatgctttctgcccaccctatttaattaagatggaaaagggggctatagatactggctggcatctgttaattcattcagcattcaaggtaataataaaacctcataaacacaagagctttaatctcaaggcagctctaagaggcagtcagggtacatggagcataagggaagttagtcatctgtagttacataaccaggaggtaccagagtcaggacaaaagcccagatgttcttaaaaacagggctctgtgctcagatgtcttctgcactgtgtaagcag

SEQ ID NO: 2993 - DNA, 126 bp, Homo sapiens
aaaaggaaatacaaagtataggcaaaacctacaagcattttgccttcagaagaaaatgtaatgttctcctgcactagtgatcccacccacgaacacaaatgtggctccatctcccatgaaagcatc

SEQ ID NO: 2994 - DNA, 273 bp, Homo sapiens
aaataacatcacctttccatgtatagtaaactgttcatatttctacaggtactaagagtacactggaattacgtgttacatataaatggagaggtggagggaagggggaaaacttgcactaagtcgcctaagagataaactgataatgttagtaagacagctttgtattaaaaactttttatactacaagttactgcagaatcatctactgtaagttttatctccccaccagaaaactgaaatgttgatttacaatattaatgtaaaatattt

SEQ ID NO: 2995 - DNA, 218 bp, Homo sapiens
aaacacccagtactgaaacaatatccaaagacagtattgcaatgaactccttttgctgtatcatgtgcaaatgctacttagatgaggttccctctctttagctaaaaatcacaaaacattaaacaatggaaaaagccctcccctcagttcttgctaattgaggtgtccgtgatttacaaaaaaagagttccttaaacactgcaggattcttatttttt

SEQ ID NO: 2996 - DNA, 339 bp, Homo sapiens
ccaatgtgcatttttgcacatgctggaaccttccatgggggtctggactattggctggagccaggacatgagtcaggggcaccatggacctcacgtgccagggagacttgaatgtggctgtcactcttccggacgccaagggctgcaggaggctgcttttggcactacccaccccgtgtgacagaataggagccagcgactcaggactgctcacgggtcaggagggcaacgcctgaagtcagacctccctataggtcaacagggacaacctggggatctctggagcagggccctcctctctcaggcttggcccactcccccagacacctggacacgtgg

SEQ ID NO: 2997 - DNA, 110 bp, Homo sapiens
  unsure (24): n=A,T,C or G
ccctcaccaacccagagaacctgntttactttgcccagggacttcctccccatgtgaacatggggaacttcgggccctgcctggagtccttgaccgctctctgtgggccc

SEQ ID NO: 2998 - DNA, 167 bp, Homo sapiens
ctgattgactgtgcccagtacttcctggacaagatcgacgtgatcaagcaggctgactatgtgccgagcgatcaggacctgcttcgctgccgtgtcctgacttctggaatctttgagaccaagttccaggtggacaaagtcaacttccacatgtttgacgtgggtgg

SEQ ID NO: 2999 - DNA, 174 bp, Homo sapiens
  unsure (6): n=A,T,C or G
cctttncttgagctgcacgtgaacctgtgtgggcaggcagcgtttgcaggcgtgtttacgggcaggcagcgtttgcaggcgtgtttaccggcaggcagcgtttgcaggcgtgtttacatgcaggcgtagcaccatgtgagaccactggtccagggtttcagaggtcctgctcag

SEQ ID NO: 3000 - DNA, 395 bp, Homo sapiens
cctgctaaacagaagggtaaatgttttgcccttctggctttaagcagtcataggaatgtgacagacattcctcttagggagcgcctcctcctagggtttcctcatctgtctcacactgagtggatgtaatgctattttaatcctgctgtggcccccaatactagtacttgtccataccttcttgcatttttagcgtctgctctgtggggttgttaggccctggcactcccaggaactagtgctaaagctgcatctctctctcccctctagggatcgataaagtttcactgcagaaagtctccactgcggtatgctgacatctgccctgaaccttcaccctacagcattacaggctttaatcagattctgctggaaagacacaggctgatccacgt

SEQ ID NO: 3001 - DNA, 356 bp, Homo sapiens
aaacaagccatctcacaatggaagcctgtgtgtcttgaaattgctgtggttattattcactctgccctttgaagaactgcagaaattcatagggcaatgttaagtgtttgtgtctccaaaaaagatgttggagtcgttaccctcagaacctcaggtaatcatgttagttaatccattaggttagttcctaattgactatgactgtgtccttagaaaaatgggaaatttggtcacagaggcagatgtacagagggaagacgatgtgaagacacaggaagaacatcttcaagccaaggaacacacggggctaccagaagccgagatagaagcatggaacatatgttctagtaagaagt

SEQ ID NO: 3002 - DNA, 135 bp, Homo sapiens
ctggggagggcggcggacctagtgaagtcacagagagagagacaccagtagagtggactggggccacgggacatttatttgtagccatcaagtgcctgcccacctgggggagggttgagactggcccgcaggtgg

SEQ ID NO: 3003 - DNA, 264 bp, Homo sapiens
  unsure (152): n=A,T,C or G
  unsure (179): n=A,T,C or G
  unsure (181): n=A,T,C or G
  unsure (236): n=A,T,C or G
  unsure (237): n=A,T,C or G
  unsure (257): n=A,T,C or G
ctgagttcccttcccgaaggtcagctcggggctcccgacgatcatgcagaagtagatgccactgtcttccggcttcacgcttgtgagattgagaatgaactggcttgcatcccgaaacacagctatcttctcctgttccacctcttcaccgnggataggtcccttttgcggaatcccananggccaggaactcgtggtgactgtcactgctcggtgcctggcgctgtctcagccanntagatgctcatgttactganggagatt

SEQ ID NO: 3004 - DNA, 170 bp, Homo sapiens
aaaacctgttgactaaacagtaattaatttatatttgtgaaaaatgtcactgtcctagtgatttctgatgtaaataatgttgtttatatagtatgtattaaattttcctacattgtaaaactgctgtacttttgattcttgtatattaaaaagtgttactgagcattttt

SEQ ID NO: 3005 - DNA, 411 bp, Homo sapiens
  unsure (19): n=A,T,C or G
  unsure (23): n=A,T,C or G
  unsure (24): n=A,T,C or G
  unsure (27): n=A,T,C or G
  unsure (35): n=A,T,C or G
  unsure (36): n=A,T,C or G
  unsure (42): n=A,T,C or G
  unsure (61): n=A,T,C or G
  unsure (70): n=A,T,C or G
  unsure (74): n=A,T,C or G
  unsure (75): n=A,T,C or G
  unsure (77): n=A,T,C or G
  unsure (78): n=A,T,C or G
  unsure (84): n=A,T,C or G
  unsure (89): n=A,T,C or G
  unsure (91): n=A,T,C or G
  unsure (105): n=A,T,C or G
  unsure (107): n=A,T,C or G
  unsure (115): n=A,T,C or G
  unsure (122): n=A,T,C or G
  unsure (134): n=A,T,C or G
  unsure (145): n=A,T,C or G
  unsure (158): n=A,T,C or G
  unsure (162): n=A,T,C or G
  unsure (202): n=A,T,C or G
  unsure (207): n=A,T,C or G
  unsure (218): n=A,T,C or G
  unsure (224): n=A,T,C or G
  unsure (247): n=A,T,C or G
  unsure (257): n=A,T,C or G
  unsure (272): n=A,T,C or G
  unsure (308): n=A,T,C or G
  unsure (325): n=A,T,C or G
  unsure (329): n=A,T,C or G
  unsure (393): n=A,T,C or G
  unsure (408): n=A,T,C or G
  unsure (409): n=A,T,C or G
ccaattatttccaatcttnattnnatncttaaaanntaaccntggtaaagtgttaagctgnaatcatccnctgnnannattctnctatnanaagcccttcttgancngatatgangagaaanaggataacatanataaggtatanttagagaagctgntgcntgagaaatcatgtctccatctccattttgctctgcgctanctgangatcgtttctnacaganatgtatttaggcagtgtgtgtancgcagtgctntgccaaaagtactancgtgaaggtagacaaaccttgtaaatgcacttccanccaattgtggctcaagngtangtggtgaccccaaggctggtgccaatgagactggggtttgggaataagttggtgcatcatcccncctgctgcccctacnngg

SEQ ID NO: 3006 - DNA, 138 bp, Homo sapiens; identical to SEQ ID NO: 2945

SEQ ID NO: 3007 - DNA, 130 bp, Homo sapiens
  unsure (4): n=A,T,C or G
  unsure (74): n=A,T,C or G
  unsure (95): n=A,T,C or G
  unsure (124): n=A,T,C or G
ccanctcactagatgaggaaagaggaaggcattttctgcattcttgcctagttttccttataagcaccactaanttaatagctctgtctttttgntcgtttgcactatgtaatgctattaatanttttta

SEQ ID NO: 3008 - DNA, 243 bp, Homo sapiens
ctgccgcgcatgcctaaggagtatatcgcccgcctcgtctttgacccgaagcacaagactctggccttgatcaaggatgggcgggtcatcggtggcatctgcttccgcatgtttcccacccagggcttcacggagattgtcttctgtgctgtcacctcgaatgagcaggtcaagggttatgggacccacctgatgaaccacctgaaggagtatcacatcaagcacaacattctctacttcctc

SEQ ID NO: 3009 - DNA, 150 bp, Homo sapiens
  unsure (13): n=A,T,C or G
  unsure (15): n=A,T,C or G
  unsure (64): n=A,T,C or G
  unsure (95): n=A,T,C or G
  unsure (101): n=A,T,C or G
  unsure (115): n=A,T,C or G
  unsure (121): n=A,T,C or G
  unsure (131): n=A,T,C or G
  unsure (133): n=A,T,C or G
  unsure (137): n=A,T,C or G
  unsure (139): n=A,T,C or G
  unsure (145): n=A,T,C or G
  unsure (146): n=A,T,C or G
ctgaccagaagtngnttgttatatggatgggaaccctaacttagggcttgggcaggggaaaganaaagaagatgagagattatacttcatgagtnttagcnatatgggagcaggntttcanttgaattctnangggngnctctgnntgtc

SEQ ID NO: 3010 - DNA, 136 bp, Homo sapiens
  unsure (120): n=A,T,C or G
ccacctgcgggccagtctcaaccctcccccaggtgggcaggcacttgatggctacaaataaatgtcccgtggccccagtccactctactggtgtctctctctctgtgacttcactaggtncgccggcctccccaga

SEQ ID NO: 3011 - DNA, 130 bp, Homo sapiens
  unsure (14): n=A,T,C or G
gtgtggacagtggnggccgcgctgtgcctgctcgtgttgcctacatgtccctggctgttgaggcgctgcttcagcctgcacccctcccttgtctcatagatgctccttttgaccttttcaaataaaatat

SEQ ID NO: 3012 - DNA, 109 bp, Homo sapiens
  unsure (71): n=A,T,C or G
  unsure (79): n=A,T,C or G
  unsure (80): n=A,T,C or G
  unsure (99): n=A,T,C or G
tatctgtaaaatagccaggaatttcctgtttgtgatctattatgcctttttacaaaaaaaaatggctgcanattatccnntaatattaaaggaactttnctttcttgaa

SEQ ID NO: 3013 - DNA, 196 bp, Homo sapiens
  unsure (119): n=A,T,C or G
  unsure (136): n=A,T,C or G
  unsure (160): n=A,T,C or G
  unsure (166): n=A,T,C or G
  unsure (173): n=A,T,C or G
actcctggcctcaagtgatctgcctgcctcagcctctcaaagtgttgagattacaggcgtgagccaccgctccctgcccaacacatataccatctgaaaatgttagaattctgagttgngattttattgacttgtngcttgctttttcttaggctttgtnacttgnaatatgntaaactgtactatcctaataaac

SEQ ID NO: 3014 - DNA, 127 bp, Homo sapiens
taaatatatttctctcagcttcttcccttatattttttattttttcatcatattttaattttagtaatttaatttctttctccttttcttcctctgatttatgcttatcctcttctactagggttaa

SEQ ID NO: 3015 - DNA, 88 bp, Homo sapiens
  unsure (76): n=A,T,C or G
  unsure (85): n=A,T,C or G
aaattgtaatcagagtcaaatacagtattgaatggaatgtactgccttctcctcctaaatcaataaacatctttcntggaaaaanaaa

SEQ ID NO: 3016 - DNA, 442 bp, Homo sapiens
ccatgtagcaggtggtcagtatgcgtccacagaggtctcggggatcctggggggtgtagctgatctggttcacgatggtgcggacatcagccagcacttcctcatttccactcctcacggcctcgcagacctggcagcacatggagtagatgaggcaggcggtggctgcgctgtccaccccgccactcaagggcagcaaaaaccctgcctgttgacttcgtcttaaaaaatcccagagccagcaggcaggtccaaggcttatctcctcctcagggctgtggtatttccactcgatgggctcagagatgggtgccagcaagtcctcgtggcacgagagggcaaagtccaccttcactctggggtaggggctcgccctgctggcttgaatctacgaggcagaggttgtgctgagctgggattgcgccattgtactccagcctat

SEQ ID NO: 3017 - DNA, 442 bp, Homo sapiens
  unsure (1): n=A,T,C or G
ncgaggtctgcatacaaaaggaaatggcaacaattgaactggtagcccaggacaaccatgagcgggccaggcgcctgatgaaggagctcaaccagatgcagtatgagtacacggagctcaagaaacagatggcaaaccaaaaagatttggagagaagacaaatggaaatcagtgatgcaatgaggacacttaaatctgaggtgaaggatgaaatcagaaccagcttgaagaatcttaatcagtttcttccagaactaccagcagatctagaagctattttggaaagaaacgaaaacctagaaggagaattggaaagcttgaaagagaaccttccatttaccatgaatgagggaccttttgaagaaaaactgaacttttcccaagttcacataatggatgaacactggcgtggagaagcactccgggagaaactgcgtcaccc

SEQ ID NO: 3018 - DNA, 337 bp, Homo sapiens
ctggctgatgtctgcttggacactccactctgtaatgggcacaccacagggatggatgtcctctgggcagggacccccatggtgactatgccaggagagactcttgcttctcgagttgcagcatcccagctcacttgcttaggttgtcttgagcttattgctaaaaacagacaagaatatgaagacatagctgtgaagctgggaactgatctagaatacctgaagaaagttcgtggcaaagtctggaagcaaagaatatctagccctctgttcaacaccaaacaatacacaatggaactagggcggctctatctacagatgtgggagcattatgcag

SEQ ID NO: 3019 - DNA, 216 bp, Homo sapiens
ccaggctcaggccctggggtgaaaggagacaggtgctgccaagaccatacatcagtcatctggcagcagctcgagaagcatgtcctccacgccgtcaatcttgatgtggtgcactaagcgccagaaactggagtctgaggatcggtatcgtccatcagggtagagctgccacatgataggcagcaggcttgggcctatctgggtgggggtcatagg

SEQ ID NO: 3020 - DNA, 294 bp, Homo sapiens
caagcagaccagcaattgcgtcctggagatctgtgctgagcagcgaaacctgagcgagcaggtagactcagccctctctgtttcactctcccctctgccagcgctcagtgccttcccctctatctaactttgtttccctctcagatgccaagctcagtaactctttctctgaagtagggctagggcctttctgtacttgagtttatggcagaattcttttcttagtgtagtcccttcagtctttcctcccttaggactggatagaagtgtctaaaaatactcttatttgaacag

SEQ ID NO: 3021 - DNA, 431 bp, Homo sapiens
ccttttgttttctaagcttactatcttgtgtttgtttatttgcttttaatgaagtattttgtgtagaaggttaaattaggatgcaaaacagatctgccattcctttttcccttatatcttccttttggtcttcatggacgagatgaatgaggattctgctgccctgagggagttcattggaaacctgcgttctcctacctctcccaaccctccattagctcaattttgagataatggaaaattgactggaaattcaaaactcaaactactatctttagatataaacactagtaattaaaatgtgccttttgaagatgttttctaagagaaaggaaatacgttgcagtgatgtgggtactgctttcataaaacagttttttcagtattttgagaattgccatattaatttttataatggaaaacttaataaa

SEQ ID NO: 3022 - DNA, 410 bp, Homo sapiens
ctggggcttccattcacgactttctggtccctggcaggacagagcgggatgccaccagcttgtccaaagggaagttccaggagctcctggtgggcatcgttgtggagaatgacgctggccgcggcgagatcaacgagttgaagcaggtggaaggggaggcttcgtgcagcagccgcaaaggaaagctgattttcttctatgagtggaacatcaaactgggctggaaaggcatcgttaaagaatctggagtgaagcacaagggattgattgaaatacccaatctttctgaggaaaatgaagtagatgacactgagaatttacaacgggaatgattttaccaacgaaagctatggcaacccaggaattgactgccaaaagaaaactgagtgggaataccctgcaggttcagg

SEQ ID NO: 3023 - DNA, 313 bp, Homo sapiens
ccttgcctgtgaagctcattgggatgaattgcactctaatgaagcaatacattgagtttgtggcagacagacttatgctggaactgggttttagcaaggttttcagagtagagaacccatttgactttatggagaatatttcactggaaggaaagactaacttctttgagaagagagtaggcgagtatcagaggatgggagtgatgtcaagtccaacagagaattcttttaccttggatgctgacttctaaatgaactgaagatgtgcccttacttggctgattttttttttccatctcataagaaaaatcag

SEQ ID NO: 3024 - DNA, 355 bp, Homo sapiens
cctctttcttctgtttgtaaaggttttctaaggcagggcttttcagactttattcagtcaacattaagctcctacactgcctcaaagcagagcgacgatggaaccctttatttcaatggaattgtgcacgtaggccagtgtattgaagaaaaactaagtctggtttatggagagttggcatggggcttagaggttgccgacctggacatccccacttagctggctctaaggcaccctcagaaaaccactgctctaacctgagaatgccatctagtttacaaactcttagaaaactgtgtttaatactcatatcactggcttctagatgtgaagcaaatgctctacaatggttttt

SEQ ID NO: 3025 - DNA, 340 bp, Homo sapiens
  unsure (78): n=A,T,C or G
  unsure (178): n=A,T,C or G
  unsure (185): n=A,T,C or G
  unsure (306): n=A,T,C or G
  unsure (309): n=A,T,C or G
  unsure (340): n=A,T,C or G
ctgattgggggggcccaggagctacatgcctactctgtgcgccgcctctacaatgccctggcagaagacatttcccancaaccactggtgcaggtggcagcctggtgcattggggagtatggggacctcctgctggcagggaactgcgaggagattgagccccttcaggtggacgaanaggaagngctggcattgctggaaaaggtgctgcattcccacatgtccctgccagccactcgaggatatgccctcacagccctcatgaagctcagcactcgcctctgtggggacaacaaccgcatccgncangtggtgtccatctacgggagctgcttggacn

SEQ ID NO: 3026 - DNA, 411 bp, Homo sapiens
  unsure (1): n=A,T,C or G
ncgaggtaaatttgtcttgtgagattttactatatctcagacagcataaatgctgttttagcactggattctttcactgagcacaaagagttgttggggctttagcatctgactgattttgttacggggttgattctgaccataggaagtatgcaatgtgaatcactatttacagagaaacctacaacagatgcttgatgttgtagaaactgggacatatagataccaagcaaaattataagaaacctataaggtgttcaatacgcttgtgtttccaaaattcactgtacatgatcagtttggtgttcttgtaccacagtttttaactgaaggaaccagttgtaacagtctcaattttaactaaaacttgaagaactaaaacaacaatgcaaacctttcagcattgtttgg

SEQ ID NO: 3027 - DNA, 464 bp, Homo sapiens
  unsure (447): n=A,T,C or G
  unsure (464): n=A,T,C or G
ctgccaccaactcaggactcaggggctcaattctcttctttggagcatattctgtagctcttcgaagcctgccaagtgtagcttccaaacttttaagtggtcttcttttggggggctttgttgttcgtacatttactgtgcttaattcaactttcatgcccttaataatgcctaacaagtctttttcgtattttccttttcactgtcttggctctctgaagtctccttggaagtctcctcagttcgaacagactgcttatctttcttgctacagatcacactgttagtgccaaaatatctttggatgttattttttgtccgggccaacagcgctgaactgcggtacctgactgttccgtgccgaacagtgagtagcataatcgcagccgctgatgtctccgggcttccagaggacaaagggtggcgggaaagggggcgaagaggtangaacgtcgagactctan

SEQ ID NO: 3028 - DNA, 143 bp, Homo sapiens
  unsure (27): n=A,T,C or G
  unsure (32): n=A,T,C or G
  unsure (37): n=A,T,C or G
  unsure (72): n=A,T,C or G
  unsure (121): n=A,T,C or G
aggtccaccctgaccatcaacaggggngaagncggcnatgaggccgactattactgtcaagtgtgggatcgnaataatgaccatgtcgtcttcggcggagggaccaaactggccgtcctangtcagcccaaggctgccccctc

SEQ ID NO: 3029 - DNA, 357 bp, Homo sapiens
  unsure (10): n=A,T,C or G
tggaacccangacccatccaacttggctgcttcacattttcatcccctcctgcatcattgctttcattttcatagccacagtgatagccctaagaaaacaactctgtcaaaagctgtattcttcaaaagacacaacaaaaagacctgtcaccacaacaaagagggaagtgaacagtgctgtgaatctgaacctgtggtcttgggagccagggtgacctgatatgacatctaaagaagcttctggactctgaacaagaattcggtggcctgcagagcttgccatttgcacttttcaaatgcctttggatgacccagcactttaatctgaaacctgcaacaagactagccaacacctgg

SEQ ID NO: 3030 - DNA, 402 bp, Homo sapiens
gaagctttctcaggggagtattttctggtcgacttggctaatattatatgtagtctgaatttctctttcagatgcttttaacctcgtaatacaattttattcagactgagagctgtttttctcttcaatgctttcagtgtctgtcttcagaagggacacccaaaagtgtctcatggtgtttctgagtgagttgggctgtcacaatgagaactctttggcactctatcgagacccataatgggaatccagcagtatttttttgtcaccattataaatagaaacttaggctgaaacattgctcccatttccattattgcaaaagtgcaatcctacccaggagtcctgcaggttctcctcctgcagttcagggacgctgctccataatgtgacactggagtgcag

SEQ ID NO: 3031 - DNA, 163 bp, Homo sapiens
  unsure (163): n=A,T,C or G
gcaggtctgacctacctgccaacctctcctctgctggcagattgtatcatccccattactgatatcagggctttcacaacaacactcaaccttctcccctaccataaaatagtcaaataaataaactgcagtcacgttggccggaaaaaaaaaaaaaaaaaan

SEQ ID NO: 3032 - DNA, 285 bp, Homo sapiens
ctggatgatggtcttcagcctctttctgtcccttctgtccctcacagcactagtatttcatgttgcacacccactcagctccgtgaacttgtgagaacacagccgattcacctgagcaggacctctgaaaccctggaccagtggtctcacatggtgctacgcctgcatgtaaacacgcctgcaaacgctgcctgccggtaaacacgcctgcaaacgctgcctgcccgtaaacacgcctgcaaacgctgcctgcccacacaggttcacgtgcagctcaaggaaagg

SEQ ID NO: 3033 - DNA, 160 bp, Homo sapiens
  unsure (12): n=A,T,C or G
  unsure (40): n=A,T,C or G
  unsure (66): n=A,T,C or G
  unsure (73): n=A,T,C or G
  unsure (88): n=A,T,C or G
  unsure (111): n=A,T,C or G
gtagcaccatgngagaccactggaccatggtttcagaggncctgctcaggtgaatcggatgtgttntcacaanttcactgagctgagngggtgtgcaacatgaaatactantgctgtgagggacagaagggacagaaagaggctgaagaccatcatccag

SEQ ID NO: 3034 - DNA, 278 bp, Homo sapiens
caccaccacgtcgatgcggtccactgagaaggggttgaactgcttgtccggccggcgcatgaactcatgcttgaggaggtagccgctctgcccgttgaactcaaatactgccatgttctgctgcatgggcaagtccatcgtctggaagttgagggcaaccatctggcatccagcattccagaacatctggggcatgtagttggaggagtccatgcgggttcccttggggtaaatgcggctcatctggcgcttgttgtagtccacaaactgcaccgagg

SEQ ID NO: 3035 - DNA, 120 bp, Homo sapiens
  unsure (29): n=A,T,C or G
  unsure (53): n=A,T,C or G
  unsure (107): n=A,T,C or G
gataatgtaaatacttcttaaatgtctgnaactcttcaaaagtgatgcttcangataaatgagctgctaagcattttaagaatttaccgtaactctaatatctgganggaaggggatgga

SEQ ID NO: 3036 - DNA, 397 bp, Homo sapiens
  unsure (393): n=A,T,C or G
gaggtaaatgcgcatgtaatttatttatgataatgtaaatacttcttaaatgtctgtaactcttcaaaagtgatgcttcaggataaatgagctgctaagcattttaagaatttacgtaactctaatatactggagggaagggatggatctgaaaggctaccatcagtaagaggaataaaacttgctctgtgtcctccagaagtctggacagtgatcagcaggtaatagacacagaggaactgatttcaacttttgaaaaagagttttccactaattaacactgtcccacggcggaataggttccctgaagatgttgagtgctgaaagtgatcaagcaggaggctagagggcttcttgcctgggagcaggggagggttgggggagaaggacaanagga

SEQ ID NO: 3037 - DNA, 263 bp, Homo sapiens
  unsure (232): n=A,T,C or G
aagtgctcggtttacaggtgtgagccactgtgcccggccattatgtgttttaagaaagggttgtgatctgttacaggctggtgggcttaaactggatggccggcagctcaaggttgacttggcggtgacccgtgatgaggctgcaaagcttcagacgacgaaggtgaagaagccgactggcacccggaatctctatctggcccgagaaggcttgattcgtgctgggacgaangctgcagagggtgtgagtgctgctgatatgg

SEQ ID NO: 3038 - DNA, 394 bp, Homo sapiens
  unsure (325): n=A,T,C or G
gatagggactttgccaagtccaattatcttctaggattgaaaggtgcattttccccataaaaaaggcgaggaaaacccatggctgctttgtgtcacctcagtgacttacagtcccccttggcatttagttggtactagagccagtcatccttaacaaatcttttcacattttatttctttcacatgtagtcatcttcaaaaaggaaagatttggaattttagaaaaggggcaactcttctttttagcattctcatcagaaagtcacaaaaatcgatggaatcatttccactgggaagattgaccttttgtatttatttgtggggnaaattaataagcattccagatgcttgcagcttcctgcatccaggagatgctgtgttccccgtgatgcag

SEQ ID NO: 3039 - DNA, 240 bp, Homo sapiens; identical to SEQ ID NO: 326

SEQ ID NO: 3040 - DNA, 213 bp, Homo sapiens
  unsure (10): n=A,T,C or G
  unsure (35): n=A,T,C or G
  unsure (67): n=A,T,C or G
  unsure (87): n=A,T,C or G
  unsure (92): n=A,T,C or G
  unsure (103): n=A,T,C or G
  unsure (159): n=A,T,C or G
  unsure (209): n=A,T,C or G
cactctgttnccgccctcctctgaggagcttcaanccaacaaggccacactggtgtgtctcataagngacttctacccgggagccgngacantggcctggaangcagatagcacccccgtcaaggcgggagtggagaccaccacaccctccaaacaaancaacaacaagtacgcggccagcggctatctgagcctgacgcctgagcagnggaa

SEQ ID NO: 3041 - DNA, 343 bp, Homo sapiens
cctcaggttaggaaggaggggcacaggttcttgttggcatgagtgtcaactcagtgcaaaggactgtcctaatctggaaacctgaaagctgtcatctcacagatgtagggaagagaacttctacatgactctgactccagtgtccaccatgaccaagttttatgtaccttgttacattttgagctttgagcataagtcctagtgcgttgtgtatcatcagtcaacttccaatccttgttagagctgaggccagtccaatatgaattccctgaaccaccatttggcaacagtgaatttaagaagtagtaagagtgtgattgtggataaatttcactgaatgtgg

SEQ ID NO: 3042 - DNA, 275 bp, Homo sapiens
cctgatgcccgaatttcagtttggcacttacagcgaatctgagaggaaaaccgaggagtacgatactcaggccatgaagtacttgtcatacctgctgtaccctctctgtgtcgggggtgctgtctattcactcctgaatatcaaatataagagctggtactcctggttaatcaacagcttcgtcaacggggtctatgcctttggtttcctcttcatgctgccccagctctttgtgaactacaagttgaagtcagtggcacatctgccctggaagg

SEQ ID NO: 3043 - DNA, 223 bp, Homo sapiens
ctgctgccacagccagtattgccggggctccaacccagtacccacctggccgtgggggtcctcccccacctatgggccgaggagcaccccctccaggcatgatgggcccacctcccggtatgagacctcctatgggtcccccaatggggatcccccctggaagagggactccaatgggcatgccccctccgggaatgcggcctcctccccctgggatgcgagg

SEQ ID NO: 3044 - DNA, 359 bp, Homo sapiens
ctgcgagtgggtgagttctgtcacaaccgtggcatcaagctggtggtggcagacacgcggggcctgtttgggcagctcttctgtgactttggagaggaaatgatcctcacagattccaatggggagcagccactcagtgctatggtttctatggttaccaaggacaaccccggtgtggttacctgcctggatgaggcccgacacgggtttgagagcggggactttgtctccttttcagaagtacagggcatggttgaactcaacggaaatcagcccatggagatcaaagtcctgggtccttatacctttagcatctgtgacacctccaacttctccgactacatccgtggaggcatcgt

SEQ ID NO: 3045 - DNA, 400 bp, Homo sapiens
aaatatgctgcatagactactggaccatattttgtagccattaaattttcaaaagactgggcccactgtaatacttcctccaaagtaaggtttgaagggggcctcttagattcatctctgcacatcttacaaatccaacaattccgcctgctcatttttctctaaaatgagaagagaaaaggcagcgttagaatatcatcaagcttcaaataaacaatgatcatttttttctcatgttggtggtataatatgtggaaacattccattgacaaatatatcctgtcgagcagtccaccatgctaaatttgatctcctctttgttatgatccgtttgaaatcaggttctgaaattttgtgagacacccagcattttatttttcccagagtaaaagaattttac

SEQ ID NO: 3046 - DNA, 299 bp, Homo sapiens
ccactcggatcagctcctcgctcacctgaagccaagagaagaaggagagaagcaccaagaatcagctaacctcagaaaggtctgttttggagacacaggaggtactatttccagcagtcagaggaagtgcacagcaccaatgcgaggaagaaaaacaatcccacttgcgcccaccagctaagggaccagggtctatgaagccccacagtggctccgacccaccatcatggcctgctggaccagggtgttgctgtgctcacacatgttcttcagaatcttgttggctgcattgtgccggg

SEQ ID NO: 3047 - DNA, 129 bp, Homo sapiens
  unsure (16): n=A,T,C or G
  unsure (64): n=A,T,C or G
  unsure (72): n=A,T,C or G
  unsure (88): n=A,T,C or G
atctctggaagcttancaatcttattgcacactgttcgctggaagctttttgaagagcacattntcctcagngagctcatgagggttncatttttattcttccttccaacgtggtgctatctctgaaac

SEQ ID NO: 3048 - DNA, 410 bp, Homo sapiens
ccataggaaaaggatacagagtagagtttcatgaacctgaaacttggtggaaatttgatcctgaagaattagaaaagaggaataaacatggtgtgtctcgaaagaagattgctcagatgttggatcgttatgaatatcaaatgtccatttctattgtaatgaattcagtggaaccatcacacaaaagcacacaaagacctcctcctccacaggggagacagaggtggggaggctctcttggctcacataatcgtgtctgtgtcacaaataatcattaaattagctattttcagctaacacatttgttgttgcacttgaaaaagagttagtgagcctgtcttggagtttaagtagtttcaaataaaaaaaggctacagtgcctcacaaaggatgttcccagcaagttgttt

SEQ ID NO: 3049 - DNA, 464 bp, Homo sapiens
ccttgtggcccgatcacctcccaacaccttcacattggcaacacctggactagggtcttagtagtcccacccctggggtcgtcaaagaacagatcagaaattcctggggtgtaggggcaggatccttacatcccctgtactgtaacatatgcatgcaccccccagtcgcatccaagtcccacagatacaagggcttgctgaggtccgagggtctggatggtgagtccagggagcatgagaaattcatccaggccacacaggctcaggcacctatactcctgcccaccccctgcaggatggatattaccatttgaaatactttggcgcttgcagtgagatcttgcttaaaagaagaaacccaccaaattctagaatcgcagaggtgggggcacctatgtgacaaatgagggaacagaggcacagagattggcagggacatgctcaaagacatggagagcctgggc

SEQ ID NO: 3050 - DNA, 264 bp, Homo sapiens
  unsure (15): n=A,T,C or G
ccaccctaagcccgncagtggagctccttttccagattcagagctggtatcggagcggggagacctgggatagcaagttcagcaccatcgcctccagctacgaagagtgccgggctgagagcgtgggtctctacctctgtctccacccgcaagtgctggagatctttggctttgagggggctgatgcggaggacgtgatctacgtgaactggctcaacatggttcgggccgggctgctcgctctggagttctacacacctgagg

SEQ ID NO: 3051 - DNA, 128 bp, Homo sapiens
  unsure (10): n=A,T,C or G
  unsure (51): n=A,T,C or G
  unsure (53): n=A,T,C or G
  unsure (75): n=A,T,C or G
  unsure (80): n=A,T,C or G
  unsure (126): n=A,T,C or G
cttccactgntcaggcgtcaggctcagatagctgctggccgcgtacttgtngntgctttgcttggagggtgtggnggtcnccactcccgccttgacggggctgctatctgccttccaggccactgnca

SEQ ID NO: 3052 - DNA, 329 bp, Homo sapiens
cctgaggctggctcatcggaggcgtgagtgttcggccctgccatgcctcacatccccaggatgccgcggtgggaactgggctgtggctttcctgccctggcactgcttgtttgctgggatttcaggaggaaaacccccaagctccgaaagaaaggtatttcttttttattttgtggttcacttcttccactagaagactcgtttcccagagcctctaccctctcctgtcaggggtggggagcgcttctggaactgataccctgggaaggaggtatcagtgctgagcgggcaggcacagtgtgtatgggggtggggagctctccctgagg

SEQ ID NO: 3053 - DNA, 373 bp, Homo sapiens; identical to SEQ ID NO: 6

SEQ ID NO: 3054 - DNA, 466 bp, Homo sapiens
  unsure (357): n=A,T,C or G
  unsure (425): n=A,T,C or G
ccatgagtgacaggtggcctcttggtgggagaggtggggcagggggaaggcagctcccactagaccagggcagtatttaggggaaggaggcagattggagcagttggctgccaacacctggcctcactcagggagaggggccttgggcctggaagatatctgggtgaggtacccacaccatctgctgcaacctctgtgtatccattatgggctcacgccattcacaggcatgaattgagcacctagtatgtgggaaaacaggggaaacagagatggcacagacatggtctccatccttcgggggctccagtctagttgggggagatcagagaagttccatttgccactctaggccangctaggtaagcggcagagccatgaagcattgtgggagcttggaggagggagtgagcccttgcagtcanggagaaggagtcatcctggggagacttccagaaagtagccc

SEQ ID NO: 3055 - DNA, 114 bp, Homo sapiens
aaattcctgtaataaaagggaaattgagggcagagcaatcaggctggagttgcaaggacccaggggatcacctaatgccagaagccagccatccaaaactctgtttgtcaaagg

SEQ ID NO: 3056 - DNA, 373 bp, Homo sapiens; identical to SEQ ID NO: 6

SEQ ID NO: 3057 - DNA, 359 bp, Homo sapiens
aaacctaaattttttaattaaatgcctgttcaacaaagctaattggaacaaacacatttatgtaaatttacattctagaataccagggtaaacaaggagacgttattcaaagatgaatgagaaagttctattctttttcatcatttgtgtgatcaggttgcaaaggacatgctctttcctcgatgaaactgatgtcgaattagtggcagaggtggaagaaccaagcacctttctgggggctcgagcagccaccacttttctgtaagtgcctggaacactgtctgctttagtccgcaccatgttcaaacaagaagagaggagaggagagaacgaactgacttcccagccgagggtgtttc

SEQ ID NO: 3058 - DNA, 345 bp, Homo sapiens
aaaccctgcgtggcaatccctgacgcaccgccgtgatgcccagggaagacagggcgacctggaagtccaactacttccttaagatcatccaactattggatgattatccgaaatgtttcattgtgggagcagacaatgtgggctccaagcagatgcagcagatccgcatgtcccttcgcgggaaggctgtggtgctgatgggcaagaacaccatgatgcgcaaggccatccgagggcacctggaaaacaacccagctctggagaaactgctgcctcatatccgggggaatgtgggctttgtgttcaccaaggaggacctcactgagatcagggacatgttgctgg

SEQ ID NO: 3059 - DNA, 340 bp, Homo sapiens
  unsure (209): n=A,T,C or G
  unsure (320): n=A,T,C or G
  unsure (332): n=A,T,C or G
ctgtgagactagggctgtgctttgcaacccccatagcacccggcatatattgctctgcattcagtgtatatttgagagctctgttcttttggaaacactaacccatgtattttgaattttataccatttgtagatgtactagcagcaatatgtcctgtcttatggattacaaccatgcctagaagttaaaaaaaaaaatcactgtaggngtataaagtttacctcaaatataaccaaataattgagcaactggtaataactgctgtgctctgaatgtttgtgttcccccaaattcatgtcaacatcctattccacaaggngatggtatcaanaggtgagg

SEQ ID NO: 3060 - DNA, 325 bp, Homo sapiens
ctgagagtagacacttgtggtatgtggagtacagataagccaggggcaggccacggcacgctccatgaaagctaggagggagtgaaatatcagtgatcatcgcaaggaaggaggcagacaagagtaaggcacacctgactcttaggactagcagtcagaaccaggaggaaaggttttattgctatgcgggtaggtaagaacagattttacttacatccatatagttacttaaagtccagttttctgttaaacatttttcttaatatattgagccaaaactagtccagttaagctgaacttggtttttctggagatgaattgtttt

SEQ ID NO: 3061 - DNA, 419 bp, Homo sapiens
ccaggccgcaccccttgctgtctcagcagatgggatataggaagctcctgggcttagctgtgggaagccaagtaccctcaccggcatgggacatgaggggcagctagacttcacccccttcccgcagacctgcctccagagcaaggagaattctgccttaatctgttgggctccagtctccgggttgaattccagtgtatcccactgggagtgaatggatcatgaggtgggatggccccatctggatgttctgcagatccccacatgggaggagattcccaagtagaggcagccagaattctgactccctggcagcagcagggctttcaggcaccagtgtctgtgttgttagaactcagaggaagaggcaggggcagcagccgacagggggcagcatgacccaagcaaggggcctgagg

SEQ ID NO: 3062 - DNA, 246 bp, Homo sapiens
ccactgcaacagtgagtcaaactctcctcgcatgaccacaaagtatagggacaggtgtgaccccctccctgacccatccccattcaggtatgctctagcacagagccggtagccacagcggctggtgtagaaggactggctgaagatggacactgtgtgcccatccaccgcctctctcttcttcatcttgtaatctgtcaccttccaaatgagccttccattatagcaagtaccctccagcagttt

SEQ ID NO: 3063 - DNA, 220 bp, Homo sapiens
  unsure (202): n=A,T,C or G
aaagaccaatttgttctacctagcattttaactagtttttctgccggctatgttgaatgcacaaattctgtcacgcatgttcattcattgctacataatttggttcttctggaatatttttatgtagctcttggagtacagctatgaaaattaacaactgttaaaggaaataccttttttttttgtaattttttccttgaanaaccaaagtattttttca

SEQ ID NO: 3064 - DNA, 467 bp, Homo sapiens
  unsure (365): n=A,T,C or G
  unsure (400): n=A,T,C or G
ctgtagcttctgtgggacttccactgctcgggcgtcaggctcaggtagctgctggccgcgtacttgttgttgctctgtttggagggtttggtggtctccactcccgccttgacggggctgccatctgccttccaggccactgtcacagctcccgggtagaagtcactgatcagacacactagtgtggccttgttggcttggagctcctcagaggagggcgggaacagagtgacagtggggttggccttgggctgacctaggacggtgaccttggtcccagttccgaagacataattgttgctgcctgcatatgagctgcagtaataatcagcctcatcctcagcctggagcccagagacggtcanggaggcccgtgttgccagacttggagccagagaancgatcagggacccctgagggccgcttactgacctcataaatcatgagtttgggggctttgcctgggt

SEQ ID NO: 3065 - DNA, 441 bp, Homo sapiens
cctcagcatcgcctggacctgttcttgcttggggcatcccgtcggtcaccaaccatgacagcgaggcgggcctggcctgtgctccaccggagggggcttcttgcacagatgacctgctcatttcagcccctccagaatcttctggcaggcgcagagcaacaggacgtccattttacagacgaggaaaccgagacacagggaaggttgccatctgcaacccagcccggtttttatcttgtttttctgtgttttaactttttatttagacttacagtttgaaacagtgctagaatcggaagcatgtaaagaaacctgtggaccttttatgcagatacacttaagtttttaacccatgtgccttatcactggggacctcttgcactctctctcatgatttttttcccgaactagatgaggatattgacaaagattcttgcttgg

SEQ ID NO: 3066 - DNA, 349 bp, Homo sapiens
aaagaactaatttgtaaattatgacacaaaattttattaacaaggaaatatccattaattgactactacagtaaaaactttataatgcttgtatcatgaagaaagaccttccttttccttatatattaattgaactacataggcttgctgtacattttgttattcatgttataagaattctagattccattgcttttgaaatatgtttctttttaggaactaaaagtcaacttatagtttgatttctgttttatttgtactgtgtttctgattttgtgggtttctaaataaaaagatcaaacccaccactttcaatatactgttttctatttaaacttttgagttgtag

SEQ ID NO: 3067 - DNA, 119 bp, Homo sapiens
  unsure (50): n=A,T,C or G
  unsure (53): n=A,T,C or G
  unsure (54): n=A,T,C or G
  unsure (61): n=A,T,C or G
  unsure (90): n=A,T,C or G
  unsure (92): n=A,T,C or G
cttccactgctcaggcgtcaggctcagatagctgctggccgcgtacttgntgnngctttgnttggagggtgtggtggtctccactcccgncntgacggggctgctatctgccttccatg

SEQ ID NO: 3068 - DNA, 413 bp, Homo sapiens
aaaatgaatttgaaattcagtatctattcaccatgacctaagagtatacagaggaaacagttagaaatggccagttgagggtagggtgtttaattgagaagtcagcacacactggcagctcttaaaccaaatattggctcgtttaacttgaaactgtaagtattttgaaattctttgtaacatataatatgctgtaatttcaacccttatttcccctgttgttagacatagggactttagactaaacatactttttgccttcatcacagttccaagttcttcgatttgatttgtctaatggaacaaattgatgttaccttgaagtggtatgaggacctgataccttcagcctactttccccactcccaaacaatgatacatcttctccaagcattggatgtggacctgcccgg

SEQ ID NO: 3069 - DNA, 151 bp, Homo sapiens
  unsure (25): n=A,T,C or G
  unsure (29): n=A,T,C or G
  unsure (30): n=A,T,C or G
  unsure (75): n=A,T,C or G
  unsure (119): n=A,T,C or G
cgaggtccaccctgaccatcagggngggnngaagccggcgatgaggccgactattactgtcaagtgtgggatcgnaataatgaccatgtcgtcttcggcggagggaccaaactggccgncctaggtcagcccaaggctgccccctcgggca

SEQ ID NO: 3070 - DNA, 320 bp, Homo sapiens
aaaatgacatctaacataaccagcaaataccagtaatggtggtgatatatacattatcctttatgttgtaaataaattgtattcaaattaaatgcaattttctcatgatcaaaacattctgctttcgatcatgttttgccagaggaaaaggtgagcgcgcttagtgtattgccaggtacttagaaagtgctcaagatctctggcgtcctcaacagtcttggtaaccatcttggattatctttattaatggttttacaactcccctgactgacaaaccttcacttctttctttcttttcttttctctttcttttttttttt

SEQ ID NO: 3071 - DNA, 181 bp, Homo sapiens
aaacatttgtcttattttatacctgtactttgagtaaggttttaagttgaaatgtcattatttccttatctgaaggattaaaggaaacagggacccagtggcttggtggtttgggaagaacacttggtgatggcggctcactaaatttggcaccagcatagttctgattagcttgagattt

SEQ ID NO: 3072 - DNA, 454 bp, Homo sapiens
aaaaggcccacttgccgtaacctcttttggtctattttgcttcccattcagcccaaagtttatatgataaaggtgtttacttttacttcccagtctccaagtgctaacacataaacacatacatgtctgactgttgcagaactgttcgagctcctaattcagtgttaccttgttttagtcgcagcaaccctctcccctaccccttgcccgcccacgtttttctcactcttccgggttgtgcaataactctcccagccagtggtcctttccacagcctttctgtcccttaaaacacctgcaactgggggagaaatgggacccatgggagggggagtcgtcatcccttacacaagaaatagccactttccttttgttgtcattcttgtgatcctgggtgggtttctgtggcactcttttagaacatgtagcatcatcttagaggtctatttttact

SEQ ID NO: 3073 - DNA, 321 bp, Homo sapiens
aaaggaggttatgggctgagagtagattgctgaaagtcatgatttaggaagtgtaaggttactggtaatgacacaccgcaagtgcagctaagggagttgacagttgggatgagtgaaagaaaagattattagtatgaggatttcaaggaatcgagaaagtagggctttggatgagttgtttttgtagaagtcaccaatgatgacaatggatgctgatagagaaaaagatggtgaacccgggaggcggaggttgcaatgagctgagatcgtgccactgcactccaacctgggcgacagagtgagactcagtctcaaaaaaaa

SEQ ID NO: 3074 - DNA, 310 bp, Homo sapiens
aaaaggaagagaaaagcaatcatcactattttggttttgttttgttttaggagtaactgactactgaacagtactgcatgtttctgaggttcctctgttattcctgtagttcactacctctgcatcctccccaggacaagaaattcattttccttattgtactgtgttatgccaagaatattactattgtttggtgaatataaaataatcattatagcaacaatttttttggcgtcctaaataaggctgatccatggcaacggtactatgcaaagaaaagaataaagtcaaaacacttgtaaaacctttt

SEQ ID NO: 3075 - DNA, 451 bp, Homo sapiens
ctgcaacagcagagcaaggccagcaagatcctcattgtagactgggacgtgcaccatggcaacggcacccagcaaaccttctaccaagaccccagtgtgctctacatctccctgcatcgccatgacgacggcaacttcttcccggggagtggggctgtggatgaggtaggggctggcagcggtgagggcttcaatgtcaatgtggcctgggctggaggtctggacccccccatgggggatcctgagtacctggctgctttcaggatagtcgtgatgcccatcgcccgagagttctctccagacctagtcctggtgtctgctggatttgatgctgctgagggtcacccggccccactgggtggctaccatgtttctgccaaatgttttggatacatgacgcacaactgatgaacctggcaggaggcgcagtggtgctggccttggagggtgg

SEQ ID NO: 3076 - DNA, 270 bp, Homo sapiens
ccttcagaagttaaacgtgatcacttgtgctgggacagccaatagaggagtctgagatgatcatttccaaggagttcttcacagaggaggtagctttggagctgggctttgaggttgggcagtatttgaaacagtagagacggagcaaagaacccctcctggtggggtcagtcattcgctttcttttcctcctcaggaccagggctctttgaagatgaagaatgcccacaagggaacacaggcagaagatcagataagccaaagtcacag

SEQ ID NO: 3077 - DNA, 472 bp, Homo sapiens
aaaaaaggtgacttggattaaagtatgcaaactcaaggagtagtacgagcccacttgagtcaagttagcttagttgctaaagagcttgataccaaaattacttttgtttacttgatgaatgggatagttgttgcacagggccactgatctagattactgtcttatttgtcaagtacttatagttgtagaagtagcagtgtgaaaattatcggaatggagaaggggcaatgataaaacaatttattttcaggtaccagcaacttcaaggtttctgccagcccactgttgtatacacttattgagaaaacaatgcaaaatgtgaagcatccggttactggacaatttctatatcaggacagcaactgggccagcaaagttgagaaactcactttagacaatgctgctttccctttccttgcatattctggaatcccagcagtttctttctgtttttgcgaggtaagtctgttca

SEQ ID NO: 3078 - DNA, 269 bp, Homo sapiens
ccttgcctcagatccaaggtcactcggaagaggccatgtctaccctcaatgacactcatggaggaaatgctgagagaagcattcagatgcatgacacaaggtaagactgccaaaaatcttgttcttgctctcctcattttgttatttgttttatttttaggagttttgagagcaaaatgacaacacccagaaattcagtaaatgggactttcccggcagagccaatgaaaggccctattgctatgcaatctggtccaaaaccactcttc

SEQ ID NO: 3079 - DNA, 142 bp, Homo sapiens
  unsure (115): n=A,T,C or G
  unsure (134): n=A,T,C or G
  unsure (135): n=A,T,C or G
agcagcgctggtggtgcctcagccatggcctggaccgttctcctcctcggcctcctctctcactgcacagactctgtgacctcctatgtgttgactcagacaccctcagtgtcantggccccaggaaagacggnnaagatta

SEQ ID NO: 3080 - DNA, 341 bp, Homo sapiens
aaaacagatttcatctagagcttcatttccctgttgagctttcttaaagagttctcttaggactgactgtcggaactggacaggtaaactcaaggttaagttgtcttcaatgaaaatctgtattacctcctgatagttgccagatctcaaacaaatatggacttgactatatggagtcaactgttgagatgtactatcagaagaaggtacaagaacatcacatgcttgacaatagccagctaaccgcttctcatctatggtacaatgaagagataatgaacctatctctgcaattagttctttggttctaaaaaatttttccctggcattttcatagacag

SEQ ID NO: 3081 - DNA, 468 bp, Homo sapiens
ctgcactgggagagctgagagcctccatgacagaccccagccagcgtgatgttatatcggcacaggtggcagtgatttctgaaagactgagggctgtcctgggccacaatgaggatgacagcagcgttgagatatcaaagattcagctcagcatcaacacgccgagactggagccacgggaacacatggctgtggacctcctgctgacgtctttctgtcagaacctgatggctgcctccagtgtcgctcccccggagaggagcatgcggcgatgctgagtttcatcaaataggacgcagcagaagttgggaagcactgcagaagatgggttgtcttccagaaagaccactgttttggggaacagcttggctctttcttcggccgctggtggttggattagctgttggagggatgtgcaggactgaatggctagtactgatggtttcacggctgtctctgcaggcaggg

SEQ ID NO: 3082 - DNA, 173 bp, Homo sapiens
aaaaaaataaaaacaacagagtgggcttctttcctgccgttgcttttgccatttgtagcattacaggtaatcagtcagaattcagatcacttaactacataggtgagagtgagagtgggttaagttatgagtcctctgtttttgctattctctctggcctgtggttctgctgg

SEQ ID NO: 3083 - DNA, 373 bp, Homo sapiens; identical to SEQ ID NO: 142

SEQ ID NO: 3084 - DNA, 424 bp, Homo sapiens
cctcctccctcacacacacgtcgccctgtcagaaggccaggcacactactgcagccaggatgctgggatagcaaggggataggtgctccaaccttcaccttccagaaaggcagggtgatctgaagtgacgtgtagctgagagctggatggggagaatttcactttcccagttgatccagaaaggaaagaaaccccagagcatcctctcggaagaacttaaactggctttgggctccagtgcgagcgagtgacttgtggaaaggggcaccatgatgagaggccggggccggtgggtgttgctgtcctgggtgaacatctcgtcatctgtctgttctttctccccggcatcatatcccttatagtctgtgctccaggtaaacagtgtctctgccagccacagcttggcaagcccggctatgtctgg

SEQ ID NO: 3085 - DNA, 308 bp, Homo sapiens
ccaccggaagcctgggaccacaaaggctactgctgaatagaagtaaacagttcatccatgatctcacttaaccaccccaataaatctgattctttattttctcttcctgtcctgcacatatgcataagtacttttacaagttgtcccagtgttttgttagaataatgtagttaggtgagtgtaaataaatttatataaagtgagaattagagtttagctataattgtgtattctctcttaacacaacagaattctgctgtctagatcaggaatttctatctgttatatcgaccagaatgttgtgattt

SEQ ID NO: 3086 - DNA, 470 bp, Homo sapiens
aaaacagcaaatagcagatttacgggaagatttgaaaagaaaggaaaccaaatggtcaagtacacacagccgtctcagaagccagatacaaatgttagtcagagagaacacagacctccgggaagaaataaaagtgatggaaagattccgactggatgcctggaagagagcagaagccatagagagcagcctcgaggtggagaagaaggacaagcttgcgaacacatctgttcgatttcaaaacagtcagatttcttcaggaacccaggtagaaaaatacaagaaaaattatcttccaatgcaaggcaatccacctcgaagatccaagtctgcacctcctcgtgatttaggcaatttggataagggacaagctgcctctcccagggagccacttgaaccactgaacttcccagatcctgaatataaagaggaggaggaagaccaagtacatacaggggagaaatcagtct

SEQ ID NO: 3087 - DNA, 465 bp, Homo sapiens
ccttgcctcagatccaaggtcactcggaagaggccatgcctaccctcaatgacactcatggaggaaatgctgagagaagcattcagatgcatgacacaaggtaagactgccaaaaatcttgttcttgctctcctcattttgttatttgttttatttttaggagttttgagagcaaaatgacaacacccagaaattcagtaaatgggactttcccggcagagccaatgaaaggccctattgctatgcaatctggtccaaaaccactcttcaggaggatgtcttcactggtgggccccacgcaaagcttcttcatgagggaatctaagactttgggggctgtccagattatgaatgggctcttccacattgccctggggggtcttctgatgatcccagcagggatctatgcacccatctgtgtgactgtgtggtaccctctctggggaggcattatgtatattattt

SEQ ID NO: 3088 - DNA, 190 bp, Homo sapiens
aagatgtcgaagcgaggacgtggtgggtcctctggtgcgaaattccggatttccttgggtcttccggtaggagctgtaatcaattgtgctgacaacacaggagccaaaaacctgtatatcatctccgtgaaggggatcaagggacggctgaacagacttcccgctgctggtgtgggtgacatggtgatgg

SEQ ID NO: 3089 - DNA, 166 bp, Homo sapiens
gaggtaaaaacaaaaatatttatttggaaaatattagtagcatgataactcaacctcaccagatattaacagttcatcaggtcaggcaatagaacaagtccacatgagcttcttaaaaagaaatggatgactacttcaatagctgactccatcttccattttatta

SEQ ID NO: 3090 - DNA, 193 bp, Homo sapiens
  unsure (1): n=A,T,C or G
  unsure (163): n=A,T,C or G
ncgaggtctgattgaaggagaaaatatggtccttatttgctcagtagcccagggttcagggactgtcacattctcctggcacaaagaaggaagagtaagaagcctgggtagaaagacccagcgttccctgttggcagagctgcatgttctcaccgtgaagganaagtgatgcaggggagatactactgtgcag

SEQ ID NO: 3091 - DNA, 145 bp, Homo sapiens
  unsure (28): n=A,T,C or G
tcgaggtcctcaggcacttggcctttgntttcacaccaacttgatgggttctactataagatgctaaaaaggtgggttgtgtgtggttcagattggttgatttgtaaccctagttgtgcataagaattgcccagatatttttttt

SEQ ID NO: 3092 - DNA, 89 bp, Homo sapiens
tcgaggtaaagaaaacaaaattggagttgaagaataagtaggtttccaattggctattgccgttttctttgaaaaaataaacatttttt

SEQ ID NO: 3093 - DNA, 164 bp, Homo sapiens
  unsure (28): n=A,T,C or G
tcgaggtaaaaatactgaatattatagnttacctcttctcttcttttaagagcctacgcaacttttctgcacttgtttctattttctttgttttctgcttttcttccttttcagcttgtttttctcttaattccaaagatttcttttagaacccagatatcgaa

SEQ ID NO: 3094 - DNA, 283 bp, Homo sapiens
  unsure (265): n=A,T,C or G
  unsure (283): n=A,T,C or G
aaaagaggacactgaattagagtgactgttgggccagggtgggaggatgggtggtcaggtaagacagactctagggagaggaaatcctgtgggcctttctgtcccacccctgtcagcactgtgctactgatgatacatcaccctggggaattcaaccctgcagatgtcaactgaaggccacaaaaatgagctccatctacaagtgattacctagttgtgagctgttggcatgtggttagaagccatcagaggtgcaagggcttanaaaagaccctggacctcn

SEQ ID NO: 3095 - DNA, 304 bp, Homo sapiens
  unsure (38): n=A,T,C or G
  unsure (135): n=A,T,C or G
  unsure (158): n=A,T,C or G
  unsure (176): n=A,T,C or G
  unsure (232): n=A,T,C or G
cactaaacctcaagaagtcagataggtattatcatggnccaactccaatccagtcactacagtatgcaacaagtcaggacattattaattcttttcaaagtattagacaagaaatggaagcttatacacccaagntaactcaggttctctcaagtagngctgccagtagtaccatnacagcactgtcacctggaggggcacttatgcagggaggaacacagcaagccataanccagatggtgccaaatgatattcaatctgaattgaaacacttatatgtagctgttggagaacttctaccaca

SEQ ID NO: 3096 - DNA, 137 bp, Homo sapiens
  unsure (1): n=A,T,C or G
ncgaggtaaaagtcgacctgttttgcagaaagtctgctgtttttgtactaaaggctttggaatttggcatttagctaggaatgcacattctttcacctcattcatactttaagaaccacagaagtgactctgcttgg

SEQ ID NO: 3097 - DNA, 182 bp, Homo sapiens
ttggctcgcttaaatgggacccttcgggaagacgataacaggatcttaagaccctggcagagctcagagacccgcagcattaccaacaccacagtgtgtaccaagtgtggaggggctggaaaacaccaagtcatacattttacattgtagaagcagtagcagcagtactatactcagtattt

SEQ ID NO: 3098 - DNA, 125 bp, Homo sapiens
  unsure (2): n=A,T,C or G
  unsure (118): n=A,T,C or G
gnaaaccagtagcccctctggaccccccagtgaatgctgagatggagctgacagcaccgtccctcatccagcccctgggaatggttcccctgatccccagccccttgtcatcagcagngcccctg

SEQ ID NO: 3099 - DNA, 215 bp, Homo sapiens
  unsure (1): n=A,T,C or G
  unsure (2): n=A,T,C or G
nngcaggtccttgcgggaagacctcatgggacgcaaggactccctgggcagagggtgggcccctggtcctggaggcacagaatcctcgacccacacgactatgtgacctctttataactggggaagacttcgatgatgatgtgtgatctgggactggcagggtattaatcgagatacacttgttaggagggacagggttcccctaaggcactttt

SEQ ID NO: 3100 - DNA, 380 bp, Homo sapiens
  unsure (1): n=A,T,C or G
ncgaggtccaccctgaccatcaacagggtcgaagccggcgatgaggccgactattactgtcaagtgtgggatcgtaataatgaccatgtcgtcttcggcggagggaccaaactggccgtcctaggtcagcccaaggctgccccctcggtcactctgttcccgccctcctctgaggagcttcaagccaacaaggccacactggtgtgtctcataagtgacttctacccgggagccgtgacagtggcctggaaggcagatagcagccccgtcaaggcgggagtggagaccaccacaccctccaaacaaagcaacaacaagtacgcggccagcagctatctgagcctgacgcctgagcagtggaagtcccacagaagctacag

SEQ ID NO: 3101 - DNA, 146 bp, Homo sapiens
  unsure (20): n=A,T,C or G
ccatgggaagcccgagaatnggttcctatagacccggttcctgatgaattcccaggccaaaagaaccaccctgacaaattttgggttctgaaagtcttattattggacagtattgcatagctagagaaggaaaaggatttactcat

SEQ ID NO: 3102 - DNA, 268 bp, Homo sapiens
  unsure (164): n=A,T,C or G
  unsure (231): n=A,T,C or G
cattttccccttggtcacacatctgtaacaaagccctaaagtcaaaaccagtgacccgagacccacgtgcccaagactcccggggtctgaacctaaactttgtacacgttactaacataccagttcgcttacctaaaagggctaggtcatatcttaccacgtanacaaacatttcctctagaaaaaaggacagcagggatcctcttggcttccttcagccagtggctttangacatgcaagtccctgtagtaagggaagtctatgacc

SEQ ID NO: 3103 - DNA, 10 bp, Homo sapiens
tcaaaaataa

SEQ ID NO: 3104 - DNA, 159 bp, Homo sapiens
gaggtaaagctcaaacttacagagtctgttgtaaggttaatacatagaatgctagctttttagtcacctgagaatcaggaaattcacatgaacataattccctatactgacaaagaactatagctacctatgggcttgtcaagttcctacgcttcattc

SEQ ID NO: 3105 - DNA, 156 bp, Homo sapiens
  unsure (1): n=A,T,C or G
  unsure (31): n=A,T,C or G
nttcgaggtccaccctgaccatcaacagggncgaagccggcgatgaggccgactattactgtcaagtgtgggatcgtaataatgaccatgtcgtcttcggcggagggaccaaattggccgtcctaggtcagcccaaggctgccccctcggtcactc

SEQ ID NO: 3106 - DNA, 238 bp, Homo sapiens
tactctcagcatgagaaatacaagtattatgagaaagagggcttattctgagcagaatttccatctctgctgctctcccatctgccggccgttggattgggaatctatactggaacacacctgacaacctccaccagcactttttgatgaagaattggaattcactctattcacatagtagaattatatcagagattgcaagatagctaactgaagagctactatgattcttgggtgg

SEQ ID NO: 3107 - DNA, 168 bp, Homo sapiens
catgttataagaattctagattccattgcttttgaaatatgtttctttttaggaactaaaagtcaacttatagtttgatttctgttttatttgtactgtgtttctgattttgtgggtttctaaataaaaagatcaaacccaccactttcaatatactgttttctattt

SEQ ID NO: 3108 - DNA, 122 bp, Homo sapiens
gtatcacatgagctgctgagctgaaatcacagtggtttatttggtgtcttgcaggacccagcctttatatgttaatgtttttccctcattggtatgggatacctacaggatgaagtgcagac

SEQ ID NO: 3109 - DNA, 196 bp, Homo sapiens
  unsure (85): n=A,T,C or G
  unsure (188): n=A,T,C or G
agatggtcctcctctgtgcccatgacccctcagcagccaaggctggccctgccagataaatgtgtgtgcccatgatcacacccangggcacaggccacatacgtttccctgaaaccttgggctccagcctccatcccgtccatgtgggagggaacttgggtcccagcagtgtgtctttcagcaccaantcatgttt

SEQ ID NO: 3110 - DNA, 380 bp, Homo sapiens
acctaaatagcttggcgtaatcatggtcatagctgtttcctgtgtgaaattgttatccgctcacaattccacacaacatacgagccggaagcataaagtgtaaagcctggggtgcctaatgagtgagctaactcacattaattgcgttgcgctcactgcccgctttccagtcgggaaacctgtcgtgccagctgcattaatgaatcggccaacgcgcggggagaggcggtttgcgtattgggcgctcttccgcttcctcgctcactgactcgctgcgctcggtcgttcggctgcggcgagcggtatcagctcactcaaaggcgggaatacggttatccacagaatcaggggataacgcaggaaagaacatgtgagcaaaa

SEQ ID NO: 3111 - DNA, 295 bp, Homo sapiens
tcctccatcctgtggaacgtgggaaaactatcttgagtgttggcgtgttctaagtatgacataatagtttaatgtatgataaatcatgggtgtttagacgaaagatttacacatataaattggaggctttagcggtcttagtgtaactaacttttcggtccccttaacccttgatgcctgttctatgggtctctagagcggaaggagcattatactccggaaacatttgctggaaggggttatgagaaattcctctctgtatgctaactccgtaatacaagcgtttgtgtatttt

SEQ ID NO: 3112 - DNA, 287 bp, Homo sapiens
  unsure (1): n=A,T,C or G
naggtgatttgcccgccttggcctcccaaagtgctgggattacaggcgtgagccaccgtgcccagcctaacagttgctttcttttcagatccggagacatacccttcagccttgctgccatgtgaaatttgttgtctaccagaccccagagctcccagttcttggtgtgcagcaagggcagaagtgggtgactcaccttctggcacaaacatgttggcgatcaccatgagcccggccaggatgaggaaggaggccaccgtggcacggcggcccacgtaaatcatggt

SEQ ID NO: 3113 - DNA, 508 bp, Homo sapiens
  unsure (1): n=A,T,C or G
ncgaggtgttgttgcctgggctggacgtggttttgtctgctgcgcccgctcttcgcgctctcgtttcattttctgcagcgcgccagcaggatggcccacaagcagatctactactcggacaagtacttcgacgaacactacgagtaccggcatgttatgttacccagagaactttccaaacaagtacctaaaactcatctgatgtctgaagaggagtggaggagacttggtgtccaacagagtctaggctgggttcattacatgattcatgagccagaaccacatattcttctctttagacgacctcttccaaaagatcaacaaaaatgaagtttatctggggatcgtcaaatctttttcaaatttaatgtatatgtgtatataaggtagtattcagtgaatacttgagaaatgtcaaatctttcatccatacctgtgcatgagctgtattcttcacagcaacagagctcagttaaatgcaactgcaagtaggttactgtaagatgtt

SEQ ID NO: 3114 - DNA, 166 bp, Homo sapiens
ttcgaggtccatgggatggctcttctgaccattgggggccaggccaggccaggccaggcttagggcagcaaggaccaggccaaaggggcagggcctcctttggaggggttgaggggtacatcctcggctggtgtttgcatccaggggtccagcaggatctcttcca

SEQ ID NO: 3115 - DNA, 350 bp, Homo sapiens
  unsure (3): n=A,T,C or G
tcnagggggatggaggactagtgatcggctggctgcttccagtcgattagagaggtgaaaaagctgaacgtgtgccagtaatcttcaaaaggcagaacatatcacctctgccccgtaaactgttctctccgaggggaaaaaatggaagttatcctcacagttcactgccgtggtatttcttctgtcccatgctttgcatgactgccatggtacagccttgtttcaaactgttcactgtgatctgtgggtctttgagtttcagtgagtttgctgaaatgtcgaagaagtagttccaaacttcaatgttcaatgaaatttttgttcaagtttgaaatggagagagcagcttt

SEQ ID NO: 3116 - DNA, 344 bp, Homo sapiens
  unsure (1): n=A,T,C or G
ncgaggtctgaacgtctgtgggtgagccggggtcccctgggagggtcttcttgcactctgactgcagtcggtaggcactggacgtcagtaaacgaagggaagtcctcaccatatcagacttgggttttttggggaataatgctgccatttctgtaacagctaccgtgtatcctctctgagcagggaatataactgtcatgtttattttcttgggctgctcttaagagctcctgtatgtttttggtgatctgttcagtcctcctgatgacatcttcggtgctagggagagtggggcttggggccacatggggttctgctgtgtctggtaccaagccatcccctgg

SEQ ID NO: 3117 - DNA, 365 bp, Homo sapiens
  unsure (1): n=A,T,C or G
ntcgaggtcatgagggtccccgctcagctcctggggctcctgctgctctggctcccaggtgccaaatgtgacatccagatgacccaatctccttccaccctgtctgcatctgtcggagatacagttacaataagttgtcgggcctctcagaatatagatcggtggttggcctggcatcaacagaaaccaggcaaagcccctaatgtcctaatttatgcgacttccagtttagaagaaggggtctcattaagatttactggcagtggatctgggacacaattcaatttaaccatcaccagtctgcagcctgacgattcagcaacttattattgtcaacattattctgcatctcttcgcagttttgg

SEQ ID NO: 3118 - DNA, 350 bp, Homo sapiens
  unsure (1): n=A,T,C or G
  unsure (145): n=A,T,C or G
ngtggaacagacgtcagaaaaacaaaaccttcccaaaatactcctggatttggaagatggaaattgcaaactgcagtgtagcaaaaggaacattcattttaggatctggaaatctgggtgggagtccagactcctctcactagcnggaagactgaaggcaggttaggctaactattctgagaccacaaaatgcaactcagaactggatcgagtgttattacacataggaaaagtgctttataaattgtgaagcagtatatatacaatgttaggaagcagcatcataaagaccttgataaatcaatgagaaaaaaatacaaaaatgcacaaaggatgggaataggtaattc

SEQ ID NO: 3119 - DNA, 3 bp, Homo sapiens
  unsure (3): n=A,T,C or G
ccn

SEQ ID NO: 3120 - DNA, 348 bp, Homo sapiens
  unsure (22): n=A,T,C or G
ctgagacaaaagtaggcccaantccttccacagggacggaatgatgctgccagttcactgtcagcatgggtgggaagagattactgacaaaacagaccaaagtgttgggcttgccaaactccaggggcttcagcgtgaacacttcagcgataggaaaccctctggacaccgggattctcccatcaagttttggccctatttgctggatcatccactcgcagaactctttgtcaaataaaatggcaggagcatctccctgttcctgagcccagtcagcaaattcgggcaggcgaggcacccgagtgttctgggaaaagtcgaagaagaaaagctggtcctcgtcgtagg

SEQ ID NO: 3121 - DNA, 372 bp, Homo sapiens
  unsure (1): n=A,T,C or G
ngcaggtggagggcacagagagggctctgggtctaggctgcagctctgtggcctgtgctgggtcatgaggacatggggacacagagggacgggtgagactgggtgaggtgccagaatccaaccctcccaggacagtcaccagaaaggagacagtctcttagggcagagatgtgtctgtccctggagccccgtcacctctggggcccagtgtctctctgttcacggatcggcctcctgccttcctcaaagggcatgttagactcaggaaatgaccagaggggagtgaatgaggggtgcagagaactccatggctaccaggtgaagtttggggtcatcacaggctgctggggtgggcctgggggctgctgagtc

SEQ ID NO: 3122 - DNA, 115 bp, Homo sapiens
gcatcgacaaaagaaccattgaaaaatttgagaaggaggcctatgacccccacccagataggcccaagcctgctgcctatcatgtggcagctctacccttgatggacgatcccga

SEQ ID NO: 3123 - DNA, 77 bp, Homo sapiens
ccacggcagtgactgctgattgcctaaccccacatgtgttctcccccttccctgataatcaagcccctgattttcag

SEQ ID NO: 3124 - DNA, 315 bp, Homo sapiens
aaaatcagattttctaaactacaattgttttagaacactgtatgaagaacttatctagtcatagttatttgtagtcaggattttaacagcttgcaacaggtaatgttttgaatataaatatctttccaaagtgttactaatggtaaagagataattttctaggcttctattctgctgcttgaagtcagaactgctgatggagacaaaggcacgaaagtgtacgtattccggattagcaacccaggaacccatcacttctgaagactctaaactgtgctgtcattttgtttttatatgcattaaaatatttgtttt

SEQ ID NO: 3125 - DNA, 159 bp, Homo sapiens
  unsure (87): n=A,T,C or G
  unsure (110): n=A,T,C or G
  unsure (111): n=A,T,C or G
  unsure (132): n=A,T,C or G
tcgaggtccatgagtgacaggtggcctcttggtgggagaggtggggcagggggaaggcagctcccactagaccagggcagtatttangggaaggaggcagattggagcanntggctgccaacacctggcctnactcagggagaggggccttgggcctgc

SEQ ID NO: 3126 - DNA, 382 bp, Homo sapiens
ttcgaggtaaaatcttgagggattgatctcgcctcatgacagcaagttcaatgtttttgccacctgactgaaccacttccaggagtgccttgatcaccagcttaatggtcagatcatctgtttcaatggcttcgtcagtataagttcttctccaggaactcacgcactgacttggcaccccggcctatggcattggccttccaggcatggtatgtgcccgaggggtcagtctgatagagcctaggagtgccatcaaagtcgaaacccacgatgagggcagagatgccaagcggcctgcgcccattgctctgcgtataacgctgcttcagactggcgatgtagcgggtgatgtactccacaggtgaccgggtcctccgcagtc

SEQ ID NO: 3127 - DNA, 310 bp, Homo sapiens
  unsure (2): n=A,T,C or G
gntttaatatggatatactgatgaagacttcaaaattcaccaagaatctttgggatctaatttcttcaaccaatttactttagggtcctttttactgtaggtggtggggatctacctggttctcaatttgacaccctctcaacatgaatgaggttcaaatcacattcattcctaagcgatcactcaagaatggtacagatgtgttggagtatgccaatacctaaggtaaaaaagtagattatctttaactccagacccatgttctcaagataaaagcctttgacattcatgatcctgtcacattttcagg

SEQ ID NO: 3128 - DNA, 381 bp, Homo sapiens
  unsure (194): n=A,T,C or G
  unsure (195): n=A,T,C or G
  unsure (196): n=A,T,C or G
  unsure (238): n=A,T,C or G
  unsure (243): n=A,T,C or G
  unsure (271): n=A,T,C or G
  unsure (273): n=A,T,C or G
  unsure (280): n=A,T,C or G
  unsure (289): n=A,T,C or G
  unsure (292): n=A,T,C or G
  unsure (314): n=A,T,C or G
  unsure (315): n=A,T,C or G
  unsure (327): n=A,T,C or G
  unsure (329): n=A,T,C or G
  unsure (349): n=A,T,C or G
  unsure (360): n=A,T,C or G
  unsure (361): n=A,T,C or G
  unsure (377): n=A,T,C or G
ctggcactttaagaaaacgataatctcgaaaaccacaaaattgccaaattgttccctaaactcctaagcagataaacatgactaatgaatgagtttgttttgtaaagaaaaatcattcaaataaattgaataattcatactgagatgcaaagtttgtcttctttcttcctatctacttggatttataaaggggnnnaccgtaatataggaaaatataccctattttgaatgtggcatntttgnttgaaaagctggcccaattaattaaaantncttgtantggaaagtntcntcccctgagcagtccatatttnnataaatgggaanangacatctatggcgcagcatnttcatagtctnnactgagactaatgtcnacaa

SEQ ID NO: 3129 - DNA, 359 bp, Homo sapiens
  unsure (330): n=A,T,C or G
  unsure (353): n=A,T,C or G
cgtgaataccaagacctgctcaatgttaagatggcccttgacattgagattgccacctacaggaagctgctggaaggcgaggagagcaggatttctctgcctcttccaaacttttcctccctgaacctgagggaaactaatctggattcactccctctggttgatacccactcaaaaaggacacttctgattaagacggttgaaactagagatggacaggttatcaacgaaacttctcagcatcacgatgaccttgaataaaaattgcacacactcagtgcagcaatatattaccagcaagaataaaaaaagaaatccatatcttaaagnaaacagcttttcaagtgcctttntgcagt

SEQ ID NO: 3130 - DNA, 238 bp, Homo sapiens
  unsure (12): n=A,T,C or G
  unsure (14): n=A,T,C or G
  unsure (36): n=A,T,C or G
  unsure (47): n=A,T,C or G
  unsure (119): n=A,T,C or G
  unsure (187): n=A,T,C or G
  unsure (204): n=A,T,C or G
  unsure (212): n=A,T,C or G
  unsure (218): n=A,T,C or G
ttttgtatgtgngnatgtatgtgtaaatagcaatanaagaaagattnaaaagtttgctaagttttttctttttaagccctttaagtaatgatataactagaaactacgtttcatctcanaggaaaaaccacaggtgatatattctcatgcttcagggtaaaaacctctcttaaaaggctatgtttgngaaagccttcctaaaantatgcttntgttgntactatcaatttgatattca

SEQ ID NO: 3131 - DNA, 374 bp, Homo sapiens
  unsure (219): n=A,T,C or G
  unsure (224): n=A,T,C or G
  unsure (323): n=A,T,C or G
  unsure (339): n=A,T,C or G
  unsure (346): n=A,T,C or G
  unsure (362): n=A,T,C or G
  unsure (368): n=A,T,C or G
  unsure (369): n=A,T,C or G
  unsure (371): n=A,T,C or G
ctgtagaaagagcgagagagatggttaaaatgccattaaggaaagctccttgtttagaatctttaagatagagctatatgtaaccatcactattcagccatttttgacctacaaaaatggtcacttcatatggtccaacacatttggtgagaatccttaagaagtggagggcttttcctttgggcaactaatttagaggtgatcccaaacctagaaatntaatnatatatctagattcttctctcacctcttctacttctactctttctactttggaaagattttcaaagcacaacacctgtcacagaacggatgtaagttanttttcatagaaggagnccctctntttcatagaggaattngtgtanntnccc

SEQ ID NO: 3132 - DNA, 335 bp, Homo sapiens
ctgctatctagaagaaaaccaaggtcccttaatatagtctaaatataatgtgtggcttattatagagaaatctttagcaacgtaagtttaaccagtaagtgtcacaactgatcaacagtacttaaaaggaaacaaacaaaaatcacactagccacaaatttccaccatatacacatgaaattaattttaatctgttttgactccttgacactaactgatcattaatgaaatatgatatggaaagatcacagagtagaaaacaagcaaagattagtttatacaacagtgactatatacatcagagggaaaacatgctagctaatgcaacattaagg

SEQ ID NO: 3133 - DNA, 414 bp, Homo sapiens
  unsure (20): n=A,T,C or G
  unsure (164): n=A,T,C or G
  unsure (201): n=A,T,C or G
  unsure (213): n=A,T,C or G
  unsure (264): n=A,T,C or G
  unsure (275): n=A,T,C or G
  unsure (277): n=A,T,C or G
  unsure (278): n=A,T,C or G
  unsure (299): n=A,T,C or G
  unsure (307): n=A,T,C or G
  unsure (319): n=A,T,C or G
  unsure (322): n=A,T,C or G
  unsure (341): n=A,T,C or G
  unsure (348): n=A,T,C or G
  unsure (352): n=A,T,C or G
  unsure (356): n=A,T,C or G
  unsure (375): n=A,T,C or G
  unsure (378): n=A,T,C or G
  unsure (379): n=A,T,C or G
  unsure (395): n=A,T,C or G
  unsure (404): n=A,T,C or G
ctttcccagaattagttgtntagggttggcccaagagatgtaagaaaaatctcgcattgctccctaagcaccctgggccttattaaagagcaacttctatttccagtcgggggagtaacactaaagctacaagaaatatgtaataatgataggtaataatgtgntccaaagctttttcaaactagaataaggaggcaaatngaagaatgaganactgatgtccacagttcattggcagaatctaaccccttctgttatcttttntaatactattngnngcttacatagaagtttcacangaagatanaaatgcttgaanagnctgagagtaaaaaagattntgctgcnaaangctntgatataaactgcctcttncannccacagggatacctgnttaaagaantttcttattt

SEQ ID NO: 3134 - DNA, 181 bp, Homo sapiens
ccaatccgttttttaattcttaaattcttgacattacagaactaaactgaaatttattaacattccactcttacacttcttatcgacaaacagaaataaaattcatgagccaaaaaacccaaaacaaaactaaaaacagggaaaagcttataaaactaaatatggatcccagcattaacag

SEQ ID NO: 3135 - DNA, 341 bp, Homo sapiens
  unsure (202): n=A,T,C or G
  unsure (260): n=A,T,C or G
  unsure (338): n=A,T,C or G
aaaaatccatgttcaacccaaacccactccccaaccctaactataggagatgaccctttaggaagctgaaaaggtttttataaagtcacaaaatgcatctcaatgcaagtttatataatatcaaaattatctcactgattttaatgtgtaagttatataatttatttcacccaccttgtattattctagaaaataagtcagnttttatatttaacaaatatgtgcaaaaatcataaacatagcttatagaaatatcaacngatatctaattacaaagtttcccgatctacttcgcttaaaaggcccaagtccccttttttctttttatttataacctntat

SEQ ID NO: 3136 - DNA, 284 bp, Homo sapiens
  unsure (137): n=A,T,C or G
  unsure (170): n=A,T,C or G
  unsure (246): n=A,T,C or G
  unsure (270): n=A,T,C or G
  unsure (275): n=A,T,C or G
aaaccaatccaatatacagacctttgaaagtaaaagatcaactgcacagatattttttaactaaagaatgtgtcagtaaatctatgtaaatatccaaattgacacaaattttctaaagagttaaaattattaaattncaaattattattttatatacttttgatcaaaanataatatttgcttcaccataagtttgaagatattaagaaaacataatctaaggtttattacaaaaaataatggccnctgatagatatacagagaataatntattnttaaatttt

SEQ ID NO: 3137 - DNA, 268 bp, Homo sapiens
aaatatattccagaagagcgtttataattcatttacaagtgcagtattgcgctagtaaatgttacttgacctcttgtataaataatgccgattaagaattagtcctggaatagttttcgaatttctaactctgtagatctaaaacacaattgtaaatggtataaagatgtaagaatcatattgtgataaagccaatctcaaaaatagagaatccagacccttcccagataatttaagaactgagttttcctcaacttaaacatgatgg

SEQ ID NO: 3138 - DNA, 365 bp, Homo sapiens
  unsure (349): n=A,T,C or G
  unsure (363): n=A,T,C or G
gtcgatttgggaggaaaggtgtggctataaactttgttactgaagaagacaagaggattcttcgtgacattgagactttctacaatactacagtggaggagatgcccatgaatgtggctgaccttatttaattcctgggatgagagttttggatgcagtgctcgctgttgctgaataggcgatcacaacgtgcattgtgcttctttctttgggaatatttgaatcttgtctcaatgctcataacggatcagaaatacagattttgatagcaaagcgacgttagtcgtgagctcttgtgaggaaagtcattggctttatcctctttagagttagactgttggggtgggtntaaaagatgggcgnct

SEQ ID NO: 3139 - DNA, 385 bp, Homo sapiens
aaaacattgttttctaaacactaacaaaaaaaattaagggcaaactgaaaatacaaatgagatttacaggcactgtgtgtagaatgtgtaaaaattcacttagcttttcttttgtttttttggtgttgctttaagaaactttatcaaatatatttcttacaaatataaagctttctctcccaattgaaggcaattaaaaaaattcaaagtttatcaatactcagtacacaggtgaaccagtcaaattcattttctttctggaaaagaataacaaaccaatatttaggatgttcagagactcaacaaaaaccattctagaaatcacccagaacaattgttttctgttgccaaagccttttgttcttcaaaagtcaccatccaccag

SEQ ID NO: 3140 - DNA, 385 bp, Homo sapiens
  unsure (1): n=A,T,C or G
  unsure (3): n=A,T,C or G
  unsure (46): n=A,T,C or G
  unsure (186): n=A,T,C or G
  unsure (218): n=A,T,C or G
  unsure (296): n=A,T,C or G
  unsure (297): n=A,T,C or G
  unsure (326): n=A,T,C or G
  unsure (331): n=A,T,C or G
  unsure (338): n=A,T,C or G
  unsure (343): n=A,T,C or G
  unsure (357): n=A,T,C or G
  unsure (372): n=A,T,C or G
  unsure (379): n=A,T,C or G
ntntcgaggtaaatggaaagttactattataaggttaatttgcagncctcttctaaatagaaaaccatatccttggctactaacatctggagactgtgagctccttcccattccccttcctggtactgtggagtcagattggcatgaaaccactaacttcattctagaatcattgtagccataagntgcgtgctttttattaatcatgccaaacatantgtaactgggcagagaatggttctaaccaaggtacctatgaaaagcgctagctatcatgtgtagtagatgcatcattnnggctcttcttacatttgtaaaaatgtcanattangccatcnttaantcatattagtgacnccggaacagcacctnccctatntgtatg

SEQ ID NO: 3141 - DNA, 176 bp, Homo sapiens
  unsure (171): n=A,T,C or G
  unsure (172): n=A,T,C or G
  unsure (175): n=A,T,C or G
gcctctgtctccgagctcgcctgcatctactcggcccccattctgcacgacgatgaggtgacagtcacggaggataagatcaatgccctcattaaagcagccggtgtaaatgttgagcctttttggcctggcttgtttgcaaaggccctggccaacgtcaacattgggagnntcnt

SEQ ID NO: 3142 - DNA, 242 bp, Homo sapiens
  unsure (109): n=A,T,C or G
  unsure (221): n=A,T,C or G
cctgccagtctctggacggctacggcgtagggtggcaggcacaatctccgggggcagatgaaggtaatcacggagatactggataccctcattggtaaggtaccagtanaaatgtctccaggcaaactgttccttcacgtagcctcgggacttgagagactgcatggccttcacgacatgaaggttgggcacattcttgtctgccagctccgggtgcttangcatgtggacatccttcttgg

SEQ ID NO: 3143 - DNA, 200 bp, Homo sapiens
  unsure (148): n=A,T,C or G
  unsure (152): n=A,T,C or G
  unsure (177): n=A,T,C or G
  unsure (198): n=A,T,C or G
ctggtgttcagcctctcaacagcaaaccatgagactacataactatcaggttttcacttcactttcttctcttctgtctaaataatcacaatgcctttaggcttataaaaagcatctaatcattacagtgtcttatcctttttaatgntctntccttttataaaactgtggcaaganctgaatgtttaggaaaggtancc

SEQ ID NO: 3144 - DNA, 364 bp, Homo sapiens
  unsure (69): n=A,T,C or G
  unsure (95): n=A,T,C or G
  unsure (353): n=A,T,C or G
gatttacatgtgcatatacaatttataaagttaaaaattctctgtacaaaatcttacatgtacagagtntatataagccccattcttatggctgnatcaccacacagatttgcttaaaactataatactacaaacactcgggttcttcatattcaatcttggcacccatatagcaatacactattctgaaatgtaaattacaaaggaaataaaatgtaatcatgcagacattttttaatataagaaaatgcgataaaatatactacaccagatcaacatttatcaattccatagatactgagttttcaacttactgcactgttttcatataagtacatgcaaaactagcagantatggattttt

SEQ ID NO: 3145 - DNA, 374 bp, Homo sapiens
  unsure (329): n=A,T,C or G
  unsure (330): n=A,T,C or G
aaagtttatttcctttgtggatacaacattatttttacaaaaatgcaaattgggaggaaaaactaaggctagagaatatatcttctacttcttggcaaagcatgtttactattggtcaatgttattatttgactctatattgccaaagggataatcggggagaaggtcataggaattttcatccttctttaatagcagacattaaagatgtctcctattataaggagttatgtgaggtcagctaaaactaattatttgaggtcatacaaatgactcaaaattcttagagaaaccatgggtttggagaggaatcctcatatatatttcannaagaggagaaaaaataagatagaaataagatcttgtattttttt

SEQ ID NO: 3146 - DNA, 414 bp, Homo sapiens
ctgttttattgctaaactatcatgatacaagccgtataaaaatactttacatataggaaaaataaactacattaaactggagattaaaaacatttgcataggaatgtgatgtattcaaacgcctttaacagtcaggattttctaaacctaagcctgccagcaccaccatgttggagagacctgtttgttggagaattggttttctctcctctgagggctgtagaggccagaggggtgagtgaggttctttgacaagatgtccaggatgctaagcttgtcccaacagccatagcctcggtctgctcaggccaatcagaatgctgtgagcacctgctctaatggaaacaacatcatttgcatccattccattcaaagcttgaactcagcagggagtttattctggtcagccaacag

SEQ ID NO: 3147 - DNA, 396 bp, Homo sapiens
  unsure (278): n=A,T,C or G
  unsure (299): n=A,T,C or G
  unsure (332): n=A,T,C or G
ctggggagatggtgtttgtatatgaaaatgcaaaagaaggagctcggaatataagaacgtcagaacgagtgacactaatagtggataacactagatttgttgtagacccatccatttttactgcacagccaaatacaatgttgggcaggatgtttggatctggccgagaacataactttacacgacccaatgagaaaggagagtatgaggtggcagagggaattggttccactgtgtttcgagcgattctggattactataaaacaggaataatccgntgtcctgatggcatatctatncctgaactgagagaagcatgtgactatctttgnatctcttttgaatatagcactattaaatgtagagatctcagtgccctaatgcatgagttatcaa

SEQ ID NO: 3148 - DNA, 425 bp, Homo sapiens
  unsure (92): n=A,T,C or G
  unsure (155): n=A,T,C or G
  unsure (158): n=A,T,C or G
  unsure (164): n=A,T,C or G
  unsure (169): n=A,T,C or G
  unsure (314): n=A,T,C or G
  unsure (386): n=A,T,C or G
  unsure (417): n=A,T,C or G
ctgctgacagttctttggtggaaaagtaagttgcgtacttacccaagctgcccaaatgattatcaagccaagtttgtttttcaaaaataggntttaagatacaccaaagaaactatacaatacaaaaatttaacaatgaagttaaagtatatagncanaagccnaatangacaacacacatgtataatgtagaaaagaatcctttcaggtcctagaaaactaaaatggggagaacttactgaagggtaacatacataaaatgagtactaatagcaaggaataatcctaaacattttcccaataaactgactaancctcaaaaggacagcttaggaaaatgattaacatgcagtttttcttttttcctagccaattcagttctaccntagataaatctgggttgccaagcaatacatntataaatt

SEQ ID NO: 3149 - DNA, 381 bp, Homo sapiens
  unsure (224): n=A,T,C or G
  unsure (254): n=A,T,C or G
  unsure (257): n=A,T,C or G
  unsure (288): n=A,T,C or G
  unsure (295): n=A,T,C or G
  unsure (306): n=A,T,C or G
  unsure (307): n=A,T,C or G
  unsure (320): n=A,T,C or G
  unsure (336): n=A,T,C or G
  unsure (342): n=A,T,C or G
  unsure (360): n=A,T,C or G
  unsure (378): n=A,T,C or G
  unsure (380): n=A,T,C or G
ctggatgatgaagtagcacagactcctatgccatcagaatatcagaacatgactgtggatattctctgcaatgactgtaatggacgatccactgttcagtttcatatattaggcatgaaatgtaagatttgtgaatcctataatactgctcaagctggaggacgtagaatttcactggatcagcaatgacgagcctacacagtactggagaacttggcattttntgatatagaaaaaggctttccttggtatcncgntatcatgtgtcgtcatctatgcattatagtngatgggntttgtactacnngtcaccagcatanaatcatattacaagtncgtaangattcaggggctcttganagactttatcatagcctntnt

SEQ ID NO: 3150 - DNA, 328 bp, Homo sapiens; identical to SEQ ID NO: 2874

SEQ ID NO: 3151 - DNA, 228 bp, Homo sapiens
ctgaaagtaaacagaatggattgccagttacatgtatgcctgcccagttccctttttatttgcagaagctgtgagttttgttcacaattaggttcctaggagcaaaacctcaaggattgatttattgttttcaactccaaggcacactgttaataaacgagcagggtgttttctctcttcctttctaatatatggagtttcgaagaataaaatatgagagcaatattt

SEQ ID NO: 3152 - DNA, 303 bp, Homo sapiens
  unsure (275): n=A,T,C or G
aaaaacaggacttgtcactttatataaaagaatagtatgctctatttcctgaatggatgtggaaatgaaagctagcgcacctgcactttgaattcttgcttcttttttattactgttatgattttgctttttacagatgttggacgattttttcttctgattgttgaattcataatcatggtctcatttcctttgcttctttggaatatttctttcaacacattcctttattttattatacattgtgtcctttttttagctattgctgctgttgntttttattctatttacaggatgattttt

SEQ ID NO: 3153 - DNA, 236 bp, Homo sapiens
aaaaaagatgaaaaagaaaaaaaaactttgtaaaatgcgagaacagaagcaaaagacactacgctctgtcattttatctttcttttgttgaaagactaaaaaaaaactgaaatgctttttagacaatcaaatgttaggtaagtgcaaaaacttgttttttcttactggtgtagaaattaatgcctttttttatttttcagttattttataataacgaaataaaaagaaccccccag

SEQ ID NO: 3154 - DNA, 343 bp, Homo sapiens
  unsure (105): n=A,T,C or G
ccacttgtgtgggtcctcacaagcaaagagagcactaaacttgacattgggagtccaccactccaactttgctttctgaaggttttggtgtacattgagccccanaaggaaaggagagtatctgtgagtgggggcctcccttgaccccagtacgaagtctatgccctgaatccccagagtagcccttcctggtgcccaactggcctggggacaaacagcgtccactacatctaggactgccggctaagtggacacacttcttgacctcctaccaggaactttggtaaaagctagctttggggaaggggttgggtgtaaatatgagagggtggagggagaccag

SEQ ID NO: 3155 - DNA, 355 bp, Homo sapiens
aaaaaaaagttcgagtctgttgcactaggctgtacatgactaaagttgacagatgctatgctagatttataatcactagttctggtacttgtgtctttgtatgatcaaagcatgcaataagcaatacaaaataccaagccttatacttaaaagaagtttaacatattggttaatatactggttaatatactggttaaacatattgaatgtatataagtggcaaaactagatttttaaggaagtgtacattataatattggagctcagtactgcatgaagagacttcattaaaactaagaaaacatttatttggggagaaattttaggcatttaagaacttgtatttttctatttt

SEQ ID NO: 3156 - DNA, 269 bp, Homo sapiens
  unsure (1): n=A,T,C or G
  unsure (2): n=A,T,C or G
  unsure (8): n=A,T,C or G
  unsure (145): n=A,T,C or G
  unsure (246): n=A,T,C or G
  unsure (250): n=A,T,C or G
  unsure (257): n=A,T,C or G
nncgaggnaaaagatcattctgttctttcaaggagaaataagcctaaaagaagaaaaacaaaaaaaattctgtataaaactgtaatcctttgtattcatgtttacagtgctattactataattcaaaattatgtatgtgacttanagttatataatcataatttatgtttatttcaaatatctaagtttattgcttggatttctagtgagagctgttgaatttggtgatgtcaaatgttctagggntttnttagttngtttttattgaa

SEQ ID NO: 3157 - DNA, 430 bp, Homo sapiens
  unsure (335): n=A,T,C or G
  unsure (424): n=A,T,C or G
ccattacatcctctttttaatttacataatacagatacttgagaaagttgttgtggtgttgtatgccaagaaaattctttttattggtgcctatattgtaacaattatttttaatgcattgtattttgaagtaacggttcagttaaatttttcacctgctgtgtaactgaaacacaattacagtctataatcatctgtagaagtctggagataattttgcaactcatgttatgggttaaatgaatatttttgtaaaagtaaaagcaacaaatttataaattgattatttgaaactttacaacacaattgcatcccaaatacaaattgtattgctnattcattatagctattcgtcctgtaatctgtttctaggtgaaggcatactccagtgttttaggggttttgaaaataaatatttacctcngccgct

SEQ ID NO: 3158 - DNA, 228 bp, Homo sapiens
gttaaaacagaaataaattaaactcttcatcaacaaagacctgtttttgtgactgccttgagttttatcagaattattggcctagtaatccttcagaaacaccgtaattctaaataaacctcttcccatacacctttcccccataagatgtgtcttcaacactataaagcatttgtattgtgatttgattaagtatatatttggttgttcccaatgaagagcaaattt

SEQ ID NO: 3159 - DNA, 515 bp, Homo sapiens
  unsure (352): n=A,T,C or G
  unsure (353): n=A,T,C or G
  unsure (409): n=A,T,C or G
  unsure (427): n=A,T,C or G
  unsure (451): n=A,T,C or G
  unsure (467): n=A,T,C or G
  unsure (474): n=A,T,C or G
  unsure (510): n=A,T,C or G
aaagatattttcttgaattatttagaacatggtaagcctggtattttttaatcaaacaaaatatttatgaaatgggttttctcttaattctggattcatcatggctttctaataccaattgtaatatttacaatattcaccaaaacttagaattttgcaaatgctggaattctgccagtgtttctttgctaagccttgcatgcaaaatttgaaattttaacattggcacccaaaacctacatggaatgtatgtctggagtatttcaaactttacattgaaacataatttccttggaaaacaaaccataagcctgaggaggtttttatcaactggaatgctttatattagttnngtttttcactgtacattcctcattttacattcatttaacctgccgattatttaatntttttattgtaaagtagnttttagcatttgctcttatttttntactttgatgcctttncaattgncatgtctttacctgccccgggcggcccgctccaaanggccg

SEQ ID NO: 3160 - DNA, 486 bp, Homo sapiens
  unsure (327): n=A,T,C or G
  unsure (344): n=A,T,C or G
  unsure (364): n=A,T,C or G
  unsure (371): n=A,T,C or G
  unsure (390): n=A,T,C or G
  unsure (432): n=A,T,C or G
  unsure (447): n=A,T,C or G
  unsure (452): n=A,T,C or G
  unsure (458): n=A,T,C or G
aaagaaggtagataaatttattgccacttgaaaactaaatataactcagatgagtcagacaaaaaaaatcattgacattaaaattattattatttgaccaggtttgtcttttgaagatttctctcacaggcacttctgcaacaaatttgtataatttaatataaatattttgtgattattcttaaaggccaagcaatgggcatttatgatggctaatcataaatacacaataatatatattacatagtatatattaattgacaggttgcattttttctttgagcttatacacttttggaaaaagtctaccttttataaatatcaagntggatattcttgtctgntgcatttgctaaataagagncaatagntaagaatctgtttcttttntatatgtccggattgttccatttggaatacagaatcccctgnataaaactagcatgntttgntgaagnccttgtgaacttgactctaaaatatttt

SEQ ID NO: 3161 - DNA, 413 bp, Homo sapiens
aaaaactatttgtaatgtaattttaatgcattttttacaggcccagtaatggttaaatacgtcagcttactgaataattttaactatttattcttctaaggatacagcttgtctctggattttccagtcttaattttatattttattaatctattttaatgcttgcttttcccatttatagacgttgtagcagtaattgcaagaagttcttgagctgaattcctgttgtgacaacttcctataattacagtagataactttttctttcagtccgtatataacttttctataacttgtgatggacaagagatatgcttatccaataaaataagcttaaatattagatgctcttgggtcaaaatgtcctttaccaaattgacctttttatgagttctttgggtaaatacttttac

SEQ ID NO: 3162 - DNA, 201 bp, Homo sapiens
  unsure (69): n=A,T,C or G
  unsure (142): n=A,T,C or G
  unsure (150): n=A,T,C or G
  unsure (161): n=A,T,C or G
  unsure (169): n=A,T,C or G
  unsure (180): n=A,T,C or G
  unsure (181): n=A,T,C or G
gatggcacaacatacttgaagaccatagaagtttttgatcctgatgccaatacatggaggttatatggngggatgaattaccgtcggctagggggtggcgtaggagttattaaaatgacacattgtgaatcccatatttggngaacacanagaacacaggncttgtatntattcctctgnnttctggggagctttgacctt

SEQ ID NO: 3163 - DNA, 379 bp, Homo sapiens
  unsure (185): n=A,T,C or G
  unsure (187): n=A,T,C or G
  unsure (195): n=A,T,C or G
  unsure (219): n=A,T,C or G
  unsure (221): n=A,T,C or G
  unsure (253): n=A,T,C or G
  unsure (294): n=A,T,C or G
  unsure (300): n=A,T,C or G
  unsure (316): n=A,T,C or G
  unsure (336): n=A,T,C or G
  unsure (363): n=A,T,C or G
gtgggtgttttctaaatattaataggggggcttgattcaacaaagccacagacttaacgttgaaattttcttcaggaattttctagtaacccaggtctaaagtagctacagaaaggggaatattatgtgtgattatttttcttcttatgctatatccccaagtttttcatactcatttaagtaanangctagagngagtaaggaatagagccaaatgangnaggtgtctgagccatgaagtataaatactganagatgtcacttttattcaggaaatatggggagattcaagtnatatanattcctactcgaaaancttgacacctgactttccangatgcacattttcatacgtagaccagnttcctctttggtttct

SEQ ID NO: 3164 - DNA, 266 bp, Homo sapiens
ctcaaattaccctccaaaagcaagtagccaaagccgttgccaaaccccacccataaatcaatgggccctttatttatgacgactttatttattctaatatgattttatagtatttatatatatctgggtcgtctgcttcccttgtatttttcttcctttttttgtaatattgaaaacgacgatataattattataagtagactataatatatttagtaatatatattattaccttaaaagtctatttttgtgttttgggcattttt

SEQ ID NO: 3165 - DNA, 446 bp, Homo sapiens
  unsure (280): n=A,T,C or G
  unsure (417): n=A,T,C or G
  unsure (418): n=A,T,C or G
  unsure (422): n=A,T,C or G
  unsure (442): n=A,T,C or G
aaatcagcatttcccaaaaggtgtgtcaggactgagttaatcagtaagctaatagaaacaactgcaatagactagggatgagatttctcaaagcagtctgatataatatgcggcaactccttatgtactggagcgtatccaatacattctcaaaactcctaaattagctaaaatgcaaggtaaagagcagtagaaaaatgcagctcttaggataggcaaaactttggaagatttatgtcctcacaccagggtccagcaacttaggtttgaatttatgatnaggttaatgatataataaacttgggttggctggtttccctggcaattgttaattccccttaaataaaaatatgttgatacattgcaaaagaagtattttacagtttgaaacctttggaaagggcttttacctgcccnnggcngccgtaagggcgaattccanccca

SEQ ID NO: 3166 - DNA, 387 bp, Homo sapiens
  unsure (5): n=A,T,C or G
  unsure (10): n=A,T,C or G
  unsure (16): n=A,T,C or G
  unsure (18): n=A,T,C or G
  unsure (156): n=A,T,C or G
  unsure (173): n=A,T,C or G
  unsure (215): n=A,T,C or G
  unsure (232): n=A,T,C or G
  unsure (299): n=A,T,C or G
  unsure (305): n=A,T,C or G
  unsure (365): n=A,T,C or G
  unsure (369): n=A,T,C or G
  unsure (371): n=A,T,C or G
  unsure (387): n=A,T,C or G
ctggntctantcaatngngaaccaccaccccccgccccccgcaaaaagtaaaagtcaaaccaaacttcctcaagctgcatgcttttcacaaaatccagaaagcatttaagaattgaactatgggctggaagaagtgaaagggaagcatctaaaaangaaaggtgagtaaccanatagcaaaagaaaagggaaagccatccaaatttgaaagctgntgatagaaattgagatncttgctgtcttttgtgcctctacaagctactactcattccagaattcctgggtcttccaagaggatncttaangtaccagagatttgctatggaaccaaaagcgcttgagaattctgactgaggggcttcgcntagntntcacattacaaaaaan

SEQ ID NO: 3167 - DNA, 478 bp, Homo sapiens
  unsure (58): n=A,T,C or G
  unsure (60): n=A,T,C or G
  unsure (62): n=A,T,C or G
  unsure (361): n=A,T,C or G
  unsure (373): n=A,T,C or G
  unsure (422): n=A,T,C or G
  unsure (472): n=A,T,C or G
ctgagttacaaggactaaaagtgaaaagcattctaaaagtccatgaacactgttgttnananccttcttcagaacacactaaacttgtctgacacatttctcttcatacatagcaagcaacagcacccaataaaagcctgagaagaaatgctgctgtgtaaatactgcaactattcctgaaaaaagaattatgggatatatactccaaagctgcccattcccataatttgtattgcataggtcacataatcacacacatatatatacacatgtgtgtatatatatgcacatgcaagaatatattaagacgacaatgaagtctagtcacagagcaatttacaggctcaatatatttttttanactttggttganagaaaatttaatattttacagtctttcagtaggcattatatacactgcnctttatgaaatctaaaaggtattgaaataaatttttccacattttggtancaaaac

SEQ ID NO: 3168 - DNA, 198 bp, Homo sapiens
  unsure (174): n=A,T,C or G
ttttcatatcaatgaaaaattccataaaaatagctatattaaatttcatatgtaaatatttaacaaatatgtttgtattcttctatttttatacaatgaatattaatacatattgcatttatttattttaatgacatttatttaagttcaattgtacaaaacctaatttgttgncaaaagtatcaagcaataaatttt

SEQ ID NO: 3169 - DNA, 327 bp, Homo sapiens
aaaaatgtttttgaaaattgcaattcctacaaataaatgtcatagtgcaaataaatgtcaggatttagagaaggagcctaaactgaatttgtgttatttcagtaaaagttatggagttatgggtctagacgtgttaataagttagacagaactttggcactttagaacaaatgcatgagtggtatttcagttcctaagttacataaaaagtgtgaaagaacactgtgaggtcccagcaacgccagactatattaaggtaagtagaaagtgtttttatagggcttcaatacccaggtggtgacagagcagaagaaccgggtttttttt

SEQ ID NO: 3170 - DNA, 439 bp, Homo sapiens
  unsure (17): n=A,T,C or G
  unsure (20): n=A,T,C or G
  unsure (24): n=A,T,C or G
  unsure (416): n=A,T,C or G
  unsure (420): n=A,T,C or G
gttagtattgactttgnttnaaanaggcttgacttcaactgggataaaaatgtcagtgaattttgttaaagtagtaaaaatgcagttgacttagtaggaacataaaattatttcctaataagataatattgcactcctaccaaataaacaggattttagtaatatctgagggattgttgatggtgagttagactgtatttggcatagaatttggaaatgtaacttgaatgtaaatatgctgcaaaatgttgaatgtatacatagaaagactttttctgtcgacgccaaatgcccgttgtaaatgaaccttaaatattacattcctcctttgcacaataatatttctttataacacttatgattttttcccccaggacaacaaactgcccttaagagtcatttccttgttatcacangtgncaatatttttctgtatttt

SEQ ID NO: 3171 - DNA, 279 bp, Homo sapiens
  unsure (257): n=A,T,C or G
agccattacaggtttgaacaaattcaaaattgcctattattaagcctccgcaggagctactgggcataagcaaacctaagattttataacccagcaattatcctatagaaaatagtccagattattatattctgccacacctttattcatacttgactccaaaaagttctcaattattcacagggataatctagaaaataaatattagttttgctttcaaagacattactggaatgagcaggaacctgcatctttgntatattaattaacttattattt

SEQ ID NO: 3172 - DNA, 302 bp, Homo sapiens
  unsure (21): n=A,T,C or G
ctgttgaaatgaagcactttncagtctttgtggcagcagaatatacttgtccatggttcatatcaatgctaaaattccggcagggaaaaaaatgatatgttaagcacccaaatcttcacatggagggggagggggtgggaaaagaaggaaaaaaagggaaaaacaaccaaaataatttaagtaaatgacagattggaaaacagggtttataaaaattattctcttgagtttataaattgttaaactcaatttatagctatgttaaactacgtaagaaccactatactgaaagaccatttaag

SEQ ID NO: 3173 - DNA, 300 bp, Homo sapiens
  unsure (128): n=A,T,C or G
  unsure (189): n=A,T,C or G
  unsure (203): n=A,T,C or G
  unsure (222): n=A,T,C or G
  unsure (246): n=A,T,C or G
  unsure (248): n=A,T,C or G
  unsure (257): n=A,T,C or G
  unsure (264): n=A,T,C or G
  unsure (270): n=A,T,C or G
  unsure (276): n=A,T,C or G
  unsure (283): n=A,T,C or G
aaataaattacaccttttgaaaatgtttaattgtacagtcaatagcttcaacaaaatattgaagtgtctgtatttagtatctactttatatactttatactttacaaattttacaattatttggcagnaattttctgattatgacatgactgctgtgcgattcagcgatttcccagatgcaggcaatanctggtgtttgtgtnctattctcagagtaactgnctcaatgtaggtgaaaaatatcancnattttagtnaactgtncaaggnccattnacacttnatcaacactatagcata

SEQ ID NO: 3174 - DNA, 519 bp, Homo sapiens
  unsure (488): n=A,T,C or G
  unsure (517): n=A,T,C or G
ctgagcacgagtatagcagcattaactttaatctcattggctacattaatgaactttcctaatcctctcaatgccatgcagattttgtggatcaatattattatggatggacccccagctcagagccttggagtagaaccagtggataaagatgtcattcgtaaacctcctcgcaactggaaagacagcattttgactaaaaacttgatacttaaaatacttgtttcatcaataatcattgtttgtgggactttgtttgtcttctggcgtgagctacgagacaatgtgattacacctcgagacacaacaatgaccttcacatgctttgtgttttttgacatgttcaatgcactaagttccagatcccagaccaagtctgtgtttgagattggactctgcagtaatagaatgttttgctatgcagttcttggatccatcatgggacaattactagttatttactttcctccgttcagaaggtttttcanactgagagcctaagcatactggatctggntg

SEQ ID NO: 3175 - DNA, 499 bp, Homo sapiens
  unsure (18): n=A,T,C or G
  unsure (116): n=A,T,C or G
  unsure (151): n=A,T,C or G
  unsure (178): n=A,T,C or G
  unsure (204): n=A,T,C or G
  unsure (395): n=A,T,C or G
  unsure (396): n=A,T,C or G
  unsure (400): n=A,T,C or G
  unsure (467): n=A,T,C or G
  unsure (477): n=A,T,C or G
  unsure (484): n=A,T,C or G
  unsure (499): n=A,T,C or G
ctggtggcttcctgattnccgcccacagaaggtatgttcacactgagagagctctcccgccaaggggaggaatcacctgctttaatacatgttgttctcttctgtgctagtgtggncatccactctgtataaacttatgtgcaacattaanacaaaaaaagggagttgagttgataanatgacttgggaggctctcatagttgnaataactatggaagacagaagaacatgctatcatctttatttttagcactcatatctggacctattactaaaaaagcttcttcattccttccaaccactagattataatggctaaaaagtcttttccttaaatctgatgggtgtaaaaataaaaagtaacagcatttctctagggctctggtttattttgnnttgntcttccttttatagacacgacaaaaacaaggattaactttccaaatactcatggtgcacaagaaggntatgtatgcncagtatnctaatttattcaaan

SEQ ID NO: 3176 - DNA, 451 bp, Homo sapiens
aaaaatgttttcccgtgggtaattttctattatatattttcatatgggcaaagggaaaaaatgataaatcctctgtaatcacaaaccccaatttcgttttgtttattcagcttctaaaatattgaacacccagacttttaattcaacctttaagaaccttatcatttatgtttcagtagatatcaaagtaatccatgtttgtgtcaaatgatcatagaaaataaatagaagagacagtgaagcaagtaaaaagaaaagcattgttttaatttgtttgcattaatttttttcatttgtcaaaatgcttcttttgttgccacagtaaagaacagtttttattgttttgtaagtaaaattacgtagctgattttgtatgtaaagattaatttccataataaaaattattgtatgtttactgtgatcttaatgggcagggttaagaaagttattt

SEQ ID NO: 3177 - DNA, 303 bp, Homo sapiens
aaaaatacaaattttatgaaaatattaagaatttttaggatgggaattataaaagtcaatgctgaacaaaattctacttttagatagtatgtatcttaaaatattatgaaaaatattctttattctgaaaacaatgtcaggaaagaatacctgagttctctaaaaccactagttctaatttcaaattgctgttttggtaacataaagaaaacacatttacaatttaacactgcagttacctgtcaaataattagaatagaataaatgttgcatatacattaggttgaaaattatatatatttt

SEQ ID NO: 3178 - DNA, 343 bp, Homo sapiens
  unsure (4): n=A,T,C or G
  unsure (23): n=A,T,C or G
  unsure (120): n=A,T,C or G
  unsure (147): n=A,T,C or G
  unsure (164): n=A,T,C or G
  unsure (166): n=A,T,C or G
  unsure (172): n=A,T,C or G
  unsure (182): n=A,T,C or G
  unsure (343): n=A,T,C or G
aggnaaaactcattaataagatnccaaattcaagagattatagttacattgtaaaacgtaatcttcttttaataaaagctaataatgactgatgaattacaaatgcacttatttattggngattacaaacaatacttaagaacttangcagcttgagtagtagntnaagctngacagagcanagaaaattcttgtttaatatatatatatttttaattccagtaatattttcttaaattcctgttaaaaatataatcaatattaaagtcagcaaaatgcctttgactgacgcctggattattttaccacttaacctggttacacagtgatttttttttttttn

SEQ ID NO: 3179 - DNA, 417 bp, Homo sapiens
aaatatattgcattttattacgtaacagtaaaattagtaaaataattgatatactttaatttataatttctttctctcagtataatgtagaaaagtattactctgaacacctaccttaaacattacttaatataggttaactacaatgagcctctccacttatatttttgtcatgcatcttacattttaatgtccttactgttttatagaaaaggtcataaagaatgcccaactaataaagagtctctaatatctctgatgcagcaacaattgatcacatactttcacgtgaatataataaagtaacagcataatttgaaagctgtattacatcattattcacttttcaaaaaaattgttttcaaggaaacaaatatactttcaatgtaattacaaagcttcaaaaaatctcctttt

SEQ ID NO: 3180 - DNA, 304 bp, Homo sapiens
  unsure (19): n=A,T,C or G
  unsure (185): n=A,T,C or G
  unsure (253): n=A,T,C or G
  unsure (265): n=A,T,C or G
  unsure (279): n=A,T,C or G
  unsure (303): n=A,T,C or G
agatgctcccttgcttttnataattcctaactgtaaaatataattttagtacagaacaaacaaattctccttggttggtcacatcattcattattgaaagggaaacttagtatcaaaagaaacaaaacactgaaataaataactaagtaatttactgaaaggtagttttgttgcattgcacacanctgaccgcagagaattctaaagctgatttttttcttaaaggatgaaaaactcatttgccatttttagnttcttgctaagngatacatgctcctnataaggaaaactactctgtgtatng

SEQ ID NO: 3181 - DNA, 347 bp, Homo sapiens
  unsure (171): n=A,T,C or G
  unsure (178): n=A,T,C or G
  unsure (180): n=A,T,C or G
  unsure (183): n=A,T,C or G
  unsure (271): n=A,T,C or G
  unsure (281): n=A,T,C or G
  unsure (299): n=A,T,C or G
  unsure (324): n=A,T,C or G
  unsure (325): n=A,T,C or G
  unsure (339): n=A,T,C or G
  unsure (340): n=A,T,C or G
  unsure (345): n=A,T,C or G
aaaatacataaaattttctaaaacgtaaaatggaaaggtttaatacacaggaaaaacactgcacaccttaactaaacaaactagaaagaaaatatatttatatacagaactaagatgagtccattcattatttttacaaatattcacatagatggtttagagataagtagntaagcgngnctnattaattaatggatgctttctagcctctgtcttcattaattttatttcctattcaacaaaaaataatgctttcaggatatattacatntagagcaatntcatttttatcagtaatnttgcctgaaaaagagaaaaactttnnagcataaccctacnnagcanga

SEQ ID NO: 3182 - DNA, 279 bp, Homo sapiens
  unsure (122): n=A,T,C or G
  unsure (221): n=A,T,C or G
  unsure (254): n=A,T,C or G
aaattttagagtcacattttattctgatcagaatttttattgagatgttgagcttttgtttttgaaactagtttgtcataacattgtgcataatcacagtatttattttctaggacaattgngaatgtgtagacttatgtttactgctaagggaacaattatttataaaataatattaaatccagtattaggctgcctatttcagacacttaatacttgcngagatctatgttacatttaccacactgaagttntttttgttgttttttgtttgttttt

SEQ ID NO: 3183 - DNA, 367 bp, Homo sapiens
aaagctatttaatactcatgatgtctaaactttcaatttattgtctgatttctggatatttctgtattttagattctacagacttcagattctgaagcttgttgaaaaagctaagttcctcaatatggatgaaaatctatctggctgtacttttagaggggaatttttctacttttgaaaaaaattctgaatatttatatatagtattaacagaataccccagtaagtcatatttcagataaatattctatagtataatttgcatcatacccaatattttagatattaaaataagggtaaaatttggaatataatcacttgtctgcatatttcccaatgtaagttttcatgtagaatattaaaattt

SEQ ID NO: 3184 - DNA, 149 bp, Homo sapiens
  unsure (149): n=A,T,C or G
aaacttgaactattccttccagaagaatacccaatggcagcccctaaagtacgtttcatgaccaaaatttatcatcctaatgtagacaagttgggaagaatatgtttagatattttgaaagataagtggtccccagcactgtcgatccn

SEQ ID NO: 3185 - DNA, 197 bp, Homo sapiens
  unsure (120): n=A,T,C or G
  unsure (132): n=A,T,C or G
  unsure (143): n=A,T,C or G
  unsure (148): n=A,T,C or G
  unsure (160): n=A,T,C or G
  unsure (165): n=A,T,C or G
  unsure (176): n=A,T,C or G
aaagaaaatccagtagttgttggtgaaaagatccaaaagatttgaactcctgctggaatacaaaattcttgagcatctgcaaactaaaaattgacttgaggtttttttttttcctagtcnttgggaatgtanagcagggtatnttgcntgtcatcggaanaatanatttttgtttnggttttgttttgaaaatgact

SEQ ID NO: 3186 - DNA, 421 bp, Homo sapiens
  unsure (21): n=A,T,C or G
  unsure (184): n=A,T,C or G
  unsure (299): n=A,T,C or G
ctggaagagagggctgcccgnaacgactctcaagtttccaagaacttggaaagccaccacggtgaccagatggcgcagaaatcccagtccacgcagatttcacaggaactggaggaacttcgagctgaacagcagagattgaaatctcaggacttggagctgtcctggaacctgaacgggcttnaagcagatctgagcagcttcaagtcccaggaattgaacgagaggaacgaagcttcagatttgctggaaagactccgggaggaggtgacaaagctaaggatggagttgcaggtgtncagctggctttgtgtgcaacacgtgccctgaaaagtggatcaatttccaacggaagtgctactactttggcaggggcaccaagcagtgggtccacgcccggtatacctgtgacgacatggaa

SEQ ID NO: 3187 - DNA, 349 bp, Homo sapiens
  unsure (19): n=A,T,C or G
  unsure (73): n=A,T,C or G
ccaagttatcatgtccatncgcaccaagctgcagaacaaggagcatgtgattgaggccctgcgcagggccaanttcaagtttcctggccgccagaaggtatgtagtgctgcagcccccttctcccacctttgccccaggctgaataggcacccaaaagtccgtgactaaatttcgtttgtctttttgatagcaaattatgttaagagacagtgatggctagggctcaacaattttgtattcccatgtttgtgtgagacagagtttgttttcccttgaacttggttagaattgtgctactgtgaacgctgatcctgcatatggaagtcccgcttcggtgacatttcctgg

SEQ ID NO: 3188 - DNA, 434 bp, Homo sapiens
  unsure (199): n=A,T,C or G
  unsure (365): n=A,T,C or G
  unsure (403): n=A,T,C or G
  unsure (405): n=A,T,C or G
gaacaaagaatcttaagggtttattaagaactctttattttcttcataccctgttctctgcagtgctttctaacagcttctgggtgcagattttcttcggcatccttttgcactcagcttattacaggtaggtagtgcttaagaaaagtcatggaggactaaagcctaagtccttttcacttttcctccatctgaaggnaggtgagttcatcctcttcatagtaatgctgttttaccaagactttatagcagatggacccagaaagaattttctgctattgtgttcactacaacaggatagggacatcagacagccccagaaaccccttccagatctgatatgggactattaatttttatgctgntaattggtattcattcacaatgcagttgaagggggaangntccactgcattctttggctaaggacctcg

SEQ ID NO: 3189 - DNA, 367 bp, Homo sapiens
  unsure (142): n=A,T,C or G
  unsure (195): n=A,T,C or G
  unsure (275): n=A,T,C or G
  unsure (280): n=A,T,C or G
  unsure (326): n=A,T,C or G
  unsure (342): n=A,T,C or G
  unsure (348): n=A,T,C or G
ctggtggttaacaagtggatcgtcatgttcagtagtttatacattatgtgagaagtaacgttctgattctttttcttacacagaattggcagagggggtcgatttgggaggaaaggtgtggctataaactttgttactgaanaggacaagaggattcttcgtgacattgagactttctacaatactacagtggangagatgcccatgaatgtggctgaccttatttaattcctgggatgagagttttggatgcagtgctcgctgttgctgaatangcgancacaacgtgcattgtgcttctttctttgggaatatttgaatcttgnctcaatgctcataacngatcanaaatacagattttgatagc

SEQ ID NO: 3190 - DNA, 231 bp, Homo sapiens
ccaggcagccctgctcacaggcaaggtgtaggggggtatttcctcgaaagtctcggagctcaggatcacagccagctcccagaagtgcctcagcaatttctggctggttggtgatcacagccaagtggagtggagtctgctgcaggttgttctggaagttgaggaaagccaggtctcccttcacctggcggatcacttccatggtcagtgccttttcttcatggatgatgg

SEQ ID NO: 3191 - DNA, 409 bp, Homo sapiens
  unsure (175): n=A,T,C or G
aaaacaaatttctaggacttacgctctttgggcctgatttgttaatgcttatgaggtaatgatattatgtttgagaagctctacttctagtatacctcaatgctcagagagaaagccaacaatacaatcaggaaaccacaatattgacaaaacttagtactaccaccaagattgntcctcttgccttggcactactaaaaaactttacctttgttactaaagtcatggtgaatacagattttgcatttctcatgtaagcagctatataagctagggttctacaagccttagatgaaaggaaaaactttgctggaagccctgtaaaaatcactttattcacaatctgaagaatgaaagacaaatttggctgtcaatacaaaaactgtagtacaaggaagttcaactgttt

SEQ ID NO: 3192 - DNA, 374 bp, Homo sapiens
ctgaagcggcggccagagaagagtcaagggcacgagcatcggccatgcctttcttggacatccagaaaaggttcggccttaacatagatcgatggttgacaatccagagtggtgaacagccctacaagatggctggtcgatgccatgcttttgaaaaagaatggatagaatgtgcacatggaatcggttatactcgggcagagaaagagtgcaagatagaatatgatgatttcgtagagtgtttgcttcggcagaaaacgatgagacgtgcaggtaccatcaggaagcagcgggataagctgataaaggaaggaaagtacacccctccacctcaccacattgacaagggggagcctcggccctgaacagagcag

SEQ ID NO: 3193 - DNA, 208 bp, Homo sapiens
  unsure (161): n=A,T,C or G
  unsure (173): n=A,T,C or G
atatataatagctgtaactgtttcactgctatgctgttttgtgttgttatagttgtaacatatttctcaattttcctgtttttcttttagtttattgacaagactacctggtcggcctaaattcacattttcattcagtttttgggcatttgagatcaaanagtaagtatggnttctacagttacttcatttttctacttatcttttt

SEQ ID NO: 3194 - DNA, 290 bp, Homo sapiens
  unsure (1): n=A,T,C or G
  unsure (27): n=A,T,C or G
  unsure (28): n=A,T,C or G
  unsure (29): n=A,T,C or G
  unsure (157): n=A,T,C or G
ncgaggtaaaccaatccaatatacagnnntttgaaagtaaaagatcaactgcacagatattttttaactaaagaatgtgtcagtaaatctatgtaaatatccaaattgacacaaattttctaaagagttaaaattattaaatttcaaattattattntatatacttttgatcaaaatataatatttgcttcaccataagttgaagatattaagaaaacataatctaaggtttattacaaaaaataatggcctctgatagatatacagagaataatatattcttaaatttt

SEQ ID NO: 3195 - DNA, 253 bp, Homo sapiens
  unsure (22): n=A,T,C or G
  unsure (131): n=A,T,C or G
  unsure (138): n=A,T,C or G
  unsure (142): n=A,T,C or G
ccactcagcacatttcatggangtcatgtcttttcactgatacttttttgatagtttttatataacaaaatccttattctatttataacttaagatgataaggcactataaattaatgacctaaaataatntatttgnctgntatctttgtgctatttctacttcactttaatttttaggctgtaaaattggtaaatggattcttacaactatctctttccatttcttactatttggttttcaaatttcattt

SEQ ID NO: 3196 - DNA, 371 bp, Homo sapiens
  unsure (105): n=A,T,C or G
  unsure (316): n=A,T,C or G
  unsure (327): n=A,T,C or G
  unsure (350): n=A,T,C or G
  unsure (356): n=A,T,C or G
  unsure (369): n=A,T,C or G
ctggtggttaacaagtggatcgtcatgttcagtagtttatacattatgtgagaagtaacgttctgattctttttcttacacagaattggcagagggggtcgattngggaggaaaggtgtggctataaactttgttactgaagaagacaagaggattcttcgtgacattgagactttctacaatactacagtggaggagatgcccatgaatgtggctgaccttatttaattcctgggatgagagttttggatgcagtgctcgctgttgctgaataggcgatcacaacgtgcattgtgcttctttctttgggaatatntgaatcttgtntcaatgctcataacggatcaganatacanattttgatagcanag

SEQ ID NO: 3197 - DNA, 326 bp, Homo sapiens
  unsure (210): n=A,T,C or G
  unsure (238): n=A,T,C or G
ctgaactcttccttgacactgtttcaacatttacatcctatgaactcatggattataaaacatttgtgacttatactgtctatgtcagtatgattgccttagaaagaccagatctcagggaaaaggtcattaaaggagcagagattcttgaagtgttgcacagtcttccagcagttcggcagtatctgttttcactctatgaatgccgtnactctgttttcttccaatcattagcggntgtggaacaggaaatgaaaaaggactggctttttgcccctcattatcgatactatgtaagagaaatgagaattcatgcatacagtcag

SEQ ID NO: 3198 - DNA, 516 bp, Homo sapiens
  unsure (450): n=A,T,C or G
  unsure (481): n=A,T,C or G
  unsure (494): n=A,T,C or G
  unsure (506): n=A,T,C or G
cctttcagtggggcttggacaaaaagggccccaaagaccaattttgctcattaacctcacactggggatcagattgacaacttaaggatttttagggagcatatgtgagatcaaagggaagaagaaaatggtgcccctttcagatggtgcttcaggtgctaaaaaatatcccaacacaaacaagcaggtggctagctgacaggtgggggaagagatgcaagtcagatagcaaaggatctgcacagtgcaaaatcttcttggctttttatttaacttagcagtgaatgcagcaggattggcttaaagtataggtacaccccatggaaacatgcaataagatcacatcgatccagaggctggctcaagtttgactgaggggaaacggagggaaggctgttcctatcacacaatctcagcagaggttgaggtggtggggatttctttcttctnatatgacgctaccatcggtgacttcttactnggagaccactgancactgaatcaangtttctaata

SEQ ID NO: 3199 - DNA, 186 bp, Homo sapiens
  unsure (172): n=A,T,C or G
  unsure (183): n=A,T,C or G
aaatcacatgtttacacaaacacttggacaaaaatggttttagcagctttatttgtaataaccccaaactggtaaaaaactaaatgtccatcagcagaggtatggattagaaaattgtgatgtattcatataatggaatattattcaacaataaaaaataacacatctgatnaaaaaaaaaanaaa

SEQ ID NO: 3200 - DNA, 275 bp, Homo sapiens
aaattaaaaaggtaaagaagaaaaagaaaaagaaacacaaggagaatgaaaaacggaagcgtccgaaaatgtatagcaaatctattcagaccatctgctcaggattgctaactgatgttgaagatcaagcagccaaaggcatcctaaatgataacataaaagattacgttgggaagaatttggataccaagaactatgattccaaaattccagagaacagtgagtttccatttgtctcattaaaggagccacgagttcagaataacctcaaaagg

SEQ ID NO: 3201 - DNA, 385 bp, Homo sapiens
  unsure (163): n=A,T,C or G
  unsure (379): n=A,T,C or G
aaactttaggttttatttacaaatatttatcttatcttcctctcctatttgacgttttagctcaagaagagttaaaatggaatgcatctgtagatatatagttgggaatgcgtgttcagtcacttggctctgtgataataatcttatgtaccatgtcagacangattttcagactccagatcctctttgccattatctgaatttcctgatgagatatagcaaccagagtcccttgggcagtcatctaactgtgacttatttaaggagatgtctgagctcaaggataggggctcaggttcattttcttgctcttgaataatttcttcttcaaggaagttttcagcagacctgcccgggcggacggtggaagggggaattncaacac

SEQ ID NO: 3202 - DNA, 302 bp, Homo sapiens
  unsure (137): n=A,T,C or G
  unsure (170): n=A,T,C or G
  unsure (176): n=A,T,C or G
  unsure (177): n=A,T,C or G
  unsure (207): n=A,T,C or G
  unsure (212): n=A,T,C or G
  unsure (239): n=A,T,C or G
  unsure (253): n=A,T,C or G
  unsure (280): n=A,T,C or G
  unsure (299): n=A,T,C or G
aaaaatatatatttcagattttcagtgctaacagattgcatatatacagttcatttacttttattaaattggcaatcgatattttattgaatggggaattaagaatataaactgtaaattttgtcttaaatttattntttttcttggcctttatttttattacttaaggnatgagnnatattttaggagatactttctagacagttngaagnttgggtgctatatgaagaaaaacattnaatgatatactcanatataaacaccttgttttcttgaatgnaatttatttattagctaanaaa

SEQ ID NO: 3203 - DNA, 510 bp, Homo sapiens
ccagagagccagtaaattaggacagtgtttcaacaagcctaggctatctcgtaagttgaaaaatatcccactatagttgcttcatgagtatgaagtaagatggcctctgatttacactggttcaatttacaaattttcaactttatgataggtttatcagggtactaaatgcatttcaacttgatagtttcaacttatgataggtttaccaggatgtagtcccactgttgaggagcatctatttaggggttaattactttagtaataagtggaaagtaagataccttgagtaatgtttgcctataaaattgtcagcgtatttttacactattggctcaagaatgttataatgctaagggacataagttggcaaccacttggtttttggaaggactttcggtattgtattagaagtctgccctagctgttaaatttctgggtatttatcctaaggaattaattaaagagttaattgttcctttcttcagtgggccattgttttagatattt

SEQ ID NO: 3204 - DNA, 449 bp, Homo sapiens
  unsure (3): n=A,T,C or G
  unsure (19): n=A,T,C or G
ggnaaatcttaagatttgnagaatgtttctaggataggatattaaaaatgattgaaacccatgcatggtgttagacaatttttctaattattccattgagtcagttttttgtgattagtgattatcagagcaaacatcatgtagatagcacaagtatttggagaaacgttgtttgttttgttaccaaaatgttggaaaaatttatttcaataccttttagatttcataaagtgcagtgtatataatgcctactgaaagactgtaaaatattgaaattttctttcaagcaaagtgtaaaaaaatatattgagcctgtaaattgctctgtgactagacttcattgtcgtcttaatatattcttgcatgtgcatatatatacacacatgtgtatatatatgtgtgtgattatgtgacctatgcaatacaccattatgggaatgggcagcctt

SEQ ID NO: 3205 - DNA, 382 bp, Homo sapiens
  unsure (285): n=A,T,C or G
  unsure (345): n=A,T,C or G
  unsure (350): n=A,T,C or G
gccatctttcatgcctttgtcaatatgaacttctaaaattttcttctctcgaactatcttccttccgttgcagcttttacatctatctttaggactgatccgctccccatggccctggcactccatgcacacagactgaatttgctgaaccattccaggtcctatctgatgaattcttatttgcattccagtacctcggcaattgggacagcactctactgctcctttcttacctcctctaccttcacatttgtcacaaatcacattcttttgcagagccagttntcttgttgcaccattatataagtcttctagggttactgagagctgatgtacaacattttnacctntcctttctctctgcatccttcctcctcctgca

SEQ ID NO: 3206 - DNA, 316 bp, Homo sapiens
aaaatatatagaggaatcctcttgattgctcagcatgatgttagataaatgagtttgtcagaaaatatcagtatacgctgtttaccaatgttatttatttacattcttctaaagccattatggatattgtattatgagagctaaacctaaataaggttatcctgttccctaggaccttctctgtaaatagtgatttttagacgagtagtctgtcctaaatcttaaatagaaaaaaaactaaagcgatttgcttaagccattgtacattataaagagctgttttgttttgctttgctttgctttgttttgttttttt

SEQ ID NO: 3207 - DNA, 287 bp, Homo sapiens
ccattctttataggaataatcagtttaatcaagatgagctagcattgatggagaaatttaagaagaaagttcatcagcttgctatgaccgtggtcagtttccatcaggtggattatacctttgaccggaatgtgttatccaggctgttaaatgaatgcagagagatgctgcaccaaatcattcagcgccacctcactgccaagtcacatggacgggttaataatgtgtttgatcatttttcagattgtgaatttttggctgccttgtataatccttttgggaatttt

SEQ ID NO: 3208 - DNA, 345 bp, Homo sapiens
  unsure (221): n=A,T,C or G
aaaaatggagcacagtgacgagaatattcaattctggatggcatgtgaaacctataagaaaattgcctcacggtggagcagaatttctagggcaaagaagctttataagatttacatccagccacagtcccctagagagattaacattgacagttcgacaagagagactatcatcaggaacattcaggaacccactgaaacatgttttgaagaagcttcanaaaatagtctatatgcatatggaaagggattcctaccccagatttctaaagtcagaaatgtaccaaaaacttttgaaaactatgcaggtccaacaacaggtttctgactacaactcaaaagttt

SEQ ID NO: 3209 - DNA, 427 bp, Homo sapiens
  unsure (168): n=A,T,C or G
  unsure (373): n=A,T,C or G
  unsure (426): n=A,T,C or G
ctgaagatagagaaatgaggaaaaagaaggaagaatatttaacttttagtcctcttacagttgtaatatttgtggtcatctgctgtgttatgatggtcttactttatttcttctacaaatggttggtttatgttatgatagcaatttctgcatagcatcagcaatgangtctgtacaactgtcttactgcctaattcataagataccatatggacaatgcacgattgcatgtcgtggcaaaaacatggaagtgagacttatttttctctctggactgtgcatagcagtagctgttgtttgggctgtgtttcgaaatgaagacaggtggggcttggattttacaggatatcttggggattgctttctgtctgantttaattaaaacactgaagttgcccaacttcaagtcatgtgtgatacttctang

SEQ ID NO: 3210 - DNA, 491 bp, Homo sapiens
  unsure (480): n=A,T,C or G
aaatggtattacgtataaattaatataaaatgatcacctctggtgttgacaggtttgaacttgcacttcttaaggaacagccataatcctctgaatgatgcattaattactgactgtcctagtacattggaagcttttgtttataggaacttgtagggctcattttggtttcattgaaacagtatctaattataaattagctgtagatatcaggtgcttctgatgaagtgaaaatgtatatctgactagtgggaaacttcatgggtttcctcatctgtcatgtcgatgattatatatggatacatttacaaaaataaaaagcgggaattttcccttcgcttgaatattatccctgtatattgcatgaatgagagatttcccatatttccatcagagtaataaatatacttgctttaattcttaagcataagtaaacatgatataaaaatatatgctgaattacttgtgaagaatgcattnaaagctatttt

SEQ ID NO: 3211 - DNA, 409 bp, Homo sapiens
  unsure (1): n=A,T,C or G
naaatcagcatttcccaaaaggtgtgtcaggactgagttaatcagtaagctaatagaaacaactgcaatagactagggatgagatttctcaaagcagtctgatataatatgcggcaactccttatgtactggagcgtatccaatacattctcaaaactcctaaattagctaaaatgcaaggtaaagagcagtagaaaaatgcagctcttaggataggcaaaactttggaagatttatgtcctcacaccagggtccagcaacttaggtttgaatttatgataaggttaatgatataataaacttgggttggctggtttccctggcaattgttaattccccttaaataaaaatatgttgatacattgtaaaaagaagtattttacagttgaaacctttggaaagggctttt

SEQ ID NO: 3212 - DNA, 314 bp, Homo sapiens
aaacatgtactggcacaatttgtgatgaaaatattagcacatttgcaataatgtttctccataacagagaatgttaatggataccagaattttatttttgtatttatgttcatagtacttttcctcttgtctactccagacagttattccataaagcatttgtataattaaaaggaaaacagaaaaaggaaaagtaggcaaatgtgaaaatagtttcaatatatcttatgatttcttaatgtaaaatgttttgttgaagtatatggctatcatgactaagtgctagaatttatagttacaggcggtgtcctttt

SEQ ID NO: 3213 - DNA, 285 bp, Homo sapiens
ctgggatgattactgattcctccattcctttggggtaactctgccaacaggggacaggttccattctattccgacttgtgttgctacatatgtccatgtaacaatacagaaagtggctccactggctaatacagcattaccgtatttgtcatgaaaatcgggtgtacgtttctggtggctctgccttgccattgtttgctgaatgcttcgaacttggagacgatttagtgcgcttttgaccaagggaaacatcgtgaaggtgaagctagaactgcggcaatacag

SEQ ID NO: 3214 - DNA, 420 bp, Homo sapiens
  unsure (6): n=A,T,C or G
  unsure (7): n=A,T,C or G
  unsure (10): n=A,T,C or G
  unsure (29): n=A,T,C or G
  unsure (37): n=A,T,C or G
  unsure (41): n=A,T,C or G
  unsure (46): n=A,T,C or G
  unsure (181): n=A,T,C or G
  unsure (362): n=A,T,C or G
taccanntcngtaccaagcttgggataanaatggacntagntgatnactgtgacttctgtttgatgaagagtatcacttcattccatttttgtgtttttgttgcatctccaagtcagaatacaaaaaaaatcatgacgaaaagacacttgcttattaattggcttggaaagtagaatatangagaaacgttactgtttattttttttcatgtattcattcattctacaaatatattcgggtgccagtaggtacttggtataaggtttttggccccagagacatgggaaaaaaatgcatgccttcccagagaatgcctaatactttccttttggcttgttttcttgttaggggcatggcttantccctaaataacattgtgtgggtttaattcctactccgtatctcttctactactctgg

SEQ ID NO: 3215 - DNA, 441 bp, Homo sapiens
  unsure (176): n=A,T,C or G
  unsure (259): n=A,T,C or G
  unsure (341): n=A,T,C or G
  unsure (343): n=A,T,C or G
  unsure (390): n=A,T,C or G
  unsure (402): n=A,T,C or G
  unsure (413): n=A,T,C or G
  unsure (431): n=A,T,C or G
  unsure (434): n=A,T,C or G
  unsure (439): n=A,T,C or G
aaagagatttcagcaggctggttttaacctacgcaaagttaacaaacacataaagtttccggaaatcttagatttggctcctttttgcacccttaaatgtaagaatgttgcagaagaaaatacaagggtactctattccttatatggagttgttgaacacagtggtactatgaggncggggcattacactgcctatgccaaggcaagaaccgcaaatagtcatctctctaatcttgttcttcacggtgatattccacanggattttgaaatggaatcaaaagggcagtggtttcacatcagcgacacacatgtgcaagctgggcctacaactaaagtactnanctcacaagcgtacctcctattttatgagagaatctgtaataatatcnaaagcacttttntctggaaacanatttatggcttttataanggntgaanta

SEQ ID NO: 3216 - DNA, 242 bp, Homo sapiens
  unsure (20): n=A,T,C or G
  unsure (137): n=A,T,C or G
  unsure (174): n=A,T,C or G
  unsure (195): n=A,T,C or G
  unsure (198): n=A,T,C or G
  unsure (218): n=A,T,C or G
  unsure (230): n=A,T,C or G
  unsure (235): n=A,T,C or G
ccaaggctgtttgcatcccngggatccccgtctgctgaccagctaaacaccaatttcttcctgcttttctccacttggtttggaaaatcacacagttttcaggctccatctgtttggagaaaatacattctgaagcntccccaatttcaccttgtaaaaactcatgtgcagggnttggatataacaccacaacanaanacacttgatgctgtattatnttacatttattncatangatttgg

SEQ ID NO: 3217 - DNA, 501 bp, Homo sapiens
  unsure (341): n=A,T,C or G
  unsure (349): n=A,T,C or G
  unsure (379): n=A,T,C or G
  unsure (425): n=A,T,C or G
  unsure (463): n=A,T,C or G
  unsure (469): n=A,T,C or G
  unsure (475): n=A,T,C or G
ctggaactcaactaatcctaaacgaaaactcaagaacagcacaccagatgccacctgttgtttgtcagggtctcaaactccagaggaaatgcatttgcctgtcatggttttcctctctaagggcacctgtctgaacttggagctgtgtttccactggtgcctcatggggcctgggcctactctccacctgaattcacacttttctctataaggtatcaggtggggaataagtccaagaaggtgacaagaggctcccgagcaacagagcttgctcattcctggcaggcatctcccacaatgccccagagggctggcgaggccgggacagcataaggacaganaaagggcngaggggtgcttggaagtgctcatcactcangggagctggcaggcccgggatgacaggcagcctgaacagtgcttgnaacaaagacagccaccctgcggccccttgtcggagcanacctcngccgtnaccactgctaagggcgaatttcagca

SEQ ID NO: 3218 - DNA, 456 bp, Homo sapiens
  unsure (151): n=A,T,C or G
  unsure (235): n=A,T,C or G
  unsure (317): n=A,T,C or G
  unsure (411): n=A,T,C or G
  unsure (418): n=A,T,C or G
  unsure (443): n=A,T,C or G
aaaaatctaaagaattcaaaaataaggcattcaatatttgaaaaaagtacagatttacaaaatgtgtatattctgtcatgaaaactccacaccaacattatacacttggaaaaaaatacaaacaggatatattacaaatttatgcagcagntaacttagttcacaccatgcaataaaaagtacattaatcaagatacacaagcttttgtaggttctaaactgaaggacttttttnttttttttctgcagaatccttaaaacctgtggcacttaaaatttgttagcctttctaatgagaggtaaattatacacaacantgatgaaaaagattaacagaccagttgtctattatgaatcattccagctttgtgcaacaatggccgaaactcttttctcatattctcgtcttgntttcctnataaaactgtgctgcctggctattnggcttggctgtta

SEQ ID NO: 3219 - DNA, 272 bp, Homo sapiens
  unsure (110): n=A,T,C or G
  unsure (175): n=A,T,C or G
  unsure (177): n=A,T,C or G
  unsure (180): n=A,T,C or G
  unsure (235): n=A,T,C or G
  unsure (272): n=A,T,C or G
caattgcatacccatattttaagggacaggtgaatttactactttctaaagtttattgatacttcccttttatgtaaaatgtagtagtgatacctatatttccacattgngcattgtgacacacttgtctagggatgcctggaagtgtataaaattggactgcatttcttagagngnttntactatagatcagtgtcatgggccatctcttcctcagatgtaaatgatatctggntaagtgttatatggaataaagtggacattttacctcn

SEQ ID NO: 3220 - DNA, 354 bp, Homo sapiens
  unsure (217): n=A,T,C or G
  unsure (241): n=A,T,C or G
  unsure (250): n=A,T,C or G
  unsure (259): n=A,T,C or G
  unsure (267): n=A,T,C or G
  unsure (285): n=A,T,C or G
  unsure (287): n=A,T,C or G
  unsure (325): n=A,T,C or G
  unsure (327): n=A,T,C or G
  unsure (352): n=A,T,C or G
aaaacaaaaatgaacatttcttttacttaaattcttgtacttctaaggtacaaatgatgaccaataattttatctttcttcctttgaatatactgtaaattctatgaaaaattcatttataaaaacaaagcaaagaatagcataaattttattttctttccaatgttatatttgtaatagaagaaaaaaactccttctgataactgtaacctaaggnaacaaatattttacatataatttngaggcaaanctaatgagnttcttgantcagctggagaaattagncncattacctatgtcatgcataaatgatggtaagaagaananaggcatctgatcatgtatgacaacngc

SEQ ID NO: 3221 - DNA, 419 bp, Homo sapiens
  unsure (169): n=A,T,C or G
  unsure (179): n=A,T,C or G
  unsure (182): n=A,T,C or G
  unsure (252): n=A,T,C or G
  unsure (259): n=A,T,C or G
  unsure (343): n=A,T,C or G
  unsure (364): n=A,T,C or G
  unsure (372): n=A,T,C or G
  unsure (377): n=A,T,C or G
  unsure (400): n=A,T,C or G
  unsure (401): n=A,T,C or G
aaaatagctttaaatgcattcttcacaagtaattcagcatatatttttatatcatgtttacttatgcttaagaattaaagcaagtatatttattactctgatggaaatatgggaaatctctcattcatgcaatatacagggataatattcaagcgaagggaaaattccngctttttatnttntgtaaatgtatccatatataatcatcgacatgacagatgaggaaacccatgaagttcccctagtcagatntacattntcacttcatcagaagcacctgatatctacagctaatttataattagatactgtttcaatgaaacccaaaatgagccctacaagntcctataaacaaaagctttcnatgtctangacantcaccaattaatgcatcattcannaggattatggcttgttcc

SEQ ID NO: 3222 - DNA, 502 bp, Homo sapiens
  unsure (192): n=A,T,C or G
  unsure (251): n=A,T,C or G
  unsure (309): n=A,T,C or G
  unsure (375): n=A,T,C or G
ctgacaggttacacaatatatatcaaacaatgtgacacaaaacatagctctcctctttcgtctcacagaggaactaaagttccaaaatatatacaaaaccatcttccatctccaactgtcttctctttcttcccagttttatgcaaagcaggctcattaatacattcttcaccaggctcaaccaagtagcgnagtgtcttccattgcacctctaaagttggaagattctgatcccacgtcttgacgtgttncaaaaaacaatcaggtcacaaaggtaacagcaaaatacgaggccatgcccaacatttnaaaaacacagcgaagtaacaagaataaacgtgaccacaaaaacaacttaattaagccccatttctnttctgagagtatttctttgacaaaagggtatattttccaaaaccaaacacatttgataatctaaatccatatcgaggtcatcaatcactgaccataagggagactgttcattgggggggaaaaaaca

SEQ ID NO: 3223 - DNA, 318 bp, Homo sapiens
  unsure (316): n=A,T,C or G
aaaataaaaaagaaattaaaggtcatatactgtactactttcacaaagatcacacagttttgcaaaagacttgtcatatgtacaatgctatatatcaaatgagaaaagctgtaagcaattatatacgcaaaagaaatgcagtatttacagtttgtcaggagacattagaaatcatctatacattaaattacattttgcttgcaaataactggtaaaacaaaatgagccatgtccacaccaaaatataaaaatctgtattgcatttttatacctaagatgcattcacagaactgctgctgacaggaaagaaaaaaanaa

SEQ ID NO: 3224 - DNA, 221 bp, Homo sapiens
aaaaattacatgataaatgtaaatcataaaattgaatgtacttataaaggtacacctattttgtgctacataaaaaaactgtagactgcaaactgtgcatgcttaccataacattttacccggggtcgatgagtgggatttcttgcaaatatttactgctatgatataaaacaattatgtgcaaactgcaaggtccctaaaatagcagttaaagagtttat

SEQ ID NO: 3225 - DNA, 427 bp, Homo sapiens
  unsure (6): n=A,T,C or G
  unsure (29): n=A,T,C or G
  unsure (223): n=A,T,C or G
  unsure (265): n=A,T,C or G
  unsure (304): n=A,T,C or G
  unsure (317): n=A,T,C or G
  unsure (358): n=A,T,C or G
  unsure (374): n=A,T,C or G
  unsure (409): n=A,T,C or G
aaaggnatttgctcattggtctggcttanagacaggaagacatatgagcaataaaaaaaagattcttttgcatttaccaatttagtaaaaatttattaaaactgaataaagtgctgttcttaagtgcttgaaagacgtaaaccaaagtgcactttatctcatttatcttatggtggaaacacaggaacaaattctctaagagactgtgtttctttagttgagnaagaaacttcattgagtagcttgtgatatgttcgatactaanggaaaaactaaacagatcacctttgacatgcgttgtagnagtcgggaataangagaggggcttttttattttttcgttcatacgaatattggntgaagatgatactaantgctaaatgaaatatatctgctccaaaaggcattnatcctgacttgggagatg

SEQ ID NO: 3226 - DNA, 275 bp, Homo sapiens
  unsure (29): n=A,T,C or G
aaactgggctctgtgattccagagtttanaatgtagaaatgaaatgcttagctttaccttttcttggggggtgtggaccctgccagaaatgtaattacgtatgctcaagtgcattaattgaaggcactgtgcacaccattggactgctgaccacagttaaacatttccagtaaaatttcgtaactggtcacagctcattcataatcactgtattttttgaccctgataaagacaattattttgatggtgttctggtactgtaattggtatccttt

SEQ ID NO: 3227 - DNA, 295 bp, Homo sapiens
ccaaaaaaatcaagatttaatttttttatttgtactgaaaaactaatcataactgttaattctcagccatctttgaagcttgaaagaagagtctttggtattttgtaaacgttagcagactttcctgccagtgtcagaaaatcctatttatgaatcctgtcggtattccttggtatctgaaaaaaataccaaatagtaccatacatgagttatttctaagtttgaaaaataaaaagaaattgcatcacactaattacaaaatacaagttctggaaaaaatatttttcttcatttt

SEQ ID NO: 3228 - DNA, 147 bp, Homo sapiens
  unsure (29): n=A,T,C or G
  unsure (103): n=A,T,C or G
  unsure (142): n=A,T,C or G
  unsure (144): n=A,T,C or G
atagcatggcatctgtgaaatatggctgnttgttacatacagtgattctgcagacatgttgacatgacagtgaaatacataaatatgtaatgagaaaaggctnaactgtggataaaacaaagtcattacaattaaagactcnangtt

SEQ ID NO: 3229 - DNA, 434 bp, Homo sapiens
  unsure (307): n=A,T,C or G
  unsure (322): n=A,T,C or G
  unsure (323): n=A,T,C or G
  unsure (324): n=A,T,C or G
  unsure (342): n=A,T,C or G
  unsure (356): n=A,T,C or G
  unsure (379): n=A,T,C or G
  unsure (383): n=A,T,C or G
  unsure (384): n=A,T,C or G
  unsure (400): n=A,T,C or G
  unsure (431): n=A,T,C or G
  unsure (434): n=A,T,C or G
tcagtttgttaatataacacctctagtagaaagcaagcaatagttaaggtggcaggaaggcaatctactttcaaggcttttattaaagtttagaaatgatcagtggtcttcagaagattataaatttcagtctaaactgaaatgcgtttttaattttctgaataagtaacttccagtttacgatgaaaataagtgatcagtttctctgaccaaagaaagaggccattgcatgtgattggactgacctcttcctgtggtgactagaaagtgctaaaagaatattctttagtattttctctcatactanggggttaatatggannntgtttgaaattgcaaatngaataattgtccangttttttttataccttgctaaantaanntcctcttttaatctantgatagatacagtgatcgccagtgatgacanctn

SEQ ID NO: 3230 - DNA, 259 bp, Homo sapiens
  unsure (86): n=A,T,C or G
  unsure (112): n=A,T,C or G
  unsure (141): n=A,T,C or G
  unsure (181): n=A,T,C or G
  unsure (191): n=A,T,C or G
  unsure (194): n=A,T,C or G
  unsure (209): n=A,T,C or G
  unsure (215): n=A,T,C or G
  unsure (219): n=A,T,C or G
  unsure (229): n=A,T,C or G
  unsure (239): n=A,T,C or G
  unsure (253): n=A,T,C or G
gtcacattcagcattatccaggcatcaggcaacatctgtctagtgttgtcttcatcaagaacagactatatactaattcccactanaagctgtccatgccatacagaagatntattaaaaatgttttaaatggaaaatgtnctctagaccacaggactaatgtaaattaatatacacgtcnttcattattngtngaagctgatagaatncttgangtgnaaacttgcgnctgaatgttntatttgttctttanctgaag

SEQ ID NO: 3231 - DNA, 506 bp, Homo sapiens
  unsure (390): n=A,T,C or G
  unsure (475): n=A,T,C or G
ctgcctatattcaatgccagtttgaagatctgaacagaagaaaagataccaaggagatctatactcacttcacctgtgccacagacacgaagaatgtgcagtttgtttttgatgctgttacagatgtcatcattaaaaacaacttaaaggaatgtggactttattgagaagcatggatgttagtgaaagttactacagtgtggagtgttgagaccagacaccttttgctgtctcatggggcagctacaagcatgaacgggaccagggaatggcagcagcatgcagaatcttagcactctttagcacaatattttgtattagggaacttttaattgacatgagatgctaaagtcagacattggaattggaagaactataaagtgtgattcnatcgtcaagacatcacttggatttcttaatcttaaatgcttatggaagatgtgaagttgaggtgctgcattctagaacttcaatntgtagcttactctttttttcccccctttctt

SEQ ID NO: 3232 - DNA, 332 bp, Homo sapiens
  unsure (317): n=A,T,C or G
aaatagaaaacagtatattgaaagtggtgggtttgatctttttatttagaaacccacaaaatcagaaacacagtacaaataaaacagaaatcaaactataagttgacttttagttcctaaaaagaaacatatttcaaaagcaatggaatctagaattcttataacatgaataacaaaatgtacagcaagcctatgtagttcaattaatatataaggaaaaggaaggtctttcttcatgatacaagcattataaagtttttactgtagtagtcaattaatggatatttccttgttaataaaattttgtgtcataattnacaaattagttcttt

SEQ ID NO: 3233 - DNA, 508 bp, Homo sapiens
  unsure (418): n=A,T,C or G
  unsure (432): n=A,T,C or G
  unsure (450): n=A,T,C or G
  unsure (464): n=A,T,C or G
  unsure (467): n=A,T,C or G
  unsure (481): n=A,T,C or G
aaatagtttcaggaataaaaagtacaaaagaagactggttaaaatttgttgctacaaagaaaaggacacagaaagacggccaagagagagataatgttaattcaagactctcgaagagaagcttcagtgcagatggatttgagatgctacaaaacccagtaaaagattcaaaagaaatgtttcaaacctacaaacagatgtacctggagaagagaagcagaagccttggtagcagtcctgtaaaataattacaagatgtggttttgtaattgccactgggaaatttctttccttttctgttcaaaatatttcgctgaaactaatgagaaatgccatgataaagatttctcagagtttggttcccactttcattgtatttcattgaaagggcttaattaaagatggcttgagaactttnggtagccatgtgtnagaaatggatggtattcnccgggggaaacaangtntttgaatttctacnttattgaaccagattcccattgtttta

SEQ ID NO: 3234 - DNA, 147 bp, Homo sapiens
  unsure (76): n=A,T,C or G
  unsure (128): n=A,T,C or G
  unsure (145): n=A,T,C or G
  unsure (146): n=A,T,C or G
tcagtatatgatactctgtaacatttctatttatatcggcataaatttcattttttttcttcatatgcaatgtggntatataaagcttaatgcagctcatttgctaccattcggatacttagacactntgagcaagattgtggcnnt

SEQ ID NO: 3235 - DNA, 340 bp, Homo sapiens
  unsure (217): n=A,T,C or G
  unsure (280): n=A,T,C or G
  unsure (311): n=A,T,C or G
  unsure (321): n=A,T,C or G
  unsure (323): n=A,T,C or G
  unsure (324): n=A,T,C or G
aaaatattttttattgaaatattaatgtttattacatgcaaataactattttgtatctacagtcggataatggattttttattttgtatatttattctattttgtatattgttaagtgcaataaagtttttgccttgctttattttttaatacataaaacttacattctcataacgcgattgataacttaggaagttcacaatgtattttctacttntgcaattaaatattctttagtgcttgtttattattactaaatactaattaagtactaacaagnacttaaatactaatgtattaagtatttaagnctttctaatngnntctttaacaaaaaaaa

SEQ ID NO: 3236 - DNA, 275 bp, Homo sapiens
  unsure (266): n=A,T,C or G
  unsure (268): n=A,T,C or G
aaaaatgcccaaaacacaaaaatagacttttaaggtaataatatatattactaaatatattatagtctacttataataattatatcgtcgttttcaatattacaaaaaaaggaagaaaaatacaagggaagcagacgacccaatatatataaatactataaaatcatattagaacaaataaagtcgtcataaataaagggcccattgatttatgggtggggtttggcaacggctttggctacttgcttttggagggtaatttgacnancaggatt

SEQ ID NO: 3237 - DNA, 501 bp, Homo sapiens
  unsure (220): n=A,T,C or G
  unsure (363): n=A,T,C or G
  unsure (378): n=A,T,C or G
  unsure (477): n=A,T,C or G
ggattacttgagccccagaggttgaggttgcagtgaaccatgatcacaccactgcattctagcctgggtgacagagtgagaccctctccctcctaaaaaaatccttaagaaatatattgatgcttggttcctttggtcagaattttgatttaaggtgttgggagtgtagcacagatgttggaataaacctctcaaactgattttaatatacaaacaaggncgagaaccaccaaggaagagtttttatgcataaagattcctgtactctaccctagaactaatacatctgaatctctgggaatggagtataacaatcagatttgaaaaggtttctttagtaattttaaggactgaccattttanacactgctttgttanagcaaaatgattaggtacctagtatcaacctagccatccaaccttatattaataactagggaaaataaaggggttggagcctctgtgtttctttgttgnaaaatctgctactattattaagat

SEQ ID NO: 3238 - DNA, 218 bp, Homo sapiens
  unsure (13): n=A,T,C or G
  unsure (27): n=A,T,C or G
  unsure (28): n=A,T,C or G
  unsure (61): n=A,T,C or G
  unsure (77): n=A,T,C or G
  unsure (79): n=A,T,C or G
  unsure (91): n=A,T,C or G
  unsure (99): n=A,T,C or G
  unsure (146): n=A,T,C or G
  unsure (161): n=A,T,C or G
  unsure (198): n=A,T,C or G
  unsure (208): n=A,T,C or G
ggtgggggaaganatgcaagtcatatnncaaaggatctgcacagcgcaaaatcttcttggntttttatttaacttancngtgaatgcaccntgattggnttaaagtataggttcactcccatggaaacatgcaataagatcacatngatccagaggctggntcaagtttgactgacgggaaacgggagggaaggctgntcctatcacncaatctcagc

SEQ ID NO: 3239 - DNA, 374 bp, Homo sapiens
  unsure (349): n=A,T,C or G
aaaaaaatacaagatcttatttctatcttattttttctcctcttctgaaatatatatgaggattcctctccaaacccatggtttctctaagaattttgagtcatttgtatgacctcaaataattagttttagctgacctcacataactccttataataggagacatctttaatgtctgctattaaagaaggatgaaaattcctatgaccttctccccgattatccctttggcaatatagagtcaaataataacattgaccaataggtaaacatgctttgccaagaagtagaagatatattccctagccttagtttttcctcccaatttgcatttttgtaaaaataatgntgtatccacaaaggaaataaacttt

SEQ ID NO: 3240 - DNA, 429 bp, Homo sapiens
  unsure (192): n=A,T,C or G
  unsure (226): n=A,T,C or G
  unsure (289): n=A,T,C or G
  unsure (305): n=A,T,C or G
  unsure (308): n=A,T,C or G
  unsure (327): n=A,T,C or G
  unsure (361): n=A,T,C or G
  unsure (371): n=A,T,C or G
  unsure (373): n=A,T,C or G
  unsure (388): n=A,T,C or G
  unsure (393): n=A,T,C or G
  unsure (398): n=A,T,C or G
  unsure (404): n=A,T,C or G
  unsure (417): n=A,T,C or G
ggacgacacacagtatggatcacatattgtttgacattaagcttttgccagaaaatgttgcatgtgttttacctcgacttgctaaaatcgattagcagaaaggcatggctaataatgttggtggtgaaaataaataaataagtaaacaaaatgaagattgcctgctctctctgtgcctagcctcaaagcgtncatcatacatcatacctttaagattgctatattntgggttattttcttgacaggagaaaaagatctaaagatgttttattttcatcttttttggttntcttggcatgactaanaancttaaatgttgataaaatntgactagttttgaatttacaccaagaacttctcnataaaagagntnatgaatgctccacantttcnacatnccacangagaagtcaattntcttaacattgg

SEQ ID NO: 3241 - DNA, 397 bp, Homo sapiens
  unsure (49): n=A,T,C or G
  unsure (71): n=A,T,C or G
  unsure (167): n=A,T,C or G
  unsure (177): n=A,T,C or G
  unsure (182): n=A,T,C or G
  unsure (195): n=A,T,C or G
  unsure (204): n=A,T,C or G
  unsure (231): n=A,T,C or G
  unsure (337): n=A,T,C or G
  unsure (362): n=A,T,C or G
  unsure (368): n=A,T,C or G
  unsure (389): n=A,T,C or G
  unsure (392): n=A,T,C or G
  unsure (395): n=A,T,C or G
ctgaaccctcgtgaagccattcatacaggtccctaattaaggaacaagngattatgctacctttgcacggntagggtaccgcggccgttaaacatgtgtcactgggcaggcggtgcctctaatactggtgatgctacaggtgatgtttttggtaaacaggcggggtnagattttgcncgagntccttttactttntttaacctntccttatgagcatgcctgtgttgggtngacagtgaaggtaataatgacttgttggttgattgcagatattgggctgttaattgtcagttcagtgtttgaatctgacgcaggcttatgcggaggagaatgtttncatgttacttatactagacattagnttcttntatagggtgatacgattgtgnccnatngg

SEQ ID NO: 3242 - DNA, 298 bp, Homo sapiens
  unsure (2): n=A,T,C or G
  unsure (3): n=A,T,C or G
  unsure (29): n=A,T,C or G
  unsure (37): n=A,T,C or G
  unsure (39): n=A,T,C or G
  unsure (43): n=A,T,C or G
  unsure (135): n=A,T,C or G
  unsure (160): n=A,T,C or G
  unsure (167): n=A,T,C or G
  unsure (191): n=A,T,C or G
  unsure (192): n=A,T,C or G
  unsure (239): n=A,T,C or G
  unsure (241): n=A,T,C or G
  unsure (255): n=A,T,C or G
  unsure (271): n=A,T,C or G
  unsure (278): n=A,T,C or G
  unsure (280): n=A,T,C or G
  unsure (294): n=A,T,C or G
  unsure (298): n=A,T,C or G
tnncgaggtccacttgtgtgggccctcantttcaaananagcnctaaacttgacattgggggcccaccactccaactttgctttctgaaggttttggtgtacattgagccccagaaggaaaggagagcatttgtnaggtgggggcctcccttgaccccantacgaantctatgccctgaatccccagagtnncccttgctggggcccaactggcctggggacaaacagtgtccactacntntaggactgctcggntaagtggacacacttnttgaccncntaccaggaactttngtan

SEQ ID NO: 3243 - DNA, 293 bp, Homo sapiens
  unsure (182): n=A,T,C or G
aaaaggatatttaagtgagcattttctagttcatatgaaaataaccatagtacaggatgatttctgtccacacaaaggttaaattagattgcacagttaattttcacttatatttatggtactattatgtgggtgatgcctttttcttttaagcccagtacatatattatgcctgcctaagntctgaactggggctgtatttcagtagttgtagaattattgatatttagttttgatagctaatgtttaattgtttggatctgcacagtttggtttttgcacaaaagtcattt

SEQ ID NO: 3244 - DNA, 231 bp, Homo sapiens
  unsure (208): n=A,T,C or G
  unsure (223): n=A,T,C or G
  unsure (230): n=A,T,C or G
taaataaacaacattttcagtatgaactatggtaagatttcatcattctataaggcatattatttaggaggtattccttcctatgcatttcctattttacagtaaactcagtatcaggtaaaaattaactgctaatgttcctatcaacaattcatccattcctttttatgacacttttatcttgtatacaaaaaaatacacaattttnccaaaccttgagganccccccnt

SEQ ID NO: 3245 - DNA, 209 bp, Homo sapiens
  unsure (80): n=A,T,C or G
  unsure (114): n=A,T,C or G
  unsure (170): n=A,T,C or G
  unsure (182): n=A,T,C or G
  unsure (192): n=A,T,C or G
  unsure (198): n=A,T,C or G
  unsure (201): n=A,T,C or G
ctgccctacttttcaattcagatatactagtaccttacctagaaataatgttaacctagggtgaagtcactataatctgnagcctattatttgggcatttgctacatgatgagngctgccagattgtggcaggtaaagagacaatgtaatttgcactccctatgatattngtacatttttancgaccactanttgganganattcccca

SEQ ID NO: 3246 - DNA, 241 bp, Homo sapiens
aaatgatctttacagatccctgaagttgctgtcctgtcactgtatttaagtgatggatattcaattgaattattctgcataaataattctgttcaacccagaagtatagtagtatgatgggtcagatacagtcaactgttcaataaaaatgcagatgtctgaaattattaaaatgtacttaaaagtaacaaactgtatcacacacttaggcttagaagtgttctttcaagttttttctttt

SEQ ID NO: 3247 - DNA, 268 bp, Homo sapiens
  unsure (267): n=A,T,C or G
ccatggattaatttttcctgttctggaactttatctatatgtactctaccatattcaaatcctttagcacagcacaatgtctgtaagatttattcatgttttattataatagttctgttttgttgctgaatagtattccatttgtgaatatattataatttatttgttttcctgttaatggacatttgagtttttttcatttggaggctataatgaaggaaactttgtaaatatttgtgtaccagtctttgtgtgaacagatgtttnt

SEQ ID NO: 3248 - DNA, 286 bp, Homo sapiens
  unsure (216): n=A,T,C or G
  unsure (226): n=A,T,C or G
cacagtaattgaaataatttcaaataactgtaaaggaactgaaaatcttcacagagatgaagtggggtttccattaggtgctttgaaatttgataacaaatcatcaacttccactggtcaatatatagattttgggtgtctgaggccccaagattagatgccactaatctccaaagattccctccaattatgaaatattttaatgtctacttttanagagcactanccagtatatgaccatgtgattaatttcttttccactagataaaattacctggttcaaaag

SEQ ID NO: 3249 - DNA, 101 bp, Homo sapiens
ctgagggatcatgctgatcttcaggagtttgctgcttgcatacttattcttgatggcgatgaatttagttaagttttcatttactttcaccacattcttgg

SEQ ID NO: 3250 - DNA, 330 bp, Homo sapiens; identical to SEQ ID NO: 2

SEQ ID NO: 3251 - DNA, 493 bp, Homo sapiens
ctgcgtgacgtcatgttctacctggagacacagcagaagatcaaccatctgcctgccgagacccggcaggaaatccaggagggacagatcaacatcgccatggcctcggcctcgagccctgcctcttcggggggcagtgggaagttgccctccaggaagggccgcagcaagaggggcaagtgaccttcagagcaacagacatccctgagactgttctccctgacactgtgagagtgtgctgggaccttcagctaaatgtgagggtgggccctaataagtacaagtgaggatcaagccacagttgtttggctctttcatttgctagtgtgtgatgtagtgaatgtaaagggtgctgactggagagctgatagaaaggcgctgcgttcgaaaaggtcttaagagttcactaacctcacattctaatgaccattttgccttcctgcttggtagaagccccaactctgctgtgcatttttccattgtatttatggag

SEQ ID NO: 3252 - DNA, 142 bp, Homo sapiens
ccagattacccaggaccgactccttctctcggctgaattgctcaaaggactcctctcctgccaccggggggttcacgacaatgtccatggcggcctgcccagacactggggggcacaggcgcaccgacagcagcttcaccag

SEQ ID NO: 3253 - DNA, 530 bp, Homo sapiens
  unsure (449): n=A,T,C or G
  unsure (505): n=A,T,C or G
ctgggctctgcacctagggagacggcactgtgttgggggaagcgcgtgggaagccagagtcagccttatcaaccacaacccaggatgttccttcggcacaggcatctcctgagggccccgccacaagccacccctctgcccctggcctcacattccttggaagcacaaatgagtaagatgggaagggggcccagtggacatgtacctttccagaaccttcctaggcacccctcgacctgcagggtaagggccctattcctcaacctggcactcgaggcccctcgggtctgtccttcgcccctgcctatcttacctccaacctttcttcactcaaaatcccacacttgagctacaatgaaaggccagcggctccctaaacacacggggaccgcctgcctctggcttgcacgggcttgctctcttctgccagaagagaaaactcccaagantccctcagtgccaagctccaagcatcacctttttccttggaaaggaaatcttccantttccccaaaaagggggtcaccgtg

SEQ ID NO: 3254 - DNA, 533 bp, Homo sapiens
  unsure (305): n=A,T,C or G
  unsure (443): n=A,T,C or G
  unsure (479): n=A,T,C or G
  unsure (497): n=A,T,C or G
ctgcagagtatatgaccaggtggaaagtccaacagatgccccactcacaagatagggccctccaatcagtcttctggctccctttcactcatagtaactggttgctcttcctattggtcatagataaatgacacctgcacaattctccgagtgctttcaagcaacttcgggaggcagtgactaagaccctttccttgctcccagcttcctatgtcccagggctgcctgtggcacctggactgctgctgcccctgggtcccgtacattccagggcaacaatggaggaagggcaggcaacgcatgangaattaacagtctttattgggctcagaccaggagtccgtgggtcttgaggacctctgtgtatttgtcaattttcttctccacgttcttctcggcctgtttcccgtagcctcatgagctgtttcttctttccggtagtnggatcttgggctttctctttcctcttctccttccanggtggctgacactggctnggacttcccagccaaccctcgtgaagccaggccccc

SEQ ID NO: 3255 - DNA, 187 bp, Homo sapiens
  unsure (66): n=A,T,C or G
  unsure (85): n=A,T,C or G
  unsure (92): n=A,T,C or G
  unsure (113): n=A,T,C or G
  unsure (121): n=A,T,C or G
  unsure (148): n=A,T,C or G
  unsure (156): n=A,T,C or G
ccatggctgatattttgactacaacctcatgagagactgagccacaacaacctaactaagaaactnctgaattccctaccaacanaaacttntgagataatgttctgttgttntaactaanttttcaagccggcaatttgttatacanaatatgtnactaataaagcatggctcctttaggtcttct

SEQ ID NO: 3256 - DNA, 314 bp, Homo sapiens
ccactcctccatttagtcgtcaggagaaattctatgctacattagttaggtacgttggggatcgcaaaaacccagtctgtcgagaaatgtccatggcgcttttatcgaaccttgcccaaggggacgcactagcagcagggccatagctgtgcagaaaggaagcattggaaacttgataagcttcctagaggatggggtcacgatggcccagtaccagcagagccagcacaacctcatgcacatgcagcccccgcccctggaaccacctagcgtagacatgatgtgcagggcggccaaggctttgctagccatgg

SEQ ID NO: 3257 - DNA, 235 bp, Homo sapiens
ctgaccatgactgaagttccagctttactttttataaacttgaatgataaagaatagaccatgggctactactgggcattagtgcaatataacagcgataataaaattctctattagtctgttaatttatgacatgatctcggaatggaaaaagatcatttcagagtgtgcgaaataatagtctttaaccatgtaattaaatatgtgtgtttattgtcaaataaggatttgtttt

SEQ ID NO: 3258 - DNA, 194 bp, Homo sapiens
ctgagaaggctgcaagtgacgagaaagattctgtttcaaatatagccacagaaataaaggatggacaacaatctgggagacataattttgcaaagcagatttaatgtcatgttcagccaagatagacaagaacttctcttccccgaataaatcagcgggggactctttgaagctgcacattctgattcagcagg

SEQ ID NO: 3259 - DNA, 230 bp, Homo sapiens
ctgaggtctgccagatcatcgatgaaatcaaacaactgactgatgtcatatgtgatagagggactgttgggattcattcttttcagatgttcttcatacattttacaaacaccttccatgcattcattcacagattcgtagtcagcataagttctgcctcctggcctcttggtaggctgtaccagcaaaatggtgtgagacatcgcgccaaactctcttcgctacagcag

SEQ ID NO: 3260 - DNA, 406 bp, Homo sapiens; identical to SEQ ID NO: 1

SEQ ID NO: 3261 - DNA, 486 bp, Homo sapiens
  unsure (486): n=A,T,C or G
cctgaaagaagggtactagtccagaggtggctagatgggattgggtctctaagggagaactcctgctctcaggcccaaccctccacctcccccccgaaaacccttaccagagcctggggaccaggtttgtgttgtccacatattctccccacatacaagcctctccaccaatcaccagagccttctgctcaggggtaccttcaaatgccaggggttccactacgtagaaatccttccagtcagggccataggatatacggttcaggtaccagggggcagagagaagggcccggaagccggccttggtgaccagttccagctccttcatatagttcactggaatatcctctcgccacacctgtatgattgtgtctggctgaatctttactttattatcaaacacctcctgccacaccacatagcccttgccataagaaagagacgaatgtccagcagcgtctggatgtagaaggactccagacctcn

SEQ ID NO: 3262 - DNA, 227 bp, Homo sapiens
cctggcattcaaggctctctgagatctgggctacccacccatgtcctccagccgtctgtcgcacctcctactgcccactcactgttcctggcatgagatgtgatctccagcccccatgcctttgctgtgcagggtgttccagagtgaattgtccctcctgtctgtctctctgccctcttcctcgtctttccatcttcctgccccacatcactgcctcctacccaagg

SEQ ID NO: 3263 - DNA, 182 bp, Homo sapiens
aaagctttttaccacaatggagttgatgcgttggtccacacttgttgaggactatggaatggaattaagaaaaggttcccttgagagtcctgcaacggatgtttttggttctacagaggaaggtgaaaaaaggtggaaagacttgaagaacagagttgttgaacataatattagaataatgg

SEQ ID NO: 3264 - DNA, 269 bp, Homo sapiens; identical to SEQ ID NO: 4

SEQ ID NO: 3265 - DNA, 197 bp, Homo sapiens; identical to SEQ ID NO: 532

SEQ ID NO: 3266 - DNA, 279 bp, Homo sapiens
ctgcctctcatgtacttgtctgttgggggcttgtgttgatcaggagtgaattcacagtctaccatgaattggaaggttcttgagcacgtgcccctgctgctgtatatcttggcagcaaaaacattaattctctgcctgacatttgctggggtgaaaatgtatcaaagaaaaaggttggaggcaaaacaacaaaaactggaggctgaaaggaagaagcaatcagagaaaaaagataactgaagattctgccatgtaaatgtcagcttgagtggactccag

SEQ ID NO: 3267 - DNA, 389 bp, Homo sapiens
ctgtcaggggcggcgtgcctggtgatgcggcatcttaccttcatccccatctcagaatgggcagccagtctcagattcaaggaggaggaatcctgaggtgtggcgttcagtcctgaggtagatctgaggtcccctggaaattgtgttgatgctgagatggatgaggggtgctcattctctcaggtagacagtgaggagtcctggttcagccgagcctccatgtctgcatggatggttatgaccctgattgtttttggaaacagccaagctctctaggtgtactcagcaaatgcaaggtatagtgggtcctgcatacccagggtattatttgagccatggaagcaaaacagagactgcttagcctccctaagagtagttggtgggagtgg

SEQ ID NO: 3268 - DNA, 113 bp, Homo sapiens; identical to SEQ ID NO: 3
  unsure (3): n=A,T,C or G
  unsure (53): n=A,T,C or G
  unsure (68): n=A,T,C or G
  unsure (69): n=A,T,C or G

SEQ ID NO: 3269 - DNA, 492 bp, Homo sapiens
aaaagtcctaagagaaatatgtgacaggtagttactgtcagtagggatattttctacctttttttccctattgttgaagtgtcggccacaacagcttctgggcatgttacagcctcaaaatcaccacctaccaaaaagggcaaaactaaaaatccctataaaataaaaaagaaagttccacccaaatgtttagtgcatttgacaaaatattatgggtatttagcaaatgaataagaaaataaagaaaacagtgcaggaagaactatataatgttttaagatttttatattacagacctgcatctctgtacatttttcacaggatgattaccagtatctcagatagcctgagtgtgcaaaaatcttcagaataagaataccatagttgctaaatatcttttaccatgaacaataatttcttcttctctccccactccccaattataaacattttatccttcaaaatacagctctcctgagttgtacttcttgt

SEQ ID NO: 3270 - DNA, 294 bp, Homo sapiens; identical to SEQ ID NO: 280

SEQ ID NO: 3271 - DNA, 587 bp, Homo sapiens
  unsure (509): n=A,T,C or G
  unsure (543): n=A,T,C or G
ctgctgacagttctttggtggaaaagtaagttgcgtacttacccaagctgcccaaatgattatcaagccaagtttgtttttcaaaaataggttttaagatacaccaaagaaactatacaatacaaaaatttaacaatgaagttaaagtatatagcaaaagccaaatatgacaacacacatgtataatgtagaaaagaatcctttcagtcctagaaaactaaaatggggagaacttactgaagggtaacatacataaaatgagtactaatagcaaggaataatcctaaacattttcccaataaactgactaagcctcaaaaggacagcttaggaaaatgattaacatgcagtttttctttttccctagccaattcaggttctacttagataaatctggttgccaatcaatacatatataaattaatttttttctgctcaattactaccattttttctttttcccttttccctaattttctctagcaacacttttcctttggtttgatcangttgaactcaaaaggtttggtacctaaaatgaantatcaactgttatttgcaatagcaccttgggaaatgcaatccta

SEQ ID NO: 3272 - DNA, 233 bp, Homo sapiens; identical to SEQ ID NO: 620

SEQ ID NO: 3273 - DNA, 466 bp, Homo sapiens
ctggtatccttccttagtggcaaagatgaaactgagctagctgaactagacagagctctgggaattgacaaacttgttcaggggggtggattagatgtattatcagagagatttccaccacaacaagcaacgccacctttgatcatggaagaaagacccaacctttattcccagccttactcttctccttctcctactgccaatctccctagccctttccaaggcatggtcaggcaaaaaccttcactggggacgatgcctgttcaagtaacacctccccgaggtgctttttcacctggcatgggcatgcagcccaggcaaactctaaacagacctccggctgcacctaaccagcttcgacttcaactacagcagcgattacagggacaacagcagttgatacaccaaaatcggcaagctatcttaagccagtttgcagcaattgctcctgttggcatcaatatga

SEQ ID NO: 3274 - DNA, 326 bp, Homo sapiens
  unsure (261): n=A,T,C or G
  unsure (290): n=A,T,C or G
caaagctagaaccctgggaacaggctatgtgttgagggagggagaggaagaaaccaaggaccccctggtcctggcctgagcgccgctgtggatggcgcagcccttcgccagaacagggtgcaacgagcatggggagaggagagcaagtgcctcctcccccacaaccagatgcccaaggccacgtgagacacccagcggggagcccacaccccagggccccttctctggacaagtcactcccccacccacctttcaactcangcaagacagtactcacctccgctcgccanggggtggcttcttggggcttgcaggtttgggcaagg

SEQ ID NO: 3275 - DNA, 181 bp, Homo sapiens
ccttcttgaatctctagtcgtcgtcaggcttaggtcacactacccatgcactgatcagccctgccacgtgggggaggttccaaaaaatgaagcggttccaggggtgccaaggttcagagcagagtcttgagagcctgaggggcaggaggaggcaaaggtctctgaggacgaaggggtttgg

SEQ ID NO: 3276 - DNA, 546 bp, Homo sapiens
  unsure (544): n=A,T,C or G
ctgatcacttatttcatcattttgcatgttttattcactggggagggctgtgttacctgtatcagatgactgattctaaatagccttgttactgtgaaaacgaagttctatttatgattaccacatggtgtttgtttttttcttttttttccaccaaatggagcatcacagtcaatatgcttttaacagtgggagcagagaaggtagtgcttactctagtacaccaacctgatgggtcattagtttcaactggcttcagaagagtgattcttcctctaattagattttattgttgaagttccttcatatggaagatattttccatagtatttggataagctggactgtgttttaagaactcatatggatgttgaaggttgttttcagtttatctttccagggaacttctgttcagctctgatgggtctggtccttttcatgcctgagggagcagatgtgattgcctgtgattgaagccagtggagagttataaactatttttgttctaacatggatgatgcctaaactcttccctcttccacanaa

SEQ ID NO: 3277 - DNA, 461 bp, Homo sapiens
aaatattgttaaagaattctcaaaggagtaaggttaatgagcaagattaaaatggcagcagcagatccaattgcgttttctttttcataagcctaaaagcatcgcggtgtgtttcagagctgcttcctctacaaattctgcatccacattgtcatgtccttcaaaaggatacagggcttgattggaggactctatatctgtcagaatttcaatgaagtagttcagaggcagaaattctacactgaacgatgacttgttaatcatagaattccgaggctgtttcttatagttctgaagcagtcgcgtcacgtggttccgcgaaatgatgttagaactcataggatgatcccaaagtctacaaatcttctgcccaataagcggaggaagccgcacaatgatactgaatttcagtttttcatttttctctgtattatccagatctttcatgagccttatgacag

SEQ ID NO: 3278 - DNA, 569 bp, Homo sapiens
  unsure (448): n=A,T,C or G
  unsure (524): n=A,T,C or G
  unsure (538): n=A,T,C or G
  unsure (563): n=A,T,C or G
ccaggatggcctccatctcttgacctcgtgatccacccaccttccctcccaaagtactggaattacaggcattagccactgtgcccagccgaggctgtcatttttaaccggctctggatgactctgatgcagccatcctggaccttggctgtggtctggtaactggaacccagtgacgtaatcaggtgccattgggggtcatgggaaagggggatccccaaggtctgaggtggactaggaaggctttctgaagaacctgggtctgttagggcatcagccaatcaaggtacaagtaaatagaggcaaaatgagggtttgaactgtgagcagttggtcctggaaaagaaagaaaccaagagattatggggactcaatgggcttcttaagagagaataagttgaaatcaatggccagaaaccctgatggaagtggaggagaatcatctcangcaaactttttgtgtgccagtaacagaaaccctctttgtgtgatcacatgcaaagtataggatatttgcaatatanccatgggggaggantgcagggcccaagggtagattttanccagga

SEQ ID NO: 3279 - DNA, 478 bp, Homo sapiens
  unsure (451): n=A,T,C or G
  unsure (465): n=A,T,C or G
ctgctgaacaatgacatcgttttctccaggggttgaaatccatgtccatggctgacaacccaacaaggctgggacccaaattcgtacagagatgaggcagagtggagagaaacaactctggctgagccagagtctccagccactacttcttattcctgggctttagctcttcggctgcattacgcaggaaaatgtaattttttttctggggattataaaattcatgtccctttgaccagtcgtagctggaagcgtatgcaaatatgtttccattgtgattgaaacagcaagctgagatgggctgatctaactgttccgaagtttttagttttgttctggcatctttgtcccagaagctgaatctaccatcagatcccacagttgcaagggtgccatgaacaggatggaacgcgattccatttaccgcataaatgtcctgaggagctgaagngttggttccattanatcgatgacattt

SEQ ID NO: 3280 - DNA, 184 bp, Homo sapiens
ctgcacagtagtatctccctgcatcactctccttcacggtgagaacatgcagctctgccaacagggaacgctgggtctttctacccaggcttcttactcttccttctttgtgccaggagaatgtgacagtccctgaaccctgggctactgagcaaataaggaccatattttctccttcaatcag

SEQ ID NO: 3281 - DNA, 364 bp, Homo sapiens
tgaaattagtacagacttacttttttattttaaaatttttgctataacatttctgagccaaaggcagagggtatccattaacttcattgttgccttaattgaggggtgggtggcaatgccaagggtgggaacacaaggaagaaagaaatattaacgtcagctaagaaatcaacatgttatcaggctatactgtagttggttgcttctgtgttactggacatgacaaatgatctggtaaatgatgttaaattggcttgaaacaagagagtctcccaattcttagccacggtttcagtcagcccttccattccaggatgggattcacaagggcccttggtgtctggaagcaccaactgaacgcagg

SEQ ID NO: 3282 - DNA, 372 bp, Homo sapiens; identical to SEQ ID NO: 5
  unsure (6): n=A,T,C or G
  unsure (9): n=A,T,C or G
  unsure (22): n=A,T,C or G
  unsure (249): n=A,T,C or G
  unsure (364): n=A,T,C or G

SEQ ID NO: 3283 - DNA, 245 bp, Homo sapiens
ccaggccgaagctcactgtcccccacccattggaggttcctccctgatctgtctgcacatgggaaggagcagagcgcgcagggagaccgggctgtacaacaggaacatgctggctggacagtctcttgctggagggaatcagtagcactcacgtgaaccacctgcgctgcctccacgagttcgtcaagtctcagacaacctactacgcacagtgctaccgccacatgctggacttgcagaagcag

SEQ ID NO: 3284 - DNA, 251 bp, Homo sapiens
ccactcagcacatttcatggaggtcatgtcttttcactgatacttttttgatagtttttatataacaaaatccttattctatttataacttaagatgataaggcactataaattaatgacctaaaataatatatttgtctgttatcttttgctatttctacttcactttaatttttagctgtaaaattggtaaatggattcttacaactatctctttccatttcttactatttagttttcaaatttcattt

SEQ ID NO: 3285 - DNA, 224 bp, Homo sapiens
aaatgagcaataactcagatatattagagagaaatcaccgcttgccttacaaataccaaataaattccctagactcccctcccctgtagagaccatcagctcactgtgaaggcttgagcctcagtaggtaaaatttgaggaaaaaaatgagaaatggctaaaagaggcatctgctgcaggaaccttctgtgactgtcaaacattccctcttcaagctccctttt

SEQ ID NO: 3286 - DNA, 481 bp, Homo sapiens
aaatcacagcttttacctatttgttaggctatagtgttttgtaaacttctgtttctattcacatcttctccacttgagagagacaccaaaatccagtcagtatctaatctggcttttgttaacttccctcaggagcagacattcatataggtgatactgtatttcagtcctttcttttgaccccagaagccctagactgagaagataaaatggtcaggttgttggggaaaaaaaagtgccaggctctctagagaaaaatgtgaagagatgctccaggccaatgagaagaattagacaagaaatacacagatgtgccagacttctgagaagcacctgccagcaacagcttccttctttgagcttaggtgagcaggattctggggtttgggatttctagtgatggttatggaaagggtgactgtgcctgggacaaagcgaggtcccaaggggacagcctgaactccctgctcatagtaagtgg

SEQ ID NO: 3287 - DNA, 469 bp, Homo sapiens
ctgtgttgctcaagttgagctttgaagcaccgatccccaaagaaaatccagttccccccgaagcaagagtcgctgttccaaaagtgaagcctgtcgtctgtgtggccggagtctgggtggcaagtgagaacaggccggtggaaggggtacttgtggctggttggaagggagccccaaaattaaaccctccagtgccagaggtggagaaagaaaaccctgtagcaggtgtggttgttgccgtctttgcagtgccaaacgtgaacccgcctgtaggggccccagtgcctccaaaattaaacccgctcatggctccggactctggtggcggcagctactctggctcccaaagcaaatccgtcggtgtctgcagccttgggaagatttcgctcagtatcaggattcctccaccttctctggaccttgattcagtctcctaactgccacagaagggatgaaggttgaactccag

SEQ ID NO: 3288 - DNA, 502 bp, Homo sapiens
ctgaaaagctagattaaaaaaaaatcaatcaagtttcccaaagtataatgtttggaccttcaaaatatttagttctagggaaagatacaagtcagaagcacacacagtgacaagatatgccttgaaaacatgtctactgtgtagtatgataatcgatacaccaagtgcttacgttctgtttagacttcaaagtctgatcaaccatgaagtcaaaggtgtattacagaaacgagatgtaaaaatgaacaaatcccttctgccctttttccttttgggaaaactgacctcataggctcgttcctcaacaaacactgacatgaagacttacctgttggcctctcaattacatctgatgtcccaaacccactgagagtaaaacttggaactgttttcattaaaaaattcactttacagtagatctcaagatggacaaagataaataaggaaagaaacaagaaaaatgtaaagagggaaacaggcagatatttcagccaattagttt

SEQ ID NO: 3289 - DNA, 305 bp, Homo sapiens
aaagatttttctctaataaaagtacagaggaaattgaaagcaggatcagatagatgaatcaaggcttcttcagattcagtggtttacaaatatacctcaaaattcataaacaaaaataatacgtaaaagagaacagaaggtaacgcaataaaggtaacagagatagtgtcttcagtatataaagagatctgaaaaatttaagaaaacactagcaatgcaaagaaaaaacagacaaaagatttggaattcacgggaaaaaaagaaatggtcagtaaaaatgcaaaactgtttaagcattatatttt

SEQ ID NO: 3290 - DNA, 348 bp, Homo sapiens
ccacggagtgatgagttgtgtgcttgtccctggcagtggcaggctgtgtcctatggacatcttggcaggacatggaatttggcctcatgacaggcccaactagggataggaaggaaaatgaagagagccagtatttccccttctccagaagcaggtactcagctttctgggaaaagcgtgcctccagccgtggggacaggccatcctactgactacctcttgcttggcatgaaataaactgctatcctccccttggaatctaccgccactctacatcctactgctttggcctccctctcctctcaccagatggcatgtggtgtggcacctgtggctggacacaggagg

SEQ ID NO: 3291 - DNA, 373 bp, Homo sapiens; identical to SEQ ID NO: 6

SEQ ID NO: 3292 - DNA, 117 bp, Homo sapiens
ctgggctgctcccgccccagcccggcccagggtgaaggaagaggcacgtgctcctcagagcagccggagggaggggggaggtcggaggtcgtggaggtggtttgtgtatcttactgg

SEQ ID NO: 3293 - DNA, 464 bp, Homo sapiens
ctgcaggtctgacaggttctgctccagggccatgggcccagactccaggccacagcccagccgggccttccactgtttcatgaaccccaacagcaggtttaggtgggaggtctgggaggtgacctcatgctcttgcacagactgtgggcttcccttgaaggagcagccgacacctgcaaaggggcacccaattccagcctcagccacctcggggtgagccttctcctgagttcgaagacggcttcctgggcttatagactggaggtcttcccctctgcatttggggcagatctgatcctcgccattcctcgggttctcagagagacagcctgcacagcagagagccctgggctcctttgggtcctggcagacggtgggagggcacccaaagggaaactcattctcatcaggggccgggcgaggactgctgcctgagctggagccatctcagggttccaggctgg

SEQ ID NO: 3294 - DNA, 299 bp, Homo sapiens
ctgagggatttccacatttcgaggcagggagcagacaaaggccataagcagtgcaatcagccgcctctgccctgaggagccatcctggaatggctggaatctgctcgggaagctgttttcaggcagaaaggacacgttgccatccaagaagaggggcacaatgtgtgtcacactctgggcagctaactcagggctcaggggggttgtagcagtgccaatgacagacaccatggcagccaacacctcatcctccaatagtacttttctcagaactgagggctccttctctggcatagagg

SEQ ID NO: 3295 - DNA, 169 bp, Homo sapiens
ccagcgcctggcgtcttgtagtgatgaccgtactgtgcgtatctggcgtcagtatctaccaggcaatgaacaaggggtggcatgcagcggctctgaccccagttggaaatgtatctgtactttgtccggcttccactcaaggaccatttatgacattgcttggtgtcag

SEQ ID NO: 3296 - DNA, 147 bp, Homo sapiens
aaagtcaaaccactaggaaaatatatcacagcctggaaacagcaaacggacaggctatattataatttcaagtaataagttggtgaaaattcaacgaagttgctatcgaaacaataaggtgccatgctggggcaggaacactgccag

SEQ ID NO: 3297 - DNA, 253 bp, Homo sapiens
ccttgtccaggaatacaggtaaagggttctgcgtacagaaaatgggtcccgctacattttaattttcaacagtcacacaatttttgcatcaaaatgacataaaagaatactagcacaaaaaccctaaaatgggcacctcagactgcagtccaatttacagatctctggcttacgttatcctaaggtgttaccacaaatataaccaaaatgtgagatataagcataattctttcaacagctttcggtgcctttt

SEQ ID NO: 3298 - DNA, 441 bp, Homo sapiens
aaacatcctgatgaatggagagcatatccatttcactgggcttggcttcctcaagcaaaagttcccttttctgaagaaataagaaatttgattctaccatatatttctgacatgaactttgtgcaagatttatgtgaagatctctatgaactttttaagactgacaaaggatttgacaaagccacttttgaaagtcagatgtctgtgatgaggggtcagatcttaaaccttactcaggcattgagagacgggaagagtcctttccagctagtacagataccttgtgtgattgtggaacgcagtcaaggtggaagtcagggtcggattgtccacctgagcaattcctttacccagactgtcaattgcaggaagccatttttttcctcctggtagtaaatgtcagagtaagagaaacaaactgtttagaattatcatgttttt

SEQ ID NO: 3299 - DNA, 491 bp, Homo sapiens; identical to SEQ ID NO: 282

SEQ ID NO: 3300 - DNA, 209 bp, Homo sapiens
ctggcagggagaacagcgacaaacacctagccgagagtatgtcgacttagaaagagaagcaggcaaggtatatttgaaggctcccatgattctgaatggagtctgtgttatctggaaaggctggattgatctccaaagactggatggtatgggctgtctggagtttgatgaggagcgagcccagcaggaggatgcattagcacaacagg

SEQ ID NO: 3301 - DNA, 262 bp, Homo sapiens
aaaggtaccattctggcctgagatcttctgtaaatctattcctagtctttccattaccataaatctgtaactgtaagaaaaaagcatcaaaaagagatcatcctgagaaagtaatgcttgaaactgtctatttaatttgaaacaagaaaaattacgctcaacctaacaactaagtataatgcaatctaaaccattagagaatgaatgcacgttcataattctgctattcttttgcagaaactgctcaatatttactttgcag

SEQ ID NO: 3302 - DNA, 477 bp, Homo sapiens
aaatactctcaacgttttaccaagtgattttacctccacctttactaaagtctttacctaaaacatggcagtcgctggacacaggaaagcccaccttttgtttggccttttcgaaaggtgacccatattgcacagcagaacatcacagctgtggtcccagatgagacactgacatgcgagtgaaggcctctcctcctgggccccgggctgcgcaggctcctcactctgggcggtgtttcctgtctcagaattgacacggtgaatgcttagtgtctggattttcttgtgccagtgtttacatatctgacatcgagctcctctaagaggccacgttcaagcttgtgtgtccctgacccaagatagccagtgctgctcccaggtggtacttctggtaccgtgttgagacacttgggattctcagactgtggacaggagtgtttgtcatttttcatactgttttcttaataagcgctcaag

SEQ ID NO: 3303 - DNA, 555 bp, Homo sapiens
  unsure (548): n=A,T,C or G
cctagtgggagaagattcagcaggatgtcatgacattttgagaaaaactaaatcatgctcctgaaccttctgaacgcatttgttattgaaggaaagacaccacccccaaatcctgccatcttattggggctacttttgtcagtgtctgtacccttggcatcggcatctgtgactctttatccatgacctcagtgtttcttaaccaaagttgtactcagcatttcttaaccaaagttgaattttgaaaagagtcagtccttgtttgctggaattagaatgttaatgtcctagtattattccgaactacagtattaactgcttgttgctagtggattagacagattcttttcttactgtggcttccatgttgggagcagaagcttttcatcctggtcacatgaagacagatggtattattgactggagttgaattatttttatatcttgtctggcacaatatggaaattactgaaataagacggtgtataatggaattaacacccaaaataagtagaacactggaagaatttgaatttgatatttaagtnaaaatgg

SEQ ID NO: 3304 - DNA, 158 bp, Homo sapiens
ctgccgcaccacctgcaccagcttctccagctcgtctgggcagatgtcagggcagtgagtgaagccaaagtacatcagcacccactggccccggaagtcagccttgcagcgagcccggcctctgtgatccagcaggtggaagtcgccctggcccacag

SEQ ID NO: 3305 - DNA, 457 bp, Homo sapiens; identical to SEQ ID NO: 8
  unsure (403): n=A,T,C or G
  unsure (423): n=A,T,C or G

SEQ ID NO: 3306 - DNA, 345 bp, Homo sapiens
ccttcaaggaagggaggggtctcagaaccactaaggggccttcctcactcccacttactcaggggcagaagactcagttgaagacctccaaatccagagacttggtaattaagtcaaagcctggctatgctgggagaatggcctccagaccctggcagaaaatggggtaagggctggtgaggctccccaccttccttcctctacaatctgctagaacccaaaacgagaaatgaggctttgggaaagggagcacaggaagagaaatcacacagcttccctcctcctcccacttgctctattgggctcctgcatctgttgctgggctgctagcagagaggctggcag

SEQ ID NO: 3307 - DNA, 216 bp, Homo sapiens
agcaggccctctttccatcccgtgtcggatgagctggtcaactatgtcaacaaacggaataccacgtggcaggccgggcacaacttctacaacgtggacatgggctacttgaagaggctatgtggtaccttcctgggtgggcccaagccaccccagagagttatgtttaccgaggacctgaagctgcctgcaagcttcgatgcacgggaacaatgg

SEQ ID NO: 3308 - DNA, 385 bp, Homo sapiens
ggactagagggtcctgattttgtgtctgtgcctcttcatctctctggactctgatctccttctcccttcccatctccaggccttctgtctgtcccagataaaggcgctgttctcccatcctccctaccccatcctctccaccaaatcgctcccaattttgagagccaaaggctggcgcttctgacttcaggagcgaaaggaggaggcctagtttgggccgatgtattttaaagcagagtggacagcagagagtcaatttccctttcgttgggagtgggcagtggggtggctaattgtcttcggccaaccaggggcctgttgcccaggcaactcaccagctccgcctccgctgattggctgccacggtgggagtcagccaagattt

SEQ ID NO: 3309 - DNA, 322 bp, Homo sapiens
ctgatcaagactggagacaaagtgggagccagcgaagccacgctgctgaacatgctcaacatctcccccttctcctttgggctggtcatccagcaggtgttcgacaatggcagcatctacaaccctgaagtgcttgatatcacagaggaaactctgcattctcgcttcctggagggtgtccgcaatgttgccagtgtctgtctgcagattggctacccaactgttgcatcagtaccccattctatcatcaacgggtacaaacgagtcctggccttgtctgtggagacggattacgccttcccacttgctgaaaaggtcaagg

SEQ ID NO: 3310 - DNA, 305 bp, Homo sapiens
ctgaggtgttttagtgtcagaagagggctggctgacccccctagctcaatttggtctcacaggtgagaaggtacctggctataaatatgaatactgattgaggcaggcttgatctgggactttcagggcaggcagaatgactatggcccaggtcccacaggatgtggagtttccgggctcagcatcatggtatctggggcccatgtccaagtggagtgaattctagctgggaaggtccgctcaggcacacgggaaccccggtctgcttttccacccccaccccatggagtatccaaggctggtac

SEQ ID NO: 3311 - DNA, 484 bp, Homo sapiens; identical to SEQ ID NO: 7
  unsure (429): n=A,T,C or G

SEQ ID NO: 3312 - DNA, 364 bp, Homo sapiens; identical to SEQ ID NO: 9
  unsure (17): n=A,T,C or G
  unsure (20): n=A,T,C or G
  unsure (142): n=A,T,C or G
  unsure (288): n=A,T,C or G
  unsure (311): n=A,T,C or G
  unsure (349): n=A,T,C or G
  unsure (354): n=A,T,C or G
  unsure (364): n=A,T,C or G

SEQ ID NO: 3313 - DNA, 311 bp, Homo sapiens; identical to SEQ ID NO: 621
  unsure (19): n=A,T,C or G
  unsure (67): n=A,T,C or G
  unsure (109): n=A,T,C or G

SEQ ID NO: 3314 - DNA, 187 bp, Homo sapiens
ccttccccgtcacagaaatcgactgtgcacaggacagcaagcagaacaacttactcacagtgcagctcaagcagccaagagtggcctgtgatgtggaggtagatggagtccgagagagactgtcagagcaacagtacaacagactggtggactacatcacaaagacatcttgtcacctggcccccag

SEQ ID NO: 3315 - DNA, 443 bp, Homo sapiens
ccagggtgattgaaaactcagcctcaaaacaaaaaattcactagttatgattcaacgcgttcaacagaagccatccccagcccagcttaaattataaagatagacaataactctgttccaatctgcatggtgcttctttagtaaatactgtacagattttaccatggagaactttttttttagtttttaccttttcttaattacccttattccgaatggacgaacactttctaccactgctgaccattgtaaaataccgtgtatataaatcccattgaaataatgccctggaatagaacatctcaaatgctgcttaattacagactcaggtcgattacttgtatttcatgtaatgttcctccaagttagacatctggtgcaagaccaaccgggagaccatggaattgtcaaaagtacaaactgacagtgtgtatatttaattt

SEQ ID NO: 3316 - DNA, 303 bp, Homo sapiens
  unsure (5): n=A,T,C or G
  unsure (6): n=A,T,C or G
aaatnntttatgcctcatcctctgagtgctgaaggcttgctgtaggctgtatgctgttaatgctaatcgtgataggggtttttgcctccaactgactcctacatattagcattaacagtgtatgatgcctgttactagcattcacatggaacaaattgctgccgtgggaggatgacaaagaagcatgagtcaccctgctggataaacttagacttcaggctttatcatttttcaatctgttaatcataatctggtcactgggatgttcaacccttaaactaagttttgaaagtaaggttattt

SEQ ID NO: 3317 - DNA, 148 bp, Homo sapiens
ccatcacttaggttattccaccacttgttaatctcctttctgaagtctccttctttttgtggtcttatgctatccaaccaatcagcttttataccatcaaaataactctggaccctggatttcagtgattcatattgccaaatagcag

SEQ ID NO: 3318 - DNA, 270 bp, Homo sapiens
ctgccaaaaaaaaggctaccatgcaaggtgacagagagcagttgaaatggaagaatagttcctatggaaaagttgaagggttttggtctaaggaccagtcacagtggaagaatgcatctgagaatgatgagcgcttatctaacccccagattgagtggcagaatagcacaattgacagtgaggatggggaacagtttgacaacatgactgatggagtagctgagcccatgcatggcagcttagccggagttaaactgagcagccaacagg

SEQ ID NO: 3319 - DNA, 382 bp, Homo sapiens; identical to SEQ ID NO: 10
  unsure (343): n=A,T,C or G

SEQ ID NO: 3320 - DNA, 271 bp, Homo sapiens
agaggagctcggcctgcgctgcgccacgatgtccggggagtcagccaggagcttggggaagggaagcgcgcccccggggccggtcccggagggctcgatccgcatctacagcatgaggttctgcccgtttgctgagaggacgcgtctagtcctgaaggccaagggaatcagacatgaagtcatcaatatcaacctgaaaaataagcctgagtggttctttaagaaaaatccctttggtctggtgccagttctggaaaacagtcagggtcag

SEQ ID NO: 3321 - DNA, 126 bp, Homo sapiens
aaacactttcaaatatggagattaatcaccaacttcttattttttgggccagttggattcaattttttatttaacatgatttttctctttttggtctgtttgtgagcttagttttcttgggccagg

SEQ ID NO: 3322 - DNA, 277 bp, Homo sapiens; identical to SEQ ID NO: 619
  unsure (170): n=A,T,C or G

SEQ ID NO: 3323 - DNA, 406 bp, Homo sapiens; identical to SEQ ID NO: 615
  unsure (1): n=A,T,C or G
  unsure (352): n=A,T,C or G
  unsure (354): n=A,T,C or G
  unsure (385): n=A,T,C or G
  unsure (389): n=A,T,C or G

SEQ ID NO: 3324 - DNA, 274 bp, Homo sapiens
aaaaatcgaataatcctattcaagtcaaccagtgttaaccccggtgtgcttcctgccagtctgttcctccccatgggagtcacacaaaatgaaaatctcctagaaagagaaattcctctgtcctctgacttcttcacttagtacgctgcgaccttcccatgttgttcaacatcctcaactcggagcgtcactggctggaggtggtctataaatggaattggcttaactatcccttcactgaaaggtggacatttagggagtgtccagttttcag

SEQ ID NO: 3325 - DNA, 198 bp, Homo sapiens
ctgggattatgaaggggtggcctgcccctccacatctgtgggatatctcatcagcctcgatgacttacgagccctcaaggggaagcattttctcctggaccccttgatgccggagctgctggtgtttcccgcccagacagatctgcatgaacacccactgtaccgggccggacacctcattctgcaggacagggccag

SEQ ID NO: 3326 - DNA, 413 bp, Homo sapiens
ccagaggagctgtgtgtgtggaaactcgcaggccacacgggaaattagcgactgcgtggtgctgatgcagaaagaaaaatggccgagacgcgcggagagcgggacccgcaggcgcggcggcccagggacggggacgcggccggtgagaggacgcagaatgagatcagattgacttctcagttgctgactctcaactgcttagaaaggggcagaaacgataaaaacagacacccctgtaccccacactaaagagctgtgttaatattgacggtatttgcagtgtcccttgcccacggccccatccgccacccgtgactggggcacttccctcctgccctctggccgtcagcctcttgcagcaagcatttccatgaacaccaagtcggagattcgtccacgctggtgcctgcagg

SEQ ID NO: 3327 - DNA, 438 bp, Homo sapiens
  unsure (424): n=A,T,C or G
ctgcccagcgaggtcctggtgctgggggctgccaccagggcacagggcctgtgagaggtcaggctcagcccctgctccccacctcttccccctgccccatctcaggaccagcaagcctatacctgctggccttgagggtctgatgtggcacagtgtaagagagttagtgatcctgagtctggtgtcctttccctgacagacaaccagaggtccagcttcaaaggagatacacagggggcaggggtggagtagggcatcttcttcctgtgcccaatctttcctcccgtgttttctagtttctcacaggactggggcaggggtcagtggggaggcaggtggactgccctgagcaaacttccagagaaataccaggccaattttccctttaagggatggggaaaccaaagctgggaggattgggganggtggagagctgca

SEQ ID NO: 3328 - DNA, 472 bp, Homo sapiens
  unsure (390): n=A,T,C or G
  unsure (454): n=A,T,C or G
  unsure (471): n=A,T,C or G
ccactccatcctggggacctttcttcagcacccgtattccttgtaagtctagacgccgccctttcatctctagtgcacccccaaagccttccaaaggccatgcctgttgaaattcatccaccaaagccagtatttcttctgacattttggtttcatctgaattctccatctcatcagaaccattgctctcctcaaccaccgtactttcaagtctaagggcatctgagtccctccctgaattctcaacagagaatacagggtcctcctctgttcctctctcagagggctcttcttcagcagcatccagtgactgtgagttgtcaaaatatttctgtttgtcatggctgttgtccagggttttctcatgacaattaccactgcaaacagaanaagtgatgttgtacagaaaaaggataaaaacttgcatacagcgggatcaacttcaggctgtttncacactctgggacattng

SEQ ID NO: 3329 - DNA, 465 bp, Homo sapiens; identical to SEQ ID NO: 12
  unsure (432): n=A,T,C or G
  unsure (461): n=A,T,C or G

SEQ ID NO: 3330 - DNA, 292 bp, Homo sapiens; identical to SEQ ID NO: 11
  unsure (95): n=A,T,C or G
  unsure (148): n=A,T,C or G
  unsure (184): n=A,T,C or G
  unsure (212): n=A,T,C or G
  unsure (247): n=A,T,C or G
  unsure (262): n=A,T,C or G

SEQ ID NO: 3331 - DNA, 472 bp, Homo sapiens; identical to SEQ ID NO: 283
  unsure (5): n=A,T,C or G
  unsure (6): n=A,T,C or G
  unsure (9): n=A,T,C or G
  unsure (350): n=A,T,C or G
  unsure (426): n=A,T,C or G
  unsure (454): n=A,T,C or G
  unsure (455): n=A,T,C or G

SEQ ID NO: 3332 - DNA, 235 bp, Homo sapiens
  unsure (170): n=A,T,C or G
cctatgacccccacccagataggcccaagcctgctgcctatcatgtggcagctctaccctgatggacgataccgatcctcaactccagtttctggcgcttagtgtaccacatcaagaatgacggcgtggaggacatgctttcagctgtgcagatactgatgatggcttgnagactgctctttacccaggctagctgactcggcggacacctaggcaatcacacatgcgcgtctat

SEQ ID NO: 3333 - DNA, 470 bp, Homo sapiens
gggatgtaccagatgcttatgaaactatcagatctcgtgagaactcactatcacaagaacagcatgaggagaacccatccccataatccaatcatctcccctcaggtttctcccttaacacctaggggttatagtacacagagaagtttgggtggaacacacagctaaactatatgaatgccagaggacagtatctatatttaatttcaacttcatactggagcagaatgaaaatgaagcccagtggagaagtgacattcccaagatcaccctgccagacccaggactgtttgagttgtggcccatgctacctcccacctattctcctaatgcttccatctctaagtgtatgcattatctacaggtgacactacatcattatttttatgtcttatcttatatacacctaatacattccctaggaagtagatgttagcatcatcaccagtgtgcatgttaggaggctgggg

SEQ ID NO: 3334 - DNA, 206 bp, Homo sapiens; identical to SEQ ID NO: 13

SEQ ID NO: 3335 - DNA, 394 bp, Homo sapiens
cctctgagggcacagtggtaaatgatggagggggtggactcctcacttccagacagcatcaccccacacatctgtattattgatgctgaaaattccggccctacgtccagaggatagttctcaatgaggtaaaacgcagtggcacacatgaccagtacgtgctgctggctgtgaatgttcacgcagtgggcgatccctttcaggttggagaggagatagtcgctgatgaccgggatgagctgcttggcagtgtcgtccagcaggtcgcactccagcacatagaggatgccgtgcagggctccaaccctgctgggcaggtggctgctcctgagcgtgctctccagcaggcggctgacaggctccgccacggccttgtccatcccaaggacggcag

SEQ ID NO: 3336 - DNA, 199 bp, Homo sapiens
  unsure (187): n=A,T,C or G
ctgaggcctcactactagatgcagtgctgggaccttcctcttttggagctgtcccatgtacagtggacccaagctcaggaccttcgtggagctgcttctccaacctgagaaactcaagacccatcctcccgctgtcactttggacaatggaaatctacattttcttttccctttttttttttttttnaaaaaaaaattt

SEQ ID NO: 3337 - DNA, 179 bp, Homo sapiens; identical to SEQ ID NO: 285
  unsure (5): n=A,T,C or G
  unsure (24): n=A,T,C or G

SEQ ID NO: 3338 - DNA, 239 bp, Homo sapiens
ccaactcgcatattgttagtgcaggaggggatgggaagattggcattcataagattcacagcaccttcactgtcaagtactcggctcatgaacaggaggtgaactgtgtggattgcaaagggggcatcattgtgagtggctccagggacaggacggccaaggtgtggcctttggcctcaggccggctggggcagtgcttacacaccatccagactgaagaccgagtttggtccattgtt

SEQ ID NO: 3339 - DNA, 365 bp, Homo sapiens
  unsure (357): n=A,T,C or G
  unsure (365): n=A,T,C or G
ctgctggatgtcctggaccgcgggctcatcctccagctacagggccaggacctttatgccatccgcctgtgtcagtgcaaggtgttctggagcgggccttgtgcctcagcccatgactcatgccccaaccccatccagcgggaggtcaagaccaagcttttcagcctggagcattttctcaatgagctcatcctgttccaaaagggccagaccaacaccccaccacccttcgagatcttcttctgctttggggaagaatggcctgaccgcaaaccccgagagaagaagctcattactgtacaggtggtgcctgtagcagctcgacttgctgctggagatgttctcaggggagctatnttggtcan

SEQ ID NO: 3340 - DNA, 482 bp, Homo sapiens
  unsure (425): n=A,T,C or G
  unsure (439): n=A,T,C or G
  unsure (445): n=A,T,C or G
  unsure (464): n=A,T,C or G
  unsure (472): n=A,T,C or G
cctcctgaaactacagaaagggcaaaaattgttatccgggagctattgcctaatgggttgagagaatcgataagcaaagtgcgctccagtgtggcctatgcagtgtcagccattgcccactgggactggcctgaagcttggccccaactcttcaacctgctcatggagatgttggtgagcggagacttaaatgccgtccatggagccatgcgtgtgctgacagaattcactcgtgaagtaacagacacacagatgccacttgttgctcctgtcattctcccagagatgtataagatcttcaccatggctgaggtggtatggtattcgaacccgttcccgaccgtggagatttttacccttgtgtccatatgatcttgtaacatgggaggagctgggaaaagggtgcaggccaaagtccttgatcntttccccgtgggtncagcanttttcacaaaaggacctcnggccgcgnaccacccttt

SEQ ID NO: 3341 - DNA, 349 bp, Homo sapiens; identical to SEQ ID NO: 284
  unsure (272): n=A,T,C or G
  unsure (331): n=A,T,C or G

SEQ ID NO: 3342 - DNA, 378 bp, Homo sapiens; identical to SEQ ID NO: 14
  unsure (320): n=A,T,C or G

SEQ ID NO: 3343 - DNA, 303 bp, Homo sapiens
  unsure (276): n=A,T,C or G
  unsure (294): n=A,T,C or G
ccttcctaaaaaatagtggtgagctggaggctacttccgccttcttagcgtctggtcagagagctgatggatatcccatttggtcccgacaagatgacatagatttgcaaaaagatgatgaggataccagagaggcattggtcaaaaaatttggtgctcagaatgtagctcggaggattgaatttcgaaagaaataattggcaagataatgagaaaagaaaaaagcatggtaggtgaggtggttaaaaaaaattgtgaccaatgaactttagagangtctgccttggactggcncttatttct

SEQ ID NO: 3344 - DNA, 352 bp, Homo sapiens
  unsure (92): n=A,T,C or G
  unsure (187): n=A,T,C or G
  unsure (235): n=A,T,C or G
  unsure (242): n=A,T,C or G
  unsure (318): n=A,T,C or G
  unsure (329): n=A,T,C or G
ccagcccagagcacaagaaagcaaccaacaaattctggtgggagaacaaagctgaggtccagatgaaagagaagtttctggtcactccccangattatgcgcgattcaagaaatccatggtgaaaggtttggattcctatgaagaaaaggaggataaagtgatcaaggagatggcagctcacatccngtgaggtggagcagagcccgacaggaggtggttcggtctgtcttagangcctcangcagtgccagacccagaagagggctcttcagcacctagaagcttggaaagggatgaacagcccaagtagcttccanctttacagcancccctcaaaatttggaccctgcc

SEQ ID NO: 3345 - DNA, 170 bp, Homo sapiens; identical to SEQ ID NO: 15

SEQ ID NO: 3346 - DNA, 358 bp, Homo sapiens
  unsure (122): n=A,T,C or G
  unsure (215): n=A,T,C or G
  unsure (216): n=A,T,C or G
  unsure (298): n=A,T,C or G
  unsure (319): n=A,T,C or G
  unsure (345): n=A,T,C or G
cgaggtctgatggcgtcatccggctgtttgacatgcagcagcatgagtgcgcgatgagctggagggcccactacggggagggtctactctgtggagttcagctatgatgagaacaccgtgtncagcatccggcgaggacgggaagttcatccagtggaacatccaccaagagtggcctcaaggtattccgagtacagcctcccctcagatgccanngggcccctttgtgctgtctggatacaagcggctacaaccaggttcaagtccccaggggcccgactcttcgctttttgacttnggaggggaaattacattgctngacatgttctttgccaccaggcgggngttaatcttacaa

SEQ ID NO: 3347 - DNA, 473 bp, Homo sapiens
  unsure (372): n=A,T,C or G
  unsure (469): n=A,T,C or G
ctccacatgaattgagtgttcatttacctcagtattaccgtgttcatttttgtcctcgtgctacagttagctccctgccgcctcttgcaggtcttacttcagctcttgcctgtgacccacacagcttctgggctctgcctctgctctaagaagtgctgtgggggtagagaaccaggaaggacatgctgttgggaatgtacacctgggcagaggtggccctgttaagatgtgactgtagccacagccagggatgggatccctgggtctctggaatctgaaacctcaacaaataccagtcttgacccctagcagcagagataagaataaaggggttggtttgctattaagtcagatgggggctctctccttgtnatgctgtccctgtgggtaacagacagggaattgaccatcttactgttgtaccaggtagctggggggggttggataatcccattgaagctgggacagncctt

SEQ ID NO: 3348 - DNA, 179 bp, Homo sapiens
ctgtcccagatcggctgcctgccagggaaagggagatggatgtcatcaggaatttcttgagggaacacatctgtgggaaaaaagctggaagcctttacctttctggtgctcctggaactggaaaaactgcctgcttaagccggattctgcaagacctcaagaaggaactgaaaggcttt

SEQ ID NO: 3349 - DNA, 299 bp, Homo sapiens
  unsure (88): n=A,T,C or G
  unsure (138): n=A,T,C or G
  unsure (149): n=A,T,C or G
  unsure (165): n=A,T,C or G
  unsure (192): n=A,T,C or G
  unsure (249): n=A,T,C or G
  unsure (279): n=A,T,C or G
  unsure (286): n=A,T,C or G
  unsure (288): n=A,T,C or G
gttggatttgcaaacctccccaatcaagttcaccgaaaatcagtgaaaaaaggttttgagttcacactgatggtggtcggtgaatcanggtctaggaaaatcgactctcataaacagcctattcctacctgatctgtncccagaaagangtcatacctgggacancaggtaaaaacattcttatgttactgnaagtgtaattctacatgaaagatgcttgaagactgcctaattaatattttatgtctnagctggtgtgttttgtttgttcttgttcanctttgancncaaggaaaaac

SEQ ID NO: 3350 - DNA, 308 bp, Homo sapiens
aaatgattctttatttcaataaactttaacaaacaatatataatatttcttccttaaaaagctcattcaaagatcataggcagacttcttccccattgtattttagttggggagataaaggcaaaaagaggaaatgtaagctatcttacagtcattctgagaacctctggtttcatgctatactttcccagctaaaagttactaatttacgaagttcagatactgaaacttaaaaatcaagatccatatattaggatgtcctgctgtcacactggtggtggcccattgtgtcggagtctggtaaatgg

SEQ ID NO: 3351 - DNA, 466 bp, Homo sapiens
  unsure (317): n=A,T,C or G
  unsure (382): n=A,T,C or G
  unsure (399): n=A,T,C or G
  unsure (439): n=A,T,C or G
  unsure (463): n=A,T,C or G
ctgcagccccttgaacaggtgaaagctggaatagaagctcattcggaagccaaaaccagtggactcctgtgggctggattggcactgctgtccattcagggtggggcactggcctggctcacgtggtgggtgtactcctgggatatcatggagccagttacatacttcatcacatttgcaaattctatggtcttttttgcatactttatagtcactcgacaggtgagtagtttgttaggaaaatggtaagttagaacatctttgcaaagaatgtcttatctaagcaatgagcaaaaaacctttttatttactgaatnctgccatctggtttttatgagctggtaaattttttattggttttccaagactgaatgaagactcncacacagagaaattatntataaccttctttggaaaagtaattagtgtaacacacaanttcctccattgggaataaatatgnggt

SEQ ID NO: 3352 - DNA, 243 bp, Homo sapiens; identical to SEQ ID NO: 622

SEQ ID NO: 3353 - DNA, 337 bp, Homo sapiens
  unsure (256): n=A,T,C or G
cctcttccctgatggccgcgtcttcatggaagtaggagagaagactgtaaaaagcgaaaggcagcagcctggtgtgctgatccggggccacacgggaggaggagccgccccagcctgaggtcactctctgtcaactgaaagagtgccagccaggatatcttcctcttctctaaacactcgaggattgcttgcacaaacgtggaaaagcctttggcaggtctgtggtgctatttgaggtcagatgtgacgacagcanggcccatcaaggagaagaagaaaaggaaaaccaatagctcctctctctcgcagtccagctttctttacttgcttcctgatg

SEQ ID NO: 3354 - DNA, 337 bp, Homo sapiens
  unsure (235): n=A,T,C or G
  unsure (280): n=A,T,C or G
  unsure (337): n=A,T,C or G
ctgcataatgctcccacatctgtagatagagccgctctagttccattgtgtattgtttggtgttgaacagagggctagatattctttgcttccagactttgccacgaactttcttcaggtattctagatcagttcccaccttcacagctatgtcttcatattcttgtctgtttttagcaataagctcaagacaacctaagcaagtgagctgggatgctgcaactcgagaagcaanagtctctcctggcatagcaccatgggggtccctgcccaaaggacntccatccctgtggtgtgcccattacagagtgggagtgtccaagcagacatcagccan

SEQ ID NO: 3355 - DNA, 198 bp, Homo sapiens
ccagaagaaggggtaatttatatataattcaaactatatacagcataaatggaatgcagcccatcccaaactggctctgtgaaacaattggacctttatagttaaaattataacaagtgtaataatacaatagatttacatgggaagcaaaatccaagggacattttatattaagtatttactgtgctgtttcaattt

SEQ ID NO: 3356 - DNA, 201 bp, Homo sapiens
  unsure (129): n=A,T,C or G
  unsure (156): n=A,T,C or G
ctgcaagaagaatggaatgaacataatgccaaaataattaaatatataagaactaagacaaagccccatttgttttatattcctggaagaatgtgtccagctacccaaaaactaatagaagagtcacanagaaaaatgaacgctttatttgaaggnagacgcatcgaatttgcagaacaaataaataaaatggaggctagg

SEQ ID NO: 3357 - DNA, 281 bp, Homo sapiens
  unsure (245): n=A,T,C or G
aaaatattttaatcaggcagagttttatggatagagaatagaagagaaaggtagtaaatattgaacatattccaatataggaacctatctctgtttttagtacaaaatatttctgacatctgaactagaggtcaagagaataaattcatttgtatacatctgagcaacctgtctttcagatgataaagtatctagccttttctgacaccataatagttcattttgtagggaataagccattaggngtatataattgctttctagaaatggacctaatgtcc

SEQ ID NO: 3358 - DNA, 292 bp, Homo sapiens
  unsure (92): n=A,T,C or G
  unsure (198): n=A,T,C or G
  unsure (252): n=A,T,C or G
  unsure (267): n=A,T,C or G
  unsure (289): n=A,T,C or G
  unsure (292): n=A,T,C or G
ctggtggtgcctcagccatggcctggaccgttctcctcctcggcctcctctctcactgcacagactctgtgacctcctatgtgttgactcanacaccctcagtgtcagtggccccaggaaaagacggccaagattacctgtgggggaaacaatattgggagtaacaatgtacactggtattaccagaagccaggccangcccctgtcctaatcatctcttttgataacgaccggccctcagggatatctgancgattctctggcttnaattctggggacatggacctcngcn

SEQ ID NO: 3359 - DNA, 267 bp, Homo sapiens
  unsure (1): n=A,T,C or G
  unsure (3): n=A,T,C or G
ngnaaaatagactcaggatttatttattttctttttagctttatagcaattaattggctattgattggttggaatgttcaactctccatttcctcaaatacaataaaatagtttcattaaaatgtattcatgcttgaaaagaagggcgccattaaatggtttcctttctgttccactccaagggaaatgcgccgtttgtaaatcaaaaatccatcatccaaaatcacttgttcttaatgatgcttttggagaagatgagggacgtgg

SEQ ID NO: 3360 - DNA, 462 bp, Homo sapiens; identical to SEQ ID NO: 16
  unsure (194): n=A,T,C or G
  unsure (287): n=A,T,C or G
  unsure (328): n=A,T,C or G
  unsure (407): n=A,T,C or G
  unsure (431): n=A,T,C or G
  unsure (435): n=A,T,C or G

SEQ ID NO: 3361 - DNA, 235 bp, Homo sapiens
  unsure (150): n=A,T,C or G
  unsure (152): n=A,T,C or G
  unsure (172): n=A,T,C or G
  unsure (195): n=A,T,C or G
  unsure (207): n=A,T,C or G
  unsure (230): n=A,T,C or G
gtctgcatggggggccacggatcagatacttagtcctattgcttatcctcaccaaagggtgtgccacccagggccacagtcatggaagaagaccatcccggtcctcacccataggcgccaagccctgttcatgatgggatcacagggcananatcaattcattttactccanaaactaaggccccacggggtgangctcttttgggnttctaagggaaatggacctctgncccca

SEQ ID NO: 3362 - DNA, 471 bp, Homo sapiens
  unsure (1): n=A,T,C or G
nccagcaggctgcggaggtaacgctcccgaagggcggctcgtgcccgctgctcctgggattccagggattcttgagctatgggacactcctggatttcaggaacctctggcctcaagggggctctgcgtccatcaggggcaaagccacggctgaagccatcagggccccggggcagccggagcacaggcacgggaatgttcactggagtttgcattgtcttggctcctccactgccagcatcctgctgcagccacagacacttcctgcctggagtactgtagtcaactcctcactgggtccctggcttccaccttcaccccccgccgtctgcaccccaacaccctgttaatgcctgagtcagatcatatccctcttctgctcggagccctcttgtggcttctgtcttactctggatcctgccggcaccctctggtgtaccacgcttgctcttcccaccccagccacacagg

SEQ ID NO: 3363 - DNA, 179 bp, Homo sapiens
  unsure (130): n=A,T,C or G
  unsure (156): n=A,T,C or G
ccatcgtgtttgatggtaaggtttctcacaaagccgaaaatgtagctgaagatcaaaaaaatctcacaagaaggggagggagaagagattcgattctgagtctcctactcccgggttctgcgtagagaanccgactgctgctggaggtcggcaacncggccacaaccgctcagtcttcg

SEQ ID NO: 3364 - DNA, 246 bp, Homo sapiens
  unsure (1): n=A,T,C or G
ngtaaatatagtcattgatatactacaaattgtatttctctctctatgtttgcctataaaatttatttacttaatcaaaatggttgcctgatataatttcccctgcaaaagttgtcaaaagaataatgttattgccttaggcaggaactcaagcacaaagataaaaagctgtatctgagtatttgctgtattttatttgttcacatttagcctatttgaggttaacactacttcatttgacagttt

SEQ ID NO: 3365 - DNA, 383 bp, Homo sapiens
ctgagcacactgccacccagattaaaatctgggttatgtgaccaaggaaaaagaggagactggatattggataggcaactaacagtctctgccgcaccctacttaacaaactggcccagcttctgtgttcagatctgatgcttggtgcccgcagctccaaggagaccccatggttcaagctgcaattacttgctccacaggcccttaccaaggaaagtcaggttttttccctcctgaggatcctctgaccagcatcttcagattttttttcagttagaagtattcattgggcacctgttttttgtttgtttgtttgtttgtttatgaccacatcagtctttcattagaatctttgctttatctcattgcatagttgaatttct

SEQ ID NO: 3366 - DNA, 251 bp, Homo sapiens
  unsure (46): n=A,T,C or G
  unsure (58): n=A,T,C or G
gggagatgccggcaccccccaaccctggggctgttccctggctcangatggtgtctcngggctaggattatggtcaggagtccatcggggcctcaagcacctcctgggaggaatcacccaccttgcccagatccctcaccccctcccagtgccaccctacggctgagtttccactctgcaaaccctaaggcagagacataagcccacagggttggttttcacgaatgtcacaagcccatgtgtctgggcag

SEQ ID NO: 3367 - DNA, 192 bp, Homo sapiens
ccacacctgctgctgccagggcagtggagtagggcgtgccaggatgagatggggcttgggccccttttaaggccaggggaaccctcccaggccccactatgggaagccagagggaacagtgaaggagcagagagggcgcccccaaaccaaaagcccagagagcaatgtccccaccaccaagggagtggggac

SEQ ID NO: 3368 - DNA, 303 bp, Homo sapiens
  unsure (1): n=A,T,C or G
  unsure (2): n=A,T,C or G
  unsure (224): n=A,T,C or G
  unsure (250): n=A,T,C or G
  unsure (260): n=A,T,C or G
  unsure (271): n=A,T,C or G
nncaatggtgtgatgaattccttgcaggatcgctacggttcctactgatccgagctctgtgactcaggcttacgatggtgacggcaacaagaactccacagttcccaggctggggatgctttgccttgtggaagctggggaggatttgttacttcctatgtgtggtgtgtgtgtggggtggcctttgaggcgctcactcctgtgaggggaatggtcagtaccancccttgtcctctgcctgtggactganccctttattncctctcacacnaccctccgtgtgttagactcttgtccttctgt

SEQ ID NO: 3369 - DNA, 222 bp, Homo sapiens
  unsure (158): n=A,T,C or G
  unsure (176): n=A,T,C or G
  unsure (212): n=A,T,C or G
gaatcctttggtccacttctgctgactcaacccctgcccatgccaacaaaggagtactaagaaaggcaggttagcctgaatgtctaaattcaatttgttcaactttataaaagcaagcaaagctactgggggttgccccctcccaccatcattctggnccaccatttgggccacangcttagggaaatgaaggaaagtcgttttctttgaangaaatcctgg

SEQ ID NO: 3370 - DNA, 297 bp, Homo sapiens
  unsure (165): n=A,T,C or G
  unsure (180): n=A,T,C or G
  unsure (204): n=A,T,C or G
  unsure (235): n=A,T,C or G
  unsure (270): n=A,T,C or G
  unsure (290): n=A,T,C or G
caaacttgatttgagagcaagtgcaagggagagaaaagaaaaatgttaagtgtaaatgtttttattttcctaaggaagaacacttgtaactgatggttacatacttgaggctaacatggaaacatatcatgtagctaaatcccatccagttttcctaaacttgancctggagcctgctgnggagtagaaacagtcccaccaganggtatagcaactcttctggcagtgcccaganaggcagaactgaatggagttcctgggggctgcatngccaactttggacctgcccnggcgggc

SEQ ID NO: 3371 - DNA, 236 bp, Homo sapiens
  unsure (236): n=A,T,C or G
caagtcctggcctgcagccactctggtggacttggctttgggtctggggtcttagtgtcttaggcttgagggagaggggcagtgaagaggtgccctcagcctccccattaccccgcctctcctccacagaacccacatcctaggctggcctaccacaagcaagggggctcaggaggggcccacgcggatgtgagggttcatgagtgggtccaggttgggatcgctgtcagacctcn

SEQ ID NO: 3372 - DNA, 292 bp, Homo sapiens
caagtaaacacttacagtgcacacatactacacacggtgcaggagtcttgtttcctcccatgaattcttgatatgtacttaccagtaggacagcttgaatttttactaatctgggcattgtgcatactttttgggtaatatataatttcagaaataaaggtgttacatttttcaggctagaacttggtaaatatgaaaccaccaaggtggtgaattactgtatgtaatctttttcctccaaaaaataagataactggtcttacacttaggttagcattatgattctaatttt

SEQ ID NO: 3373 - DNA, 246 bp, Homo sapiens
aaaccaaagatcatgtttagaacaatgaaaaattatttgttgtatctaatacacgcctgtattgtgaaaagcttcatttagcaatgatgtaataatttttaacttctaggaaataatctgtgaatggaaagattttttaagattttgagatagtgtttagtctcatgttgggaacacatgaatgtgatgaacatagtgaatactaaagaaaacgcttcagactttcagaatgatggttcagaattt

SEQ ID NO: 3374 - DNA, 338 bp, Homo sapiens
  unsure (131): n=A,T,C or G
  unsure (134): n=A,T,C or G
  unsure (140): n=A,T,C or G
  unsure (276): n=A,T,C or G
  unsure (300): n=A,T,C or G
  unsure (323): n=A,T,C or G
ccatcctggctcctgtctcgtctggccttttgtttcctcatccctgcagtggggaccatgttccagtggggactgagggaggtggtgtgtacagtgttgtgtgcagagcctggcatggcagcgaccttcancanatggangtgctgtttggcatcacccgtttgcgtgcaagtgaccggcaggcttctgtcttctctgtaaatgaaggaggctgcaagggaagcaagggtccaggcttctgccttggacgcacaagccttggtccgcccttccttnttgaacttccccaagggctttggnaaggggtgcctgaaggggtaacnaggaatggggggcaa

SEQ ID NO: 3375 - DNA, 165 bp, Homo sapiens
  unsure (146): n=A,T,C or G
ctgcaggtcccaggagggcctgaggtcaaagctgtggaaggccctcttggtatcagggctctctccccatggcctcttccccacctctgattgctggttgtggccccataactcatcaccccttgtctccttgcttaaatgtgcanggcttaatgtggcacttga

SEQ ID NO: 3376 - DNA, 455 bp, Homo sapiens
  unsure (19): n=A,T,C or G
  unsure (224): n=A,T,C or G
  unsure (239): n=A,T,C or G
  unsure (246): n=A,T,C or G
  unsure (251): n=A,T,C or G
  unsure (300): n=A,T,C or G
  unsure (364): n=A,T,C or G
  unsure (393): n=A,T,C or G
caagtcctcccaaagacancaatgggagaagtgaccccataactgcataaaataatccctcttctttgaagctcttggcaggaatcgctcagccagcaggaaacctttaacccaatacccagaaagacagacatttggaggaagagggatcttccagattattcttccattctgccccatcctctacagagaaggaaactaagacacttttcaagaatcacaanataagttaatgatanaaagcanagtanaatcttgagtggaggagtgaaaataacattcactttgttcaaatcccanctctaccactttccaatggtgtgaacttgcacaaataactctgagtctcattttcttcatttgnaaaatggagagaacaatctccgcttcaanagattgtcttaaatggaacatgcaaagcatcctgatatcgtttacccaaccacacatagcag

SEQ ID NO: 3377 - DNA, 207 bp, Homo sapiens; identical to SEQ ID NO: 17
  unsure (201): n=A,T,C or G
  unsure (207): n=A,T,C or G

SEQ ID NO: 3378 - DNA, 237 bp, Homo sapiens
  unsure (161): n=A,T,C or G
  unsure (209): n=A,T,C or G
  unsure (226): n=A,T,C or G
caagtctgtgcgggtctggatagaggagaggtcaagggcttggactggggaccctgagctgccaaggtgtggggactccttgcagtcctggtgcagcaatggcaggaaggccagcaggggccctagttgagcaggttgccctgctcctgggcctgggtcangctgtccttgcggtgcaggtggtgaacccccatcctcttggggctgcnctgggggccgactgganctggggagtgg

SEQ ID NO: 3379 - DNA, 435 bp, Homo sapiens
  unsure (5): n=A,T,C or G
  unsure (288): n=A,T,C or G
  unsure (302): n=A,T,C or G
gcccnggcaagtaaagctcttaagttcagggtagcggtctcaaactgccaaacactaggatgaggatgtgactctgcatgtgttttggatgagaggaagcatcgtcccagtcacttttctcctcctgtgctgtcctttcaaaaacaggtctggatttcacgccctaccccaagaaaaagaactggttcagaaaacacttccccaagtttctccaacagaacactgtggctgcagggcctggtagtgtgaagggcagcaactgacatataaaaatgtacttaaaatcanagtcaaaaaatggntttaagttttaatactcttaattagctccctgctttatactgtaactccacagaagacatagggccacctaggattcacaggaaggagcagctctgattcttacatggctggctccgatgcccccacagcagg

SEQ ID NO: 3380 - DNA, 231 bp, Homo sapiens
aaaactaacttcactgttaaccaagcagttcaacatgaaagactgaatctcttatgtttaatattttcttctcttttaatcttcataactaatttttttcagataattgtataaaataaccatggtagcaaaataatgtgatcactggaaaataagcagggaaaaacatgctatgaagatactcctatctgggtgaattcttgatagctttacatttttcatctggcattt

SEQ ID NO: 3381 - DNA, 186 bp, Homo sapiens
  unsure (160): n=A,T,C or G
tccatcaccatgtcacccacaccagcagcgggaagtctgttcagccgtcccttgatccccttcacggagatgatatacaggtttttggctcctgtgttgtcagcacaattgattacagctcctaccggaagacccaaggaaatccggaatttcgcaccanaggacccaccacgtcctcgcttcgac

SEQ ID NO: 3382 - DNA, 216 bp, Homo sapiens
aaaatggtttcacctgttaaagggccaacagaactcttggttttacttttgtaattactgtacagaaaatttcaagagtgtttgagtgcttgtcatcaggtgttttccttaataagtagggatatgatcatttacaggaattatatatgaaaaaagtttttgaaatgtatttttgtgatgtgctatgttgaggggaaaccaaatatttatgatttt

SEQ ID NO: 3383 - DNA, 443 bp, Homo sapiens
  unsure (1): n=A,T,C or G
  unsure (366): n=A,T,C or G
ngtctgcattgaggtgaccccaggggacaggagttggcaccaaatggtagtgagagccctatcctcccaggagtccaagccagagcaccagggcttggcagagcctgagaacgaccagctcccggaggagtaccaacaaccgccaccctttgcccctgggtactgctagagaacaggtccaccctggctctgggactcgctgccaggggctgccacactcctgaatgccttaacatttcttccatggccccacaccatggcatccgggggtcttcgggaacccgggaaatggaataaagatgtttttggggtctgttcctgcactcacccatggggtgagctggttattttagcaacaatcaccanagtgacgctgatggtttggggcaccagctatacatcagccccagtgccagaccttctattcattattttacgcctca

SEQ ID NO: 3384 - DNA, 388 bp, Homo sapiens; identical to SEQ ID NO: 287

SEQ ID NO: 3385 - DNA, 247 bp, Homo sapiens
  unsure (46): n=A,T,C or G
  unsure (57): n=A,T,C or G
  unsure (78): n=A,T,C or G
  unsure (119): n=A,T,C or G
  unsure (125): n=A,T,C or G
  unsure (139): n=A,T,C or G
  unsure (165): n=A,T,C or G
  unsure (172): n=A,T,C or G
  unsure (188): n=A,T,C or G
  unsure (247): n=A,T,C or G
gaaaggattatgggaaagatggaagctgacccatacctatccaagntcctctaccancttcatgaaaccgagaaggangatctgatcccataggaaaggtccctgagagagcgagtgcntcagtntcgaatggacacanatctggaaaccatggatctcgaccanggtgganaggcactggctccacngcaggttctggacttggaggacctggtttttacccaagggagccactttatggacctcn

SEQ ID NO: 3386 - DNA, 146 bp, Homo sapiens
aagtccttactacgtgtcccacttcctccccgccctgctcacacctcgagtgctccccaaagtccctgactcccgtgtggcgtttatagagtctctgaagagagcagataaaatccccccatctctgtactccacctactgccagg

SEQ ID NO: 3387 - DNA, 415 bp, Homo sapiens
  unsure (1): n=A,T,C or G
ngtaaatatgatcttgggagatgtggaagaaactgtgactactatagaaattgatgaagaaacatatgaagagatatataaatcaacgaaacggaatattccaatgctctttgtccggggagatggcgttgtcctggttgcccctccactgagagttggctgaaacaaagaatttgtcctgtatggaaaacgggagactttgtacagtggcctctctaaaagtacaaaacattcataagagaaacctgcatacattttgatattaagaaataattccggggattcttccactcctgaaatgagttgatttgcagataactcacaacttcttaagctaaatggtattttcatttttctcaagctctccaataaatatgaccaccaagatccaaaaaaaaaaaaaaaaaaaaaaaaa

SEQ ID NO: 3388 - DNA, 294 bp, Homo sapiens; identical to SEQ ID NO: 18

SEQ ID NO: 3389 - DNA, 555 bp, Homo sapiens
  unsure (354): n=A,T,C or G
  unsure (453): n=A,T,C or G
  unsure (506): n=A,T,C or G
  unsure (507): n=A,T,C or G
  unsure (537): n=A,T,C or G
ctgctcgacagcatatggcaccagcccattttcaatttgctgagcatcggccaaagcctgtatgcgaaagccaaggagctggacagagtgaaggaaattcaggagcagctcttccatatcaagaagctgttgaagacctgtaggtttgctaacagtgcattaaaggagttcgagcaggtgccgggacacttgactgatgagctccacctgttctcccttgaggacctggtcaggatcaagaaagggctgctggcacccttactcaaggacattctgaaagcttcccttgcacatgtggctggctgtgagctgtgtcaaggaaagggctttatttgtgaattttgccagaatacnactgtcatcttcccatttcagacagcaacatgtagaagatgttcagcgtgcaggggcttgctttcacaaacagtgcttccagtccttcgagtgcccccngtgtgcgaggatcacacgaggagaaaacttctggaaagtgtggcctctgcaannacatgatgcccctgagtactgtgaaaaaantgttcacatgccttatga

SEQ ID NO: 3390 - DNA, 255 bp, Homo sapiens
caaagtgattccccggaatcgtgtgctgggctggtcccccttgtcagactcagtcacatgcccactcgaagtcgcactgctatggaaagtgggtgcaggtggtgggcaccctggcgtgatccgcctgcttgactggtttgagacacaggagggcttcatgctggtcctcgagcggcctttgcccgcccaggatctctttgactatatcacagagaagggcccactgggtgaaggcccaagccgctgcttctttgg

SEQ ID NO: 3391 - DNA, 396 bp, Homo sapiens
  unsure (1): n=A,T,C or G
ngtaaatgtttctgccttgtttgtatctctcttgaaagactgtatataagtacaggcacagcatatatttgagagaacatctcacaaatttcatttactataggtttctcaataatctttacatttaatcaatgagaaaagtgattcagtctcttgaattttaagttaaaaaaattaaaaagtatttccagggactcttaaagctctctcccaaagtataaaatattatgtactttcaaaatcttaagcattcacgttctttctgagaccaacgcaggatacaaacttactctcaacatagatgcttatgtgcttttgggcacacatagtcttagaacagtggtcaaacagctcacaggaccctgtactcctcttcatcctggactgtgacggtgg

SEQ ID NO: 3392 - DNA, 188 bp, Homo sapiens
  unsure (15): n=A,T,C or G
  unsure (17): n=A,T,C or G
  unsure (54): n=A,T,C or G
  unsure (81): n=A,T,C or G
  unsure (117): n=A,T,C or G
  unsure (153): n=A,T,C or G
agtctggcttttcanancagtgccagtgagaggcaccagtgtaacttgaagcangaatagtgatggctcaggtccccacangtagctcctccatacctgtgggactcaaaggctaanggcactaacttcatagggctcaaaggctggatgaanagaacaatcaatgtgttaaatgtcctttcgaccta

SEQ ID NO: 3393 - DNA, 307 bp, Homo sapiens
  unsure (1): n=A,T,C or G
  unsure (156): n=A,T,C or G
  unsure (233): n=A,T,C or G
ngtccattttttgtagaactgctcagtcatctgggggcttccaccccatgggcccacaattgcccaatcagtgggtggcagacatgggtgatgacacggaatgggtgaggcatctggggtacactgagtttcccgagtccctctttgccccccganccctggcaggcccctaagggcttgccccgcatcctccagtttgcagacaaggctgtacagatgcaactgagacacanatggggatccacatgggggggtcatggggtctttctgtctctcctcttccaacctgggggcaagtacaggcacg

SEQ ID NO: 3394 - DNA, 367 bp, Homo sapiens
ctgaaccgaaactagctacctgacgatatgaggcaaaagacaaggaagcaggactgtgagcgcgggcagtcggggtaagataggaaccaacggccggagccaaaataggaaaaaagctagaagtagatgtttcccatggactgactttcttaaatagtggttcagttgctgttggtttacatgactctgtccaacttaaatccaatagcttttccacacgtccacgttccaaatttgatgtgaaagctggtagtacacctaaggcatcctcttcaaaatcttcagaaacttctggctgagataattccatttttcttttggaaaatggaattttcctatgttttcgtttggataaacgtaattctgg

SEQ ID NO: 3395 - DNA, 467 bp, Homo sapiens
  unsure (377): n=A,T,C or G
  unsure (414): n=A,T,C or G
  unsure (438): n=A,T,C or G
  unsure (448): n=A,T,C or G
ccaaattcagtcccgatttgtggggtgtgtctgtttgtacagtagatggacagaggcattctactggagataccaaagttcccttctgtcttcagtcctgtgtaaaacctttgaaatatgccattgctgttaatgatcttggaactgaatatgtgcatcgatatgttggaaaagagccgagtggactaagattcaacaaactatttttgaatgaagatgataaaccacataatcctatggtaaatgctggagcaattgttgtgacttcactaataaagcaaggagtaaataatgctgaaaaatttgactatgtcatgcagtttttgaataagatggctggtaatgaatatgttggattcagtaatgcaacgtttcantctgaaagagaaagtggagatccaaattttgcaatangatattacttaaaagaaaaagaantgttttccanaaggccagacatggttggt

SEQ ID NO: 3396 - DNA, 342 bp, Homo sapiens; identical to SEQ ID NO: 444
  unsure (1): n=A,T,C or G
  unsure (293): n=A,T,C or G
  unsure (307): n=A,T,C or G
  unsure (321): n=A,T,C or G

SEQ ID NO: 3397 - DNA, 396 bp, Homo sapiens
  unsure (1): n=A,T,C or G
  unsure (303): n=A,T,C or G
  unsure (396): n=A,T,C or G
ngtaaaaaaaaacctaaatgatcaacagatgttgctttctatatttttcctttgttctgtttgaactgggctaagtaagcacagttagaccctgctgttcacttgaccacgtcctaaacccgggacaagtgagcactcattcatgcacagcagacccggaggcatgggctggggcagcacaactgggttcccgcagcgccctgcctgcaggctcatgctggaggccacggaaccaggcggcacagggcagattctgtttgtcaagcgccccacaagccttgcccagattgtcaagctcagcancgagaatggttttgacgaggaggatggaaacagcatctgctctggaagccgctctggcgtggggagagtggggagagggtgcccttgctgcan

SEQ ID NO: 3398 - DNA, 205 bp, Homo sapiens
  unsure (1): n=A,T,C or G
  unsure (3): n=A,T,C or G
  unsure (135): n=A,T,C or G
  unsure (191): n=A,T,C or G
ngnaaaagatgctgcttccctgttttcttccaggaacacagagaccaacacggtttcaaacacagggcgagcttctcactatttcctgggaatgttacttctcagcccaacacttctcttcccaagaagttcaanttttgagactgtttttctccccggaacagtacttaaaaaaaaaaaaatcattgatnttcaaaaatgggtt

SEQ ID NO: 3399 - DNA, 376 bp, Homo sapiens
  unsure (358): n=A,T,C or G
gtccaccacatcaccccagagaaatttctggaatctgattgagtctccactccacgagcactcagggttccccagcagctcctgtgtgttgtgtgcaggatctgtttgcccactcggcccaggaggtcagcaagtctgttcttggctgggtcaactctgcttttcccgcaacctggggttgtcgggggagcgctggcccgacgcagtggcactgctgtggctttcagggctggagctggctttgctcagaagcctcctgtctccagctctctccaggacaggcccagtcctctgaggcacggcggctctgttcaagcactttatgcggcaggggaggccgcctggctgcagtcactanacttgtagcaggacctgc

SEQ ID NO: 3400 - DNA, 339 bp, Homo sapiens
  unsure (197): n=A,T,C or G
  unsure (237): n=A,T,C or G
  unsure (318): n=A,T,C or G
  unsure (319): n=A,T,C or G
ctgcgtctgtctgaatggtgcgtgaaggctctcagaccttacacaccattttgtaagttatgttttacatgccccgtttttgagactgatctcgatgcaggtggatctccttgagatcctgatagcctgttacaggaatgaagtaaaggtcagttttttttgtattgattttcacagctttgaggaacatgcataanaaatgtagctgaagtagagggggcgtgagagaagggccangccggcaggccaaccctcctccaatggaaattcccgtgttgcttcaaactgagacagatgggacttaacaggcaatggggnncacttccccctcttcagcat

SEQ ID NO: 3401 - DNA, 385 bp, Homo sapiens
  unsure (235): n=A,T,C or G
  unsure (332): n=A,T,C or G
  unsure (340): n=A,T,C or G
  unsure (357): n=A,T,C or G
  unsure (362): n=A,T,C or G
  unsure (376): n=A,T,C or G
aacttgtctttagccttggtgctttgatccttctatattttgaccccacaggtgtggtccggtttacttaatcaggacatgggcctaagaacaaaccttttcccttcatgataacatccatagacaacttattagaagggactagagtttttgcaaatttccctgctggatggggcctatagctatacttagtatatgcctaaacatggtaattggatagtaaatggttttctanttccattgctgtatatttgcctaaatggacttgtgttcaaattatttcttcaattgtcatagataatcctgtaccaaatggggaagaattaggaaanaatcatgntggctaaagggactctngattnaggggacgaactgncatttacct

SEQ ID NO: 3402 - DNA, 272 bp, Homo sapiens
  unsure (166): n=A,T,C or G
  unsure (210): n=A,T,C or G
  unsure (216): n=A,T,C or G
gtcctccttcctccactctctcaacccctctgttgggtaacatgaaaagactgtattcctctaagatgttgggattgatatacgtgatttaatctgcaataggtggaataaccaggggaactggttatgaatatgtgaatgcaccagcaaatttatccttgaaggngtgatggtagaaataggaaaacaacaaaagaaaaacaataacanaaaaanaaagtgtgatggctgggtgcaacggctcacacctgtcatcccagcactttgggagg

SEQ ID NO: 3403 - DNA, 459 bp, Homo sapiens
  unsure (394): n=A,T,C or G
  unsure (450): n=A,T,C or G
aagtccatcgggagaagccggtccctgagacatgtggcgcttggaaggaacttcaacgtccggtgcaaggagaccctggacgacgtcctgcaccggattgtccagctcatgcaggacgacgattgtcctcttcagtctctgtcggtggctgagtctcggctgaagctgggtgccagcgtcctactccgggccctagccaccaatcctaacctgaccgcgctggatatcagcggcaacgccatgggggacgcgggcgccaagttgctggaaaacagtaacaaaaaacaccaccacacatggaaaaatccttgcaactaaacacagtggaccaacagagacaactctcacagtgtcttaaggtctgggaatctgggcatgctgcccacagcttgangagacatcttcaggtttaaggcaaagggaacagcctacaaaaagcacaaccaccanctaccccta

SEQ ID NO: 3404 - DNA, 153 bp, Homo sapiens
ccagcatcccatctgcaccgttggtcaggtcactggcagagaaccttgtgccgttagacgtggaacctgccgtcgtgatgaacacgcctccaacagttccctgagccatttctgtcacgtatggctccagagccttggggaccagacttctgg

SEQ ID NO: 3405 - DNA, 297 bp, Homo sapiens
  unsure (1): n=A,T,C or G
ngtctggcctgcagggaagggccagacggcacctctcagtggagactgaatcttccttccttcaggaggctgcctccagggaagacctggggtccttcctgcgctcagcgctggctggctgtcctgttcatgcagtggaagacattacagaagaattcatacgagaagaacatgaagcctgtggagagggcagccttcagcaagctgggggacaggcccttgaagaagcccagggcgccttccttttgcagcacctgcttggcacagtccatgaggcccttgtatctccgtacctgg

SEQ ID NO: 3406 - DNA, 477 bp, Homo sapiens
aaatcacttagtgcattaacaatgttacaaattccaataatgtcagacatatggatgatattcaaaataaagtacaaaaatacatttcaaaatcaaatataaatgactttatggttatctgccatgctcccctttaatttggcctgatagtctacatttgactgtaattataataacatctgtaatttcaagtacaatagtacaatcataataattttgaagaacgtatgacctaggaccccaaaatgcaatccaatatacaatttggagtatggtttactttttagtgaagtttaatactaattgaagtactaaattgaacaaggccagtactctgaagtactaatctcaagtatttgatcccatgtaagaaacagaagggaatttttaaggcaattttggtattccaaaatattggggatctaccttaattttctattattcccctcaagtctcaattgaatatttccatttttt

SEQ ID NO: 3407 - DNA, 197 bp, Homo sapiens; identical to SEQ ID NO: 19
  unsure (7): n=A,T,C or G
  unsure (35): n=A,T,C or G
  unsure (88): n=A,T,C or G
  unsure (94): n=A,T,C or G
  unsure (99): n=A,T,C or G
  unsure (119): n=A,T,C or G
  unsure (162): n=A,T,C or G
  unsure (171): n=A,T,C or G
  unsure (185): n=A,T,C or G

SEQ ID NO: 3408 - DNA, 252 bp, Homo sapiens
  unsure (20): n=A,T,C or G
ctgccacagactccaaaggnacacaagtttgtgccaacacacggagtcattctggctctctgctgaggcccctgttttctggcaggtgccctccttggaaactggttttggctctgatcagcggttctttttgcagcaaagcctgcatctgtgttgacttgcaagattttgcgtttattcaggcaaaaactggtcaaaatggttactacatgatttgttcccagaggtttgaaacattcagtgaaacttttt

SEQ ID NO: 3409 - DNA, 356 bp, Homo sapiens
  unsure (193): n=A,T,C or G
aggtaaaagcacagagttctataataataggaaaatagagggaatgattgctcaacttttcttgaaaaagagtcaggaaaatattgaccgagaaggcagtcattgacctgagtcttaaagaatgaataaggtttttacagatggagtagggtagggataactttccaggtataaggaagattttgtattccanggacctttgaatattttagaatggctagaaaacttggtattatgtagcacagaaaaagtggtatgactgaagagatagagaacttaccacaaagggtcttgaatgccatgatacatagtttggattttcttctgtagggagcaaggagttagtgaaggatttt

SEQ ID NO: 3410 - DNA, 387 bp, Homo sapiens; identical to SEQ ID NO: 20

SEQ ID NO: 3411 - DNA, 235 bp, Homo sapiens
  unsure (142): n=A,T,C or G
  unsure (187): n=A,T,C or G
  unsure (194): n=A,T,C or G
  unsure (218): n=A,T,C or G
ccagagttcaggaacgccgggcacagaccaaagaccgcggtccagccccgcccaggcgggcatctcatggcagtgcggacccgtggctggcagcccgggcagtcctttgcaaaggcaccccttgtcttaaaatcacttcctntgtgggaaagggggagaaacttttatatatttgtatgggactctnaggaggngcaacctgtatatatattgcttcntgcttgcttttttatcc

SEQ ID NO: 3412 - DNA, 444 bp, Homo sapiens
ctgtgtggtgcttctgtggtgaaggagctttcatcattcacccttggcacagtaagtattgggtgccctgtcagagagggaggacacaatattctctcctgtgagcaagactggcacctgtcagtccctatggatgcccctactgtagcctcagaagtcttctctgcccacatacctgtgccaaaagactccatctgtaagggatgggtaaggatttgagaactgcacatattaaatatactgagggaagactttttccctctaactctttttcccatatgtccctccccctcctctctgtgactgccccagcatactgtgtttcaacaaatcatcaagaaatgatgggctggaggctgggcatggtggctcatgtctgtaatcccagcactttgggaggccgaggcaggtggatcacttgtcaggagtttgagaccagcctgg

SEQ ID NO: 3413 - DNA, 369 bp, Homo sapiens
aaatcctcaagtgttacaacagttagatagtaaacgacagcaggtccaaatgacagttacagagaccaaccaggagtggcaggtgttgcagttgagagtgcatacttttgctgcctgtgcagttgtgagcttgcagcagcttccggagaaattaaatcctatcataaaaccattaatggagacaattaaaaaagaagagaatacactagtgcaaaactatgcagctcagtgcatagctaaactccttcagcagtgcacaacaaggacgccctgtcccaattcaaaaattattaaaaacctctgtagctcactttgtgtggacccatatctaactccttgtgtcacatgtccagtaccaacacaaagtgg

SEQ ID NO: 3414 - DNA, 290 bp, Homo sapiens; identical to SEQ ID NO: 21
  unsure (125): n=A,T,C or G
  unsure (236): n=A,T,C or G
  unsure (248): n=A,T,C or G

SEQ ID NO: 3415 - DNA, 186 bp, Homo sapiens
ctgaatgaagaaaacctctctaccaaaacagaagcagtataggaccgacaagtgtacctctgcacccaatgctggaatcaaatccaaagcttttaattctctcaacaagatgtaaacaggaaagaaatctagttgagcatgaagataggatctaacagcttttccagttgttagatgactttgtgg

SEQ ID NO: 3416 - DNA, 148 bp, Homo sapiens; identical to SEQ ID NO: 22
  unsure (46): n=A,T,C or G
  unsure (132): n=A,T,C or G
  unsure (135): n=A,T,C or G

SEQ ID NO: 3417 - DNA, 373 bp, Homo sapiens
ctgtagcttctgtgggacttccactgctcaggcgtcaggctcagatagttgctggccgcgtacttgttgttgctttgtttggagggtgtggtggtctccactcccgccttgacggggctgctatctgccttccaggccactgtcacggctcccgggtagaagtcacttatgagacacaccagtgtggccttgttggcttgaagctcctcagaggagggcgggaacagagtgaccgagggggcagccttgggctgacctaggacggccagtttggtccctccgccgaagacgacatggtcattattacgatcccacacttgacagtaatagtcggcctcatcgccggcttcgaccctgttgatggtcagggtgg

SEQ ID NO: 3418 - DNA, 148 bp, Homo sapiens
ctgtttccttcatcttctggaagaagtccttgttgcagagtccctcggttgcaggtgttaaggagcaggccacgacgatgaaatcagattgggcagccagctcaggggtagacacaaactctgcctggaattccgctgcttcctcagg

SEQ ID NO: 3419 - DNA, 533 bp, Homo sapiens
  unsure (445): n=A,T,C or G
ctgggtgtgttgccaagcgacatcaccatctcctctgcttaattctgcttccaaaataacttcagtggcaccagaaaaatcagcataggagtgaagactgttatcgcctgtcggttctacttgtgctgtatcagatcgcaatttccattctactgttccagtctgaaaagtttgactacttgttctaatagaaatgctatctacttttaggccaactgacccacactcaaacttccaggaaatataagcaaaagatgatccttcctttcgggccaaatataccatgtgccagtctgtttcaacttttctgaatatagattccattttccacacgccattctcccatccagaaatggtttgattgttatttgaaactcgaacataacgatctttcacaatattgtaacaaaggtggagctgtttagaaatcttctcattttcacanggaataaacaagggttcttttctctgtaggacccatttcaccttggggctactcttccaagccactggacccagatattcttccccca

SEQ ID NO: 3420 - DNA, 166 bp, Homo sapiens
  unsure (44): n=A,T,C or G
aaggccccatttctcctcaccacggggtcgcttgtcagctccangagccagtctggccccactgagaacttttcagtcgagggcctgatgagtcttgggaatgcgcttctgcaagagggcccaggctttctccacctggcgttgggtgatatgcggtcccacaagg

SEQ ID NO: 3421 - DNA, 152 bp, Homo sapiens
aggtctgctatttggcaatatgaatcactgaaatccagggtccagagttattttgatggtataaaagctgattggttggatagcataagaccacaaaaagaaggagacttcagaaaggagattaacaagtggtggaataacctaagtgatgg

SEQ ID NO: 3422 - DNA, 214 bp, Homo sapiens
ctggggctgctgcccacccaccctgcccaggctcctgaaggtggcctcaccttccaggtgcttgacaatgccccgcaggctgttcccgtgggctgcaatgagcactcgcttgccggccttgatctggggaacaatctcctcgttccagaagggcagggcccgggcaatggtgtccttgaggctctcgcaggtggggagttccccgggcttcagg

SEQ ID NO: 3423 - DNA, 253 bp, Homo sapiens
  unsure (61): n=A,T,C or G
  unsure (65): n=A,T,C or G
  unsure (85): n=A,T,C or G
  unsure (135): n=A,T,C or G
  unsure (140): n=A,T,C or G
  unsure (151): n=A,T,C or G
  unsure (171): n=A,T,C or G
  unsure (234): n=A,T,C or G
cctggacctgggatgaagatgaatgaagaacatggactcatgtggatgtggtttggctcanatgnccctgcaataaacaaggggncagtacttagtccctgagtgtggttgaggtttgaggtcctggtcgagcanggcantactggaccangtctacgtcagcattcaggntcaatggggacaccagtggcttcaaacttcctgatctaattatgtttttagacacttagaagntattgaggactttacctgc

SEQ ID NO: 3424 - DNA, 251 bp, Homo sapiens
aaatgaaattcgaaaaccaaatagtaagaaatggaaagagatagttgtaagaatccatttaccaattttacagctaaaaattaaagtgaagtagaaatagcaaaagataacagacaaatatattattttaggtcattaatttatagtgccttatcatcttaagttataaatagaataaggattttgttatataaaaactatcaaaaaagtatcagtgaaaagacatgacctccatgaaatgtgctgagtgg

SEQ ID NO: 3425 - DNA, 153 bp, Homo sapiens
  unsure (18): n=A,T,C or G
  unsure (70): n=A,T,C or G
  unsure (108): n=A,T,C or G
  unsure (115): n=A,T,C or G
  unsure (127): n=A,T,C or G
aagtccttggagactcangagttttgagagcaaaatgacaacacccagaaattcagtaaatgggactttnccggcagagccaatgaaaggccctattgctatgcaatntggtccnaaaccactcttnaggaggatgtcttcactggtggcccc

SEQ ID NO: 3426 - DNA, 199 bp, Homo sapiens
ctgctgagcttggagcatggcgctgtcactgtagtcgatggctgagcggtagctgctccgcaggcagaagaaccggaagacatcgggggaaaaggtcttcagaaagtccttaatagtaatgtagttctttaatgatttggacattttttcttctttgctttggcgtgcaaatgccctgaaacaaaaacaaaagcattca

SEQ ID NO: 3427 - DNA, 313 bp, Homo sapiens
  unsure (1): n=A,T,C or G
  unsure (284): n=A,T,C or G
  unsure (307): n=A,T,C or G
ncaggtaaatgattctttatttcaataaactttaacaaacaatatataatatttcttccttaaaaagctcattcaaagatcataggcagacttcttccccattgtattttagttggggagataaaggcaaaaagaggaaatgtaagctatcttacagtcattctgagaacctctggtttcatgctatactttcccagctaaaagttactaatttacgaagttcagatactgaaacttaaaaatcaagatccatatattaggatgtcctgctgcacactggtggnggcccattgtgtcggagtctggnaaatgg

SEQ ID NO: 3428 - DNA, 352 bp, Homo sapiens
cttgctgtggagctccactgccatgtacccagtagggtttgacatttcattagccatgcaacatggatatgtattgggcagcagactgtgtttcgtgaactgcagtgatgtatacatcttatagatgcaaagtattttggggtatattatcctaagggaagataaagatgatattaagaactgctgtttcacggggcccttacctgtgaccctctttgctgaagaatatttaaccccacacagcacttcaaagaagctgtcttggaagtctgtctcaagagcaccctgtcttaattctccaagcggatgctccatttcaattgctttgggacttcttcttctttggtttttt

SEQ ID NO: 3429 - DNA, 345 bp, Homo sapiens
  unsure (46): n=A,T,C or G
  unsure (230): n=A,T,C or G
  unsure (257): n=A,T,C or G
  unsure (259): n=A,T,C or G
  unsure (270): n=A,T,C or G
  unsure (292): n=A,T,C or G
  unsure (293): n=A,T,C or G
ccccgttggtccgcgcgttgctgcgttgtgaggggtgtcagctcantgcatcccaggcagctcttagtgtggagcagtgaactgtgtgtggttccttctacttggggatcatgcagagagcttcgcgtctgaagagagagctgcacatgttagccacagagccacccccaggcatcacatgttggcaagataaagaccaaatggatgacctgcgagctcaaatattaggnggagccaacacaccttatgagaaaggngnttttaagctanaaagttatcatttctgagaggnncccatttgaacctcctcagatccatttctcctccaatttatcatccaacatt

SEQ ID NO: 3430 - DNA, 462 bp, Homo sapiens
  unsure (338): n=A,T,C or G
  unsure (417): n=A,T,C or G
  unsure (435): n=A,T,C or G
  unsure (450): n=A,T,C or G
ctgaaaaactgtaaaagttacatacatacatacctaatggcactaggaatgtacaatatcaattattggaaaaataagtgagtgactcagagtcgtaagaaattatttaatattagtattttttcttttatagacaaacataacatacacatggtttctaccttctataagacaaagtagaaaactaaccgttactgcatttacctcaaacacagcactgactgtgccacagataacatggtccaaaatattcaattctatagataggccatggtattgaatgcatggttaagttttaggaaaggcatatatttcctgaagtatgtatgttaaatacncaaatatctataaataacaaaaagttaccagcaaaaatgtttaggttataacattcccaaacttcctaacattttaagngtttaagatatatgttgnctgaccagttcgttnggttacagtttt

SEQ ID NO: 3431 - DNA, 228 bp, Homo sapiens
ctgctttccggcaaagatcaacctctgctggtcaggaggaatgccttccttgtcctggatctttgctttgacgttctcgatggtgtcactgggctccacctcaagggtgatggtcttgccagtgagtgtcttcacgaagatttgcatcccacctctgagacggagcaccaggtgcagggtggactctttctggatgttgtagtcagacagggtgcgcccatcttccag

SEQ ID NO: 3432 - DNA, 429 bp, Homo sapiens
ctgagcatgctgagaaacaagctgttcggtacagatttccttttctctcagcctttccccagccttagtcttttctgtccctctgtcctatctatcccaggacccctggcttccctcatcatctgtctgtggctatctgtcccacagggcagaactgtaggactgaggatccattattgtcctgggctgacttcactaaggtaactccctgaatcctgtggagctgctggatctagcccacattccaaatactggccttcccacgtccctccttccctacaccagaggcaactcctcagcttttgctacctttccattcctcctccagcgagagagccctcctggcaagttaccattctggacatggctggacaaaattctggagttggtacatgaccacctgaaggatctctggaatgatgggtaagg

SEQ ID NO: 3433 - DNA, 375 bp, Homo sapiens
  unsure (307): n=A,T,C or G
  unsure (308): n=A,T,C or G
  unsure (375): n=A,T,C or G
aaatatgtggaagagagcataacgaacgtctaggtgtttatcacttggcttaagcattatcagtttacctattgtattcatccatggatgtttcagaaggaaccaccatgtcatcatcacatagttacttaatatcaagtcgtcagtgttggaaccattctgatcgactaataaggtgttttgttctttggttcccttttcgcagttagttcaagtcaggatacacatcaagtcttttacctgcccgggcggcctcgagccctatagtgagtcgtattagaagggcgaattccagcacactgggggnncgttactagtggatccgagctcggtaccaagcttggcgtaatcatggtcatagctgttttcccgggn

SEQ ID NO: 3434 - DNA, 404 bp, Homo sapiens
  unsure (142): n=A,T,C or G
  unsure (325): n=A,T,C or G
aaatttgtcttgtgagattttactatatctcagacagcataaatgctgttttagcactggattctttcactgagcacaaagagttgttggggctttagcatctgactgattttgttacggggttgattctgaccataggaantatgcaatgtgaatcactatttacagagaaacctacaacagatgcttgatgttgtagaaactgggacatatagataccaagcaaaattataagaaacctataaggtgttcaatacgcttgtgtttccaaaattcactgtacatgatcagtttggtgttcttgtaccacagtttttaactgaangaaccagttgtaacagtctcaattttaactaaaacttgaagaactaaaacaacaatgcaaacctttcagcattggttgg

SEQ ID NO: 3435 - DNA, 393 bp, Homo sapiens
aaactcgccagtgagactgaggacaatgataacagtttgggtgagtgaaagagcgacggtcagggataagccaggcatttggatatgtgggtgggaactgtcacaacaggagtgagaagtctctctttcctgctccaggggacatcctgcaagccagtgacaacctctcccgggtcatcaactcttacaaaacaattattgaagggcaggtcatcaatggcgaggtggctaccttaaccctgcctgactcggaaggaaacagtcagtgcagtaaccaaggcacgctcatcgaccttgcggagctggacacgaccaacagtttgtcctccgtgttggccccagcacctactccaccctcctcaggcatcccaatcctccctccaccaccccagg

SEQ ID NO: 3436 - DNA, 265 bp, Homo sapiens; identical to SEQ ID NO: 23
  unsure (92): n=A,T,C or G

SEQ ID NO: 3437 - DNA, 377 bp, Homo sapiens; identical to SEQ ID NO: 24

SEQ ID NO: 3438 - DNA, 399 bp, Homo sapiens
  unsure (397): n=A,T,C or G
aggtcatttctctcccacgcctagctacctccactccagttcagcacccagagacctcagactggatccactactggcccaagaatactgatgagaaacctagtctggattgggtcggaagctggaatttggtgctctgcagaccagtgctcaaaattgtggttatttttgaggactcgccttcaatccagaacatttgcgtttcaccttcctcgcccagatccagttaacaagcgcaccatcctgggaagtgcatgtctcagaccaactccaccttcaccttcaccacctgtcgcatcctgcatccttcagatgagctcactcgggtcacaccaagccttaactcagccccaactccagcttgtggcagcaccagccacttgaaatccacgccggngg

SEQ ID NO: 3439 - DNA, 183 bp, Homo sapiens
aaataacttacatacttttatccaggcaaaactgtctctgcttttcattaactctaattataaaataaatacagctccctattttgttttgctgttagtaattttttctgagaaaagtgttagggtacctgggtgccgctttgatgatgttgtccacacgcagaatcacctctgctgcttcag

SEQ ID NO: 3440 - DNA, 478 bp, Homo sapiens
  unsure (10): n=A,T,C or G
aaaaatgganagtctgaattttattagagctcacacaccatatattaacatatacaactgtgaaccagctaatccctctgagaaaaactccccatctacccaatactgttacagcatacaatctctgttcttggtaagtgttcttggtaagtgtgagattggatttctctccagggaggaaggatgacttgtttattatgagcatgaactctggatccagaccacctgagtttgctagttactgtctgtgtggctttgggaaagaattttaaccacactgtgcctcaatttcttcaactgtaaaatggggatggtaacactatttatctaatagggttgttctgaggaataaataagttaatatatacaaagcatttagaacagtgtttggtacacagaagtgctatataagcattggctttaacattaattattctcaacatcattaatggcattaatatttaccattatattaatg

SEQ ID NO: 3441 - DNA, 241 bp, Homo sapiens
ctgtcccctggtggcctgctgtgtggggtgggtgtggagggtgaggctgtgcagaatggtcctgccagccacagcagggccctggtggggatttgcactgggcactccaatcctggggaggatgccagggacggggatgctgaggaagtcagagagcttggtacggttgaagaaaactgagtcttgggcaatttgtgctaaaactaggtgagttgccaaacccaaggcatcttaccaacag

SEQ ID NO: 3442 - DNA, 269 bp, Homo sapiens
ggcaagctccaaatgagaagatgaagcaagtgttaaagaagactatagaagaagccaaagcaataatatctaagaaacaagtggaagccggtgtctgtgttaccatggagatggtgaaagatgccttggaccagcttcgaggcgcggtgatgattgtttaccccatggggttgccaccgtatgatcccatccgcatggagtttgaaaataaggaagacttgtcgggaacacaggcagggctcaacgtcattaaagaggcagaggcgcag

SEQ ID NO: 3443 - DNA, 433 bp, Homo sapiens; identical to SEQ ID NO: 26
  unsure (334): n=A,T,C or G
  unsure (335): n=A,T,C or G
  unsure (418): n=A,T,C or G

SEQ ID NO: 3444 - DNA, 362 bp, Homo sapiens
aaaaatggagagtctgaattttattagagctcacacaccatatattaacatatacaactgtgaaccagctaatccctctgagaaaaactccccatctacccaatactgttacagcatacaatctctgttcttgggcattttgtcagtgatgctgatctttgccttcttccaggaacttgtaatagctggcatcgttgagaatgaatggaaaagaacgtgctccagacccaaatctaacatagttctcctgtcagcagaagaaaaaaagaacagactattgaaataaaagaagaagtggttgggctaactgaaacatcttcccaaccaaagaatgaagaagacattgaaattattccaatcca

SEQ ID NO: 3445 - DNA, 419 bp, Homo sapiens; identical to SEQ ID NO: 27
  unsure (1): n=A,T,C or G
  unsure (8): n=A,T,C or G
  unsure (187): n=A,T,C or G
  unsure (341): n=A,T,C or G

SEQ ID NO: 3446 - DNA, 288 bp, Homo sapiens
  unsure (1): n=A,T,C or G
ncaggtgggagggcggttgccgctgggcgcgacttggtgcgtttcgggcaggaccgactgactgtgtgtgcgcggagcagacgtgtcccgggccaggccgggccgtggaaggaggagaaggagagtcaaataaaataagaccaccccccaacaccaaaaaatggatagagttagtacgagaagtgcccagtgaagccaaatgacacgtcattttacagtgtgacctttttttccccttccagacttgcaggctttttcaaaagcagagcggagaattaattgtagcag

SEQ ID NO: 3447 - DNA, 210 bp, Homo sapiens
  unsure (163): n=A,T,C or G
  unsure (169): n=A,T,C or G
  unsure (171): n=A,T,C or G
  unsure (187): n=A,T,C or G
  unsure (205): n=A,T,C or G
cccagctacacaggaacctgaggcaggaggattgcttgagccccggaggttgaggggtgcattgagcagtggtcatgctccagcctgggcaacagacctgggtgagaaacccagaccctgtctccaaaaaaaaagctggcacttaatcacattagctataatnagcaangnctttagattctctgantcattctacaactttagncattc

SEQ ID NO: 3448 - DNA, 323 bp, Homo sapiens; identical to SEQ ID NO: 25

SEQ ID NO: 3449 - DNA, 207 bp, Homo sapiens
  unsure (1): n=A,T,C or G
ngtccacaggatcaaggactgtcagctttctaacccagagccagggatgtgatgtcccaattggtcccaagtccctcctacccgccgcctctgctccacctaagctccacacccactcctgaaccagccacctgtccaggaaatgaggcaccctaagcctatactagagctcctgatacctctgtggcactcgccagcctttaccag

SEQ ID NO: 3450 - DNA, 201 bp, Homo sapiens; identical to SEQ ID NO: 28
  unsure (117): n=A,T,C or G
  unsure (133): n=A,T,C or G
  unsure (164): n=A,T,C or G

SEQ ID NO: 3451 - DNA, 527 bp, Homo sapiens
  unsure (486): n=A,T,C or G
aaaaaggcggagatgactaatcaacaaagttcctaaccaacagcagcagccagttaatattaatatctcagtccagcatatctcatagaatccaatttacctcacaaattttaacagttctcatgttaaattcacaaatatttcagaaaagttctacataaaaatgttaacaatggttaactggggtgatgagatggaggggattggattttttccttcttaatctgtagttttccattttcagacatcatcccgcccctccgcgtatgtgctatctgtgtgaggaaatcctacacacggtcccattaccattcctcgttgggacgtcctcagacactggacacaccccatagtacaggggcggctccttagacgcagtcgctccagctctgtaggtgtcggtgtcactagggggcaccgagcaggtcttggatgtcacagcttcctcctctggaggattcaggcccacactgtaaccaaaatctntgtttcagaaaaaccagcctgatcagttgggttcccttcag

SEQ ID NO: 3452 - DNA, 422 bp, Homo sapiens
  unsure (151): n=A,T,C or G
  unsure (165): n=A,T,C or G
  unsure (340): n=A,T,C or G
  unsure (347): n=A,T,C or G
  unsure (356): n=A,T,C or G
tggtaagtggcttcgtggtctttatagctgttactcttttgtactttgtctttttcttttattttcttttgagcgattgtgcgaacatagcatagcacgcactatgccttctggggttggaactgcctggccagggcgactggcggataangtcttgtgcgtggnctcgaggcttaaaagtagcagtggggctttgtgaaggacaaaatggcgatggcgggcccgtgtaagtcccccttcctatgatgaggaccttttcacagacctgtactgagctccgtgaggataaataactctgaagagatgggccctgcaagcctcttgcttacccgctgttcanaaaatanccgttttcnaaatgccctgagttgacctaatgcttattgggctcctgtcttgcaggaatttacccccccctttgg

SEQ ID NO: 3453 - DNA, 426 bp, Homo sapiens
  unsure (112): n=A,T,C or G
  unsure (330): n=A,T,C or G
  unsure (345): n=A,T,C or G
  unsure (398): n=A,T,C or G
  unsure (414): n=A,T,C or G
ccaaatctcttcacatcctgttccatttctttttgcattcctgctaatgcttttactgtctaattaaaataattcactgtgatatcttgaatagagacaacagcttcttcanccccgtctgggtccattcttcagcttctttctccagggcaactatcctggagacgtaggacctacgtcatcctcatccaaggaattataaagttgcaacttctcgcatagccctaaatggctgcagtaagtactggaaaaacatggttgccatggtaactaattcctgggaggcttcatcttcctcttggtaaactttcattaatgctaccatggtgnttggcttttccatgncctttggataacctaaagagcaaaaggtgaataaaagcttaagtcagaacagngggaatacataccccnccaaccaaaact

SEQ ID NO: 3454 - DNA, 169 bp, Homo sapiens
ctagcattcacatggaacaaattgctgccgtgggaggatgacaaagaagcatgagtcaccctgctggataaacttagacttcaggctttatcatttttcaatctgttaatcataaatctggtcactgggatgttcaaccttaaactaagttttgaaagtaaggttattt

SEQ ID NO: 3455 - DNA, 313 bp, Homo sapiens
  unsure (302): n=A,T,C or G
ctgcggccagctagctggaggctcacgcatctccccagtcaccttcaacaggtacagcctgcggtcagacacaaccacaaggcacatgaactccccagtgtggcctgccaatgccactggcaccttgaggcagcactggaactcctcctgggcatcgctgaacacctcaacatccaggaagagccggagtcggtggtccacagagcggaggccacagcgctcaggggggggactgaggctccaactaccatggtcacgggtgctcggtgcctgaggtgggctgttcttggccctgtcaaggnggtcaccatgg

SEQ ID NO: 3456 - DNA, 278 bp, Homo sapiens
  unsure (243): n=A,T,C or G
  unsure (255): n=A,T,C or G
taaagggaactgtcttctgtcgagaagtaaaggaaacttcatgaaggatgtagaagcttagctgcctcagagaagagagaacctgaagatctgaggcaagctggacaggaagaaggtggatatttgttgatggaagaattcaagtttataatcaattcccacttagcacctactgtgtgctaggaacttgaatgtgtatgtttgacaagtcctgcttggcctgatgggtgggagaaagaaccngacctggctganatggctaggcggagggcttttaa

SEQ ID NO: 3457 - DNA, 279 bp, Homo sapiens; identical to SEQ ID NO: 289
  unsure (1): n=A,T,C or G
  unsure (3): n=A,T,C or G
  unsure (48): n=A,T,C or G
  unsure (70): n=A,T,C or G
  unsure (120): n=A,T,C or G
  unsure (134): n=A,T,C or G
  unsure (137): n=A,T,C or G
  unsure (175): n=A,T,C or G
  unsure (184): n=A,T,C or G
  unsure (192): n=A,T,C or G
  unsure (220): n=A,T,C or G

SEQ ID NO: 3458 - DNA, 211 bp, Homo sapiens
ctgggtggatggtggttccacgtattcaggtggcaaacaggaaaaacatgtgttcgaagaagaatggaggtaggtggtctcttaagaatggttaagaggcttgggagtcagactgcttgggtttgcatcccagctttgccgttttctggctatcaaacttgtcagctattatttgttgagtacgtactatttgatttatgaccacaggcag

SEQ ID NO: 3459 - DNA, 434 bp, Homo sapiens
  unsure (1): n=A,T,C or G
  unsure (297): n=A,T,C or G
  unsure (371): n=A,T,C or G
ncaggtaaatgtgcgtaatggatctgtgctttgggggagtttgaaatgaagtccagcctgataaagcatttgtttgttaccaccttcgtgatgttggccgatgaagtgaaaacttgctattgaaagaccagtcctctgtagacgagaccttttctaatgtactgaaggacggccaggactgatatccatattcagatgcaaatcgagcttttgggaaaactttccagttccagcaatcatgccagtacgagctctctgatgtttttcacatagagtgtcacatagtccttgatgtanattggccggtcagtgaaactgatatgataccaattcatcatcagcgcctcctcattttcattattgccactccntatgatgatagaaggatgagaattcagtctcttgactggtaggcacttctgctgtcactgaat

SEQ ID NO: 3460 - DNA, 371 bp, Homo sapiens
  unsure (18): n=A,T,C or G
  unsure (369): n=A,T,C or G
aaaacaccctaggatgcnttgaatcaggcttgattttgttagttgagttacaggagaattttaagggtgagggtatgggggtcagggaagaaaaggaaatgggaaatggaccaaaaaaaatcttgagtcatcatctaaatcaacaaagcactgatagctccaaatattaggtcagacactaaaacgactgatataggctcaagtggtttataaaacctataaaaagactacaccagcaaagtccctgtcaatctgtcagagttcagaaactaaaacagggagtaacattttagcttaaaaccttatctcaagagaatcatatacacttcacatgaataaaaatacctgaaaccaaacatttttacctcngg

SEQ ID NO: 3461 - DNA, 363 bp, Homo sapiens
ctgagaatagtggacacagggtcccagaaacaaggctgcaaagcctaaatatcttgcagcctattggcccagctcagtgggtcccgctgctttagaagcctgcacccacccactcagtctggtgtgatctgagcccctgctacgtgctcagtctgcactagacagcaaaagcaatgcggtgaaaggtgtttgaggtttggagtgagacagacttgggctgaatcctgactctgcgacctaattggttatatgtccttgagcaacttatattaccaacctgagctctagttttaccatctgtaaaataaggatgatcacaggtttcttccagggtcataagggccaaacacacttggtagctca

SEQ ID NO: 3462 - DNA, 278 bp, Homo sapiens
aaaactttccttagataaggaatcatattgaagcccagaagcttttgcaagagtccattccaaagctgcaggtcatagattttgtattctaaacacagctcagtcaccaatcttactgccatggactcgtggctgtggtttttccacagacccttaatcattccttctttaggactgctgcaaaataattcatatgtgatggggatattcaaagtctcaaatgatgccagaaaagttatacatctcaaataagatttcacttcttcaatgggtttttt

SEQ ID NO: 3463 - DNA, 409 bp, Homo sapiens
  unsure (114): n=A,T,C or G
  unsure (318): n=A,T,C or G
  unsure (386): n=A,T,C or G
aaatggctttaggcttatagggggtgtaaactttaagaatataattctcccattcaagtttacagcaaacatctagccaccttcaaaacaaagaatatacagaccatcatttancaaatactaatacatgattttccttggggatggcaggtttgagaatcctttagcaacaggacataattcccctaaattacagtgaattatttataacgagataaagctttcaggtacaagctgaaggtggggtgtctaacaactaaaaactatcactaaatctcaaagagaaagttcttgcaaaatatgtaaaggtcacaaggngcagacattctccttctttaggcttttatctaaggaaaggctatgaaactgggcccatctgtatacangctcaaatttacctttttacctc

SEQ ID NO: 3464 - DNA, 283 bp, Homo sapiens
aaatatatgggaggatgtgcgtaggttgtatgaaaataccaagtcattttatatcagggacttgcgcacccacagattctggtatctgtggaagtcctcggccactcccccgtggagacaggacaactgtgtgttgacagaagtcacatgggagaatgctcatagcagcccccacgcagtgacacaacctggaacaccgcccagtctgaccagcacagaaaagcagcacctgctgaattcatgccacgggggactccacagcagccaaaagagtgggctgtgg

SEQ ID NO: 3465 - DNA, 307 bp, Homo sapiens
aaagggaagctgtggctgggctgtcctcttgtcccttttttctgtaacactcaaccatgcctgagctcttctggcagccccaaccatctgggtgatacacacacccagatgtctgtaaaatctctgttgtagacccaactaattctaaagctgggactcagtgattaatataatgggtgaacaatcgaaatatagaaacatgggaacaacaaaaatgaagagaaggaggatttgcagattatatgttgacatgttgaagaatgaataaagttaatggggaaaacttgtgagatctgagatgaaattt

SEQ ID NO: 3466 - DNA, 235 bp, Homo sapiens; identical to SEQ ID NO: 290
  unsure (1): n=A,T,C or G
  unsure (77): n=A,T,C or G
  unsure (172): n=A,T,C or G

SEQ ID NO: 3467 - DNA, 208 bp, Homo sapiens
gcgagagccactcaccactctacatgcaccccccgaagtgcacgtcctgcggctctcagtccccacagcatgcagagatgtgcctccacaccgctggccccacgttcccttgaggagatgggagagacccagtctgagtactcagattctagctgtgagaacggggccttcttctgcaatgagtgtgactgccgcttctctgaggagg

SEQ ID NO: 3468 - DNA, 340 bp, Homo sapiens
cctcgtccagccgcacacggcgactctgcatgaggtatgccagacagatggtggcagagcgcgagatacccgcctggcagtgcaccagcacccggcctccgctgttctttacccagtctgcaagggagatgggggagtggtgtcagacggaatgtgcacagcccaggagacaggtgcccccagtcctctcctctggagcccctcgggatttctgggcagaggtgcccccttaccaatgaagcctatggcctcctggaaccaggcactgatctccaccatctggttgtcctccacagggatactcttgtagcggaaaaggccctcaaagtggttggggcag

SEQ ID NO: 3469 - DNA, 154 bp, Homo sapiens
ctgcattctattccactccagtgcctgggccagttagcaccagtgtggaagacagtgagctggctccggacaacagggatggaggaaaggtcccacattcacattcctgatacgtggacaaggtgaggggccgcaatcgctctggcagcatttt

SEQ ID NO: 3470 - DNA, 482 bp, Homo sapiens
  unsure (358): n=A,T,C or G
  unsure (384): n=A,T,C or G
  unsure (416): n=A,T,C or G
  unsure (429): n=A,T,C or G
  unsure (442): n=A,T,C or G
  unsure (452): n=A,T,C or G
  unsure (480): n=A,T,C or G
aaaacaagcaagcttaattcagtcaggcatatattgcaaataaaaacatgtttccaagtaggctggaataaaaatgctaaataagaactgggccaaaagatcatagataatgggcttcttctcttggtaatatgtgaatacatttacccatggggtagaagtatttcacctgccccatgaagaacctgatggcttgtggtgtctgtgctgtgtcaatactaacagatgtgaggagacagactatggaatggacgctgtggctatctgtgagatagtggaaggggttatacacactggccacaggaagttgcaaaaattagatggactctgtgtagctagccactcttgagtgtcaggnctgcatatgtgagttttaaagaaggngcaagatagcaataaattcccttaaagagcangatatgtcctggnagctctatagttncatgatcaangacctggacctgcccgggcgggcgctcnaa

SEQ ID NO: 3471 - DNA, 258 bp, Homo sapiens
ccatcatatagcccatggtggagttgtcccgaagtgcctgggctttcatgatccgctccatattggctgtccagccgtaggtgctggtcacaatgcagcaaggtgaagacacaaagtctattggagattgtcacctgtggacgatcacaaaagccttagattgacattaccactttgaaagagaaaacaggcattgtcaagcctaattccagcagggggaggaggtggacagaccacttgagtttgagaccatgctgg

SEQ ID NO: 3472 - DNA, 184 bp, Homo sapiens
aaaacaacaattaagtggattatgggaacaggaaaaccatcttactttggttccaggatatactggtaatatagctaaggatgtagatgcttatttattacagttacattgagaagatttcatctactaaagagcatttggtttttcaaaacatccctgaactgtataatttacaaaaaaaaaa

SEQ ID NO: 3473 - DNA, 364 bp, Homo sapiens
  unsure (322): n=A,T,C or G
aaagtaaaaacataaggcttttaatcaaacaaattcatagttagttgttctctaagccatcttggtattccaggcacagtcatatctggagagacaactgctaaatagccagagccctgaaatgttcaccctactcaatgcctggttttcttttctccctttacctgataatgagcctgggcttgctgtgcagagttcaaggtgacattgcagagtttgcagtacaggggcttacatagctcctccagggcacagtcttgctcccctcccttcgataactcttcttcccctgcaggaggcaaggaagcctcctgcccaaaangcttctgtggtggaagctgcaagggtcctgtagacctggtgg

SEQ ID NO: 3474 - DNA, 484 bp, Homo sapiens
ctgaacgccagtttgctgctcgatatggcaaacctatattagcaagtagggatgctcgaagctccagtcgagagcaagaagcaggtgttcttgctatggatgcgctgccccgccaagtactaccgtttcttttgagaagaatgaaagaagatgttttgcaggatcttccacctaaaattatttaagactattattgtactcttagtcctctccaggttcagctctatgaagattttgctaagtctcgtgccaagtgtgatgttgatgaaacagtttcttcagctacactttctgaagaaactgaaaaaccaaagcttaaagctacaggccacgtattccaggcattacagtacttacgtaaactgtgcaaccatccagcattagtcttaacacctcaacatccagaattcaagaccactgccgaaaaactggcagttcagaattcttctctacatgatattcaacatgcccctaagctctcagt

SEQ ID NO: 3475 - DNA, 441 bp, Homo sapiens
gcgtggggcgcccacaatttgcgcgctctctttctgctgctccccagctctcggatacagccgacaccatgggtttcggagacctgaaaagccctgccggcctccaggtgctcaacgattacctggcggacaagagctacatcgaggggtatgtgccatcacaagcagatgtggcagtatttgaagccgtgtccagcccaccgcctgccgacttgtgtcacgccctacgttggtcaagcagacggcttagtctggggctcatctaaactagttccagtgggacacggaattaagaaacttcaaatacagtgtgtagttgaagatgataaagttggaacagatatgctggaggagcagatcactgcttttgaggactatgtgcagtccatggatgtgactgctttcaacaagatctaaaatccatcctggatcatggcattt

SEQ ID NO: 3476 - DNA, 348 bp, Homo sapiens
  unsure (238): n=A,T,C or G
  unsure (247): n=A,T,C or G
  unsure (329): n=A,T,C or G
aaaaaatgggaaattttaatattaagtatgtccatgattgaaagaatcattccagaaatggcagcaaagaggctcaatgaattcattatcatttttcctttgaccaaacactttccttggagtttttctccgttgctgccaggagtgatccggaaataatatacataatgcctccccagagagggtaccacacagtcacacagatgggtgcatagatccctgctgggatcatcagaanaccccccanggcaatgtggaagagcccattcatagtctggacagcccccaaagtcttagattccctcatgaaaaagctttgcgggggcccnccagtgaagacatcctcct

SEQ ID NO: 3477 - DNA, 412 bp, Homo sapiens
ccgctgacacatgtgtctatgtatgctaattggaagctccccaatacatgtctatgacaaaacttttacacaaccaatcaacatttgacattttttacatcctcttcctctcatgaattatattccattttcaagaaaataatagttatcctttgaaaaggcaaaacgctcaagccactgaaaaacagtatctaaatttctgtaaagtgcaaaaatactaaggtggggggcaattattatattctgacaaataaatattctgaacttttcaacatgaccctttggcactagtggtttgggagccctgacattcgcctggtgtcagttcagcatcagggttgagctgcttggaagcaggaagttcagcgtcatttattacaaatccagtgcaacagaatccacgtgtttcaca

SEQ ID NO: 3478 - DNA, 408 bp, Homo sapiens
  unsure (328): n=A,T,C or G
ctgcatttcacatgccttgcaatggatcagccaaggccgagaccccatcttccagccacctagtcccccaaagggcctcctcacccaccctgtggctcacagtggggccaagcatactccgtgaggctgctgccatccatgtgctagtcactggcagcctgcacctggtgggtggtgtcctgaagctgctggagcccgcactgtcccagtagccaaggcccggggttggaggtgggagcttgccacacctgcctgcgttctccccatgaacttacatactaggtgccttttgtttttggctttcctggttctgtctagactggcctangggccacggctttgggatgggaggccgggagaagatgtcttttttaaggctctgtgccttggctctccttcctcctggct

SEQ ID NO: 3479 - DNA, 392 bp, Homo sapiens
  unsure (238): n=A,T,C or G
gtccttacagccgctcgtcagactccagcagccaagatggtgaagcagatcgagagcaagactgcttttcaggaagccttggacgctgcaggtgataaacttgtagtagttgacttctcagccacgtggtgtgggccttgcaaaatgatcaagcctttctttcattccctctctgaaaagtattccaacgtgatattccttgaagtagatgtggatgactgtcaggatgttgcttcanagtgtgaagtcaaatgcatgccaacattccagttttttaagaagggacaaaaggtgggtgaattttctggagccaataaggaaaagcttgaagccaccattaatgaattagtctaatcatgttttctgaaaacataaccagccattggctattt

SEQ ID NO: 3480 - DNA, 437 bp, Homo sapiens
cctggccctgaagcaggtgggtggcagagacccagagtgggcagtatggcagttccttggttccttttctggcatcttcccacagccgggacatcttgggtagcagagatgatgtgcgggctgagcaactcctcacatagagtcaaggcatcttgggctctgcctgcctggatcagtgctaccgctgcctccaaaaacacctcaggcatacagggccccttggctccgagctatccagcaacagggccagcaggtccaagtaatgctctgcagcgtctcctgccctccccgtctgtaggcacctgcttgctaatatgtgcttggtctggctctgagtgccacaatgaaagggtgaggctaggtcaagtggtggcagtagtaattctacctcaaatgagaaactgcggggctttggaacttgcatgggacattcaagg

SEQ ID NO: 3481 - DNA, 292 bp, Homo sapiens; identical to SEQ ID NO: 29

SEQ ID NO: 3482 - DNA, 381 bp, Homo sapiens
ccttatatttgtacctgtataaataccatatcacagcacaaaaacataccccatctggctctcttaaggtacatgataaatcagactaatgcacattcatcaaagtgggatcatctcaggatatgtgcatatttgacgtgggtatgaattcagggtttccttgggtctctttcaaggactctcctttctcgtcggtatttctatttccttattttccttctgtttatgaagaactgttatttttatatttaatgcccaattttcactacttgttcatgtcagttctctgaaatgttactgcctatgaaccgtgacatgtactctttataacagaaccagaagttaaaagatgtagacatcacacaaatcaatgattatttt

SEQ ID NO: 3483 - DNA, 318 bp, Homo sapiens; identical to SEQ ID NO: 291
  unsure (129): n=A,T,C or G
  unsure (212): n=A,T,C or G
  unsure (270): n=A,T,C or G
  unsure (279): n=A,T,C or G

SEQ ID NO: 3484 - DNA, 265 bp, Homo sapiens
  unsure (105): n=A,T,C or G
  unsure (138): n=A,T,C or G
  unsure (211): n=A,T,C or G
  unsure (264): n=A,T,C or G
cgaatagagctcttggaagtccctccaaccatggcctgggtctccttctacctactgcccttcattttctccacaggtctctgtgctctgcctgtgctgactcancccccgtcttacatctgccttgctgggagcctngatcaagctcacctgcaccctaagcagtgaacacaacacttacaccatcgatcggactttctgttgtttttgnttgtttctgtatcttgtctcaacttgtggtcagcctttctccctgcatcccang

SEQ ID NO: 3485 - DNA, 326 bp, Homo sapiens
ccttcctttcacacacatcagaaatagggaacccaagacctcgagagaggaaatgggcccagggacatgccttggcttggggtggcttaggaccagggcaagacgcctgaccccagagcagaccatgctgacactgggcaacacattccctgctctggacctcagttcctttggctactaaggaggcccaacgatcctcgcctgtgtgggacggggctacctgcagacatagagggcctttgagcacctcgtagcttgcttcccagccagcctgggtgtggaaatggccgtgctgacaggctctctgcgatagggcccagccatgg

SEQ ID NO: 3486 - DNA, 283 bp, Homo sapiens
aaacatgacttggtgctgaaagacacactgctgggacccaagttccctcccacatggacgggatggaggctggagcccaaggtttcagggaaacgtatgtggcctgtgcccctgggtgtgatcatgggcacacacatttatctggcagggccagccttggctgctgaggggtcatgggcacagaggaggaccatctggtgacactgaggaccagtgttgcccacagccagggagaataaggatgaagaatgagtgttgccacacccctccagatgagctcaag

SEQ ID NO: 3487 - DNA, 445 bp, Homo sapiens; identical to SEQ ID NO: 616

SEQ ID NO: 3488 - DNA, 411 bp, Homo sapiens
  unsure (392): n=A,T,C or G
ctgatcaggagcccagatgccagggtggattttctcagtgggatctagtattgctagaagagccttccttacatggcagaaacaggcacatgggcctcttcccttaaaatgcatctgtctcacatgcttggggactgctgtgcgggaacacctggtgtggcctggcgaggcagcgtatacatggcccccaaaaactggtctgcaattcttcccgcttcttgcagcccactcagcagagcaccatgcactgtggctgggtagttacggatcgtatgttctcccgcaaagaagagtcgtggaatcggctgtggggcacctggaatcgaggggccaggagtgattggctgagccattaaatcatagtcattttccagatgatccttgcagcaacnttaggaataagagccccga

SEQ ID NO: 3489 - DNA, 281 bp, Homo sapiens
ccaaaactgcgaagagatgcagaataatgttgacaataataagttgctgaatcgtcaggctgcagactggtgatggttaaattgaattgtgtcccagatccactgccagtaaatcttaatgagaccccttcttctaaactggaagtcgcataaattaggacattaggggctttgcctggtttctgttgatgccaggccaaccaccgatctatattctgagaggcccgacaacttattgtaactgtatctccgacagatgcagacagggtggaaggagattg

SEQ ID NO: 3490 - DNA, 216 bp, Homo sapiens
aaaatcataaatatttggtttcccctcaacatagcacatcacaaaaatacatttcaaaaacttttttcatatataattcctgtaaatgatcatatccctacttattaaggaaaacacctgatgacaagcactcaaacactcttgaaattttctgtacagtaattacaaaagtaaaaccaagagttctgttggccctttaacaggtgaaaccatttt

SEQ ID NO: 3491 - DNA, 376 bp, Homo sapiens
  unsure (291): n=A,T,C or G
  unsure (302): n=A,T,C or G
  unsure (304): n=A,T,C or G
  unsure (317): n=A,T,C or G
  unsure (333): n=A,T,C or G
  unsure (340): n=A,T,C or G
  unsure (349): n=A,T,C or G
  unsure (370): n=A,T,C or G
  unsure (371): n=A,T,C or G
ctgtcccttacaaaggatactgtgcgtggagtcctggcatggttcctggcacataggccccagcacgaggagaccgtttctgttactgctttaggagtgcataggggagtcaggctttgtaaccaacatgcgtaatgtttttgttttgtttggggggttttttggcggggaaggagggatagattcatagtctgcagccccttgctgtctggtggcacaaagtcccccagacgtgagactcccactcgagaaacaactaaagaatgccataaatcaacgtggacaaaaggnccctacattananactatcctgaggncccttttactttgganccaaaanccttatttnaaatggggggaaaaagggganntggaa

SEQ ID NO: 3492 - DNA, 454 bp, Homo sapiens; identical to SEQ ID NO: 31
  unsure (211): n=A,T,C or G
  unsure (394): n=A,T,C or G
  unsure (396): n=A,T,C or G
  unsure (452): n=A,T,C or G
  unsure (454): n=A,T,C or G

SEQ ID NO: 3493 - DNA, 240 bp, Homo sapiens
aaagcgggctgcatgtgtctgcatgctcagattagaaactgtgtatcttgaagtgtcttgaagctgattttctataaatgggcatttgggaaaatgtctcaggtgttctgacatagcattatccttcggttcccaattgctcaattttccaccacaggcaaagcaagccactctgtctccaggtcctatgtagtaaaagcctgcttttgccagatctgttggcgacagaaaagtcaatgg

SEQ ID NO: 3494 - DNA, 250 bp, Homo sapiens
  unsure (107): n=A,T,C or G
  unsure (110): n=A,T,C or G
  unsure (181): n=A,T,C or G
ctgcctctgttaccttgactgtctcagatttcgttgacccgagacgggtcctggcactaggaatgaaagactgtctctattattttggtttgctccaggttaggganaancccacgcaaggctcctactgaccatatgtttcatttctagctttgctgtctgggcaccaatttccctaggnttaactaattgctcaatgttaaggcagctctggggaaattcgtcttgtgtaactggggtgctatgcagg

SEQ ID NO: 3495 - DNA, 178 bp, Homo sapiens
ggatgaggacctgtacccagagcactaccggaaatactccgactacatcaaaggcagcaacctggatgcccctgagccctaccgaattggccggatcaaagagatcttctgtcccaagaagagcaacggcaggcccaatgagactgacatcaaaatccgggtcaacaagttctacagg

SEQ ID NO: 3496 - DNA, 191 bp, Homo sapiens
aaaaatacagttccccaggttgaggtatgtggtggcctgttgtcacggcagcatgagcacggcggcgcccagggcgggggcggaagggcctagctggagactgccatcacgtagttcttggaggggctgctccggcccagcagcacttggttcttgcaggtgaggagcccacaggaggcggccagtggggc

SEQ ID NO: 3497 - DNA, 417 bp, Homo sapiens; identical to SEQ ID NO: 30
  unsure (1): n=A,T,C or G
  unsure (9): n=A,T,C or G
  unsure (12): n=A,T,C or G
  unsure (164): n=A,T,C or G
  unsure (237): n=A,T,C or G
  unsure (384): n=A,T,C or G
  unsure (400): n=A,T,C or G
  unsure (408): n=A,T,C or G

SEQ ID NO: 3498 - DNA, 219 bp, Homo sapiens
ctgtcacctctggggtgtggcttcttcccggaaccgcaccagaggcccctggagcccagggagggaccacggagggcaggtgtaacccctggcctggagcacagctctcagagccctgaggctcccggggacagaaacaagtaacaaagtgagaccacgagagaaaaagaatccacagtttctacaaaaagccccaccctccccaagcaccctggtcag

SEQ ID NO: 3499 - DNA, 476 bp, Homo sapiens
  unsure (473): n=A,T,C or G
aaatgaagagagaatcttagctttacagctttgtgggtggataaagaaaggaacggatgtagacgtggggccatttttgaactcccttgtacaagaaggggaatgggaaagagctgctgctgtggcattgttcaacttggatattcgccgagcaatccaaatcctgaatgaaggggcatcttctgaaaaaggagatctgaatctcaatgtggtagcaatggctttatcgggttatacggatgagaagaactccctttggagagaaatgtgtagcacactgcgattacagctaaataacccgtatttgtgtgtcatgtttgcatttctgacaagtgaaacaggatcttacgatggagttttgtatgaaaacaaagttgcagtacgtgacagagtggcatttgcttgtaaattccttagtgatactcagttaaatagatacatcgaaaagttgaccaatgaaatgaaagaggctngaa

SEQ ID NO: 3500 - DNA, 383 bp, Homo sapiens; identical to SEQ ID NO: 33
  unsure (1): n=A,T,C or G
  unsure (25): n=A,T,C or G
  unsure (305): n=A,T,C or G
  unsure (319): n=A,T,C or G
  unsure (362): n=A,T,C or G
  unsure (377): n=A,T,C or G
  unsure (383): n=A,T,C or G

SEQ ID NO: 3501 - DNA, 312 bp, Homo sapiens
  unsure (6): n=A,T,C or G
aaccanaaattttccgaagaagtaaaaaccccagaatttgtatcaagaagactcttaagggataatgcacaggccgctgagtttcgggaagcatggggccgtgagggcaaactcaaagagcgcgtgggaaattctgccgggcagagtttgaacaaacccaatattcacaagagagttttaacagaagctaccgtgggcagggaaagatctttgggagaaagaacccaagagtgtagtgcatttgatagaaacttgaatctggaccaaaatgttgttagacttcaaagaaataaaacaggagagagggtcttt

SEQ ID NO: 3502 - DNA, 232 bp, Homo sapiens
aaagagaattacctatattctcctgatactgattaccaagtcattcacctgaacaccagaattagaattaaacattgtaccatacaatttcattatcttatcagaatgaaaccaattcacagggaaactagagactacggctgtggtggtaacctgcagatatacacattcccatgcactgacataagttgaaaacacatagtactttctagatggaatttttttctttagg

SEQ ID NO: 3503 - DNA, 423 bp, Homo sapiens
  unsure (24): n=A,T,C or G
cgacaccgtaactatccgcactanaaagttcatgaccaaccgactacttcagaggaaacaaatggtcattgatgtccttcaccccgggaaggcgacagtgcctaagacagaaattcgggaaaaactagccaaaatgtacaagaccacaccggatgtcatctttgtatttggattcagaactcattttggtggtggcaagacaactggctttggcatgatttatgattccctggattatgcaaagaaaaatgaacccaaacatagacttgcaagacatggcctgtatgagaagaaaaagacctcaagaaagcaacgaaaggaacgcaagaacagaatgaagaaagtcagggggactgcaaaggccaatgttggtgctggcaaaaagccgaaggagtaaaggtgctgcaatgatgttagctgtgg

SEQ ID NO: 3504 - DNA, 184 bp, Homo sapiens
ctgatgcctcactactagatgcagtgctgggaccttcctcttttggagctgtcccatgtacagtggacccaagctcaggaccttcgtggagctgcttctccaacctgagaaacttcaagacccatcctcccgctgtcactttggacaatggaaatctacattttcttttccctttttttttttt

SEQ ID NO: 3505 - DNA, 430 bp, Homo sapiens
aaatcattcattcaatagataccaccgtgtgacctataattttgcaaatctgttacctctgacatcaagtgtaattagcttttggagagtgggctgacatcaagtgtaattagcttttgggagagtgggttttgtccattattaataattaattaattaacatcaaacacggcttctcatgctatttctacctcactttggttttggggtgttcctgataattgtgcacacctgagttcacagcttcaccacttgtccattgcgttattttctttttcctttataattctttctttttccttcataattttcaaaagaaaacccaaagctctaaggtaacaaattaccaaattacatgaagatttggtttttgtcttgcatttttttcctttatgtgacgctggaccttttctttacccaagggattttt

SEQ ID NO: 3506 - DNA, 324 bp, Homo sapiens
  unsure (323): n=A,T,C or G
ctgtgggaggctgaaaaggtcaaaatgcggcaaatcctggacaaacagcagaagcagatggtggaggactaccagtggctcaggcaggaggagaagtccctggtgagcaccccaggaaggatgtcggtgccctgcacccatctgtgtcctcttccacctccccaggtggctggggcaagggtcccctgcattcttggtgctttcagctccagaattcttagtccttcactcttgtttcttcctctgcaggaccccatggtttatatgaatgataagtccccattggtgagttgccaggagaggccgcctcctccatgccaagng

SEQ ID NO: 3507 - DNA, 240 bp, Homo sapiens; identical to SEQ ID NO: 617

SEQ ID NO: 3508 - DNA, 198 bp, Homo sapiens
aacctaccaatctaaagaaaactttgaaaactgaactgtgtaacgtggaacaacacgtcgaactctccgaggtgatcgctctcgctctcttcgtggagatctttcccgggaacgtttcctctgaggtgatctttctctcgatctacgtctttctctctctctctcacgacttcgatcatcttttctgcaagagcactt

SEQ ID NO: 3509 - DNA, 482 bp, Homo sapiens; identical to SEQ ID NO: 32

SEQ ID NO: 3510 - DNA, 339 bp, Homo sapiens
  unsure (130): n=A,T,C or G
  unsure (323): n=A,T,C or G
ctgctgcccctcagtcttctttccttctccttttcttttcctttcttctctcttgtgcattcttcaggtcagtcatcacattcaaagtcttccatacccacataaccacaatgatcatggcattcaccancagtggggctgaaaatactatagaaatgaacatccccctggagtcgaaatactggtatttcgaaaataatctccagttcatcgcagccgcctcattgatgtattcagcacagtagactaagatgactagacacagaaagtgcccgatctgtagtctgtagcttcgggaggacaagcaggtgaggagcacgcanagcgcgtggaaggtgg

SEQ ID NO: 3511 - DNA, 184 bp, Homo sapiens
aaattcacaaaaaactgtacattatcaaaaagtcactaaaacaccacatttggttatataaaaagtcccttttgctgtaaaaggaacacagaaacttgttggtgttgatggtgtggtttcttcctgtcaaccagactgatgggagggaagcaaaagggcagggggtgggttgtctttttatttt

SEQ ID NO: 3512 - DNA, 381 bp, Homo sapiens; identical to SEQ ID NO: 292
  unsure (311): n=A,T,C or G
  unsure (338): n=A,T,C or G

SEQ ID NO: 3513 - DNA, 323 bp, Homo sapiens
ctgggtcttgacgctgttcatcagagccagggcggaggacgcagcctccggaggctcctcgaagtttctccgagaggggctcagactgtaaaagatctgtgggtctaggtggggtgcctcatcgaagggaatggagatctcgaaggtctcatcgtccttcattgtccgcctccgactgctccggtcattcatggcgcggcttcctgcggaccccagcagccgagggcctcaggggcactgcaaaatggggaaattacaagcccttctaaatttattgtgaggatgcagtgatgcgacacacagaagctcagcccagcacctgg

SEQ ID NO: 3514 - DNA, 406 bp, Homo sapiens
  unsure (148): n=A,T,C or G
  unsure (326): n=A,T,C or G
  unsure (357): n=A,T,C or G
ctgtggtcaagtacacggatatgcatgtacaaggatatttattggtgttgcatataatgataaattattgagagttttctaaatgtacattttcctccttctggtagccatcttctctacgaagagtgactattgcctctttacccanaaatattggaaatgcaggaatggtaagacaattcctaagtgttcttagtcaaaggtaaattcattttcatatgacagaaaatataaacgtatattttatcatttcttttaacatttgaacttctactaaaggtggctgggatggaaaataatgatcgattcagtagaaggtcaagcangttggtaaagtgtaattttatggttcctctntgggaaccttactattttatacttggggctaaccttaaatgagtgctca

SEQ ID NO: 3515 - DNA, 190 bp, Homo sapiens
aaagtagtcttccgtggttgggaagcctcacctcccaagaccagagtcagttggagctggttgttgttggaagggagtgggttggggaactggggtgggggcagggagatccccccgctctgctggcggtcctaggtggagaagaactgcacttcacagagtctggggtttggtgggaaggggatgatgt

SEQ ID NO: 3516 - DNA, 329 bp, Homo sapiens
cctccgtgcatgatcagcactttgccgttgatgcactgggccaacgggagccactcgaacacctcgctaaagagctcgtacatctgggctgtgtacttggccttcacctcaccctcgaaaccgtagatctggttcatgttgtctgtctcgtggttgcctcgaaggaggtgaaagtgatctgggtacaggagcttgaagccgaaaagggtgaggatcacttctacagagaaggagcctcggtccacaaagtcaccattaaatatataggggttggtctccgagggtaaaccgttgagctcgaatatgttgaggaggtcatagaactggcc

SEQ ID NO: 3517 - DNA, 246 bp, Homo sapiens; identical to SEQ ID NO: 34

SEQ ID NO: 3518 - DNA, 515 bp, Homo sapiens
  unsure (376): n=A,T,C or G
  unsure (384): n=A,T,C or G
  unsure (450): n=A,T,C or G
  unsure (461): n=A,T,C or G
  unsure (501): n=A,T,C or G
  unsure (504): n=A,T,C or G
cctacaaccctggatgcttgggttacttaagcgctcctccctcccaccagatccctgcctccagtgtccctcccactccaacgcatcctaccaggctcctttaagcctactgtcatgacattgctaacagctaacagcataacctgttctccaactccctatggtcagggcactcaccatcctttgcaacctggacccaccttatttgtccaatcataccaggaccttcaggtcccacattccctactctttagtttccgctggacagaaaactctcctcactatcccacaaatggaccgtacttgtgttaagctttgagtgacagcctctgtatttcctccctcccagcacataacatgtggtcctccaattctncagtattntataattttacccacctctcaaagcctacctcttaaaagtatcttctctatgaaacctcctcctgntactctaagtnttttcttacattccttctggcgcttacaggttgcattggnatnacccccgcccc

SEQ ID NO: 3519 - DNA, 315 bp, Homo sapiens
  unsure (5): n=A,T,C or G
  unsure (111): n=A,T,C or G
  unsure (130): n=A,T,C or G
  unsure (144): n=A,T,C or G
  unsure (145): n=A,T,C or G
  unsure (152): n=A,T,C or G
  unsure (183): n=A,T,C or G
  unsure (224): n=A,T,C or G
  unsure (238): n=A,T,C or G
  unsure (253): n=A,T,C or G
  unsure (265): n=A,T,C or G
  unsure (288): n=A,T,C or G
  unsure (293): n=A,T,C or G
  unsure (294): n=A,T,C or G
tcgangtccaccactggatttctgattaagtcactgactaactctaaccaccactggaagtaccattcaacttctggacaacctctggttgtgtaaaataactcaatttantaatagcttaaacattaangttatctattattnngcaactnaaaggcatcatgattcagaaaatatattgcntgaatatcataaccagaccaaaactaacaaaagaaataatnttttgcaatatganaataatatttacaanaccaaaaacaanaacaaagtttttgctctttttanatttnnccctacaggaacttctgtgtg

SEQ ID NO: 3520 - DNA, 155 bp, Homo sapiens
ggaacaaattgctgccgtgggaggatgacaaagaagcatgagtcaccctgctggataaacttagacttcaggctttatcatttttcaatctgttaatcataatctggtcactgggatgttcaaccttaaactaagttttgaaagtaaggttattt

SEQ ID NO: 3521 - DNA, 309 bp, Homo sapiens
  unsure (301): n=A,T,C or G
ccatttaccagactccgacacaatgggccaccaccagtgtgacagcaggacatcctaatatatggatcttgatttttaagtttcagtatctgaacttcgtaaattaagtaacttttagctgggaaagtatagcatgaaaccagaggttctcagaatgactgtaagatagcttacatttcctctttttgcctttatctccccaactaaaatacaatggggaagaagtctgcctatgatctttgaatgagctttttaaggaagaaatattatatattgtttgttaaagtttattgaaataaanaatcattt

SEQ ID NO: 3522 - DNA, 273 bp, Homo sapiens
ctgcatctcctgccctgctgtcattacagggatgggcaggctggcatgggggcacccgctgcccctgcctgggtgttgctgtgtattcctgccggccaggggccactgccaggaccacgcctcccttttcatatcccgattcttaagttctgctattgtggtattctggtggagaaaaaagaaccgcgtggctgttttcgaactgcctggaacctaagaccctgaattcttttcccccccaaggggaaaatctatatggaaaacatttatttt

SEQ ID NO: 3523 - DNA, 301 bp, Homo sapiens
  unsure (218): n=A,T,C or G
  unsure (263): n=A,T,C or G
  unsure (267): n=A,T,C or G
  unsure (279): n=A,T,C or G
ccaaggggctgaagaagatgcagagcagcctgaagctggtggactgtatcatcgaggtccacgatgcccggatcccactttcaggccgcaaccctctgtttcaggaaacccttgggcttaagcctcacttgctggtcctcaacaagatggacttggcggatcttacagagcagcagaaaattatgcaacacttagaaggagaaggcctaaaaaatgtnatttttaccaactgtgtaaaggatgaaaatgtcaagcagatcatnccgntggtcacttgancttgatctgggagaaagccacc

SEQ ID NO: 3524 - DNA, 306 bp, Homo sapiens
  unsure (184): n=A,T,C or G
aaaaattcttggtagttgagcagctctgggggaataagggcaaatatgcttgttatgaactacactgaaatctaccaaagttaatgtttactttgtgtagatccatttgtctattttatttatttttcccagtgaaaagtgtatttggatagagaacttttcattctataaatacactatgagntactaaaatatcatggattttgtttattcctgaaacatagttacatagttaaactgtacatatgacatggcttatgttaaaaatacccagtgctcagttttgaaagataggccaaaaaaaaa

SEQ ID NO: 3525 - DNA, 421 bp, Homo sapiens
  unsure (128): n=A,T,C or G
  unsure (270): n=A,T,C or G
  unsure (285): n=A,T,C or G
  unsure (306): n=A,T,C or G
  unsure (314): n=A,T,C or G
  unsure (320): n=A,T,C or G
  unsure (374): n=A,T,C or G
  unsure (376): n=A,T,C or G
  unsure (389): n=A,T,C or G
  unsure (412): n=A,T,C or G
  unsure (420): n=A,T,C or G
ctgcctcctctttctcccagagtctgagccgaaactacagtccagaggtatagccaggccctgggtcccgtaggcacagaccgttatcattattcagagtatgcagcagcttcagggcagtgtgctantcaagcagagcctagcctgtatttcatagaaacagaactcactttaactgaattattattttttctttatagagtgcaggatgtttttgttgttaacacaggcgtctttctcaggtccgtttgaatcctgaggagtgtgccnatgttttaaggcggngggttgaccacctttgttctncacaagtnaatcanaaatcaaaggctctcctggttctcctctctctgggctggttttttagcgaggcngnagacgcttcacangtaaaccgagagttcacatgggnttgctcang

SEQ ID NO: 3526 - DNA, 140 bp, Homo sapiens
aaacctgagactaacttaaacacttccttgaccttcttgttgcctgttcatttttgtgccaaggaagtagctgccccagtgtatgtcttgccttctccgcgtcattgttggaagaggagagatgcatcgagcagtcccag

SEQ ID NO: 3527 - DNA, 511 bp, Homo sapiens
  unsure (479): n=A,T,C or G
  unsure (504): n=A,T,C or G
ccacgctctcacggaaccactggcatcagatggtgaagtgactgctacccggttgccatctgttgaacagacttttggatgaagtgtgttggggaagaggataaggttatatctaggacaactctttgagttggtccttcatataagaatcgtgacggtaagagaataaacacttgtactgggatcagaatacatgatggatgaaattctttacatgttttagcagaatgaatttgtttaatataataaagtttgctacttatctgtatgtaggttgctaaaaaggattttcttaactcagattttaagccaaataaccatttaacactagtatttgttaaatggggtatttttctgtatttgtatgtttcactataataagggaattaaggataatgtgcattgagaatattttgaaaaataattgactcaaattttatttcttggtcttttgctgtttacctgcccgggcggcctcnaaggcgaattccacacacttggcgnccgtcta

SEQ ID NO: 3528 - DNA, 513 bp, Homo sapiens
  unsure (493): n=A,T,C or G
  unsure (508): n=A,T,C or G
tatttcccagttcgaggccgctgcgcggccctgcgcatgctgctggcagatcagggccagagctggaaggaggaggtggtgaccgtggagacgtggcaggagggctcactcaaagcctcctgcctatacgggcagctccccaagttccaggacggagacctcaccctgtaccagtccaataccatcctgcgtcacctgggccgcacccttgggctctatgggaaggaccagcaggaggcagccctggtggacatggtgaatgacggcgtggaggacctccgctgcaaatacatctccctcatctacaccaactatgaggcgggcaaggatgactatgtgaaggcactgcccgggcaactgaagccttttgaggccctgctgtcccagaaccagggaggcaagaccttcattgtgggagaccagaatctcctttcctgactaccaacctgcttggactttgctgctgaatccattaaggtcctaaccccctggnttgccttggatgccntttcc

SEQ ID NO: 3529 - DNA, 238 bp, Homo sapiens
  unsure (105): n=A,T,C or G
  unsure (137): n=A,T,C or G
  unsure (167): n=A,T,C or G
  unsure (187): n=A,T,C or G
aaattttgaacttgtttcaatcaagttgtagccaaaacaaaaaggtcataattactgtgctcatataagagatgtgacgagggaaggagggagggagaaatgcangaaaggagtggggagaggaggaagggaggaanagagggaggaaagagtaaggtacacatcangttaaaaggggcagaattangaataaaactaagcacttaatctaatctgatcaggaagaaactctgccctt

SEQ ID NO: 3530 - DNA, 519 bp, Homo sapiens
aaaataaataattcagtatgttttattatactcagttgtgcaaccatcaccactacagaacatttttaccaccccaaaaagaaaccgtatactgactagtgctcattccccctgtcccatccttagcagtcaccagtctgtactttctgtctccatggatttgcatattctggacacttcctaaaaatggaatcatgtaattcgtggcctttcgtatttggtttctttcactccgcatgttttcaaggttcatctatactgcagtatgtatgaatacttcattcctttttattgccaagtaacatcctactgtatgaatgaatgcacactctttatccattcattaactgatggacactttgggttgtttccccttttaggctattataagtaatgctatgaacatttgtgttttttgtgggattatatagctaggagtgaaattgctgggtcatagggtaactctatatgaccttttggtaaccttctgaggaactgctagattgttttccaaagcag

SEQ ID NO: 3531 - DNA, 379 bp, Homo sapiens
  unsure (288): n=A,T,C or G
  unsure (303): n=A,T,C or G
aaaagctaggaatggggctggttatggtggctcgtgcctgtaatcccagcactttgggaggccagggcagaaggattgcttgagcccaggattttgagatcagcgtgggcaatgtagtgagaccccgcctcttaaaaaataaaataaaagctagggacagaagaatggactaaaattgaggaaggctgtgaatggaggctaaagatgaacataaagattcatctctgcaaagattggtttttgtgccccctgtctggtgaccatgacagatgacacctgctatcccantgctgcttcctgcanagcacggctgtggtcactcttcaacaaagcagtccaacaaccagcacacatttgattctcctttgagtttttgaca

SEQ ID NO: 3532 - DNA, 388 bp, Homo sapiens
  unsure (368): n=A,T,C or G
cctctgagccccaccatgggcagcttgtactcggagtacctgaaccccaacaaggtccaggaacactataattataccaaggagacgctggaaacgcaggagacgacctcccgccaggtggcctcggccttcatcgtcatcctctgttgcgccattgtggtggaaaaccttctggtgctcattgcggtggcccgaaacagcaagttccactcggcaatgtacctgtttctgggcaacctggccgcctccgatctactggcaggcgtggccttcgtagccaataccttgctctctggctctgtcacgctgaggctgacgcctgtgcagtggtttgcccgggagggctctgccttcatcacgctctcggnctctgtcttcagcctcctgg

SEQ ID NO: 3533 - DNA, 309 bp, Homo sapiens; identical to SEQ ID NO: 35
  unsure (11): n=A,T,C or G
  unsure (229): n=A,T,C or G
  unsure (272): n=A,T,C or G
  unsure (277): n=A,T,C or G
  unsure (289): n=A,T,C or G
  unsure (296): n=A,T,C or G

SEQ ID NO: 3534 - DNA, 363 bp, Homo sapiens; identical to SEQ ID NO: 36
  unsure (291): n=A,T,C or G
  unsure (317): n=A,T,C or G
  unsure (332): n=A,T,C or G
  unsure (350): n=A,T,C or G
  unsure (353): n=A,T,C or G
  unsure (354): n=A,T,C or G

SEQ ID NO: 3535 - DNA, 291 bp, Homo sapiens
cctggggcatctctgtactgaactccaacaaaaccaaggtccagggaagctgtgagggtgcccatccccacctgcttctctcattcccctatggacacctcagctttggattcatgcaggacctccagcagaaggttgtctacctgagctacatggcggtggagtacaatgtgtccttcccccacgcagcacagtggacattctcggctcagaatgcatcccttcgagatctccaagcacccctggggcagagcttcagttgcagtaactcgagcatcattctttcaccag

SEQ ID NO: 3536 - DNA, 110 bp, Homo sapiens
cctgcgcagattcaagagccttagatactggctttccaggcttcccagaaaaagtagctgcaactcgagcaaagcaggttacacccctgaacatacccataggaaagagg

SEQ ID NO: 3537 - DNA, 416 bp, Homo sapiens; identical to SEQ ID NO: 37
  unsure (288): n=A,T,C or G
  unsure (326): n=A,T,C or G
  unsure (329): n=A,T,C or G
  unsure (369): n=A,T,C or G
  unsure (379): n=A,T,C or G
  unsure (385): n=A,T,C or G

SEQ ID NO: 3538 - DNA, 360 bp, Homo sapiens
aaaatatattagaaatgtaaaaattgtatatggggctcacattatatttctattggacagctctgtcctagagccaagctcggactgccaaagattggacatcctgtgactgcaagtttccagtgagcccttactcagcagcttgcttaggtggtctgtggttcatagaaacagagaggaggccaagcatgcgaaaaaggaacgggagaaaacagctctcagggactttaataactacagtctgtaacaaataagcagtgaatgtttgaatttggttggtggaaagctgggatgcaagtcatctctgcctattacgacaaaagcctatcgaccccagcagccagcacaggcaggctgcag

SEQ ID NO: 3539 - DNA, 122 bp, Homo sapiens
ccagaggctgcggtccgtcaagggcttgcctcgcttcagaatcagtaacatagatcttaagtgtaattgattaataagcagtgagttactgtagcttcctttagctctaccgaactcttttt

SEQ ID NO: 3540 - DNA, 271 bp, Homo sapiens
  unsure (1): n=A,T,C or G
naggtctcgaatagagctcttggaagtccctccaaccatggcctgggtctccttctacctactgcccttcattttctccacaggtctctgtgctctgcctgtgctgactcagcccccgtctacatctgccttactgggagcctcgatcaagctcacctgcaccctaagcagtgaacacaacacttacaccatcgatcggactttctgctgtttttgtttgtttctgtatcttgtctcaacttgtggtcagcctttctccctgcatcccagg

SEQ ID NO: 3541 - DNA, 253 bp, Homo sapiens; identical to SEQ ID NO: 38
  unsure (97): n=A,T,C or G
  unsure (120): n=A,T,C or G
  unsure (130): n=A,T,C or G
  unsure (205): n=A,T,C or G
  unsure (215): n=A,T,C or G
  unsure (239): n=A,T,C or G

SEQ ID NO: 3542 - DNA, 138 bp, Homo sapiens
gctcctgccttgcacgttagagagccggtacatgcaggtgggaagctccacacggagaggcgcgccgcgcccgtgataaggttttacctggtacatcggcatggcggaaccaaagcaagagagggtggcgcgtgccaa

SEQ ID NO: 3543 - DNA, 232 bp, Homo sapiens
aaagtcttaggacaaaaacactacgttaagctcaggtacaaactgggtgacaaaaattaaataccgaatgcttttaatgatgcgttattggtaccctgtgacactgcttatagtttctttacttttgaattacagaagcctgtcctggaagacagttttttaacatgctggaaaatcgtccaacatcgattaatttagtactcatccacttttcattttagaaataaacagg

SEQ ID NO: 3544 - DNA, 218 bp, Homo sapiens
gtgctttgcatttaggacacagcccggagccgcagaaggtcagcaggagcacgtctggcaccttcagtaccaggctgggtgagagagcccgagaggggggccgggggggcagtcagggccctgcttcgctgcctgggcccttgtagatggccttctccaggccgtccaccacctccctgtattccaggaacgattggtagtgtgtgcactcaaagcag

SEQ ID NO: 3545 - DNA, 537 bp, Homo sapiens
  unsure (400): n=A,T,C or G
  unsure (450): n=A,T,C or G
  unsure (487): n=A,T,C or G
  unsure (488): n=A,T,C or G
  unsure (502): n=A,T,C or G
  unsure (528): n=A,T,C or G
ctggtccccttcatcttccccaggcaagagggggtaacccgtcaggagctctgctaaaatgcagcccaggctccacatatcaatgggcatgccatacctggccccaaggatcacttctggagcccggtaaaaacgcgactggatgtacgtgtagacacgctgatgctcgtaacaactggagccaaaatcaattactttaataccgcttctaccctgctgctttaacaaaatgttctcgggcttaaggtcacagtgaattattctgtttttgtgcaaagcatccaagcactgcagaatcgagtgggcaaacttgcgaaccaaaggcagactgaagccctggaatttattcttcttgatgagctcatagaggttcatgctcagcagctcaaacgtcatgcanatgtggttgcggaaggtgaaattctccagcatatggatgacattcattgngttatccttgtcctgcttcccaggtgttccaggattnngatctcctccctgnttcccggggaagcgctttcattccgncctttttag

SEQ ID NO: 3546 - DNA, 367 bp, Homo sapiens
aaaagggacccaaggtcaggggcagaaatgggaggcagaggggaggcacccatctcacaccccacccctagggactaaagccgtagccaacagagcagtagtaatccgcgtcgtcttcaggctgcacgggactaatggtgaggacacaggcattgtgggcctcatccttggctgccgagaatcgatcggggatgtcagcaggccggtggtgatcctcctccgagcggtagtagaggagatatcgaggggcactgcctgcccgctgctggtaccaggacacaccgtagtccctgatggtgacgtgctgggggctgagcgtgcaggagagttgagccacttggcctgggaagaccagcagtgcatccag

SEQ ID NO: 3547 - DNA, 268 bp, Homo sapiens; identical to SEQ ID NO: 618

SEQ ID NO: 3548 - DNA, 178 bp, Homo sapiens; identical to SEQ ID NO: 39
  unsure (5): n=A,T,C or G
  unsure (8): n=A,T,C or G
  unsure (129): n=A,T,C or G
  unsure (149): n=A,T,C or G
  unsure (155): n=A,T,C or G
  unsure (165): n=A,T,C or G
  unsure (178): n=A,T,C or G

SEQ ID NO: 3549 - DNA, 194 bp, Homo sapiens
tgaggagcttctgggagatggacacagctatagtcctagagctattcattcatggctgaccagggccatgtacagccggcgctcgaagatgaaccctttgtggaacaccatggtcatcggaggctatgctgatggagagagcttcctcggttatgtggacatgcttggtgtagcctatgaagccccttcgctgg

SEQ ID NO: 3550 - DNA, 317 bp, Homo sapiens; identical to SEQ ID NO: 294

SEQ ID NO: 3551 - DNA, 156 bp, Homo sapiens; identical to SEQ ID NO: 40
  unsure (77): n=A,T,C or G
  unsure (99): n=A,T,C or G
  unsure (101): n=A,T,C or G
  unsure (121): n=A,T,C or G
  unsure (124): n=A,T,C or G

SEQ ID NO: 3552 - DNA, 287 bp, Homo sapiens; identical to SEQ ID NO: 41
  unsure (111): n=A,T,C or G
  unsure (211): n=A,T,C or G
  unsure (220): n=A,T,C or G
  unsure (260): n=A,T,C or G
  unsure (272): n=A,T,C or G
  unsure (275): n=A,T,C or G

SEQ ID NO: 3553 - DNA, 264 bp, Homo sapiens
aaagaattcttcaaccccccaagggacagttatggtcctttgattctctgctgtggcagtaggtgtgcctcatgcccttccagtgcaatgcaagccctccagcctcaccccagagaggatcactgatgtcagcagcagcctgaggctgaatccaggttgaaagaagaataacttgaaaaaatatatttccacacacagaattttgtttttcttccaagttggttaagacatatattttgtttctttttttttttttttttaaaa

SEQ ID NO: 3554 - DNA, 272 bp, Homo sapiens; identical to SEQ ID NO: 42

SEQ ID NO: 3555 - DNA, 252 bp, Homo sapiens
  unsure (91): n=A,T,C or G
  unsure (178): n=A,T,C or G
  unsure (201): n=A,T,C or G
  unsure (233): n=A,T,C or G
  unsure (238): n=A,T,C or G
ggcttccacgcgggtgagccttcaggacttcaggtccagtctgcccatttataaataggaaagcagaggcattgaaacctctaggtcctangctgcttgaaggcatcaaagtgcctgactggtcctcagagcctggcaaagtattcagcttacaacatacatttcatgaatatttgtngaatgaataaataaacggacaanaaggccagacgtggtggctcacgcctgtaatnccagnacttttgggaggcc

SEQ ID NO: 3556 - DNA, 219 bp, Homo sapiens
  unsure (22): n=A,T,C or G
  unsure (171): n=A,T,C or G
  unsure (218): n=A,T,C or G
gtgcctactatgagaagggcgntgcctttgtccagactgagaagttcacattcaccgtgcctgccatgcccgcgctgacccctgccccgagcccagcttcctaacccaagacacacctccccaacctcagtcttcccatctgaacgatgggtcctgaggcacagctctgancacagaggtcccttctgccacctaccatgcaccatgttccttgccang

SEQ ID NO: 3557 - DNA, 262 bp, Homo sapiens
gaaaagtacaggacattcctctgctcctattgcccctgtttccgttcttttcacactgtctgtgggtgctgtgccctgttggaactctctttaacgtcttacgttggagccgctaaccttccccaggtgtttgtcttcattgctttcacagggaaagaattactcgtcccactgacgagttctatgtatgtccctgggaagctgcatgatgtggaacacgtgctcatcgatgtgggaactgggtactatgtagagaagacag

SEQ ID NO: 3558 - DNA, 288 bp, Homo sapiens
ctgcaccgtgtcattggagaggaacttcccatctgcatcctgaagctggcaggtcacaatcttcccatggtgactccactgtggggagaacttgagctcgctccgggtgaagacagacttgatggtcaaggaggtcgaggtgacagcagcctgcctcattggaaccccctctaggagccactgcaattggatcggatacccatagcaggagaaattcagcaagcaggtcagagtgacttcctgggactcttgaatttctggagggagctggatatgaggtggaaaagg

SEQ ID NO: 3559 - DNA, 533 bp, Homo sapiens; identical to SEQ ID NO: 43
  unsure (485): n=A,T,C or G
  unsure (517): n=A,T,C or G
  unsure (533): n=A,T,C or G

SEQ ID NO: 3560 - DNA, 514 bp, Homo sapiens
  unsure (499): n=A,T,C or G
ctggctggcggagcatgagcgccccagatcccaagcactgcaagtccagatgcaacgggagcctggctcaagggacgacaagatccagccggaaagtgtagaagtcacaccccaatggcgggatagcagcccctgtgtgtgagcacccctccatgccaggaggagggccagagatggatgactacatggagacgctgaaggatgaagaggacgccttgtgggagaatgtggagtgtaaccggcacatgctcagccgctatatcaaccctgccaagctcacgccctacctgcgtcagtgtaaggtcattgatgagcaggatgaagatgaagtgcttaatgcccctatgctgccatccaagatcaaccgagcaggccggctgttggacattctacataccaaggggcaaaaggggctatgtggtcttcttggagagcctagaattttattacccagaactgtacaaactggtgactgggaaagacccactcggagattctncaccattgtggtgga

SEQ ID NO: 3561 - DNA, 324 bp, Homo sapiens
ccaggtcagtaagtggaaaaaccccaggggacttctatgatagacggacaactaagcctgagtttttgagacctggtcctcgaaaaactgaagatacctacttcattagttctgcgggaaaacctacaccaggcactcaaggaaaaataaaattagtaaaagaatcttctctgtcacgacaatcaaaagatagtaacccttatgcaactttacctcgtgcaagcagcgtgatctcaactgccgaaggaactacacgaaggacaagcatccatgattttttgaccaaggacagtagactgcctatatcagttgattcaccaccag

SEQ ID NO: 3562 - DNA, 281 bp, Homo sapiens
ctggggcacagctccgcctctcctccagcccctcggtcccatgaggccaaacaatgaggacagaggggctgaggggtgtgtccagggcccagtcccacctcagcaggaaggtggcgtcagcactcgcagtcccagcctcacgccgcatcgcagtcccgggggatcttcacacagggagggtgagctggttaagaaggcgggtgatcctccccccggatgcttcgatacttagccatgtcttccggaaatactttagaaagttcttgaatcaacaggctttt

SEQ ID NO: 3563 - DNA, 388 bp, Homo sapiens
aaaggccacgtgaggaagatgctgcggcatgcggaagcatcagccaccgtggagtacgcatacaatgacaaagccattttggagcagaggaacatactgacggaagagctctatgggaacacatttcagctttacaagtcagcagatcacccaactctggacaaagtgttagaggtacagccagaaaaattagaacttattatggatgaaatgaaacagattctaactccaatggcccaaaaggaagctgtgattaagcactcattggtgcataaagtattcttggacttttttacctatgcaccccccaaactcagatcagaaatgattgaagccatccgcgaagcggtggtctacctggcacacacacacgatggcgccagagtgg

SEQ ID NO: 3564 - DNA, 194 bp, Homo sapiens
cctagcaggtgtgagtttggttcccactgcagccagcaagaagatgatgctgagccagattgccagcaagcaggccgagaatggcgagcgggcaggtagccctgatgtgctgaggtgctcgagtcagggtcaccgaaaagacagtgataagtcccggagccgcaaagatgatgacagcttgtctgaggacctgt

SEQ ID NO: 3565 - DNA, 221 bp, Homo sapiens
cctgtctctgaggggaggctgtgaccggattcttccccgacagagtcaccctgggattcctcagagcaagtgctccggtcgcattccagatcatccactggcaaaagcatcacttcttacacgtggttttcagggaagtacctaatgcagaacgcaagggtggggtggcaggagcgaggctgtacagatacacagaggtacactgtacaaggccggggagg

SEQ ID NO: 3566 - DNA, 512 bp, Homo sapiens
  unsure (445): n=A,T,C or G
  unsure (499): n=A,T,C or G
aaaatttctatccattctgtcaggttctgttggtttatcagttccagtggtagtgtatactgaacaagagcatagaagatcttgaatatctgtttctggatgaggacagactgatcagactggtcagaaagaagctggataaaacgatcctttagaactggcagaaaatgctgcattgctgctaccaatggactccgctcctctggttttttatactcataatttttcacaagctgataaaggcaaagaagaattcctagccaacaagcactgttatcggactgaagataaaagccaattttgtccacaatggcagtccagcggcttggataatcatgtttgatgatgtgatgaatgcatgtagtaagctgtaccctgatgagctcaggagaatggataatggcttctacaatattttctcgaatacaatggcgatcttcttctnggaatagtataagggggatatatcccctggtgctgtttcttcgatcaggccaantctgtgttatcat

SEQ ID NO: 3567 - DNA, 254 bp, Homo sapiens
gttaacataagccattttaattccctgggaagtgggagagtgggtctcccattttccccaagcaccctttttggtaattgtgttctgtgggttggaaggaggtgaagggggacctgggagcgagctgttggtgggtgggaatagggatttggccccgagtggagcagccgcctgttaggagcccaacatggcgcctgaaaagcacatgatgcgaaagggaagagaggagaatccattccctgccagccaggcag

SEQ ID NO: 3568 - DNA, 487 bp, Homo sapiens
aaatctgtttttctaactgggggaaaagattcccacccaattcaaaacattgtgccatgtcaaacaaatagtctatcaaccccagacactggtttgaagaatgttaagacttgacagtggagctacattagtacacagcaccagaatgtatattaaggtgtggctttaggagcagtgggagggtaccagcagaaaggttagtatcatcagatagcatcttatacgagtaatatgcctgctatttgaagtgtaattgagaaggaaaattttagcgtgctcactgacctgcctgtagccccagtgacagctaggatgtgcattctccagccatcaagagactgagtcaagttgctccttaagtcagaacagcagactcagctctgacattctgattcgaatgacactgttcaggaatcggaatcctgtcgattagactggacagcttgtggcaagtgaatttgcctgtaacaagccagatttttacctc

SEQ ID NO: 3569 - DNA, 532 bp, Homo sapiens
  unsure (432): n=A,T,C or G
  unsure (487): n=A,T,C or G
  unsure (525): n=A,T,C or G
agaatacaagtgtggtaaatgccatgtttgtactttatctaacatcttctctttcagtagtcttgttttttttatatcatgtgattgtttgtgtgtcccctttcctcttctttgcttaacacaattatcttgtgttaaggatctcaaagatttcatgagacaagctggggaagtaacgtttgcggatgcacaccgacctaaattaaatgaaggggtggttgagtttgcctcttatggtgacttaaagaatgctattgaaaaactttctggaaaggaaataaatgggagaaaaataaaattaattgaaggcagcaaaaggcacagtaggtcaagaagcaggtctcgatcccggaccagaagttcctctaggtctcgtagccgatcccgttcccgtagtcgcaaatcttacagccggtcaagaagcaggagcangagccggaccggacaagtcccgttctgttagtaggtctcccgtgcctgagaaganccagaaacgtggttcttcaagtagatctaagtctccancattggg

SEQ ID NO: 3570 - DNA, 509 bp, Homo sapiens
  unsure (467): n=A,T,C or G
aaaccttaagaaccacataatactatataatgcttttctgtacaaatctcaagaaacactttcattcattaaaacatcatgaaaatccttaaatgtgttaaatggaaaaaaatgaaaccatgaacaaaaaagctatacatgtaggtgcatatttatctcctcctgagttgggagaaatctttctaagcatagaaacaatggtagcaaaagagaagaatagatttggctggattaacaataaaaaatttctgccagaaatatgaaaattcaatttagacaaaattcaatataaacaaaattaatatagacaaaggtggtaaacaggtggttctcagagaagataaatacatgattatttaacataaaaagaaatgttcaatgtttctagaagacaaataattacaaacctaaacaaattgtatatttgttagattggcataaattataataatccaacattgagttangtggaatataaattggtaaaatatttctggaagacaatttgg

SEQ ID NO: 3571 - DNA, 396 bp, Homo sapiens
cctccagcgtccgggccactcgctcccagcagcacacacccgtcctctctagctctcagcccctccggaagaagcctcgaatgggcttctgaggacacaaggtgggctgccctcaagccccagagagcccctcatccttcctctgggaccagatgtgccttccacagttgaaacttgagaagcagagctcgccaccttctggaggccactgtgatgatgagccaagcaatttggagccaagttgaagggacagggcaacaaaatacagtagtagtttcttttgtattttgtatattcgcctgaagatcatcccgcaaggcaggctggaggtgccggtgggcctgtgttgctgggattttagtctgtgctgggaggcagggctccgctgcgtctcag

SEQ ID NO: 3572 - DNA, 162 bp, Homo sapiens
ccagcctggatctcctcaagtccccaagattcacacctgactctgaaatctgaagacctcgagcagatgatgccaacctctggagcaatgttgcttaggatgtgtgcatgtgtggaagtgtcactggcatgtatacacacacacacacacacacacacttac

SEQ ID NO: 3573 - DNA, 309 bp, Homo sapiens
aaaatcaagtctgttttgttttgacactaaattggtgagaattgaatgctgtcaacgttaaatatgaacataatttcatatcttctaggaaagtgctttaagtcctttttgtaagcttgggaatgtatccacggaaaggatttttcatagacggaatttccagaagtgaatcataactactgttagagcataagcatgcatgattgtgctgtgtagatcagttttgttgaaagtttagattgttgtgtttgtcaattataatttaatgtttcagtttttatatgaaatgttgtaaatgtataccttttt

SEQ ID NO: 3574 - DNA, 174 bp, Homo sapiens
ccacgtgcaggggcaggccctggcccgccatgagcagaagtggagtggatcttcaaatcccactttgtcctcctggacggatcacaggcgccgtaagcctggcgtttgagcacttggaaaattcctctggcaagccaagcccttcctttcccgtagctctctggttgtttcagg

SEQ ID NO: 3575 - DNA, 221 bp, Homo sapiens
ccaggattgagtcctatgaaggaagggaaaagaaaggcatatctgatgtcaggaggactttctgtttgtttgtcacctttgacctcttattcgtaacattactgtggataatagagttaaatgtgaatggaggcattgagaacacattagagaaggaggtgatgcagtatgactactattcttcatattttgatatatttcttctggcagtttttcgattt

SEQ ID NO: 3576 - DNA, 303 bp, Homo sapiens
  unsure (288): n=A,T,C or G
ccatggtgtaggcagtgcaatgtcttcgagtgagagtgaaggtggtaactcattgcatggattctagagttctgtttattctaatccaagttcttccacttaaaaacaatgttcttcctctcattgagtctcattcctcatctataggatgggaataagagcatgtacctggcaggttgttgtaaggattaaatggtgtaaaaaaatgtcaagtgcttgcaactttgaataccaaacttgagtgaaagctcaataaattgttacccaaaaaaaaaaaaaaaaaaaaangcccttcccgggggg

SEQ ID NO: 3577 - DNA, 531 bp, Homo sapiens
  unsure (519): n=A,T,C or G
aaaaaggtaattttcagcattttggcacctaaaagggaaactttcatctgcttacacaggccagaagcaaagacaaagattgcatgttgttcttacagatgacttaaatcatctctttgatgataaaaatatttttaagccgtgaaagttatgagatattctgggtaagcctgattatcaaagaataccacaaatagctttggagatcgtgtattgtttgtcactgagtcaaagagatctgtgggattgtgaggattcttgggtggaggggtgactaatcctgcacgtccctttgtgaagactccagtaagtactcgcacaacgtacatgtgctttctcccattgctgtctggcttggagtaggtgtccttggcagaataactggcatccacagcaaaataggttccttttccataggatacagcatttttcccacacaacttctattaaagccgtgctgattgacatatggcactgagtctgcatctgtcccatggaagaggagtctctcattattcntatggtcattct

SEQ ID NO: 3578 - DNA, 479 bp, Homo sapiens
  unsure (462): n=A,T,C or G
ctgggcccggtgccagcagccctgcccctaatctgcctgcccgggggctcctgagggagacaccctctccccagggctggaggctggacttcagcaggacccactgcagcccttaccccctttcccctgctgtactgtcaggaccccttcccacacaggaaccaccggcccaggctctagctagtcatgacagttccccagtgccaggcactgcaggaggctctgagaggggtcggtggcctctgtctcaactcagctcgctcagcggccctgggaagccaggggaggttctggagccaagctccagccagacccatcccatcagcattgctgcagctccccaagggctctgctgcgtgcttggaagtgaaaattgctgatggagggggtgggtccgacgagaagagaggaagggacagagtccagccacaggtggttctgggcattctccaactcctccanacctctctgaggacctc

SEQ ID NO: 3579 - DNA, 276 bp, Homo sapiens
aaaaaagagagctacctgtatgtcatgcatcccatccaaaacatgtcacaatattttatatatattacatagtatttacaacaaagccccttccatagtatttacaataaagctccttccaaaatcaccaagaggcttctttccagaatagcaagtgctttcaagttactgtaccaagtattctcactaatacagtagtgtatctaaatgggggaggtgggggagtatcaactgcctaatattagttactgaattttcagattagatccctagttt

SEQ ID NO: 3580 - DNA, 273 bp, Homo sapiens
aaagttttattatgaaaacacacagaatcaaatgtgttatccatgtatttgcaacagcagagaaacagtgacagtggaccatccccataggggacacttatcctttggctaaactaatataaataatggaaatgacacctaatacaataacacggcacataaaaaagattaaattaagagaagggacaggaactgcggagaggagtcctgggtatggaggagatgtgtctcatggagaagcatccgggctcaagtgacctttcctgaagactt

SEQ ID NO: 3581 - DNA, 225 bp, Homo sapiens
  unsure (92): n=A,T,C or G
ctggagcagcttgagttagaacggaagcaagcacttgagcagtacgaggaagttaaaaagaagctggagatggcaactaataagaccaaganctggaaggacaaagtggcccatcattgaaggattaattccgactgatagaaccaggttcaaagaaccctcacctgatcactaactggggacctgcagcttttcactgaggcagaacttgaagagagagaagaa

SEQ ID NO: 3582 - DNA, 486 bp, Homo sapiens
aaactctccagagacactactttgaagtgctggaggtgggttttgaaagacaggggtgcataggacctctccgacatcctttcagaatatttcaggtaccaagaagaggtagcaagctcctaactagcttatggaactacctcattctagcatcagggcattctccacttgcccaaaggctctctttgcaataaacatggtttgaaaataactttagggtgcaacaggcaaacaatcaatcatatatacaaataacatgtgtctatcacaaaatttacagaaggtaagaaaacgtgttgttgtgtttccttacaaagtccatattaataaacggaagcagcattttcagctatgaaactgaagcacaaagaaagctgaagaaatccacctcttttattaaaattcttgtaaagttcaattccataaagaaattctagtgtctcatcaagattttcacaaaatatatagaaaactgttcatgtattt

SEQ ID NO: 3583 - DNA, 175 bp, Homo sapiens
ccagacacacacgcccaggcgggagctctcactcttttgggaggggtcattcccaggggaccacagcctctggggaaacatctggggtgggggcagggttgcgtgggttgacaatggcctccttggtctgcgccatgtccgagatgaccccatcagtaatgatgaacagcaccga

SEQ ID NO: 3584 - DNA, 421 bp, Homo sapiens
  unsure (5): n=A,T,C or G
  unsure (8): n=A,T,C or G
  unsure (121): n=A,T,C or G
  unsure (315): n=A,T,C or G
  unsure (335): n=A,T,C or G
  unsure (337): n=A,T,C or G
  unsure (396): n=A,T,C or G
ccacngangacttggggagatacgtaatacaaataaagaccttaaccaatcccaacactttcagaaaaactttcacctgtggggaagtgggggcatgtgactggagagcaatgaacggaantttacactggatctgaattgttactaaaaaagtaactgacacgcacacacaagtggccttcctggcggagcatcaacaaagccaagaggtgcgagtacccaagactcccagagttgttccacccctggggctagctgtatttatgccctcgctcaaagaccagctttttcaaacactaatacctacctgccctnggtggtaacaacactgtaangngctgctcattccactgtaggattttacatttttctcaccatggcacagcctctttttanttcatacccaatagtctagcctggg

SEQ ID NO: 3585 - DNA, 195 bp, Homo sapiens
ctgcttcatcagatcaattctacccgagactttgaaagcatccgattggctcatgaccacttcctgagcaatttgctggctcaatcctttatcctattgaaacctgtgtttcactgcctgaatgaaatcctagatctctgtcacagtttttgttcgctggtcagtcagaacctaggcccactggatgagcgtgga

SEQ ID NO: 3586 - DNA, 429 bp, Homo sapiens
  unsure (387): n=A,T,C or G
  unsure (401): n=A,T,C or G
  unsure (409): n=A,T,C or G
  unsure (429): n=A,T,C or G
aaagcaaaccgtgccccttggcttgccattctttcagcagcacatgccacgttctaagcagatgggcttccgtgatcccgttttctagtttggggtaactgagtcttgaatgctttactagtccggcaatctttggacttaggcttctgccctttgagactcacatgactttctggtttggggtctggtcatttccctttcaatttttgaatctccttctctgttcagttggcttggcaaagtaccctctgttctcatgtcactaattcctgctctaggtcatctttcctttgtgcaagcccacattcccaccatcctgtgaactttgttgtacttggtgttgggcaactgggtgagtgttgtgacaggctcagacctgaatccttnctcaggagcaattnggagaacncaaaattacctggccgggcn

SEQ ID NO: 3587 - DNA, 244 bp, Homo sapiens
aaataagacaatattatcacattaaccaccaaaaaataactagtataacaattcacctggatgatttgcagactatcatttctgtgttctccccatcaaatacaatgaaaagctgatctaaagatatttacaactggagtggaatacacatttttttgaggctagttatatcatggagaatcacacttaatgagatctgactccatcactgtaccaaagaagtcaaggagtcagacgtaaacag

SEQ ID NO: 3588 - DNA, 536 bp, Homo sapiens
  unsure (468): n=A,T,C or G
  unsure (525): n=A,T,C or G
  unsure (527): n=A,T,C or G
aaaatatgcatattctaaaagctcttagcagagttgctgttcagaaaggctgggtgagtgtctgtcttcctagtaacagggcagaggtcagcctgtcctaccacactctcctactgcactctagccagtgttagtaacgtgcttctggtcacattttcacatgaaggctattaggagctattgacaaagtttaagtagacaaatcacataaccagatttgcatttttgattccggcttcagagcctaatagctctattagtcttatgtggcccctaggaggcattcaagataatggtgacactaagcaaaggagggcaagttgaggtggagtgtctgaacaagcaggtctctaacctgcagctatggagaagcaattcagtgtttcctgtggcgggtggagggcatacttacccagcagagcatgtgagactctttgatatgcaccttcatgtattatcttgttcaanttctctgaggttgggatcattattatttcccattttgcagatgagaaaattgagcananaaaggtcac

SEQ ID NO: 3589 - DNA, 332 bp, Homo sapiens; identical to SEQ ID NO: 44

SEQ ID NO: 3590 - DNA, 529 bp, Homo sapiens; identical to SEQ ID NO: 297
  unsure (31): n=A,T,C or G
  unsure (297): n=A,T,C or G
  unsure (313): n=A,T,C or G
  unsure (502): n=A,T,C or G
  unsure (511): n=A,T,C or G
  unsure (523): n=A,T,C or G

SEQ ID NO: 3591 - DNA, 253 bp, Homo sapiens
aaaagcacaaagtgaccttcagccccggagctctccctgcttgccttaaccccttgggcggcgccaggagttacacgagacctctgtcccggagccctgcgctcactcttccctccgccctcactccccagacactgccgaggcgacccctcccagcgtcacctcgaagcccagccaggagtagggggacagcacgtcatagaagagctccacggtgcgcggcaggggccccatgctgcaggctccggaagag

SEQ ID NO: 3592 - DNA, 394 bp, Homo sapiens
ccttagccctgctcctctcaattccatcctgtagagaacaggagtcaggagccgctggcaggagacagcatgtcacccaggactctgccggtgcagaatatgaacaatgccatgttcttgcagaaaacgcttagcctgagtttcataggaggtaatcaccagacaactgcagaatgtggaacactgagcaggacaactgacctgtctccttcacatagtccttatcaccacaaatcacacaacaaaaaggagaagagatattttgggttcaaaaaaagtaaaaagataatgtagctgcatttctttagttattttgagccccaaatatttcctcatctttttgttgttgtcatggatggtggtgacatggacttgtttatagaggacaggtcag

SEQ ID NO: 3593 - DNA, 451 bp, Homo sapiens
  unsure (361): n=A,T,C or G
  unsure (438): n=A,T,C or G
aaagtttgattacatcagctataggagtaaagtgctaacttacaaagcttacagtttgtgacaccagtgataatgcatgcatactgctattttcaccaccaactggtgaaacaatgaaaagacagtttacttttactgagataccgaaatgagtcaaagactatattagccaatataattcctttgtttttagtgtgaaatactatggtagggcctaattaaaaataaaaacaatatggagaacagtaaaacagtcatcaagtgactctaagcttgtatttactctaagcttgtattaagcttgtattgactctactgcctcttgtattttttttttttaatttctattcagggatccaanaattttagtaattattaactgagcagcagattgccactggactgttttaagatttactatcaccaggtcttacatanatacataaatttt

SEQ ID NO: 3594 - DNA, 411 bp, Homo sapiens
cctcaggaaactgacaatcacggcagaaggcgaaggggaagcaggcacgtccggaagcgctcctccagcagggacagctcgctgatgaggtcggtgatggcgttggtaaaggcttcctgggggctgtagtccggcgtggtctgcactcggatgatgatcttgtgctccaaggggtgggggactttgtagccagcaaatagcacttgcgggtcttttaggagttgtgatttaatgatgtttcccagtgtgtggtcttctttgttgatggtgaataaacaggcattgggtaccttggtgtccttgttaatggtgatcttctcgccctcgaagagcaagaacgactcgaagctggaggggcgttcatgctcccgccgccgttgcgtccagaccccaagtgtccgccaccgccgc

SEQ ID NO: 3595 - DNA, 349 bp, Homo sapiens
ccatcctggattggcttcatcagaggaggctgaaggccggatgaggggccccagtgttggagcctcaggaagaaccagcaaaagacagtccaacgagacttaccgagatgctgttcgaagagtcatgtttgctcgatataaagaactcgattaagaaaggagacaagttccatgggatacaacctccctcttgttttgtttgtctctccttttcttttgttactgttcttgctgctagaacttttttacctgcccgggcggccaagggcgaattccagcacactgcggccgttactagtggatccgagctcggtaccaagcttggcgtaatcatggtcatagctgtttt

SEQ ID NO: 3596 - DNA, 345 bp, Homo sapiens; identical to SEQ ID NO: 298
  unsure (20): n=A,T,C or G
  unsure (27): n=A,T,C or G

SEQ ID NO: 3597 - DNA, 305 bp, Homo sapiens
ccaggatggtctcgatctcttgacctcgtgatctgcccgcctcagtctcccaaagtgctgggattataggcgtgagccaccatgcccagcgtcagaacatttagtttttgatagtgaggtcggccagccttcaggacagaatggggcaaagggtttgagcatcattctgagactccaacatgacagccacaggcaccgaccttgagccggtccagtgcagtgcagtgcagcccataagccccttggcttccactagaccaggacacctccctctcacccagcctccccttgctctcaccctttgg

SEQ ID NO: 3598 - DNA, 532 bp, Homo sapiens
ctgctcgacagcatatggcaccagcccattttcaatttgctgagcatcggccaaagcctgtatgcgaaagccaaggagctggacagagtgaaggaaattcaggagcagctcttccatatcaagaagctgttgaagacctgtaggtttgctaacagtgcattaaaggagttcgagcaggtgccgggacacttgactgatgagctccacctgttctcccttgaggacctggtcaggatcaagaaagggctgctggcacccttactcaaggacattctgaaagcttcccttgcacatgtggctggctgtgagctgtgtcaaggaaagggctttatttgtgaattttgccagaatacgactgtcatcttcccatttcagacagcaacatgtagaagatgttcagcgtgcagggcttgctttcacaaacagtgcttccagtcctccgatgcccccggtgtgcgaggatcacagcgaggagaaaacttctggaaagtgtggcctctgcagcaacatgatgcccctgagtactgtgaaa

SEQ ID NO: 3599 - DNA, 272 bp, Homo sapiens
ccagcagaatctgtgatcttgaggtggctgcgcaggccgccagcgcccccagactggtcggagatctcgtacgcgccagtcactagcaggtccttgtgaatctcctcacggaggcacttgcgagagttaatgggcagatggaaggagatggcaaggaccaatctggggccgagcaggaacaaaagcagcaacgctaacggaaaagggccgcgccgggctggtgggccagacaaaccagacatggtgctggagactcgttcgccaccgaaggc

SEQ ID NO: 3600 - DNA, 508 bp, Homo sapiens
  unsure (444): n=A,T,C or G
  unsure (487): n=A,T,C or G
ccaaggtgtcggtgctgaacgtggcggtcctggagaacccgagccctttccacagccccttccggttcgagatcagcttcgagtgcagtgaagccctggcggacgacctggagtggaagatcatttatgttggctcggctgagagtgaggaatttgatcagatcctagactcggtgctggtgggccctgtgccagcagggagacacatgtttgtctttcaggccgacgcccccaacccatccctcatcccagagactgatgctgtgggtgtgactgtggtcctcatcacctgcacctaccatggacaggagttcatccgagtgggctactacgtcaacaacgagtacctcaaccctgagctgcgtgagaacccgcccatgaagccagatttctcccagctccagcgggaacatcttggcctcgaacccccgggtgacccgcttncatatcaactgggacaacaacatggacaggctggaggccatanagacccaggacccctcctggg

SEQ ID NO: 3601 - DNA, 342 bp, Homo sapiens
atttcctacagtgcgaaacttgtcattctagatgttctgttgccagtatcaaaaccggcttccaggctgtcacgggcaagcgagcacagctccgtgccaaagctaactaatttgctaatcactgattttgcaaagcttgttgtggagatgtggctggacaggtttgccatcagagtggatataccgttgtattaaaaacaagataaaaaagctgccaagatttttggcgagtggttggtctgaagtccttgcaagacgctgatgctcaagctgttgacatactcattgcctactttaacacctgtcagagaaacgtgatatggggtaaggaggtgctttttt

SEQ ID NO: 3602 - DNA, 272 bp, Homo sapiens
ctgcgaggagctcactgcggtcctaaccccgccgcagctcctcggacgcaggtttaacttctttattcaacaaaaatgcggattcagaaaagcacccaggaaggttgaacctcgaagatcagacccagggacaagtggtgaagcatacaagagaagtgctttgattcctcctgtggaagaaacagtcttttatccttctccctatcctataaggagtctcataaaacctttattttttactgttgggtttacaggctgtgcatttggatcag

SEQ ID NO: 3603 - DNA, 545 bp, Homo sapiens
  unsure (27): n=A,T,C or G
  unsure (491): n=A,T,C or G
  unsure (512): n=A,T,C or G
aaaatgttttccacatcaactacttangaagaagttacagcaatatgatcttccactgctcaggaagacagagtgaacttggatatgatgaatattaaaaacaaacatacagagcacctgggtctggacttgtgggctaaagaaatgcttcctgaatttgtccgaggtgatgtgttgagcaaccgtgccacagttcaccagcagtgacactctagttcttcagtatattcctgttgtgaacctatttctttgaatttaatcatctgggatgattgctgcagtgtgagtctttagcattttgaaaatcccacagaagagattaagaaggttcctcttcccagaagacactcatataaagcatgcttctatagggttaactgttcagaaattgtaaggtgcatggtcatcaccaggtaagcagctctacaggggcccatggcccatactcatccttgcgtgcccaggggagccagcgtgcatatgaacagtanggaagtggcataaccacgcanaagggctcaggacaacttggcatttttgttgtg

SEQ ID NO: 3604 - DNA, 277 bp, Homo sapiens
ctggacttgcacttgtttgcctgactgctgtccccctaccacagtaccagtctcgtgggctggtaaaggcccctggcaagagctcgttcacgatgtttgtggatctagggatctaccagcctggaggcagtgggaacagcatccccatcacaggtgaggacaggaggacagacctgctgtgaggccagggtccaggggcagcctggaggggagcacagtggtcttgagacgcagcctcacaaagcatagccacaggacctctcccttgggccctagc

SEQ ID NO: 3605 - DNA, 287 bp, Homo sapiens
aaagtagtcttccgtggttgggaagcctcacctcccaagaccagagtcagttggagctggttgttgttggaagggagtgggttggggaactggggtgggggcagggagatccccccgctctgctggcggtcctaggtggagaagaactgcacttcacagagtctggggtttggtgggaaggggatgaggcaggagcagcaagctggggagatgggacccacctcagtccccagcttcattttcttctaatgtttccccactggtggcattctctgcagtcttggagg

SEQ ID NO: 3606 - DNA, 396 bp, Homo sapiens
ccattgggagctcttccacattggctcctgtgtcctttgaccttcctccatcttcttctctttttattttttagcactgccttaatttcggcgctgaggtgggtactgcagagaaaagcaaacactccagaacccatgcactggatccaggagtgggtggtagaaagggatgtggagggaggggtctgagctctaatactaaagacagagacttaggagactgtgaaggggtgtttatggaaagtcagggaattttacctccccgaggagaggaatcctgtgtcatccacctttgtgtcccctcccctgggctcacaacagtgaaccatggggtgaacaaggaccattccactgcctctcccaggttctccaactctgtggcttactatggcctgg

SEQ ID NO: 3607 - DNA, 182 bp, Homo sapiens; identical to SEQ ID NO: 299
  unsure (54): n=A,T,C or G
  unsure (155): n=A,T,C or G

SEQ ID NO: 3608 - DNA, 140 bp, Homo sapiens
cttacggcctgccccgaggccacaacccgacccaggccacgccatccgatccagaccctttctcgcagactcggtccccagaaccacactctgcttcactgactgtcctgcccccatcccgggccgcaccagcagcatgg

SEQ ID NO: 3609 - DNA, 425 bp, Homo sapiens
ccatgtcggagctgaagcttaccagctctctaaagcatttgctagggaatcatgcagagggtccaaaatattttttagaaaagcattcatctgtcccgggatagaagtagaggaagctggtaggcaggcgctagaccctaaagaaggactgctgagccagttcttaagcctgtggtcctgtcggtgaggaaagtgagagcagtccagagcaggtgaaaagagcagagctcattcctgcagtggctcttttgcctaaagcagcattcctcaaacttctcactcgaagcattaagttacggtgagatgctaacacacgctttagacttaagtcaaaatttactgtgaagccacagcaaaccatggcttcacagatgaattagttgctacacaaataagttcgatacataagtacagtaattgctttt

SEQ ID NO: 3610 - DNA, 195 bp, Homo sapiens
aaaacagcctgggtaggaaaattagaagcaagctggatgcagtggctcatgcctgtaatcccaacacttttgggaggtccaggcaggaggatcacttgggcccaggaggtcaagcctgcagcgagctgagatcacaccactgcactccagcctggggtgatagaacaagaccctgtctcaaaaaaaaaaaaaacc

SEQ ID NO: 3611 - DNA, 350 bp, Homo sapiens
cctgtctcagtcagacctctttgctcaatctcatttacacaatgcacaacaatggaggggatcattggagaagtctgggacacaaagtctgccagcattccctctccaatcttgacaggtgttcctatcagggtaggaatgcagggaaggggacagcggtcccgacattctggatgagagaccacacgacagtctcgacacttcagagataatttgccaaattttatccgctttccacatggaacacaggattcaggtttaataaccgtcttagaaacaaagtcatgcaggcgcatccctccattactctgtggcgtgcccacactgtctgtctcagttcttggctccag

SEQ ID NO: 3612 - DNA, 391 bp, Homo sapiens; identical to SEQ ID NO: 45
  unsure (5): n=A,T,C or G
  unsure (9): n=A,T,C or G
  unsure (44): n=A,T,C or G
  unsure (245): n=A,T,C or G
  unsure (308): n=A,T,C or G
  unsure (314): n=A,T,C or G
  unsure (333): n=A,T,C or G
  unsure (368): n=A,T,C or G
  unsure (374): n=A,T,C or G
  unsure (391): n=A,T,C or G

SEQ ID NO: 3613 - DNA, 311 bp, Homo sapiens
aaaaaaatgaaacaaacacaaggcattgctgcagtgactgggacatgctgatgacccagagtgactatgagaaggaacggtgacaagtgtttggatttaatggtctcaccaaggaatgttgggttagaaaagtaaaataactcaacaccaaacatgaaaaagtatgcctggcatccccaaactttatgccattatttttaggttcataatatgaacaactaagtgataaaacctttagattccatattgtgctcagaagattgcgtttcttctgcagatctctagtaaaaaaagatctcttccatattcag

SEQ ID NO: 3614 - DNA, 222 bp, Homo sapiens
aaaggctcacctgattaggtcatgctcacccacaaaaatctcctttttgtaacgccaaatgtggtcaacacacaatccaatcacagtagtgattattccatcatatttgcaggttctacccacagtcaaagcaaatgagttttagaaggcatgtacaacaggaggtaataggtattcttaggggccatcctcaaattttatttgccatattcacccctctgg

SEQ ID NO: 3615 - DNA, 346 bp, Homo sapiens
ccaggttctttacatgtgcttgttttgttcacagcgggccaatccgagcctacatccttgcccacaaggatgccatccagctctggaggacgctcatgggacccaccagagtgttccgagcacgccatgtggccccagattctatccgtgggagtttcggcctcactgacacccgcaacaccacccatggttcggactctgtggtttcagccagcagagagattgcagccttcttccctgacttcagtgaacagcgctggtatgaggaggaagagccccagttgcgctgtggccctgtgtgctatagcccagagggaggtgtccactatgtagctggaacaggagg

SEQ ID NO: 3616 - DNA, 469 bp, Homo sapiens
  unsure (383): n=A,T,C or G
ccacggaagtgggaaagtgaaggcaagaagtgtgtcctgaataaagcttggctggttttcagacaaaaggtcttctgggtaataaatgttgtctggagcagccctcaggagaagaggtaagagcctgtatgggatggtgtcgctgccaacatccttccctgtgatcccacttactcttccctggctgatgagatacttggggttgtgattcatgatgattgaatttccttttgaggatttgtctttgggcagatgaaggaggctcagagaaaagcccctccctgcatgtgctggcccaagtgacctcattttgaagtcaagtggcaaaccagcggcatattttagggtgccatttgctgaatgctttcagcatccctaatccngtcaattgttcccatttgtttcctgaatagcaaacacttccttgaaattcttctcaaactcagcctccagtcttaaatccatttgg

SEQ ID NO: 3617 - DNA, 535 bp, Homo sapiens
  unsure (535): n=A,T,C or G
ccaaccgctcggacgggactttcttggtgcggcagagggtgaaggatgcagcagaatttgccatcagcattaaatataacgtcgaggtcaagcacattaaaatcatgacagcagaaggactgtaccggatcacagagaaaaaggctttccgggggcttacggagctggtggagttttaccagcagaactctctaaaggattgcttcaagtctctggacaccaccttgcagttccccttcaaggagcctgaaaagagaaccatcagcaggccagcagtgggaagcacaaagtattttggcacagccaaagcccgctatgacttctgcgcccgagaccgatcagagctgtcgctcaaggagggtgacatcatcaagatccttaacaagaagggacagcaaggctggtggcgaggggagatctatggccgggttggctggttccctgccactacgtggaggaagattattctgaatactgctgagccctggtgccttggcagagagacgagaaactccagctctgagcccgcgtgggn

SEQ ID NO: 3618 - DNA, 256 bp, Homo sapiens
ccatgcccagggccacagccgagggcacaagcgtgtagtagcgctcccagtagttggtggagacaaagagggcgtagatgcccacagcgaggaacatcatccacttcgttccaaaaaacctgatgagcacaggtgtgtagagcagggcggcgatgggagtcacgttgatgcccatcagcattttgctgtcgatgtcgggcagccccatgttgccatacttcacctcgcggtaggtctcgtcgtagtgcaggatcag

SEQ ID NO: 3619 - DNA, 235 bp, Homo sapiens; identical to SEQ ID NO: 3257

SEQ ID NO: 3620 - DNA, 324 bp, Homo sapiens
aaaataaaactttatgaaagaaaaaacttatatgttacagagaagctaaagcacctgtaatgctaccagaaagttatcatttatgatatatttcatgcacagccctaatttctcggtgtaatatttctgatactttaagtgatcgtttattttaattaccataatttctaatgcactgttttatccttagctttgtttgttattatgttttggaatgaaatttggtcagataatatgattacggtgagttctgtaacagctactggtaatatttttgtaaatcacgtgaaagcattggagcaactgtcttggaaaatgctcttt

SEQ ID NO: 3621 - DNA, 363 bp, Homo sapiens
  unsure (9): n=A,T,C or G
  unsure (169): n=A,T,C or G
  unsure (227): n=A,T,C or G
  unsure (239): n=A,T,C or G
  unsure (257): n=A,T,C or G
  unsure (261): n=A,T,C or G
  unsure (283): n=A,T,C or G
  unsure (306): n=A,T,C or G
  unsure (334): n=A,T,C or G
  unsure (351): n=A,T,C or G
cctagattntcatcaaaaatggttctagcaagttcttacaaggaataactaaataatatgtaggttctaaagaataatgtaataattaggtcaattagatttatctattttccccccttggtagtaccttttaattccgtattttggaaaaatttctcacttccaaggncgtgaaacttaatgatcttccaaagggctgaaattcaacatattcttttataaaaaanaactttcttcanccttcctgagaaaaccangatntacaatttttaacaattttatntgattttagaatatccacttacnggccagaccccatgggtcacatcttgtnatcccaaccttttggangcttgaagtggg

SEQ ID NO: 3622 - DNA, 478 bp, Homo sapiens; identical to SEQ ID NO: 46
  unsure (268): n=A,T,C or G
  unsure (292): n=A,T,C or G
  unsure (332): n=A,T,C or G
  unsure (367): n=A,T,C or G
  unsure (388): n=A,T,C or G
  unsure (392): n=A,T,C or G
  unsure (431): n=A,T,C or G
  unsure (455): n=A,T,C or G
  unsure (464): n=A,T,C or G

SEQ ID NO: 3623 - DNA, 188 bp, Homo sapiens
  unsure (32): n=A,T,C or G
  unsure (51): n=A,T,C or G
  unsure (153): n=A,T,C or G
  unsure (173): n=A,T,C or G
  unsure (176): n=A,T,C or G
cctctttcacatcaatatccattccccagctntggaaggggtgggcatcanggctggtgaatgctacacaattaaagccaagaagatttaccatagcacttaatgaacatactagccatttgtggagtctccactttgtggaggcccttcaantactaaaaggatctcagcanggntaaatgacttgt

SEQ ID NO: 3624 - DNA, 533 bp, Homo sapiens
  unsure (241): n=A,T,C or G
  unsure (532): n=A,T,C or G
attgttatccgctcacaattccacacaacatacgagccggaagcataaagtgtaaagcctggggtgcctaatgagtgagctaactcacattaattgcgttgcgctcactgcccgctttccagtcgggaaacctgtcgtgccagctgcattaatgaatcggccaacgcgcggggagaggcggtttgcgtattgggcgctcttccgcttcctcgctcactgactcgctgcgctcggtcgttcngctgcggcgagcggtatcagctcactcaaaggcggtaatacggttatccacagaatcaggggataacgcaggaaagaacatgtgagcaaaaggccagcaaaaggccaggaaccgtaaaaagccgcgttgctggcgtttttccataggctccgcccccctgacgagcatcacaaaaatcgacgctcaagtcagaggtggcgaaacccgacaggactataaagataccaggcgtttccccctgggaagctccctctgcgctcttctgtttcgaccctgcgcttaccggatccng

SEQ ID NO: 3625 - DNA, 534 bp, Homo sapiens
  unsure (524): n=A,T,C or G
  unsure (529): n=A,T,C or G
cctataccattcaaggacagtatgccattccacagccagatttgaccaagctgcaccagttggcaatgcaacagtctcattttcccatgacgcatggcaacaccggattcagtggcattgaatccagctctccagaggtgaaaggctattgggcaggtttggatgcatctgctcagactacttctcatgaactcaccattccaaacgatttgattggctgcataatcgggcgtcaaggcgccaaaatcaatgagatccgtcagatgtctggggcgcagatcaaaattgcgaacccagtggaaggatctactgataggcaggttaccatcactggatctgctgccagcattagcctggctcaatatctaatcaatgtcaggctttcctcggagacgggtggcatggggagcagctagaacaatgcagattcatccataatccctttctgctgttcaccacccccatgatccatctgtgtatttctgaacagtcagcgattccaggtttacctcggccgcgacccnctaanggcga

SEQ ID NO: 3626 - DNA, 329 bp, Homo sapiens
ccaactcgcatattgttagtgcaggaggggatgggaagattggcattcataagattcacagcaccttcactgtcaagtactcggctcatgaacaggaggtgaactgtgtggattgcaaagggggcatcattgtgagtggctccagggacaggacggccaaggtgtggcctttggcctcaggccggctggggcagtgcttacacaccatccagactgaagaccgagtctggtccattgctatcagcccattactcagctcttttgtgacagggacggcttgttgcgggcacttctcacccctgagaatctgggacctcaacagtgggcag

SEQ ID NO: 3627 - DNA, 440 bp, Homo sapiens; identical to SEQ ID NO: 300

SEQ ID NO: 3628 - DNA, 244 bp, Homo sapiens; identical to SEQ ID NO: 47
  unsure (8): n=A,T,C or G
  unsure (9): n=A,T,C or G
  unsure (12): n=A,T,C or G
  unsure (109): n=A,T,C or G
  unsure (215): n=A,T,C or G
  unsure (222): n=A,T,C or G

SEQ ID NO: 3629 - DNA, 343 bp, Homo sapiens; identical to SEQ ID NO: 48
  unsure (10): n=A,T,C or G
  unsure (25): n=A,T,C or G
  unsure (45): n=A,T,C or G
  unsure (99): n=A,T,C or G
  unsure (104): n=A,T,C or G
  unsure (218): n=A,T,C or G
  unsure (287): n=A,T,C or G
  unsure (313): n=A,T,C or G
  unsure (323): n=A,T,C or G

SEQ ID NO: 3630 - DNA, 537 bp, Homo sapiens
aaagagaaacttaaatcctgttgtattctttcaacacaagcaatgatacttctcagagtctgctcaaaagctcagctctgtggactccgtgacaaaatgtacgcgtccactgccgaccctcttggtttctgaaaccaacctttcttcctgctctcctctttaagagcaaaccccaacatgtataaggtcacagcaagtggtagccaggaaaagctgtgggacccctcatttgagtcacatccatatggcatggagaaagaaaacctctctgccagaaggaactgaactctggaagtcctaaggaaggtcaccatgctcagcagataggaaagcattgccaagggctgtccctcaagagcttagttttcttagggagaccagaaagacatcagatcctgactgccctgttttgctcaagttctgaaatgagtggcatgatgaagagctggtggagctgagggaaagagtcaaccatgtggggtggggtagtgaggaaggtgtatgaggaaacaaactgggccctgacgaaacagcggg

SEQ ID NO: 3631 - DNA, 137 bp, Homo sapiens
ccagtactttcttaatctctttaggggcagctaaaggaaattctgaatatgtgactcttagatccaaccaccatctctcaagaagaaatactactaccaccatttctgccctcaaaactcactaccgtgactatggg

SEQ ID NO: 3632 - DNA, 335 bp, Homo sapiens
caccatcttccccttattgctgtggacttcagggctctgctgctctgtcctccacagaacttgtcaatcagcttcctaccagctaagatctggtgctgtctgatatatcctccctgcggcttgtcactcatgctgtctaatggcgtgaggtgcattgagttgtattctgatgtctttgtccttttgaagccaccgagtaaggtcacacaactttgaaacgagcagggtaccatctgaggatgctggacattccttttaacaattacctaggggagaggcagtcctcagacaggactcaggtgggtgggcctcaaagaggaagggaaagggggcag

SEQ ID NO: 3633 - DNA, 175 bp, Homo sapiens
ctgaaggagcatttgcggaaaggtgacagcctcgtcaacaagccagacgagcgcggcttcacccccctcatctgggcctccgcctttggagagattgagaccgttcgcttcctgctggagtggggtgccgacccccacatcctggcaaaagagcgagagagcgccctgtcgctgg

SEQ ID NO: 3634 - DNA, 441 bp, Homo sapiens
aaaattgggacaagagtaaaactagaccagatgcgacttggctgaccaccaccaaatgtgactttgtgggacgataagtgaagagaaataaatggttctctttgaaggcacactacataaaatatttttgtgggaccacctcgaaatttccatcagacacaccaacacagtgaaatacagtacttgagaattcatgcaccaggtcagaaggttgtaaagtcaacatcgagttttaacaaacccttctgtatatgccctgataaacaagtgaacttaagagcttctagctagtaaataaataagtcagtcctgtggcaaatattacaagtttgaatcacttactagaagaatacttaattccgaaactcggttgggctgtttttatttttttatcatgtggagttgccaaacattaaaccagaagttgcatggaagtttttt

SEQ ID NO: 3635 - DNA, 326 bp, Homo sapiens
cctcaggcgcctttgtctacctgcggcagccgtactatgccacgagggtgaatgcggctgacattgagaaccgagtgttggaactgaacaagaagcaggagtccgaggatacagccaaggctggcttctgggaggagtttgagagtttgcagaagcaggaggtgaagaacttgcaccagcgtctggaagggcagcggccagagaacaagggcaagaaccgctacaagaacattctcccctttgaccacagccgagtgatcctgcagggacgggacagtaacatccccgggtccgactacatcaatgccaactacatcaagaaccag

SEQ ID NO: 3636 - DNA, 446 bp, Homo sapiens
  unsure (409): n=A,T,C or G
cctggagcagcttctcagggcagccctggcccactaaggcccagtaatgagggcagaggggtgcagagccatacctggctacacccacaggtggacacagggagcaagctacttcgctgttctctgggctcattcccccagcacaggagggcctccatgcacactcattccacaggccccactggccctgtcacactcacacggcacgcacttggcgctgcctgctgtctgccttccacctgggggtacaagaggtcacccaagggggcaggcgtgcagggcctcttggatcttctggcggcaataggagtacttctgcaggatctggcggaggtgctcctcctcctcccgctgcaggatacgtaggaagttatgtagttcaggcatgctgaaggcgtcccactgcaangggcaaaaggggagtgtacaggctgcagaagggatgg

SEQ ID NO: 3637 - DNA, 373 bp, Homo sapiens; identical to SEQ ID NO: 49
  unsure (215): n=A,T,C or G

SEQ ID NO: 3638 - DNA, 308 bp, Homo sapiens
ctggagactcaaactcctgtacagctaccttctgggaaatagtttttgacacctatttttcagattcttgtccggaatttctgctgctcttttcaaaaaagggcattaacaattctctggaaataaagcacctgttagcctgacatatgcaaaaagcagggcggcatcacccattacgagctcccccagccagcagtcagtattggattggccttgcctggctggtggcagtttgggagaaacagccaaagaggttagtttatttcaacaccaaattagaccatggcccatttccaacgggtctcttt

SEQ ID NO: 3639 - DNA, 533 bp, Homo sapiens
  unsure (533): n=A,T,C or G
aaaaaatttaatgaataaacactggggtctacagtagtatttgaaggagatctcacaaacaggtttggtttttgaaggttagaactggtggtctagagaattcatttcattccagagaaataaagagaggaatttcttgggttccttcaggaatgcatctagctttgcctcatctttgtttgaactatggatacggcagaagaaaacatgaggatttcacagatttaaggtgcaaaaagtcactgggttctctaagaagtctgggattcttctgctggaaaaataagtttgttgagaaaaaatgagttggaggaggctgttattgaagtgaagcagaattgtttttactaatctgcttattacccactctgtagtgtggaaacaaattattcatgcacaaggtcctcttactgttcctcctaaatgtctcccaaatcccttctctcccttcaatgtccaggccaccagcatgactttttgctgtgtgtagcacctccgcccaggacctaaagatgcaaatctagtcgtagctn

SEQ ID NO: 3640 - DNA, 285 bp, Homo sapiens
ccaagacccaaacacaccacagggatggcacaggatgttggggcagggagatgagcaggtggggctcaggaagaggagaggcaaaggaataagaaaggaaaaggaggaaaaagagaaaaaggcaagatggggcaggggcaagggagagatggggaggtataggagacagacagaaaaaggaaagagaaagcaaagaaaaagagaaagaactacaaggcaaaaaagcatctagaaaaatgagggagaaaagggagaaagacaccctgacacagccctttctttcag

SEQ ID NO: 3641 - DNA, 418 bp, Homo sapiens
  unsure (418): n=A,T,C or G
ctttggatccatttccatcggtccttacagccgctcgtcagactccagcagccaagatggtgaagcagatcgagagcaagactgcttttcaggaagccttggacgctgcaggtgataaacttgtagtagttgacttctcagccacgtggtgtgggccttgcaaaatgatcaagcctttctttcattccctctctgaaaagtattccaacgtgatattccttgaagtagatgtggatgactgtcaggatgttgcttcagagtgtgaagtcaaatgcatgccaacattccagttttttaagaagggacaaaaggtgggtgaattttctggagccaataaggaaaagcttgaagccaccattaatgaattagtctaatcatgttttctgaaaacataaccagccattggctatttacctcn

SEQ ID NO: 3642 - DNA, 371 bp, Homo sapiens
aaaaaagccacacttgaacaggatgaccagaatcacgatcaacaccagaagtccaccaacgctgcctttaatgatgataggcaaagaatggtacttctcatctttcaggaagacgacagtgatcttagttctgtggttctctgcattcagtccctcatatagagatttgttgaaagatatttcaccaaggatctgcagttcagttacatcttttagtaactcctcagagtgatcccaggagatctctgcagccacggtgacattttctttatctgaagcgatgacacagctcactgaatgccattcttccacatgctgaaccgaactgtacgcacaagcgcgctcctgactccaggtgcacaccgtggagg

SEQ ID NO: 3643 - DNA, 345 bp, Homo sapiens
cctggtacctagtaggttcatgatacgtatttattgaatgaatgaggcacaagataatgatgcgaaaaaaatccccaccaagaggggaacaaaaagacctaaccagataatccccaattcatgtcatggcttgaggatggaccattttattctgttaggctagagcaaatctttttcccgaaacaccagggctgacaaggcggcgtgaccagggctggaggatgccgccgtctgtgcaggcttccccctgccctgggtgcatgccccctgcggggctggggagaaggtgacacagaccttgcccttcccacaggcatgccggggagactcacgcttcacgttcag

SEQ ID NO: 3644 - DNA, 289 bp, Homo sapiens
ctgcttggacttcaaagccctccgcctagccatctcagccaggctcaggttccttctcccacccatcaggccaagcaggacttgtcaaacatacacattcaagttcctagcacacagtaggtgctaagtgggaattgattataaacttgaattcttccatcaacaaatatccacctctcctgtccagcttgcctcagatcttcaggttctctcttctctgaggcagctaagcttctacatccttcatgaagtttcctttacttctcgacagaagacagttccctttagg

SEQ ID NO: 3645 - DNA, 538 bp, Homo sapiens
  unsure (516): n=A,T,C or G
  unsure (534): n=A,T,C or G
  unsure (537): n=A,T,C or G
cctcctacacctacctctctctgggcttctatttcgaccgcgatgatgtggctctggaaggcgtgagccacttcttccgcgaactggccgaggagaagcgcgagggctacgagcgtctcctgaagatgcaaaaccagcgtggcggccgcgctctcttccaggacatcaagaagccaggtaaaagaaactggcatttttaggaaattgttctacatagacatgaaccataaaagggaaagtaacctctgggggactagcacctgtttgtattccttaaagtgaaatgatggcaatcatctttcgggactgacctgaaatgaagagaatactcattgctgatcacttgattatttgggcataatgttccaaatggaatacatggtgtgaagtagaagtgacaatttgatgtgggatcggtaaatgtgtatcctactttttttagggtatgatgtgattgctcaagctcagtcaggtactggcaaagacagccacatttgctatttccatcctgcaaanttggagattgagttcaangana

SEQ ID NO: 3646 - DNA, 283 bp, Homo sapiens
ccaagaaacaaaagcaaaatcgtcccattccccagtggattcggatgaaaactggaaataaaatcaggtacaactccaaaaggagacattggagaagaaccaagctgggtctataaggaattgcacatgagatggcacacatatttatgctgtctgaaggtcacgatcatgttaccatatcaagctgaaaatgtcaccactatctggagatttcgacgtgttttcctctctgaatctgttatgaacacgttggttggctggattcagtaataaatatgtaagg

SEQ ID NO: 3647 - DNA, 390 bp, Homo sapiens
cctcaagtctttaccccacccctttcttgttcttccaagaagcagatgcccagttgctcagcagcagcggtagagacttgaatctgcccaccagtcacaaggcgggtcacagattcctcttcctctcttctcctcgttcctctgaaccctccaccaatgtgcctcagcctgtgtgctgtgtggcaacagcattctggttcccactgccaagatctcccaccactctgctgggatctgcagtggcagggagtgggggttgtgtaaaggggaagtcatcttttgagatccagatagacatggtttgtgcacttacgtccagatgggaagcatccttcctgcaaccctaaaataatcatgcagcctctcagacggacgccatcggtcccaagg

SEQ ID NO: 3648 - DNA, 199 bp, Homo sapiens
ccaggctccatgaggtgagggtctcgccttggactccggatagggggtgctcgaccccgcgcccaggcccctccgccttcagccagcgcatcttctgtcggtactgctggacagcatcttgcacacaggcgtccatcatggcctcagtgaggaccccgtccttggaggcatatgccgtggcctgccaggacacggccag

SEQ ID NO: 3649 - DNA, 202 bp, Homo sapiens
  unsure (186): n=A,T,C or G
  unsure (187): n=A,T,C or G
ctgatgcctcactactagatgcagtgctgggaccttcctcttttggagctgtcccatgtacagtggacccaagctcaggaccttcgtggagctgcttctccaacctgagaaactcaagacccatcctcccgctgtcactttggacaatggaaaatctacattttcttttccctttttttttttttnnaaaaaaaattttccc

SEQ ID NO: 3650 - DNA, 290 bp, Homo sapiens
  unsure (273): n=A,T,C or G
  unsure (279): n=A,T,C or G
ccagagggatccccttgaggagctcgctggtgacacatttgtcgtcctccccctcctcctccacctggtcggcccaactgggcttcgaatcaaagtctccagtaggcatcgcaaaaagtattctccacgcagcccaacttgaagatgatgaggatgatgatgtcgataccaagaagcagaagaccgacgaggatgactagacagcaaaaaaggaaaagttaaactaaaaaaaaaaaggccgccgtgacctattcaccctccacttcccgtttnaaaatntaaacgtggtc

SEQ ID NO: 3651 - DNA, 519 bp, Homo sapiens
  unsure (176): n=A,T,C or G
  unsure (431): n=A,T,C or G
  unsure (476): n=A,T,C or G
  unsure (494): n=A,T,C or G
ccatgctgcgtcttctgacttgggtgatcgggacgggctcgcctcgcttacaggttctggcttcagacaccctgaccaccctgtgtgccagcagcagtggtgatgatggctgtgcctttgcagagcaggaggaggtggacgtgctgcttctgtgccttgcagtccccgtgtgccancgtgcgggaaaccgtgctccgggggctgatggaactccacatggtattgccagcacctgatactgatgagaagaatggcctgaaccttctgcggagactctgggtggtcaagtttgacaaggaggaggagatccggaagctggctgagaggctctggtcaatgatgggcctagacctgcaagccagacctctgctccttgctgattgacgacgtgatctatcatgaggcggctgtaaggcaggcaggggccgaanccctctcccaagcagtggcacgttaccagcggcaggccggcggangttatgggcaggctcatngagatttaccaggaaaagctctacc

SEQ ID NO: 3652 - DNA, 207 bp, Homo sapiens
cctaagcctcagtgtgggccaaggctcaaaggtgctggcacaggcttcccagggagaacagaaactcagcagtgaaagccgcagaggggaagaagcaggctgatgtcaacagcgtggggctctgtccctcaccccaaagagagggagtgtgccagatcccaggccaccaagcggggccagctccagcctgggcgatcgtcccagcag

SEQ ID NO: 3653 - DNA, 478 bp, Homo sapiens
  unsure (364): n=A,T,C or G
  unsure (402): n=A,T,C or G
  unsure (405): n=A,T,C or G
  unsure (421): n=A,T,C or G
  unsure (448): n=A,T,C or G
  unsure (454): n=A,T,C or G
  unsure (460): n=A,T,C or G
aaacatgcgatgtccttcagtttacatttgcagattttggtgaaatagcatcttccagtgaagtccactgcgttggtaggagggatgtctgtagagaaaaggtctatttcagtatcagccagcaaaacagccttcattcccctagagctgacacttgtttacagaatttgcaacacaggatggacacgcacctgtccttgaaactacaaatgttggtagacatggcgtcgcaggaaggatgaggtgcgggattttgaaaaaggaaacaagagtaatgctcctactattttgattcccctaggctaaaattcaagtttgcgggacctagagcttttctaagtcctaatattgggaaggaaattangttttttttttttcttgttttccccgggggcggagtanaanaatatttattggattnggaacaggggagcggggcaaacttggnttttcnttttancttttggaaaaaggggag

SEQ ID NO: 3654 - DNA, 364 bp, Homo sapiens
aaataataacagaatttgtcttttttttcctgccacagcaccaaatgccaaagagccactcatctgtagagcttgctgtgctgctggcggaatctgcaaacctgtaccctctgcaagtcttgccattaactgaagacgaccagttgttcccaaatcaattccagtcctttccagttcatcactgtccaaaaatgaactagcactcgaagcatcagtacgttcagtaacatgaccaactttcattggtcttcctgctagttcaaatccattaagttgttccaaagcctttttggcacattctgagtcagaaaatgtaataaatccatatcccttggatcgaccagtttcactgtcccatcatcag

SEQ ID NO: 3655 - DNA, 220 bp, Homo sapiens
gactccaaccagttcttccgggacgtcacggcggactttgagggccagagtcccaaatgcacccagggtgtgcgggaagcgttccgacagatcaaggacttgttcctacagggagcctacgacacggtccgctgggagttcggcacctgccacccgctgtcagacgagaaggacctgacccagctcttcatgttcgcccggaatgccttcaccgtgctgg

SEQ ID NO: 3656 - DNA, 283 bp, Homo sapiens
ccagtgtatatgtttataactagaaagaaagaaaacagagcaccaatcgtggagggagtgacctctgctatattgatgctggcattcttggctcagtatgccagattgcttttaagataacctgaacctaagggctttccagcatcggaaaaccttggaaaagactaaagcttgtttataggcagagatggactaaaggacatgggtgtaagatttggggtggaggccctttgagaatgttcactgcttacattcctgttacagcttgtgtaacctgaagagg

SEQ ID NO: 3657 - DNA, 541 bp, Homo sapiens
  unsure (424): n=A,T,C or G
ctgaaaagcatgcttgatatagtagagcatgatctcctcaaacctcacttgccctctgtcacttatttgagattaggtggcagcatacctcctggtcagaggcattccattgtttcccggtttaataatgatccatctatagacgttctgttacttaccactcacgttggtggcctgggacttaatttgacaggcgctgacacagtagtatttgtggagcatgactggaatcctatgcgagatctacaagccatggaccgggcccatcgcattgggcagaaacgtgtggttaacgtataccgattgataaccagaggaacattggaagaaaaaataatggggttgcagaaattcaagatgaacatagcgaatactgttattagccaagagaattctagtttgcagagcatggggactgatcagnttcttgatctgtttactcttgataaggatggcaaaagcagaaaaagctgacacctttacttctgggaaagcaagtattgaaatcaattttgaaacctgatgatctttggatcaagac

SEQ ID NO: 3658 - DNA, 248 bp, Homo sapiens
ctgttgtggactcttcttaaggagcttcaggctccacagtggtttgtgttcctctctgctcgtgtgtctgacatggagtgaccaagtcccacacactgagtcccctgtgtcccggggctgctggcgcctgggtccttggagaggctgtggggttgggagctagaggtcctcatgggtagagctcaggtccaccctctgagcctgtccaaacaccaggaaggtgcacagccccaggttgctgatgatgg

SEQ ID NO: 3659 - DNA, 165 bp, Homo sapiens
aaatgtcaaaggttttgaggtgtccagaaccacctccagaaaggggtagggtagaatgccacctgttgcctggtgtgtgctaacctggagcaggtaggggtaagactcaatagtcatcttttaccaaatgggtttgccccaggttaataagaggggtctagtagg

SEQ ID NO: 3660 - DNA, 301 bp, Homo sapiens
ctcctcttcctcctcctcctccacctccggcttttgggggatcactgtcctctctcggcagcagaatgagccggcaggtggtccgctccagcaagttccgccacgtgtttggacagccggccaaggccgaccagtgctatgaagatgtgcgcgtctcacagaccacctgggacagtggcttctgtgctgtcaaccctaagtttgtggccctgatctgtgaggccagcgggggaggggccttcctggtgctgcccctgggcaagactggacgtgtggacaagaatgcgcccacggtctgtgg

SEQ ID NO: 3661 - DNA, 256 bp, Homo sapiens
aaaatatacatgactaataaagtgaacattcagaggagccactgctcagcatgttccatgtcggccacttgtggacactgatctcatccaaagaggacagaagtttcaaacatctgagcagtttaagttaaaaataggatgaaggggaaataagagaacaggataagtgtcctcccaagacagcagtggctgatgcccacatggcgcaaacaggctgacttcaatgagtgttcacgggatgtgtgataaagcccag

SEQ ID NO: 3662 - DNA, 148 bp, Homo sapiens
aaatacttatgaaagctttcagacaaaaataaactttcacgttaccatgatgaaactggggttgtttctgttcctccaactgaaagatgggacgctgagctcggggactcggcccccgtggtgcacctcgcaggcgctgtgcgtgtgg

SEQ ID NO: 3663 - DNA, 336 bp, Homo sapiens
ctgacggctatcctgggcacagtggggcgggctgtctcaggcataaagggatggctatcctgggcacagcggggcgggttgtcctggaggcgggctgcaccatcctcatgggggccctccagtggggctttcctgtctcctgagtgtacacaggccccagtgaaggagcccggtgtggagccccataccacagcatgtttcagtgtctgctatattgtgagcctaagccacccaccacagggcttgaccctgcgaccgtcctctcatttctagaacgggaaagcacagtgcttctccttgagggttaaaaggatgctgctgggtgtcagggactta

SEQ ID NO: 3664 - DNA, 361 bp, Homo sapiens
ccaccatgcctatttcttgacttgtgtcttcaggatcaaatgttttacatgtcaggaaagtcactatccgtcctttccagggcaaattatccgacccaccttgacagaacaacttcccacacatggtatcactgaggaaaaagccaaaatgtattgcaggattcaaattgcagttttacataaatgctctaggactatggatatttaactgatggtatttttccctgtagccgagactcttagttgtactttacactcattttcccttatttctcagtaataggatgcctgaacgttagcacaatatattattgctcaaataaacagtattacctagatccctgtacacctaatttttcca

SEQ ID NO: 3665 - DNA, 260 bp, Homo sapiens
ccactcctggaaacccactgatagatgagtttcccccattcttctggcctccgccacatgatcaggaagctggacttgctcttatccaaccactcgaggttccctttcttcctcagttcctctaatacaatctggatcgactccacaggaagctttcgctgtagcttgacgttgttgaagagcgggctctcctgagcttccatcaccgtcatgctggactgtttgtgcaggcggcagaaggacaggaccagcgagcacca

SEQ ID NO: 3666 - DNA, 338 bp, Homo sapiens
ctgcagagccagatgatccacaggatgctgtagtagcaaatcagtacaaacaaaatcccgaaatgttcaaacagacagctcgactttgggcacatgtgtatgctggagcaccagtttctagtccagaatacaccaaaaaaatagaaaacctatgtgctatgggctttgataggaatgcagtaatagtggccttgtcttcaaaatcatgggatgtagagactgcaacagaattgcttctgagtaactgaggcatagagagctgctgatatagtcaagcttgcctcttcttgaggagcaccaacatctgttatttttaggattctgcatagattcctttt

SEQ ID NO: 3667 - DNA, 296 bp, Homo sapiens
  unsure (1): n=A,T,C or G
ncaccctaggcccacttttccacatggcaacaggcgtggagctgggggctactgcccctactgtgtaggcggtgggctccccatagtctcctctgccctgctgccgtgtacctggctcccttcactcatccacatcaccggccctaggccagggtctgaaccacacacacagaatggctgcagtaagcaggaacgggaagagctttcacattcagaacaagaaggggttttttagttactcaaaagcaatctgagcatgttccagcacttcaaccttactctttcagagctttggg

SEQ ID NO: 3668 - DNA, 373 bp, Homo sapiens
ctggcttccagagcaccataataaatagtttcaaagatctgcttattcagtaactgggcttctgcactctcaaaagggtatctcatcaggataaaagcatctgccagaccttgtaccccaattccaatggggcgatggcgtttatttgataggcatgcctctggtgcaggatagtagtttatatcaataattttattcaagtttcggacaacgactttagtgacttcagccaacttcttaaagtcgtatgtgtgttctgatgtgacatacatattcagggccagggaagccaaattacaaacagcaacctcatctttgctggtgtactccactatttctgtgcacaggttgctgcatttgatggttcccaggt

SEQ ID NO: 3669 - DNA, 396 bp, Homo sapiens; identical to SEQ ID NO: 301
  unsure (256): n=A,T,C or G

SEQ ID NO: 3670 - DNA, 418 bp, Homo sapiens
  unsure (359): n=A,T,C or G
  unsure (417): n=A,T,C or G
ccaccagcaagcacgacattaatccttggatctggcagcaacaccaaaaaagagcgtttgctcttcacaggcactccctaaaacgaatctgctcattcgcctggaactcactgagactgcttcacagcatgaccaagcatcgaccacctctcaccaccccaggcgtcccaggtccaacccagcgccctcttctctgcctcctgtctccctgctccttggcccaggacacctgcagccagctaccatgatcctattaacacccaagtcagagcacggcactcacctgctgacaaccctccaacagctcccatctgactctggatagaagccgaagtctcgccatgaccccccaactctgnggcctcactcctccaggtctctccacctggcctccctgccatatctgaagtattagang

SEQ ID NO: 3671 - DNA, 455 bp, Homo sapiens
  unsure (322): n=A,T,C or G
tggggaggaaagagcttccagggggcgaacgcagcacagaggaagaggcctgctccacttgtctgggaacctgggcaggaggcacagaggaagccaaggcctggagctgcaggtcccccggcatctctctctgtcccggcagcccaggatggcctggtgcccccacctgctgcagcaggagccccaaggagtgctagctgagggtggttgctggggtggtcctcatggacagtgaggtgtgcaagggtgcactgagggtggtgggaggagatcacctgggttccaggccatccttgctgagcatctttgagcctgccttccngtgggagcagaaaaggccagaccctgctgagttagaggctgctgggatccactgtttccacacagcgggaagctgctgggaacaggtggcagagaagtgccatgtttgcccttgagccttgcacttctttcag

SEQ ID NO: 3672 - DNA, 402 bp, Homo sapiens
aaaaatgtatatatataaaataaagtgacagattcagagtcactgttcattgtgtgtttgggggctgcacaaagacacctagccaaagaagcaagtgaaagcctgcattctgctcaccatgccatacatcctggcatagggctgtatcctcccaaaggggattcctttgtctaattcataccaggccactgtattgactagagaaggccatggatgggtttctcactcttagaagggaaagaggaggaatggctacagcctccccaagccatagatgggactgcctcccactatccccagacacaaatggtaaattggaaaacctgtatccagacatttcttcagccacttcattggcaccaagcgtctctcaaaatgtcttctgttccttaacctaccagg

SEQ ID NO: 3673 - DNA, 375 bp, Homo sapiens; identical to SEQ ID NO: 50

SEQ ID NO: 3674 - DNA, 150 bp, Homo sapiens
aaataaaataattttatttcataaaaagaaataaactagaaagaacaatgcccttaaaaaaaatgtttgcttcactaaaaccatgttgtgaaggaaattcatcaaaggctgttaccttattcaacacgcgtagaaattgggttctgattt

SEQ ID NO: 3675 - DNA, 548 bp, Homo sapiens; identical to SEQ ID NO: 302
  unsure (493): n=A,T,C or G
  unsure (512): n=A,T,C or G
  unsure (545): n=A,T,C or G

SEQ ID NO: 3676 - DNA, 547 bp, Homo sapiens
  unsure (547): n=A,T,C or G
ccaaagtgatggagctcctgcccacgcacgccttctccacactgttccctgttcttcaggacaatttagaagtttatttgggattacaacagtttatagtcacttcagggtcaggacacaggttgaacatcacggcggagaacgactgccggcggctgcactgctccctgagagacttgagctccctgctgcaggccgtgggccgcctggccgagtactttatcggggatgtgtttgctgcacggttcaatgatgccctcacagtcgtggaaaggttggtcaaagtcactctgtacggatctcagataaaattgtacaacattgaaactgctgtgccatcagtattgaaacctgacctcattgatgtgcatgctcagtccctggctgcgctgcaggcttactctcactggttagcacagtattgcagtgaagttcaccggcagaacacgcagcagttcgtgacactcatctctactaccatggatgcaatcacacctctaatcagcaccaaggtccaagacaactgctgctatctgcgtgccacttn

SEQ ID NO: 3677 - DNA, 279 bp, Homo sapiens
ccacacccagatcatactgatatctacagcatagtcctggctacaggggagctcaactctaactcgtgaagcgggcctggtttagaaagtaacaatgaggtagtaactcatgatagtgctagctgttatcaaaaattaacaactttaggtatttttgttttgggtttttgcggtttaggtacatccaaaatttcttcatagtctgcactcattccctttgcccagcgaccaactgtgaccattcgctctgaattctgactttcagggcaatctttcttt

SEQ ID NO: 3678 - DNA, 232 bp, Homo sapiens; identical to SEQ ID NO: 303

SEQ ID NO: 3679 - DNA, 492 bp, Homo sapiens
  unsure (471): n=A,T,C or G
  unsure (487): n=A,T,C or G
ctgtttgcttttctaggcaaaaagcaagcctgacctggccctggcacccccattatgtttgcagaggggtgaaaagggacttgacagatgtgggcggaggggagggagagcagtgcccttcctggacacctggaggaaccgcacaccccgaactctcgccctttgcattaggcgtggccttgccattgcacctgccaataaaatgtgggcagaaatgttaagacccagggcatgattccgcaggttccggctccctcgtggcatctgggacagcatgctggggacagcttccatcagagcacctcacaacacccacactggacataaaatgtgagcaagaagtaaatatctttttttttctgtttttgagatggagtctcggtggctcacccttggctcactggcaacttctgcctctgggttcaagcaattctcctgcctcagcctccccagtagcttggattacagganacctgcccggcgggcngtcaa

SEQ ID NO: 3680 - DNA, 373 bp, Homo sapiens
ctggggtggcaaacctagtcccttttcaaagctggatcccaaggtgaaagcagccttcacaagagcttacaataaggaagcccaccttactccatactcacttcaagctataaaggcatctagacacagcacaagcccatccctggattcggaatacaatgaagaattaaatgaagatgactctcaatctgatgagaaagaccaagatgctatagaaactgatgccatgatcaagaaaaagacaaaatcttcaaagccttcaaaaccagaaaaagataaggagcccagaaaaggaaaaggaaaaagttcgaagaaatgaaaccatttttcactagcgacagccactttttactctccctcctgaccagtccag

SEQ ID NO: 3681 - DNA, 345 bp, Homo sapiens
aaaattgaacaattttacttattcaaatgaatctgtgaatataaccaaatagttgaaatcccttctcaattaaattgcaaataataatatcacaaagtatcagttctcctttaacaaaagccattctcaagatattaaaggaagaataatcatatataccttacctatcccaagcagtccgccattctgtaatgttaatactcgtcttatattactcaccacaatttaatgacccaataaatgttaagtgttatttgtacttaaaaggacagtaaaatggcatttagttaaatatgataagattagccaagaaaaaggctgttgcaaaaaatgtacagtaatttt

SEQ ID NO: 3682 - DNA, 266 bp, Homo sapiens
ccagaggaacagaccagcttttgcacaatgaagcgcaagggaacaagtggtttgcctggtgtcctacctgtcctgaacctggtcctgtgggccattgaaaagttagatctgtgatctctggggtttttgtggctttgttcaatgcttccactctagggcaggcagagcagtctatactctcccaagcctgcttgacctccaagtagagctgatacagagatctgtgaatattgtgatagaaattctttggtattcatacacttcag

SEQ ID NO: 3683 - DNA, 158 bp, Homo sapiens
aaaaaaacttctacaaaactctagtatgggcttctgactttttccagggtgtagaatttgactcaaaagtaaaaataattttgttttagtatattctactttcattaatgtttttttgttctgaaagtgatattatattgtacatgtaaaattaattt

SEQ ID NO: 3684 - DNA, 412 bp, Homo sapiens
cctgtgagcttccccatggctgggggttatggagtgatgggtgacgatggttctattgattatactgttcacgaagcctggaatgaagccaccaatgtttacttgatagttatccttgttagcttcggtctcttcatgtatgccaaaaggaacaaaaggagaattatgaggatattcagtgtgccacctacagaggaaactttgtcagagcccaacttttatgacacgataagcaagattcgtttaagacaacaactggaaatgtattccatttcaagaaagtacgactatcagcagccacaaaaccaagctgacagtgtgcaactctcattggaatgaaacctcagaaaaagagcaacagaagtaattgtttcaagctcctgattctttctactaaatcatgaacagcttt

SEQ ID NO: 3685 - DNA, 316 bp, Homo sapiens
ccaccttaggagtctgacctctcacttttccagcacgggtcagggaaccatggactttacctccaagcatgcggcctgctacttccagggtagtcagggcctccaccccgcactggcccagagtggcctcatcctccaggggcgcgcctgccaggagcacgacttgatcttccggggcaatgccctccagtgaggctacatgagccttgatctgggcgaccgtttcctggccggtcacctcgaaggtgtgtagctcctgggcgcggacaaagagctgcatattggcgactgaacggcggtcccagctaccgcgaag

SEQ ID NO: 3686 - DNA, 136 bp, Homo sapiens
  unsure (16): n=A,T,C or G
  unsure (110): n=A,T,C or G
  unsure (126): n=A,T,C or G
ctttccccaccaaaanaagatgcactgacattttgaaagaaaattagtttgacatcagatttttcaacagcaatgccttatgtcagaacaaaatggagttacatattcangccaagtgtggtggcncacaccttgt

SEQ ID NO: 3687 - DNA, 312 bp, Homo sapiens
aaaatatattttgtgcaaaataccttactatgctataaaccaccattaaaaaccagtgttttgatttggtacttaaatatttttggagtgaaaattatcactaaagtaacatgactccaacaaaagtatggtttcattataaaagagtactatattgatttgcccaagttttgtaacttagtaaaggtattaacttccttggatttgtactttgtgatttagtatgctgtatcgtgggctggttatgttaactgaaaaaaataaagtcattacctgagttttgcagtgctctaacttaaacagaaagaacag

SEQ ID NO: 3688 - DNA, 290 bp, Homo sapiens
  unsure (1): n=A,T,C or G
  unsure (8): n=A,T,C or G
  unsure (241): n=A,T,C or G
ngttcgangtgccgtgtggacagccctgtcggggacagtgaggagactcagtgcctgtcctgggggacagctctgcctggaggctggggtctctttgaccttcctgagacatcctgatgcctccaccctacttctgtgtcccggcaggagtgagagcgcagagagccctgagacagcccctactggagcacctcctggggagcagccagatgtcatccccgcccagggcgacctgctgggngacctcctcaacctggacctcggccccccagtgagcggcccacccctgg

SEQ ID NO: 3689 - DNA, 418 bp, Homo sapiens
  unsure (323): n=A,T,C or G
  unsure (362): n=A,T,C or G
  unsure (402): n=A,T,C or G
ccaggcaagtggcagagccagacctgggtcttcacacactttcctcttcttgactgtactggcgcaggtgcttaagatttgggggaaggtgggtgggtatctggcctcttctttgggactcaaattgtgatatctctctgagaacccacaggctccctctttagggctgaggtgagaagttctgaaagtcaagcagacacatccaggcatttgggcaagaaacttcttccttccaaatcaaaggtgaaatgaaaacgattatgagcccacgggggatgaacagaggtgaatggtgggctagtctcgaggatggcctaattcanggtttcctaagtgtcagccattcatggaaccacccctgnggatttttgctacctctctggatctgtgcccacttttacngttatgttttttcttt

SEQ ID NO: 3690 - DNA, 184 bp, Homo sapiens
ctgattgaaggagaaaatatggtccttatttgctcagtagcccagggttcagggactgtcacattctcctggcacaaagaaggaagagtaagaagcctgggtagaaagacccagcgttccctgttggcagagctgcatgttctcaccgtgaaggagagtgatgcagggagatactactgtgcag

SEQ ID NO: 3691 - DNA, 382 bp, Homo sapiens
  unsure (348): n=A,T,C or G
  unsure (381): n=A,T,C or G
ctgaagaaaaaagctcaaatgatctagtcactttcgatactgtacttcagatgcgaaatggatattcgagtggaaacctgacaaagtgcgcctgctttgatgtgaactggtatagacaatgaccagtggctgggtcaagtgggatgtctctctgtgagcacaaaggcttatcaaatgacactaaagataagttcaacaaccatcacattggaagggagaaggcgaacatttcatgtttggcgggcatgtgagtgcacaagatggaaagagcgattggagcatcctggtataattacccccattgtgctcttaatggaaatttcaaaggacgggagtattcttgttggntggtgtccaggtttgtggcacttgttccaagang

SEQ ID NO: 3692 - DNA, 408 bp, Homo sapiens
  unsure (221): n=A,T,C or G
ctggtggggctgccagggtacacgcccctgaggatgccattcttgatgcggatcaggcgtttcttccaggagttgatcccagacaggtagacgtgtttcagggcctcccgactgagccggaagtcgaccccgtctggggtcaccgtgaactggaagccacggcctggtgagcttccgccatcctgggggttggtcggcaccttccgcggtgggaattgcanggcgcggctgggtttctgtgcggtgaaggttgctcaaaggtctgggagcctggggggccccagagtctcgtgaggatggtggcattagagtcaaactcaggaacaggccggtctcctgaacctcagtttcacttgggggctcagcccaatcgccagggccttctgctcttgttcctccctccaaggt

SEQ ID NO: 3693 - DNA, 160 bp, Homo sapiens
aaattatctcaaaagtgctttgttgtaaaaataaatttgtgactaaacaaagactttcatattaaatgggttcaattgaactcatttcttattttccaagtgtcaatgtgaaaagaaaataaatgctagcactactgactagtcagtatatctccacttt

SEQ ID NO: 3694 - DNA, 373 bp, Homo sapiens
  unsure (361): n=A,T,C or G
ctgtttggagaaattgccgacgtagtacttcttgaagtcccacatcatcaggattcgggcagggatgcacgactctgcatatgagtggcagcagtcacagaaatacttccctaggtattcgcagtaccggagccgcttcacaaacttaggctctactggagttccacagccggcacagaaaaaattctgggctgccaccacaaggtccctcttgagtggtggatgaatattaaatatgatttgaaatctaggaggagcccagtcttcagtccctctgatcctagacttaaatttaatttcctgtactacattcatactggattcaaagtcttttcggacacgctcttcatttacgactatngagccagacctc

SEQ ID NO: 3695 - DNA, 184 bp, Homo sapiens
aaaatgattacacttcaaataaaggtactaaaatcacgccccccaaatttgtaagcgcttttgttgttattgggtactcactgtgaatagaagtaaatgtacttgacctgtatgagaataaacattttatcaagtacagcaaaaaaaacggaattgattgtgaaagccatggggatgggacttt

SEQ ID NO: 3696 - DNA, 347 bp, Homo sapiens; identical to SEQ ID NO: 51
  unsure (247): n=A,T,C or G

SEQ ID NO: 3697 - DNA, 143 bp, Homo sapiens
  unsure (7): n=A,T,C or G
  unsure (19): n=A,T,C or G
  unsure (100): n=A,T,C or G
ctgctantctgcaacctanttttccctctcacctttaactgacgttttgtcctcaataattacacaaggacctagagtacctataggacaaaaagtatanaataaaaatatgcctttagtcatttggtttttcttaaaaaggt

SEQ ID NO: 3698 - DNA, 311 bp, Homo sapiens
  unsure (151): n=A,T,C or G
  unsure (167): n=A,T,C or G
ctgctgctgccgttgaccatcctgaactctgggggagaggaggagtcagcctggcttgcagacggccgacccagaacatggctgtctgtggtcatttccttccttcacacccagtgggatgggcacagagcccaaccttggtcttaccaantcccccaccctccttntgcatcagcatccaggctcacacagctctccagaagaatttgatcttagctgcagccttggggtacatcactctacacccagtctcttccctgcgcttctttcaaccaacagaagcaaacatcaaaagcacccacacctactgg

SEQ ID NO: 3699 - DNA, 219 bp, Homo sapiens
  unsure (157): n=A,T,C or G
ccaacagagcacttatggcaaggcatctcgagggggtggcaatcaccaaaacaattaccagccatactaaaggagaacattggagaaaacaggaggagatgttaaagtaacccatcttgcaggacgacattgaagattggtcttcttgttgatctangatgattattttgtaaaagactttctagtgtacaagacaccattgtgtccaactgtatatag

SEQ ID NO: 3700 - DNA, 168 bp, Homo sapiens
aaagaaacaccaccaaaaggggattagcttagtccatcccttcctcagtcatctgcttcccaccttcctccaaatgttatcccagaacattctggaggcagggagaaggggaggcagctaatcagagtctgagagcacgatgatctctttctggatcgcattgtgtgg

SEQ ID NO: 3701 - DNA, 313 bp, Homo sapiens
  unsure (313): n=A,T,C or G
gatgtgatggtgtccaccttccacaagtactcgggcaaagagggtgacaagttcaagctcaacaagtcagagctaaaggagctgctgacccgggagctgcccagcttcttggggaaaaggacagatgaagctgctttccagaaagctgatgaacaacttggacagcaacagggacaacgaggtggacttccaagagtactgtgtcttcctgtcctgcatcgccatgatgtgtaacgaattctttgaaggcttcccagataagcagcccaggaagaaatgaaaactcctctgatgtggttggggggtctgccan

SEQ ID NO: 3702 - DNA, 385 bp, Homo sapiens
  unsure (306): n=A,T,C or G
  unsure (324): n=A,T,C or G
  unsure (348): n=A,T,C or G
  unsure (365): n=A,T,C or G
  unsure (366): n=A,T,C or G
  unsure (369): n=A,T,C or G
aaaatacattcaaataaaaagatataagttacttgcagtgaatgcacacatacaacagcagggagagctgagaacataattaaccaatactcttgtgttcagagaataaatagtctgaaaccgtgggactgaggcttgttccttaggggcttttctcaaagtatccttggtggacataaggttaccctcactcaatggaaggacacatcttctgctgccggggaggacacagcatgacagtttcatttatatgggatgttttccttccataaatgtctggaacacggtgtcacaggacaccatggngtacagtgcagccctcanattagaataaataagtcacatggntggactggaatgccacnnacncactattgacttgaaa

SEQ ID NO: 3703 - DNA, 141 bp, Homo sapiens
  unsure (1): n=A,T,C or G
ncgaggtaaaagatactttggattcaattaagaagagtttttaagaaaaaagaggaaggttctggcatggggagctctgcaacccactgctgggtgccagaagcgagctgtggagcggaagatgaagatggcaccatgtgt

SEQ ID NO: 3704 - DNA, 230 bp, Homo sapiens
  unsure (172): n=A,T,C or G
  unsure (177): n=A,T,C or G
ccaatcaaggcttgctggagtgtctcccagccaatcagggccttgaggaggatgtatcctccagccaatcagggcctggggaatctgttggcgaatcagggatttgggagtctatgtggttaatcaggggtgtctttcttgtgcagtcaagggtctgcgcacagtcaatcanggtanagggggtatttctgagtcaatctgaggctaaggacatgtcctttcccatgagg

SEQ ID NO: 3705 - DNA, 286 bp, Homo sapiens
  unsure (195): n=A,T,C or G
ctggatgatggtcttcagcctctttctgtcccttctgtccctcacagcactagtatttcatgttgcacacccactcagctccgtgaacttgtgagaacacagccgattcacctgagcaggacctctgaaaccctggaccagtggtctcacatgggggctacgcctgcatgtaaacacgcctgcaaacgctgcctnccggtaaacacgcctgcaaacgctgcctgcccgtaaacacgcctgcaaacgctgcctgcccacacaggttcgcgtgcagctcaaggaaagg

SEQ ID NO: 3706 - DNA, 239 bp, Homo sapiens
  unsure (5): n=A,T,C or G
  unsure (215): n=A,T,C or G
  unsure (224): n=A,T,C or G
ctggnacacggcagggtcagggttctggatatcaggtaaaacagtcaattgtgtcccagatccaaaggtcagttgccttgcagaaccagaagactccatgtcacccacgaggcagtagtacacagcagtgtcgctcagggaaacccggggcaggctcagagtgctggactttctgtcggcagggataaacagggaggccacttcgtttgtaactnttgtcttgnatccttgaataataa

SEQ ID NO: 3707 - DNA, 208 bp, Homo sapiens
  unsure (3): n=A,T,C or G
aantttgaacatgtactgtgacacttttgacacttttctgaagatttatcccgtttttctagcctttaaggtaatgctgaaggaatacatatactttaatatcaccttttttagaaacttaaaattgaatcaaaataatcagttttaaggaagctttttctcctccttccttttttgtagaggaaagaacacttgataaaaattagat

SEQ ID NO: 3708 - DNA, 354 bp, Homo sapiens
gttggatgcactttatgaaatagcaatggcatggaacttagtaaaaccagttaccattagcagagcatggaagaagattctccctatggtagaggagaaagagagcctggactttgatgttgaagatatttctgtggctactgtggctgccattttacaacacaccaaaggattggaaaatgtgactactgagaaccttgaaaaatggcttgaagtagacagtactgaaccaggctatgaaggtgtaaactgatagcgaaatcatcagaagagcccaaggcccgggcagatgaatccagtgaaaatgaggaggaggaaatagaactaattccagacaaacatattaatctgcaa

SEQ ID NO: 3709 - DNA, 242 bp, Homo sapiens
ctgagacccctgccctgtgagcccttctatccccacaagttgtcaggacaatcccttgtggttagggggaggggcggggagagagctctatttctcagccagtgccgagctaccctccctcctgggctgtgatttcatttgtgcaatgggggtgtgcaggagtcactagcttctcggggcctgtcccgcacatacacgcacttatgcgacatccagacatttgctacattttccaagggctt

SEQ ID NO: 3710 - DNA, 444 bp, Homo sapiens
  unsure (371): n=A,T,C or G
  unsure (404): n=A,T,C or G
  unsure (411): n=A,T,C or G
ctgagaagatccttgaggacaattttggcctattcagaagaggacacagccatgcagatgactccttttcccacccaggtggaggaacttctctgtaatctgaatagcatcttatatgacacagtgaaaatgagggaatttcaggaagatcctgagatgcttatggatctcatgtacagaattgccaagagttaccaggcatctcctgatctgcggctgacctggctccagaacatggcagagaacacaccaagaagaagtgctacacggaggctgccatgtgcctggtgcacgccgctgcgttagtggctgagtatctgagcatgctggaggaccacagctacctgcccgtgggcagtgtcagcttccanaatatttcttccaatgtgctggaggagtcttgnggtcttntgaggacaccctgtccaccttgccccggggcgg

SEQ ID NO: 3711 - DNA, 227 bp, Homo sapiens
  unsure (213): n=A,T,C or G
ccaagggttgggagtgtcccaaagttcaagtcctgggtttctgggtctttggggttggggtcgcagtccccaagttcagaatcaggagtcgtggggtcaaggtgataacatccagattcctagatgactggggtcaaggctggggtcaagggtcccaggttcctggagtcaaggtcattaggcttgaaggtcactgaggctggcagtcatgangaccttggtcacta

SEQ ID NO: 3712 - DNA, 167 bp, Homo sapiens
ccaggctcaggccctggggtgaaaggagacaggtgctgccaagacctggagaaggacaaaagaagacagaatcaagggtgaaggaaaggaccaggcagtggcgaggggtggtgctgctggagcaggtctaagtgggaagcctagtggtcagggatggcccccagagg

SEQ ID NO: 3713 - DNA, 236 bp, Homo sapiens
ctgttgatgaactcatgaaaaaaattatccttgaattcaaagaaaaatgtaaagacaagaagaatcctttaggaaactgtggagatataaatttagtacgactgggtccagaaaagtctattaatagtgaggttctaaagttcagtttggacagccaagtaaaccacagaatgaaaaaagagttaccttctcatgttcaggcgatgcataaaagaaaggaatttctagattatcag

SEQ ID NO: 3714 - DNA, 323 bp, Homo sapiens
ctggctgataagaagggcctccatgttgtggaaatccgggaggaatgtggccctctgcccattgtggttgcgtccccccgggggcccttgaggaaggatccagagccagaagatgaggttccagacgtcaaactgactgggaagatgtgaagactgcacagggaatgaagcgctctgtgtggtctaatttgaagagagccgccacgtaacctctctggccttgtgcaccagttcctgtctgcctgcacctaggagagactcagcccctcacagcttgggatgttaccttgccttttgtttgttttgagggaagtttaatcttt

SEQ ID NO: 3715 - DNA, 251 bp, Homo sapiens
  unsure (62): n=A,T,C or G
  unsure (69): n=A,T,C or G
  unsure (155): n=A,T,C or G
  unsure (168): n=A,T,C or G
  unsure (169): n=A,T,C or G
  unsure (208): n=A,T,C or G
  unsure (216): n=A,T,C or G
  unsure (225): n=A,T,C or G
cctggaaggtgtgcaggagtttggtagaggagtgatctaggtgaggggaatggaaggtgcanagaccanagctgagagggcctgaggcactttccagagcgtggggaggggcctccaccaaggcgagaagggctgcaggtccagatcaccagcgnttgtagacagtanngtggcgcttggagtttacctgagggccagtggagctccngggacctntccggacgnggacctgtggtgactgggaaggacct

SEQ ID NO: 3716 - DNA, 199 bp, Homo sapiens
  unsure (183): n=A,T,C or G
ccagagggaaggcccaagagacgtctctgaagccaccgttcctgattattcagaggcagggtccacagtgagtgactcggtggggctggaggaacccagggtgacccagagggggctctggagcgggtccctaacatctgaaaaagtcctcccagggaactcggagctggaacttccaggcancttcgggggtgacatt

SEQ ID NO: 3717 - DNA, 176 bp, Homo sapiens
  unsure (4): n=A,T,C or G
cttnggtaatggaaatctcgcgagggttaatcttctcttgagaatggcagtcaagaaatgagatggttcacttgactactgagcagttacaccaaggagagcgtgaaggagatgattgagccagagaagaaacgggttgtgatggcaatggtgtgggggaaatgaacttgagcttt

SEQ ID NO: 3718 - DNA, 187 bp, Homo sapiens
  unsure (92): n=A,T,C or G
  unsure (139): n=A,T,C or G
  unsure (160): n=A,T,C or G
aaggtgtgcaggagtttggtagaggagtgatctaggtgaggggaatggaaggtgcagagaccagagctgagagggcctgaggcactttccanagcgtggggaggggcctccaccaaggcgagaagggctgcaggtccanatcaccagcgtttgtagacangtagtgtggcgcttggagtttacctga

SEQ ID NO: 3719 - DNA, 181 bp, Homo sapiens
aaaagcctgagggaacctggaggggggctcccactctctaccttctttcctccgagtttgtgactccgagatggacaaagtgtgtgctgtttttggaggctcccgagcattggcagagctgtggcccaattaatggcccggaaaggctaccgactgggcggtcattgccacaagcctgtaa

SEQ ID NO: 3720 - DNA, 236 bp, Homo sapiens
  unsure (209): n=A,T,C or G
  unsure (213): n=A,T,C or G
  unsure (224): n=A,T,C or G
aaatttaacagtgtcctcttgaaaaaccttaatcacagttaagtgatggcatgggcaatgaattttaatcatatttaggaataaaatactagatattagtgtataacaattagatatatgttaattgagcactacaaagcctgaaagcttaacaaagtggggctataactagtaattttttggtaaaaatatagtgatctttttctacngggnattattattangggacaaattat

SEQ ID NO: 3721 - DNA, 333 bp, Homo sapiens
  unsure (1): n=A,T,C or G
ncgaggtcctcaggcgcctttgtctacctgcggcagccgtactatgccacgagggtgaatgcggctgacattgagaaccgagtgttggaactgaacaagaagcaggagtccgaggatacagccaaggctggcttctgggaggagtttgagagtttgcagaagcaggaggtgaagaacttgcaccagcgtctggaagggcagcggccagagaacaagggcaagaaccgctacaagaacattctcccctttgaccacagccgagtgatcctgcagggacgggacagtaacatccccgggtccgactacatcaatgccaactacatcaagaaccag

SEQ ID NO: 3722 - DNA, 168 bp, Homo sapiens
aggtcctcctgcagtgttccgcacagcaaaccgcacgctatggctgacagccgggatcccgccagcgaccagatgcagcactggaaggagcagcgggccgcgcagaaagctgatgtcctgaccactggagctggaacccaagtaggagacaaacttaatgttattaca

SEQ ID NO: 3723 - DNA, 377 bp, Homo sapiens
  unsure (370): n=A,T,C or G
cgccaacatgggccgcgttcgcaccaaaaccgtgaagaaggcggcccgggtcatcatagaaaagtactacacgcgcctgggcaacgacttccacacgaacaagcgcgtgtgcgaggagatcgccattatccccagcaaaaagctccgcaacaagatagcaggttatgtcacgcatctgatgaagcgaattcagagaggcccagtaagaggtatctccatcaagctgcaggaggaggagagagaaaggagagacaattatgttcctgaggtctcagccttggatcaggagattattgaagtagatcctgacactaaggaaatgctgaagcttttggacttcggcagtctgtccaaccttcaggtcactcancctacaa

SEQ ID NO: 3724 - DNA, 125 bp, Homo sapiens
  unsure (1): n=A,T,C or G
  unsure (11): n=A,T,C or G
  unsure (39): n=A,T,C or G
ngaggtaaatnaacacattccaggcaatgtaaaacagtnaaaagacaaactcaaatccctgagaatggctgggaagggaaaatggtggtaaaaattccaaatgagtgaaacttacaaagggcagt

SEQ ID NO: 3725 - DNA, 190 bp, Homo sapiens
  unsure (169): n=A,T,C or G
cctgggacctggcctgcacccagtctgtggcccagggaggcatggcaccctagcagcaaagcctgggcaaaggctgagccataccagacacagtagcccaggctacacagggcagagctgcgagtgctacctagccctggggccaaggcggggcaccacaatgctgaangagggcactgcccacagccag

SEQ ID NO: 3726 - DNA, 243 bp, Homo sapiens
  unsure (184): n=A,T,C or G
  unsure (225): n=A,T,C or G
  unsure (242): n=A,T,C or G
aaatgaacacattccagacaatgtaagacagtcaaaagacaaactcaaatccctgagaatggctgggaagggaagatggtggtaaaaattccaaatgagtgaaacttacaaagggcagtctcccctgcctgggctctgtcctagacagaagtgacagtgatgactttggtgatgttctccccantgcaagagaactgcattcagaattagacaacctcagtgacnagtatctctcctgcctnc

SEQ ID NO: 3727 - DNA, 321 bp, Homo sapiens
  unsure (284): n=A,T,C or G
  unsure (297): n=A,T,C or G
  unsure (313): n=A,T,C or G
cctgcttgatccataggctcacatttgatcccaactggcggctgcttcttggcattaactttggattcccaaccagtaaatcttagcaagatctgagtttctccaggtatgatattattttgtttgaccatccttatcttcaagggctgtgggatctggcagctcttcatttggcccacaccgtgtgaggttgctcttggtgcaccgaatggggaagtttctacatcagtacctcggagagtccactggaagccctggacagtgggaattggtggcacccccancatggaggccaanaacacacagactgaanctccagga

SEQ ID NO: 3728 - DNA, 116 bp, Homo sapiens
  unsure (1): n=A,T,C or G
ncaggtctgttgatgaactcatgaaaaaaattatccttgaattcaaagaaaaatgtaaagacaagaagaatcctttaggaaactgtggagatataaatttagtacgactgggtcca

SEQ ID NO: 3729 - DNA, 151 bp, Homo sapiens
  unsure (112): n=A,T,C or G
  unsure (126): n=A,T,C or G
  unsure (134): n=A,T,C or G
  unsure (149): n=A,T,C or G
  unsure (150): n=A,T,C or G
cctctcctgtgggttccagaccctgttccagcaacaattgctgggacacctgggccgactgctccacctcgccaggccctggccctctccatctcagccctgacagccaccnagtgataaacacancaggcttnctaaacaatgtgacnna

SEQ ID NO: 3730 - DNA, 174 bp, Homo sapiens
ctgagcaggacctctgaaaccctggaccagtggtctcacatggtgctacgcctgcatgtaaacacgcctgcaaacgctgcctgccaataaacacgcctgcaaacgctgcctgcccgtaaacacgcctgcaaacgctgcctgcccacacaggttcacgtgcagctcaaggaaagg

SEQ ID NO: 3731 - DNA, 228 bp, Homo sapiens
  unsure (75): n=A,T,C or G
  unsure (99): n=A,T,C or G
  unsure (113): n=A,T,C or G
  unsure (130): n=A,T,C or G
  unsure (173): n=A,T,C or G
ccaaagtcccacggctgccctcggtgtgcactcaggctctggaacatcatggctcatcacgtttaacctcctgtntccatctgggtgatgaaaacctanggggagttaacgcnccgctgcagctcattgncaaagccagcttcaggcagagaacgaaggagggagcgacttcngggctgggtgagctggattctgttcctgctctgccaccaccgtaagcggtcccag

SEQ ID NO: 3732 - DNA, 241 bp, Homo sapiens
  unsure (16): n=A,T,C or G
ctcggaagcgcggcancaggcatcgtggggaggtgaagagcttccctaaggatgacccatccaagccggtccacctcacagccttcctgggatacaaggctggcatgactcacatcgtgcgggaagtcgacaggccgggatccaaggtgaacaagaaggaggtggtggaggctgtgaccattgtagagacaccacccatggtggttgtgggcattgtgggctacgtggaaacccctcgagg

SEQ ID NO: 3733 - DNA, 269 bp, Homo sapiens
  unsure (10): n=A,T,C or G
  unsure (237): n=A,T,C or G
aaatactttnattttcatttcacaaaaaaagcaacagtgtttgcagctacacatgcctttcagtcagtgttggtcatatgcaaaacaagttatcacaaatataaagaaaaataagccttttccctttacaagtgaaacaacacaatttgcatatacaatattatatacacatattttcaaaatgtttcacaaaagacagattatgatacaaatttagaattccacccacaagctcanactcaaggaattgaagatctctataggtgttt

SEQ ID NO: 3734 - DNA, 375 bp, Homo sapiens
ctggtacacggcagggtcagggttctggatatcaggtaaaacagtcaattgtgtcccagatccaaaggtcagttgccttgcagaaccagaagactccatgtcacccacgaggcagtagtacacagcagtgtcgcccagggaaacccggggcaggctcagagtgctggactttctgtcggcagggataaacagggaggccacttcgtttgtaacttttgtcttgtatccttgaataataaatcgtggtccttggctgggaaactgttggtaccacgtgatataatcatttgtagcaatgttgttgtggctacaggttatgttcacttcttgtctttcatatgagtccatggagatgggctgggtggtcttagcgag

SEQ ID NO: 3735 - DNA, 273 bp, Homo sapiens
aaataacatcacccttccatgtatagtaaactgttcatatttctacaggtactaagagtacactggaattacgtgttacatataaatggagaggtggagggaagggggaaaacttgcactaagtcgcctaagagataaactgataatgttagtaagacagctttgtattaaaaactttttatactacaagttactgcagaatcatctactgtaagttttatctccccaccagaaaactgaaatgttgatttacaatattaatgtaaaatattt

SEQ ID NO: 3736 - DNA, 579 bp, Homo sapiens
  unsure (535): n=A,T,C or G
aaaaggcactagttttaagtgcacagctcataaattctgctgacattttggattaaccttatgtaggttgccagctaatgaattgtaattgatttcaatcttagctgataaatctaattggtaatttatagaacaaatatttgataagctcctattaattgtcaccccaccaagcggacagctaacatgaattgcacttcactgcagctttagagatcggtttaggctgagacattgcgcctgccttaggttgctgacttctttatttcagagctctggagacacctagtttgaaaaatgttattctgtttttttgtgagaacttagtaaacaagaaaatactcttgagtgaaatgcaatgtatttcttttgtaatcagtgcatttgaaaattcaagccagcatattcctagtagatggaagcaaaattaagttgtctttgtagaaaatgaagagcctttcttccaccaaaaatccctgctgtatgcaaatagccctgattaaccctctcccttctgctgtttcccatattacanacttggagactgtcctcattcccatatgtaatagacatccaaga

SEQ ID NO: 3737 - DNA, 158 bp, Homo sapiens
ccttctagcatggcatcaattccgatataggttcctgtgcgcccaacaccagcactgcagtgcaccacaatgggaccactgaagaaattgctgaaggcattcactctccttctcagtttgaggagcaagtgaggatcctcaggcaccccgtggtctgg

SEQ ID NO: 3738 - DNA, 310 bp, Homo sapiens
aaaaatattaacagttattcatttaatatttttccacactttgaaaccacctttgcaaaaattacaatggagaaaactgtatcagtgaacaagatctgatctaactgactccatcttgcttttaacctccaagctgtccttgttcattcctgggtggataccaaactaactttgggaggaacttagttgatagtttcactttgaaagaaagactgtaacaaaaaccctcttcctgactgggactacactgcctttgcaggactaacaaattagctacaaaattaaaaattatggtttagaagctgtgcag

SEQ ID NO: 3739 - DNA, 325 bp, Homo sapiens
  unsure (9): n=A,T,C or G
  unsure (187): n=A,T,C or G
  unsure (204): n=A,T,C or G
  unsure (306): n=A,T,C or G
  unsure (316): n=A,T,C or G
cctcagccntccggccaagaaaacagaaaatatggggacagaacagtcattcgtgcacatcccagatctcagagagcagcggtgggagctttttgtcctgcagacgcagtgcaaacacttgctctgagtggacgctgctcagggtccggaggctcaccagtttcattagcatccgtgggaacatcantcggtcatggggatggnggatggagacgtaggcatgcagggcttccacatatgtgtgctgcaggctctctacctggagctggtcctgcacgttgggcgcggtctataggtcaccaacanagttgaggancaggtctgg

SEQ ID NO: 3740 - DNA, 420 bp, Homo sapiens
ccatttccccccgcagctttctgccagcactcccaacagtctttccacagaaccgagcactgctcggtgaatgaggactggacgctccagggcacccgcctgccccttatactggaggtcaaatctcaggggcagttggaagtcaagctgaattgtcccacactgatgtggccggcccagggcatcgtggaggtgcacgtcaatcttaggtccatagaaggcaccatctccagagttgaggtcccagggttctccaaattccttcagggcctgtttaaggacctgttcggcctggtcccaaaggcaagggtcccccaggaagccagatggccgggtggacagtgccaggcggaaggagaagccaagaacggcatagacggaacggaggaaatcaagacagctttggatctctgcttccag

SEQ ID NO: 3741 - DNA, 225 bp, Homo sapiens
ccatctctctcaaagcaatgaagaaggagatgaagattggggcctattacacaagataaacagtgtcagcatgctttaccagagagaacattttcatcaccccactactgaaagccatgtataatccaccaccacctgttttttgggggacctgggacacatgaaacacagagaggaaatttcatgggtactggatgaaacaaggaaggaaatgtttttgctcac

SEQ ID NO: 3742 - DNA, 315 bp, Homo sapiens; identical to SEQ ID NO: 3124

SEQ ID NO: 3743 - DNA, 304 bp, Homo sapiens
ccaggccaaggggagctcgctggctgcccatggtgcccggaagaatgggggtggcagtggcaagagtgcaggcaaacgactgctgaagagggctgccaagaacagtgtcgacctggacgactacgaggaagagcaggactacctggatgcctgcttcaaggactcagactacgtttacccctcactggagtcagatgaagacagccccatctttaagtcccggtcgaagaaaaggaaaggctcagacgacgctccctacagcccaacagcaagggtcggcccatcggtgccaagacaggacagg

SEQ ID NO: 3744 - DNA, 273 bp, Homo sapiens
ctgcatctcctgccctgctgtcattacagggatgggcaggctggcatgggggcacccgctgcccctgcctgggtgttgctgtgtattcctgccggccaggggccactgccaggaccacgcctcccttttcatatcccgattcttaagttctgctattgtggtattctggtggagaaaaaagaaccgcgtggctgtttttgaactgcctggaacctaagaccctgaattcttttcccccccaaggggaaaatctatatggaaaacatttatttt

SEQ ID NO: 3745 - DNA, 313 bp, Homo sapiens
ctgcgtcgtgacattgaggacttaaggaccaccatgtcaggcagatatgcccaggacatgggagaaaactgtgtcacacagtgaggaattctgggggattcccccagggaggagctgggctgctgagagcctagtccagcaggtttctgccctgacattctcttgtctgctattcccagagaggtctcagaggggaggggagagcctgcatctgggggccaagggcgaattccagcacactggcggccgttactagtggatccgagctcggtaccaagcttggcgtaatcatggtcatagctgtttcctgtga

SEQ ID NO: 3746 - DNA, 557 bp, Homo sapiens
  unsure (504): n=A,T,C or G
tagcttggcgtaatcatggtcatagctgtttcctgtgtgaaattgttatccgctcacaattccacacaacatacgagccggaagcataaagtgtaaagcctggggtgcctaatgagtgagctaactcacattaattgcgttgcgctcactgcccgctttccagtcgggaaacctgtcgtgccagctgcattaatgaatcggccaacgcgcggggagaggcggtttgcgtattgggcgctcttccgcttcctcgctcactgactcgctgcgctcggtcgttcggctgcggcgagcggtatcagctcactcaaaggcggtaatacggttatccacagaatcaggggataacgcaggaaagaacatgtgagcaaaaggccacaaaaggccaggaaccgtaaaaaggccgcgttgctggcgtttttccatagctccgccccccctgacgaagcatcacaaaaatcgacgctcaagtcaaaaggtgggcgaaaaccccacaggactatnaaagataccaaggcgtttcccccttggaagcttcctcgtgcgctcttcttgtt

SEQ ID NO: 3747 - DNA, 301 bp, Homo sapiens
ccacatcaggaggttgcaggttaaccagaactcaccgacacagcaggagagcagcttggaacctgcaacctagccaaaacctagtgccttggattgggggagaaaacatgcagccattcctctctctctgctggctagaggggattctggcttttcctcccagagccacccctttccctcctcctaaagttgatggtggttctttaaggaaagggagaagtgcacagtgtgatagggcaggaagagaaggaaacggaggagaggaggggactttcccataagcaggcagaagaaaaggcag

SEQ ID NO: 3748 - DNA, 262 bp, Homo sapiens
ctgcctgggccccaccctcctgactcctgctgatggttaagggccgggagcagatgctgccaaggccacatgtaccaaagcaggctgggcccagggttctatttattgccttgctctgccctctcccttccccggttgtgggacaagagccctccctgaacccctgcaaccctccctgaacccctgcaaatgaaaccaaacgtccacctgggtgtgttcattccttcctgtccttcaaagtacttgatagcctttcataagg

SEQ ID NO: 3749 - DNA, 271 bp, Homo sapiens
aaatatttgttcttttaattttgccatatccaaaaacaagtttgtagagtgtccttctagatgcctttttattctttcccaaattttgatcttattaagaacatctaatagtttccacaaatccttatgttaagcttctagagcaggccatatcatttgaggttgaggtgccactataccgccacggttccagataataggaacttttgccatacttcttatcatttctaccatctgaccgttttgttcagatcatctgaacatagtgtgg

SEQ ID NO: 3750 - DNA, 186 bp, Homo sapiens
  unsure (17): n=A,T,C or G
  unsure (22): n=A,T,C or G
  unsure (29): n=A,T,C or G
  unsure (42): n=A,T,C or G
  unsure (61): n=A,T,C or G
  unsure (72): n=A,T,C or G
  unsure (80): n=A,T,C or G
  unsure (114): n=A,T,C or G
  unsure (148): n=A,T,C or G
ctccagcagacccctgnatacntaaaggngcaaaccaacaanatggtgatgctgtcctgcnaggctaaaatntccctcantaacatgcgcatctactggctgagacagcgccangcaccgagcagtgacagtcaccacgagttcctgnccctctgggattccgcaaaagggactattcactgagaa

SEQ ID NO: 3751 - DNA, 283 bp, Homo sapiens
aaaattaaacctaaagaataggaggaccccagcaggcagaggaagggcctgcaggaagatgtaaataattaacataaagaacttttcctttaatagaggagctgaaagaagatcagggaggctacatagagagtgtcagaagggtaatgctagctgaggctggaggtgggccagaccatccagggccatggaaactggatttctttctgagtgcattgggaaacctgcagggttttaagcaggaaactgaaggatccaatttatattaaaaacattactctgg

SEQ ID NO: 3752 - DNA, 362 bp, Homo sapiens
  unsure (9): n=A,T,C or G
ccattttgngtcttttgaggttgtgctgtgggggtttgggtttgagggaagggagcagggtggcggttgaggaacgcttcagccttagctgctacctttcggcagcagtgaaatacaagctgcagcctcggctgccagggctcccttttgacttattgtcgccactgccccttggtgctgtgtggtcccagtggaaggaggggaagattttggaaacctggtagccaccagtaaggtgattctctgccctgttggggcctaaatttgggggcttttgggcaacctctccgtgtactgcgtctgtccacactcgattgggccccaggtgtgtatgaggcgctctggtaaggtgctcaggccag

SEQ ID NO: 3753 - DNA, 240 bp, Homo sapiens
  unsure (213): n=A,T,C or G
  unsure (235): n=A,T,C or G
ttgtgctgccgttcgtgttttgtggggaggcgcagtgtctgtaggccgtgtggcttgcagagtgtctttcggcccaggtaaacgccgctgtgaaggactccaggaaagctgctcccatcacaatccccctgcctgacagccacaggtaagaacacagaatgcacccacaagatggaactgaaagcaaattaatttataaaaaaaaaaaagaanaaagaaagaaaaaaagagaaantttac

SEQ ID NO: 3754 - DNA, 303 bp, Homo sapiens
  unsure (51): n=A,T,C or G
  unsure (290): n=A,T,C or G
aaaggtatccgggagattggcagtttgtaatacaagaattatgtgcccccnagaaggtttctggcctcagtgtctctatctgtctaatgggcagcagatcagacaaggtctgtcggctctgacaggttcaaggccatctcctctaaatgactcactgtctctggagaaatatgtgagcattttcacaggggaaaagaggggtgcattccacagcccctgccccgaggaggtctgagaaggtgaaggaaggccagatgcagagagacaggggatgacaaatgacagctcanatttctcccatgg

SEQ ID NO: 3755 - DNA, 441 bp, Homo sapiens
ctgctccaaagacacccagtatctcaaggattctctggcactggggaaaacagaggaggaggcactgaagcacttccgagtgaagtttaacgaagccctccgtgagagctggaaaaccaaagtgaactggctggcccacaacgtgtccaaagacaacaggcagtagtggctcctcccagccctgggcccaagaggaggcggctgcgggtcgtggggaccaagcacattggtcctaaaggggctgaagagcctgaactgcacctaacgggaaagaaccgacatggctgccttttgtttacactggttatttatttatgacttgaaatagtttaaggagctaaacagccataaacggaaacgcctccttcatgcagcggcggtgctgggccccccgagctgcacctggctctcggctgaggattgtcaccccaagtcttccag

SEQ ID NO: 3756 - DNA, 311 bp, Homo sapiens
cctccacgaagaatatttttggccgatactcttcacagcggatgaaggattggcaggagattatggctctgtatgagaaggacaacacctacttaggtaaagtggcccggcctgggagccctggtatccatggggaagcccactctcagagttctgagataccaggcttataggaggcacagtctgtgagtgggaagagactggagtgtagatgttgcccatttgtaggtggtaaaatcaattgtttttgatggaattgattttccctgagtggagtgctgggggaaggaggaggtccaggccggtagtgg

SEQ ID NO: 3757 - DNA, 290 bp, Homo sapiens
ctgcctgcgcccccgggcttcgcagccttgcttgttttctctggacagcaacagaacagtgttcacagcgattcaaagggtggcattgggttggacgttctgggtacaagccaacctagtcccacgttgtacgtgaatgtttaatgtgctctcaaaacatggaaaataagtttagtgcacatagctaaatcacaaaacatccaatttctctgtttcctcaggaagtcattactgcgccaccacatcacatgaccttaacatgatcaatgtatttctctgccttgacattt

SEQ ID NO: 3758 - DNA, 490 bp, Homo sapiens
  unsure (480): n=A,T,C or G
attgttatccgctcacaattccacacaacatacgagccggaagcataaagtgtaaagcctggggtgcctaatgagtgagctaactcacattaattgcgttgcgctcactgcccgctttccagtcgggaaacctgtcgtgccagctgcattaatgaatcggccaacgcgcggggagaggcggtttgcgtattgggcgctcttccgcttcctcgctcactgactcgctgcgctcggtcgttcggctgcggcgagcggtatcagctcactcaaaggcggtaatacggttatccacagaatcaggggataacgcaggaaagaacatgtgagcaaaaggccagcaaaaggccaggaaccgtaaaaaggccgcgttgctggcgtttttccataggctcccgcccccctgacgagcatcacaaaaatcgacgctcaagtcaaaagggggcgaaaacccgacaggactattaaagataccaggcgttnccccctggaa

SEQ ID NO: 3759 - DNA, 319 bp, Homo sapiens
ccaaaacctgcagtaggggttgcactactgatactcatgccagccatctgctgattcatctgtgagaggctccactggggctgctgagcttgcggcaggccaaacttactctggggtgcacccatttgtcccaccattcctccttgggggccaacaacgttctgaggaagtggcatcacaccagtttgtgcatttcccataaacccattgggcatgggcatgcccaccatcatgcttggactctgtcccatcacatttcctataaggccaggagctgcaggcacaggcacgcccatcgatggaaagccctgaaatgcag

SEQ ID NO: 3760 - DNA, 291 bp, Homo sapiens
ctgatgcagtccgagagctagatggaagaacactatgtggctgccgtgtaagagtggaactgtcgaatggtgaaaaaagaagtagaaatcgtggcccacctccctcttggggtcgtcgccctcgagatgattatcgtaggaggagtcctccacctcgtcgcagagtcaccatcatgtctcttctcaccaccctctgaatctgcattagccagccaactagccctttcagcgtcatgtgaccagcgcgccccattcagcttggctggtgtcgtttcacatgacccaggctgg

SEQ ID NO: 3761 - DNA, 269 bp, Homo sapiens; identical to SEQ ID NO: 2613

SEQ ID NO: 3762 - DNA, 319 bp, Homo sapiens
  unsure (157): n=A,T,C or G
  unsure (196): n=A,T,C or G
  unsure (265): n=A,T,C or G
  unsure (284): n=A,T,C or G
  unsure (293): n=A,T,C or G
  unsure (304): n=A,T,C or G
gtccatgtgactgaactttagacagtgagatataagcagatatcttctgtggcagtgttaggaaactattaaagacagtaagaacattgccctttgccttctttttcctttcttcatttttctgcctggaatgcaagtgtgatggctaacaccctancagccattttagattatgaagatgagagtcactccccangaagggtggacctgaaagctggattctagatgtggaatgacaataccaccctggaccacctacctgtangctgtgtgtgtgtgtgtgngattgacanagagagaaganagatagagagattcc

SEQ ID NO: 3763 - DNA, 198 bp, Homo sapiens
ctgcaaccctgtctacagtaacatctggggatctagatttattcactgagcaaactacaaaatcagaagaagtggcaaagaaacaactttccaaagactccatcttatctctgtatggcacaagaaccattcaacagcaaagtactcctggtgtatttatgggacccacaaatataccatttacctcacaagcaccag

SEQ ID NO: 3764 - DNA, 428 bp, Homo sapiens
cctgggcaccttcaggaaggccacctcctatcaggagcccttttcgtacatgggggagctcttttccaactcttgttacccctatgacagaatcctagtgcctagcattgaatgagctatgtggaatatcaggttaccagggagaaggtagcttggagtcaggagatcaagaaattctcatacctttcatctcttcccagttttccttgtagacagctagccaagcccaacgtccagagcttaccattatcaaaccaaggcacacacatgcacgcgctcagcttagaagacctctatccagcacagatgtccacaaagatacacccttttgttgggagttaatgtccatgttctttcttgttctcattacggtcccaccccctcctccagatcgggcagggctccaagagaaaaggaaagtagaacag

SEQ ID NO: 3765 - DNA, 265 bp, Homo sapiens
ctgtgaaacagaaggcactttgtgctaaaattcagagggtctctcaagagagaacgccacagcagagagacccaatccgcctaagttgcaggcgaccctttagggtggggaggagtatcccccaggaaggcatctgcaaaggaaaaaattgtaatcatgattccaaggcaaaatggctaaagttgggagagaagaaataccaagagagaagacaaaacatggctgtgccaaggactgaggagtgagctttacaaggacttatcag

SEQ ID NO: 3766 - DNA, 216 bp, Homo sapiens
ccaggctcaggccctggggtgaaaggagacaggtgctgccaagaccatacatcagtcatctggcagcagctcgagaagcatgtcctccacgccgtcaatcttgatgtggtacactaagcgccagaaactggagtctgaggatcggtatcgtccatcagggtagagctgccacatgataggcagcaggcttgggcctatctgggtgggggtcatagg

SEQ ID NO: 3767 - DNA, 334 bp, Homo sapiens
ctgaagcaacttgggattaattgcttgattagcttcacgaagcacagagataaggtcgctcacttgctttatgttattaggtgtaaagaaagtgtatgctgtgcctgttttggtactgcgagcagttcttccaattcgatgaatataatcctctgaggagttagggtagtcataattgatgacaaatttcacatcttccacatctgtaaggtgttgcagtgtggcaaaatagcaatgtacggagttttgcacaccacaacagccagaccaaaaataaaaagttagacaattgtattcccaagaaggtacgggctgcaaaaaatacagttaaaat

SEQ ID NO: 3768 - DNA, 235 bp, Homo sapiens
cctaccataacaacatctttacacacagtcaggtaggtctggataatttgctgataaatgaccctatgaagcttcaggtagtcttcttcttgatcttgaataaaagataaaattttgctttctaaccaaaagccagtgtcttccaacatggacaaatacacctttccttctgagcagaacttgtgctgaagatggatgctcaggcgacagtggagaccaaaggctcgcggggcag

SEQ ID NO: 3769 - DNA, 221 bp, Homo sapiens
aaagtggcccagggtcaagctctgagccttcagcatcctccggtatggaatttcttccccacagaaaaagtaagtgacaaccaactcactggcctggagcgcgtggacacctgtcagtttctttggctctttgtgatcttctggagccaggcttggattggagaagggtgtggctcccgtctgaacagtggccgaatgattcctgtccctctgctgactgg

SEQ ID NO: 3770 - DNA, 445 bp, Homo sapiens
aaaaagccaaatacatttctgacaaatggaatgtctgataattatgtgactgaatctcacatttactaattctgaaactagttaataccaaatagttcttaaaagacaaaggaagagaggtgatttctctgtggaaaggttgggcctaagggtcaaggatggttctaagtcatcagactacagagttttaatctaaacatttttcttcattttttactatgttagaaagagcaccctgagatattaaactactacccaaagcatctttttcaaaaagtgaaaaaaggaaaagggaggcactccatcatggattcgcactaaaacaaatatcttctatatatttgaagttgaatgctcttaactaccaactgaatggcacgttcacatatgaagacttcttgtgattcctgcaagacagtgggagtgtgaatgacccctgctgtgg

SEQ ID NO: 3771 - DNA, 203 bp, Homo sapiens
ccaggatggcagagacttccttgtcatcatggagaagtgccagcaggggactgggaaaagcactctacccagacctcacctcccttcctccttttgcccatgaacaagatgcagtggccctaggggttccactagtgtctgctttcctttattattgcactgtgtgaggtttttttgtaaatccttgtattcctatttttttt

SEQ ID NO: 3772 - DNA, 246 bp, Homo sapiens
cctggaaggtgtgcaggagtttggtagaggagtgatctaggtgaggggaatggaaggtgcagagaccagagctgagagggcctgaggcactttccagagcgtggggaggggcctccaccaaggcgagaagggctgcaggtccagatcaccagcgtttgtagacagtagtgtggcgcttggagtttacctgagggccagtggagctccagggacctatcaggacggggacctgtggggactgggaag

SEQ ID NO: 3773 - DNA, 394 bp, Homo sapiens
ctggctcccagcctcgtctacctctgcagagcaaagggccaagatgagaacggtatagccacatgtgtgcgcgcatgtacatgcacacagacacactcatgcattcacgcactcacacacaccaagatctgacggttgtagctggataggggagattctgggaagatgaacagaatcctgaggatgtcaggatgaagaagccataggagcatgatcttacaacttcaaattgatgtccatgagtaaggaggaactgaaggataaaggcaagactactggggtttcagcaaaggtaaagatggctgggtggtgagatgagtggagagagtacctgtgtcatagccctgagggagtccagagatgaaactatgggccccagactttactgcagcag

SEQ ID NO: 3774 - DNA, 183 bp, Homo sapiens
aaacaagaatccactgttgctactgaaaggcaaaagcggcgccaggaaattgaacaaaaacttgaagttcaggcagaagaagagagaaagcaggttgaaaatgaaaggagagaactgtttgaagagaggcgtgctaaacagacagaactgcggcttttggaacagaaagttgagcttgcgcag

SEQ ID NO: 3775 - DNA, 219 bp, Homo sapiens
ctgcaggacatgtagagaaaccaaaccgggaaatcttacaaggagttgaaaagattaatgtcccaacctgatgagattacggccttgagacaataaggtggagcaacagaacaatgggaaagaggactgggagaggaatctaagaaccagatggcttcagctctctagaggagctgagcctattcacagtgcctaacctggaagcctgtgaggaacagg

SEQ ID NO: 3776 - DNA, 357 bp, Homo sapiens
ctgagttcccttcccgaaggtcagctcggggctcccgacgatcatgcagaagtagatgccactgtcttccggcttcacgcttgtgagattgagaatgaaccggcttgcatcccgaaacacagctatcttctcctgttccacctcttcaccgtggatagtcccttttgcggaatcccagagggccaggaactcgtggtgactgtcactgctcggtgcctggcgctgtctcagccagtagatgcgcatgttactgagggagattttagcctcgcaggacagcatcaccatcttgttggtttgcacctttatgtatgcaggggtctgctggaggactgagttgccatggagaactgtcag

SEQ ID NO: 3777 - DNA, 349 bp, Homo sapiens
aaacttgttaaaataccttgttgctagtgctcagaacatctaggtacagtctttatttttaagacagtatctatcctaggcaaatgagagcttgtttttatgtatttaagagtttcctcttgtcatttcaatgtcaaattgatttgactcaatttcatgatttcatctcgctcaaggccatcaaccggtcagagccagagcccttcaaaggctgtatgtgagtatatgagggaaaactttccacataattttacatcatttctatctcatagcagttttagttttctcatagctatctcatagcagttttagttttctcaaattctatgctgtttttgtactactgcag

SEQ ID NO: 3778 - DNA, 370 bp, Homo sapiens
  unsure (370): n=A,T,C or G
ctggtctgggaagaggtggtctgctgacctgtggtatctcagaggggacgttcctcctcctccctgtgcaccaggtgggctgcaccctcctgcctattcaggatgtggatgccacaggagagcagcaggcagtggaaacttcagttgcactggttctcctggtggcaaaggcatgaagcacaggggtcgattaatccaggctactagaaagctccagagcaaagtgtgcgggtcccacaaatgcttggctggtggggtctggatcagtgctgagatagagttggcagaagaagcagaggcactctgcttgctttcctagccagtcctcccctacacacacacacacacacacacacacacacaatctcan

SEQ ID NO: 3779 - DNA, 370 bp, Homo sapiens
aaaatactatttctttggaaatcgaaattcaagaaaattggaataataataattaaaaaaaacctctttgggtaaattttacctgcgttcattggttttaacatgctgccactttttctctttctctctccctctctctttctgcaccattttcaggtaggtggcatatattgtctcctttcaccctttaacacatcccaagaacaggacattatcttctgtaaccgcaatatgcttaccaagttgagaacattttctgcccagcagtccatgttccgggtccatcagttctttgttagtcagtttccgtctgaggcagcgatggcaaggggtcaaggtggacagcagccagtggtagacttgtggattt

SEQ ID NO: 3780 - DNA, 240 bp, Homo sapiens
aaaaaacaaataggtggaaattgggagtttgtaatcagagatagtcaaacactaacgaggtacaatttgaaagtaacattattcagcttctcaaatcaacctattattttttttaccaacttactgtgtttcccaaggtcttaacctcattctagattgttaactacagctaggtttaccagggttcaaggagttgaatgtgaaatactagaggcttatcttgaaggcaaaactttaagg

SEQ ID NO: 3781 - DNA, 320 bp, Homo sapiens
  unsure (5): n=A,T,C or G
ctganaccacaaacaggtactttgagggagatagggtgggataggagttttatgccaaacaggttggctaaacagacatattcaacaggtcacagggggaactatgaatattcatgaaagggggtcatatgtgtgcttgataagcaaacatatgtgttacatacatcccatgttcaccttcgagtggagaattaacattaaaatgcagtaaaattaggttctgtatgttgaaaggtgaaacacaggacacgaagacactttgtacacagcctcggtgaaccagccagaaccagcccatggttgaatactttgtagcctag

SEQ ID NO: 3782 - DNA, 285 bp, Homo sapiens
  unsure (5): n=A,T,C or G
  unsure (9): n=A,T,C or G
  unsure (11): n=A,T,C or G
  unsure (99): n=A,T,C or G
  unsure (109): n=A,T,C or G
  unsure (111): n=A,T,C or G
  unsure (179): n=A,T,C or G
  unsure (200): n=A,T,C or G
  unsure (213): n=A,T,C or G
  unsure (256): n=A,T,C or G
  unsure (276): n=A,T,C or G
  unsure (278): n=A,T,C or G
  unsure (282): n=A,T,C or G
ccatngggnangcccaagagacgtctctgaagccaccgttcctgattattcagaggcagggtccacagtgagtgactcggtggggctggaggaacccanggtgacccananggggctctggagcgggtccctaacatctgaaaaagtcctcccagggaactcggagctggaacttccangcagcttcgggggtgacattngtatccggccagnctagctgggaaaggagaccttgtgtcctggcaacagggagagncaggactgggatggacctcngncgcnact

SEQ ID NO: 3783 - DNA, 441 bp, Homo sapiens
ccagagatggcccttcaagcaacagctcattccacagcagcgaagaggaagggactgaccttgaaggagacatgctggactgcagtgggtctcggcctctccttatggagtctgaagaagaagatgagagctgcagaccccccccggggaagctgggaggagccgttccattcgctccaccagaagtctctcctgagcaagcaaagacagtgcaaggtggaagaaagaaccagtttcaagccttcacacagccagccactgatgggctcagtgagccagatgtttttgccatagctcccttcaggagctcaagggttccaaatgatgacatggacattttctccaaagccccatttgtctccaagagcagtatggctccttcccagccagaggagtcagacgtgtttttgagagctcctttcactaagaagaaaagcatgg

SEQ ID NO: 3784 - DNA, 380 bp, Homo sapiens
  unsure (5): n=A,T,C or G
  unsure (6): n=A,T,C or G
ctganntcaaacaccttgcacaccagctcctctccgctgtgcagatgcacggcacgaaaaacgtggtctccctccagaggttccaacaataagtatttcccgatacaagaaacgcaatgcgacaagttcggagtctcgggcgggctcggggagccgaggttcgggctgaaactctggctgggctccgcggaccttatagacgacaactcttcgaaatcctgggttttgttccgcgatctcccatatctcgctattgtgatgggggtagacctgtgtatgttcatgagtgtgaggatcgcacacgacaaacaaaaaaaaacccgctggagagatgagtcgctggcgagtgcggttgcaggcgcctcggtgccactgatttt

SEQ ID NO: 3785 - DNA, 274 bp, Homo sapiens
ctgctcattgaggagtgttgaacttcaacctgagggggccgacagtgccctccaagacagagacgactgaacttttggggtggagactagaggcaggagctgagggactgattccagtggttggaaaactgaggcagccacctaaggtggaggtgggggaatagtgtttcccaggaagctcattgagttgtgtgcgggtggctgtgcattggggacacataccccttagtactgtagcatgaaacaaaggcttaggggccaacaaggcttccag

SEQ ID NO: 3786 - DNA, 351 bp, Homo sapiens
aaatgtgtttggtaactattggaaaattttctcttcttaattatgttctgtgtattgtattgatcctgaattgtatagttaatagtgacttttcaagatggggcatgctcaagatcgaacagataataaaagatatgcacatagaatactaattgtagcttttttttcttctggaacatttcagttcttcaccctctagcttcttccaaatatcagtattcccacttgcatagaagtgcagaattgaagagttgggtgttacataaataggctaagtgtttggatgacttgttcaaggtgacaaaattttaattccagttttctgactcctagtacaccacacacaccttt

SEQ ID NO: 3787 - DNA, 169 bp, Homo sapiens
aaaaacacaggttgccaaggcaggctgcctagttcctatcatggccctgccacttggcagttctatgccctccacttctctgtgcctcagttccctcaggaagaactgagtattcactctttccgtgcgctgagcacagtggagggcatgagggcactgagaggagcag

SEQ ID NO: 3788 - DNA, 237 bp, Homo sapiens
cctgaccatggagaccccggcttggtcccacctaatctctgcagaccacaggttggtgacgggtctctgggatgaggctggagctgggagcacctcaggctcaaaggaacttagcatttggctccaggaatggatagcccagggtgggcggcagcgtttccattttcaacacacccaacctcagcacaagactcccagatctgcaacggggatggtgacagtctcagtcgactgtgg

SEQ ID NO: 3789 - DNA, 446 bp, Homo sapiens
ccattattcagttccaaagctgcttccacgttttcaggtatctttacagcaatacccttctgctctggtaccaatcttctgtattggtctgttcttatactgctgtaaagacatacctgtgactgggtaatttataaagataagaggttgaatcagctcctgttctgtgggctgttcagacttctgcttttggggtggcctcaggaaacttacaatcatggtcaaagttgaagaggaagaaggtacatcatcacatgacctgagaaggggagacagagagagagaaggaggaggtggtacacaatttcaaacaaccagatcttgttaaaaactctatcatgagaacagcaagggggaaatccaatcccgtgattcaattacctcccacgaagaccctcctccaattctgagaatgaaaacttgacatgatatttgggtgggataac

SEQ ID NO: 3790 - DNA, 376 bp, Homo sapiens
cctgaaggacccagggccctctggctggatgcgtttgcctatcaggacccagaattacttacagacctgtttagggctaggcttggcctctttcttgagctcatctggaggggtgtggcaacactcattcttcatccttattctccccggctgtgggcaacactggtcctcagtgtcaccagatggtcctcctctgtgcccatgacccctcagcagccaaggctggccctgccagataaatgtgtgtgcccatgatcacacccaggggcacaggccacatacgtttccctgaaaccttgggctccagcctccatcccgtccatgtgggagggaacttgggtcccagcagtgtgtctttcagcaccaagtcatgttt

SEQ ID NO: 3791 - DNA, 298 bp, Homo sapiens
aaagctcgtaaattatctcaggaattttccatttaatattttcaggctgtggctgaccgtgagtaacaaacccaggaaagcgaaactgcagaacagtggatgggagaaagggtgaattactgtatattcatgagggatattagtccatagtttcttttttcccttttaacaaatttttgggttttgtatatagtttgtctggttttggtatcagggtaatactagcttcataaaatgaattggaaagcgtttcttctgttttcctaaaaagattatatggaattagcattcattcttt

SEQ ID NO: 3792 - DNA, 117 bp, Homo sapiens
  unsure (89): n=A,T,C or G
aggtgcaaaccaacaagatggtgatgctgtcctgcgaggctaaaatctccctcagtaacatgcgcatctactggctgagacagcgccangcaccgagcagtgacagtcaccactagt

SEQ ID NO: 3793 - DNA, 322 bp, Homo sapiens
ctggatcatacggttgcagtccgtctaagaaataattactaatgaaactggcagagctttgactgttttagctttgcaagaaacccaaatgaggaatgctatctatcagaaaagactggccttagactacttgctagtagctgaaggagtttgtggaaaatttaacttaaccaactgctgcctacaaataaatgatcaaggacaggtggttaaaaacatagtcagggacatgacaaaggttgcacatgtgcctgtagaggtttggcacgagtttaatcctgagtctttatttgaaaaatggtttccagctataggaggattt

SEQ ID NO: 3794 - DNA, 390 bp, Homo sapiens
  unsure (5): n=A,T,C or G
  unsure (229): n=A,T,C or G
  unsure (280): n=A,T,C or G
  unsure (283): n=A,T,C or G
  unsure (319): n=A,T,C or G
  unsure (325): n=A,T,C or G
  unsure (344): n=A,T,C or G
  unsure (363): n=A,T,C or G
  unsure (377): n=A,T,C or G
ctgcngcatcatctcctcctgcccagggccccatgctattgtcctagttctgctgctgggccgctacacagaggaggagcagaaaaccgttgcattgatcaaggctgtctttgggaagtcagccatgaagcacatggtcatcttgttcactcgcaaagaagagttggagggccagagcttccatgacttcatagcagatgcggatgtgggcctaaaaagcatcgtcaangagtgcgggaaccgctgctgtgcctttagcaacagcaagaaaaccagtaangcntagaaggaaagtcaagtgcaggagttggtggagctnatatanaaaatggtgcattgcaacnaaggggcttactttttctnatgacatatacaangacacacacgaaa

SEQ ID NO: 3795 - DNA, 323 bp, Homo sapiens
  unsure (1): n=A,T,C or G
  unsure (12): n=A,T,C or G
  unsure (13): n=A,T,C or G
  unsure (109): n=A,T,C or G
  unsure (133): n=A,T,C or G
  unsure (166): n=A,T,C or G
  unsure (198): n=A,T,C or G
  unsure (203): n=A,T,C or G
  unsure (209): n=A,T,C or G
  unsure (222): n=A,T,C or G
  unsure (239): n=A,T,C or G
  unsure (263): n=A,T,C or G
  unsure (266): n=A,T,C or G
  unsure (294): n=A,T,C or G
  unsure (307): n=A,T,C or G
  unsure (319): n=A,T,C or G
ncgaggtggacnnctccatcctgcagttcctgccatgagcctcgggctcctgtgctgtggggccttttctctcctgtgggcaggtccagtgaatgctggtgtcactcanaccccaaaattccgggtcctgaanacaggacagagcatgacactgctgtgtgcccangatatgaaccatgaatacatgtactggtatcnacaanacccangcatggggctgangctgattcattactcanttggtgagggtacaactgccaaanganaggtccctgatggctacaatgtctccanattaaaaaaacanaatttcctgctngggt

SEQ ID NO: 3796 - DNA, 219 bp, Homo sapiens
  unsure (16): n=A,T,C or G
  unsure (17): n=A,T,C or G
ctgacaagaggcacanncacagagctatgaggacagtcttatttaggcaaaccattcttatactcatgcgtaccagaaaaatgtctttgtctcttctgtgacactgctagatgctggggatataacacacatcgctgtccctaccctcacattaggggtagctgtaattatattctggtcaagaactgtgatgctaaatttcaattcttactagctttt

SEQ ID NO: 3797 - DNA, 240 bp, Homo sapiens
ctgggtgtgtgccgcgtagtgaaaatcctcttgtcagggggtatccggggagcttcgtaacccgaatggatgcgctctgcaatcagcaggcagcacggctgtgcaggggccccatctgagacccggatcttggtcacatacggggttaggcggaatggctggtaccgaggccctggatcccggtcaggacctcctctgatacggcagaagacggacttctcctgggtaaagtccctgagg

SEQ ID NO: 3798 - DNA, 333 bp, Homo sapiens
aaaaattcagatttccagttcgtatacatataagcagagcaaaaatttcattaatctaataatggaattttcaatttgctggctaacaaataaattgatctaatttttagaaactacaagaacaaatgtgcatgaatttaaccgtgttcaccaggaatcaagaggatgaatgttactaggtacaaagggtcttctgtgtgtgtgacaagaatctaggcaacaccattattcataggttaaggatgctatttgctccgtatctgaaaaaaagaagatataaattcaatgtctagaatgtagccatgacagggaaaatattagagccactatttt

SEQ ID NO: 3799 - DNA, 134 bp, Homo sapiens
tccgccagtgagtccttggtttttaataatgagaagtcctttcccccaaggtgtgagcattgcagcgcagtgtgtgtgtgtggttagagccagcttagtccttcactttgtcgaccgaagtgggagctcaacag

SEQ ID NO: 3800 - DNA, 184 bp, Homo sapiens
cctggaggcccagggtggacgtggtcctcagccagaccaagggcctcctctagtggaggggcttcctgggctctctctgcactgcccctcagggtgctttctggggtccagtcaatggatcttacacacccatgaacactgagcccttggggagacgtgtccaggcttcagtttcccctcccag

SEQ ID NO: 3801 - DNA, 163 bp, Homo sapiens
cctctagaacctgcgtcaagaatgtctccatcgccaccacaaattgaagggaaaccacccttatcacagagcaggaggcattgaaactggccttgcagagctgaacaggtggtgagagcagagcagtgcaggtggacagagatgaggaagtcttagcagtcag

SEQ ID NO: 3802 - DNA, 171 bp, Homo sapiens
gcttgaggctagcccagtgaagaaaaaccagagactcatgtttccaggggtcagtctgtcaggcaggaaggacccaggatttgaacccagcttcagtgtgcaggctccgaggctgcccaggacgggaaagtccaaggaaggggcctggtggtgctccacttgcagttcttt

SEQ ID NO: 3803 - DNA, 344 bp, Homo sapiens
aaattatatatattatatatgtaacatgatcagcaagtctggaaacataacgaagttttatagtattgatttattcctatcactctgagatatggtgacattacatgatatgttcaacgtgttgttcctcattagcaatgtgttatgcataatggggaccaacatgggacattaatacaacatttctatcagtgcctgcacatgcttctgtgatacgttgcctccaatgatttttgtctctaattttcagaatataaacctgctccattagcattttctggaagaagcaatcaaatgggttaatctgtgaaagtaaatgttatctatatttcccaacattatgg

SEQ ID NO: 3804 - DNA, 208 bp, Homo sapiens
aaagcgaattctctactgaaaggtctgctctgcttaaggagctacaaactgctctcaaaagaatgaaatactgagttccaattcagtgaggcacagtgttggactatggcacatttagttggagtcggggggaggtcaggaatatgatcagataatggattttataccttagagcaaaatctattagtctctctcagtttatcaattt

SEQ ID NO: 3805 - DNA, 410 bp, Homo sapiens
ctggggcttccattcacgactttctggtccctggcaggacagagcgggatgccaccagcttgtccaaagggaagttccaggagctcctggtgggcatcgttgtggagaatgacgctggccgcggcgagatcaacgagttgaagcaggtggaaggggaggcttcgtgcagcagccgcaaaggaaagctgattttcttctatgagtggaacatcaaactgggctggaaaggcatcgttaaagaatctggagtggagcacaagggattgattgaaatacccaatctttctgaggaaaatgaagtagatgacactgagaatttacaacgggaatgattttaccaacgaaagctatggcaacccaggaattgactgtcaaaagaaaactgagtgggaataccctgcaggttcagg

SEQ ID NO: 3806 - DNA, 420 bp, Homo sapiens
aaaccttccagaaagcatgaatccaaaaggaaatgtccaacaggtgatatgaaccagatattttatggcctttcctgtttcagtctcaaactttctaaacatcaatggggaaaaaaaattctctagagtttttcagttttattcttctagagcacaattttccggcctgttactgagtacggtcttctaacaggtacacaattaactcataagtagacaacacaatggcagtatttgggatctgccggataagctgggcaaacagtcctctataaaaggcaaggtggccttcttcccggaacaccaggcgcgccgtctggacaaaagacttgtacttggtgccctcttcccggagcctcgtccttatgacttcgtgtggataagcaatgcaggaggcacagcccttagaaagagcagcag

SEQ ID NO: 3807 - DNA, 227 bp, Homo sapiens
tgactacttcgtgttggcctccttcgagcccccacctgtgaccatccaacagtggaacaatgccacatggacagaggtctcctacaccttctcagactacccccggggtgtccgctacatcctcttccagcatgggggcagggacacccagtactgggcaggctggtatgggccccgagtcaccaacagcagcattgtcgtcagccccaagatgaccaggaaccagg

SEQ ID NO: 3808 - DNA, 269 bp, Homo sapiens
ctgcctcctgagggtgtggggttattagggtctcaatactttctcaaggggctacactccccatcaggcagcatcccaccagcctgcaccacaggctcccctgggaggacgagggaaacgctgatgagacgctgggcatctctcctctgtggctctaggacatctgtccaggaggctgggcggaggtgggcaggatgtgagaggtggggagtactggctgtgcgtggcaggacagaagcactgtaaagggctctccagccgcagctcag

SEQ ID NO: 3809 - DNA, 259 bp, Homo sapiens
ccttcaaggtgatctgccatcttaccggtttgttctctggcttgtctacgacgagtcctcctggcctcccgctctgcaatgcgacgttttgcatgctcctgatacagtgcccgatcgcgtccaaaggagtcaagatttggtgccatcagagctttgtcttcaagatggactgacttgaatggcttgaaaactccgaagattcatctttaatatcatcttgtcgtctttggacaaggcgggaagctcgctgtttgtacag

SEQ ID NO: 3810 - DNA, 402 bp, Homo sapiens
caaaattccgggtcctgaagacaggacagagcatgacactgctgtgtgcccaggatatgaaccatgaatacatgtactggtatcgacaagacccaggcatggggctgaggctgattcattactcagttggtgagggtacaactgccaaaggagaggtccctgatggctacaatgtctccagattaaaaaaacagaatttcctgctggggttggagtcggctgctccctcccaaacatctgtgtacttctgtgccagcgcggggtacgagcagtacttcgggccgggcaccaggctcacggtcacagaggacctgaaaaacgtgttcccacccgaggtcgctgtgtttgagccatcagaagcagagatctcccacacccaaaaggccacactggtgtgcctgg

SEQ ID NO: 3811 - DNA, 210 bp, Homo sapiens
ctgaataggcacccaaaagtccgtgactaaatttcgtttgtctttttgatagcaaattatgttaagagacagtgatggctagggctcaacaattttgtattcccatgtttgtgtgagacagggtttgttttcccttgaacttggttagaattgtgctactgtgaacgctgatcctgcatatggaagtcccacttcggtgacatttcctgg

SEQ ID NO: 3812 - DNA, 201 bp, Homo sapiens
ctgttttccagcaaagatcagcctctgctggtcaggagggatgccttccttatcttggatctttgccttgacattctcgatggtgtcactgggctcaacctcgagggtgatggtcttaccagtcagagtcttcacgaagatctgcattgtcaagtgacgatcacagcgatccacaaacaagaaccgcgacccaaatcccgg

SEQ ID NO: 3813 - DNA, 234 bp, Homo sapiens
gtgtgaggacagccccatcttcatctgccctgcactcacaggagccaatggggtcacggtgcctgaagagggcctgacacttcacagagtggggacccaccagagcctatagaatcaattccttggtctcacagccatgtagacaagccctggtcatctcagcagccaccgcacaacacccctggtggaagacacgccctcctcccctctggtcacacaagagaacatcttcca

SEQ ID NO: 3814 - DNA, 300 bp, Homo sapiens
gtgcagcaagtagctgctgaatattgtagagcatgtcgcttgaagtctacttgtatctacggtggtgctcctaggggaccacaaatacgtgatttggagagaggtgtggaaatctgtattgcaacacctggaagactgattgactttttagagtgtggaaaaaccaatctgagaagaacaacctaccttgtccttgatgaagcagatagaatgcttgatatgggctttgaaccccaaataaggaagattgtggatcaaataagacctgataggcaaactctaatgtggagtgcgacttgg

SEQ ID NO: 3815 - DNA, 462 bp, Homo sapiens
ctggcttctggtgtctctcatcacaccactgcggacgctgtctgtagagcagccttggtgtgggtgactctgaagctggagtgatgggaccccagctatccttgttttttaccgccttgtctggcactgtgaccacgcttcagggctgcttctgggggtcttggtccctggatgtgccatttccttgcccttctgaccctcacacttcttccaaagtcttgagcagagttgggggccaatggtagcattgctgtcatctctgggaggagagtgagtatacaagtcagtgacagttcagccaggctcccttgggtttgggaagaggcactgcccttctgtgctgtggatcctgcttgtctgctctggagtccccccacccttgccaggagcttcacaaaccagagacgggctgtcagcaagagctcagacaggatgtggtacaagtgcaggtgcacgagttta

SEQ ID NO: 3816 - DNA, 469 bp, Homo sapiens
ccagtgagaggcactccctgcagggatttcacagcccaaatggcgggaccgtccaggggctccaagaccaacaggagcatgtggtagccacgtcacaacccaagaccatggggcatcaggacaagaaagatctatgtgggcagtgttccccgttaggctgcctcatccggatattgattgacgggatctctctcgggctcaccctgcgcctgtgggacgtgtatctggtagaaggcgaacaggcgttgatgccgataacaagaatcgcctttaaggttcagcagaagcgcctcacgaagacgtccaggtgtggcccgtgggcatgtttttgcaacccggttcgttgatacctgggccagggatgaggacactgtgctcaagcatcttagggcctctatgaagaaactaacaagaaagcagggggacctgcaacccccagccaaacccgacaagggtcgtcggcatccag

SEQ ID NO: 3817 - DNA, 290 bp, Homo sapiens
aaatgtcaaggcagagaaatacattgatcatgttaaggtcatgtgatgtggtggcgcagtaatgacttcctgaggaaacagagaaattggatgttttgtgatttagctatgtgcactaaacttattttccatgttttgagagcacattaaacattcacgtacaacgtgggactaggttggcttgtacccagaacgtccaacccaatgccaccctttgaatcgctgtgaacactgttctgttgctgttcagagaaaacaagcaaggctgcgaagcccgggggtgcaggcag

SEQ ID NO: 3818 - DNA, 280 bp, Homo sapiens
aaacttttctgaaacgattagctgtagccaaattatgtggttacgttttgctacattagaatttgaaaatgcaatatgtgtggtaaatctactgtttgaaatttataatggtctctgatatgattcgaattttggtaacttttgaaagttattttccccctttagtcatggatttctatttgttttttaatgttaatttttctagaaagcatctgaattgactaggcttttcctatataaaaaactcaaaacttgttaactctgtactttaataaaattt

SEQ ID NO: 3819 - DNA, 465 bp, Homo sapiens
ccaggaaaagactgaccattggtctccaaagatgctggatagcattgccagatcacatctaaacaactccgactgcagtttcacacaggtggtggtccaaaatttgtaaaaaagtgaaagtgatgtgtgaagatagggctgagatgagaggaaatggattcaagcctcattggaaaagctgagttagtttgttactttaatttgagcatagacaatggggtcaaagtctgcagaatggttctcagccaagtgattgctcttttcttctgagagtttgaaagttgtgctggcataggtaagtgattcccctgggatggatgaaagcttggctggaggatctgagtgaggatctggggcctggggcttggagtgatattttctgtagctctttatgatgaggaagataaaggctatcagcagcagtgtcagtagaaccccagcacaaaaggcaaggattaaatgttt

SEQ ID NO: 3820 - DNA, 318 bp, Homo sapiens
ctgcatgcctctctgcctcctctgtctgcccaccagcctcctgcagtgtgctactctgctctgtgactgctcctcatgcagctcgcagccatgtttcctctctgcttcttgatttgcttcagctccttctagtgccttgaaactgaagctggcctgtagttgggatcaaagatggagggagaggggagattgtactatggatagtgtagggcaagaagtgaattcttacactggaatgataaaaggaacctgcttcctgagtttcttaaaattgtgtctggaactcagatttgcactgcctagtatagtagctgctgg

SEQ ID NO: 3821 - DNA, 294 bp, Homo sapiens
ccaggaagtagtcacagcgagacacagcctgcacctctgcaatgttaagcaggtaactctgctcctctaccacttgactattggacttctcaacttcagccaaagagcctgtgaagaacttccgagagcgagccagctcatcctggaccctgcgctcctcatgcccatactcctggagaactgctttataccttgcctgaaggtccttggagacaccttccaaggctgccttccgccgctgcagctcccccataagttcccgcagacgagttaacttctctccaaagtcccgac

SEQ ID NO: 3822 - DNA, 211 bp, Homo sapiens
ctgctttgctttctctttgcccaaatctgaagccaaaacaagaaagtgggcatccaggactgcttctcttgctcgggacacttcattaaacagagtgttagcctcttcaaggacctctgttaatttgtcaccggcattcagtatgtcctcacggttttgttggacggagttgatgagcgcccggtactgatggcggatctggcggcacagg

SEQ ID NO: 3823 - DNA, 208 bp, Homo sapiens
ctgggaagtctggcaaagatccagtggcccacatatccctgcttgtcttgtcccctctcaggaggatgtgttggctttcaaagctgatgtccaagtggaagagccactgcagagtggagaagcaccgaaccaaacccaacacggcatccagggacaaaccgttctcactgaggttcaaggactgcagagctcccagccctgggagcag

SEQ ID NO: 3824 - DNA, 283 bp, Homo sapiens
aaagctgcctttctggtgagtactgttttatacttttatatattataattttatcttctaaaattaactgaaataggacactttgattaaagaggtgagcactctgaatttctacatctttggatattacttgaatcaagaatattagaaaattattttaccacctggcatttcccttttaatttgctagttcacttttttctgaccttcacttaacagactataaatacaaaaactttgaacacataaattatttcattttggtgagatggaataaatgttt

SEQ ID NO: 3825 - DNA, 351 bp, Homo sapiens
cctctggaggctcgggactggaggcaaagcccaggagaggtgggagacaggagctcccgactgtcagaggcatggaaatggaggctgagtcctggagaaactccagagcggagtctgagactagcagagtctcgagagcaaagccccaggagaaaagaggtggaaagtagactgagcccaggggaatctgcctaccagaagttgggcctgacagaggcccataaatggagacctgactccagagagtctcaggaacagagtttggtacaactggaggcaacagagtggaggctgaggtcaggagaagaaagacaagactactcggaagaatgtgggagaaaagaagagtgg

SEQ ID NO: 3826 - DNA, 460 bp, Homo sapiens
  unsure (438): n=A,T,C or G
  unsure (447): n=A,T,C or G
  unsure (460): n=A,T,C or G
aaaaacgaaacaaagttatggggttaatctcctacacaattcatttacttcatttgaatgttagagctactcatgattatttgtgtttctaatttatagtttaagtttatttgtaaaaagttaaaagagagtgggtctctgtggctctcactgatgttcactctggcatccttcagcatttttcttttttcatttcataattgtaggtcattagcatgcatatcgagtttgcccttacgtggtgggagttcaaacacacaaagacccactctttgcacaaaactgttctcgctggtttggaataggctcccgtgcttttctaatgttattgcagcatggatgtccattacagaattcagataaaatttgctaatgttctgctatgatgtttgatctcatcttaatcacagtgagctcttctatagctcaatatgcggnttgccctcnagtgtgcactgtn

SEQ ID NO: 3827 - DNA, 415 bp, Homo sapiens
ccaattgaaacaaacagttctgagaccgttcttccaccactgattaagagtggggtggcaggtattagggataatattcatttagccttctgagctttctgggcagacttggtgaccttgccagctccagcagccttcttgtccactgctttgatgacacccaccgcaactgtctgtctcatatcacgaacagcaaagcgacccaaaggtggatagtctgagaagctctcaacacacatgggcttgccaggaaccatatcaacaatggcagcatcaccagacttcaagaatttagggccatcttccagctttttaccagaacggcgatcaatcttttccttcagctcagcaaacttgcatgcaatgtgagccgtgtggcaatccaatacaggggcatagccggcgcttatttggc

SEQ ID NO: 3828 - DNA, 337 bp, Homo sapiens
cttcacggaggttactgtgtgagacgaaagacagttcactgttcatcactggaaatactgtacgtgctactgaaaaacaaggattttattgaggatctatcttgggatcccatggctttctttactgggctctggggccccttcacctgtgtaagcagagtgctgagccatcactgtttcagcaccactgggagtctgagtgcgattcagaagatgacgcgggtacgagtggtggacaacagtgccctggggaacagcccataccatcgggctcctcgctgcatccatgtctataagaagaatggagtgggcaaggtgggcgaccagatactactgg

SEQ ID NO: 3829 - DNA, 153 bp, Homo sapiens
cctgaggtcacctggctaggaattcatagggcaggatttaatccgggtgcctgagtccagaaccttgactctgaagccctgttttgagctaaatgcagcagcagcataaacagcccgttttgtgcctcaaaaggtgaacagtgggaggcacag

SEQ ID NO: 3830 - DNA, 473 bp, Homo sapiens
  unsure (473): n=A,T,C or G
ccgacgtctgtgggttctggagcaactgccctcctaaggtctgtccttagcagggaccttcccctgactcatgaatgctggaatcaaggaccccaacaccataatcatcaaggtgatacatctgtccttcattgtcatgtgcttcacaacagagtaagtgctggcacacagggtcccaggctgggatggcccatgtgtggatggtgcttccagtaacgaggtggggcacacttctacctggggcttgaaactcccagtgggacaagaaaacccagaccccactcctcaccccttccctacctgagctcttcctcctacacatcacaacagccaccacagctcctaggacagctaggacagccaggacagccaggccagcaacgatgcccacgatggggatggtgggctgggaagatggctctgggaaaggaggggaaggtgaggggccctgacccccaacctcagccctgacn

SEQ ID NO: 3831 - DNA, 227 bp, Homo sapiens
ggccagtggaactgtacagcttggagaaaatggcaagatctgttgggttaaagaggaatgaagccttttaattcagaaatggggccagtttagaaagaattatttgctgtttgcatggtggttttttatcatggacttggcccaaaagaaaaactgctaaaagacaaaaaagacctcacccttacttcatctatttttttaataaatagagactcactaaaaacaaa

SEQ ID NO: 3832 - DNA, 265 bp, Homo sapiens
ctgaaacgcatgacctcgtgggtcctgaactgacctctggtcacaacacccagggcctggttctcccattgggtaaatcttcagaggaacggatggagaggaacgcagtggcttgctttttctgctgatgctgcggaacttccttcagggtcacatggtgaaccaagagagcctggtgcagtgccaggggcctgccatcatcggggccctcctgcgaaaggtcccaagctgggccatggacatgaacgtgctcatgtccgcccag

SEQ ID NO: 3833 - DNA, 329 bp, Homo sapiens
  unsure (113): n=A,T,C or G
ccaatacggctatgggtgtaggcagctttcagaggaaattagtggtctgggcttgcctccagctccccaggggcagccccagtagctacactgtccagacagcacaagaccangcttggtgtcacgtccatccgagcgctgcctcagggatcgataaagtttcactgcagaaagtctccactgcggtatgctgacatctgccctgaaccttcaccctacagcattacaggctttaatcagattctgctggaaagacacaggctgatccacgtgacctcttctgccttcactgggctggggtgatccttggtgcctttgtttccacaagg

SEQ ID NO: 3834 - DNA, 194 bp, Homo sapiens
ccagcttatgaggcagatggtctcagttacaacttcgctgctttcccaaactcctgcagccctcctgagtccgacttccgttgatagcaaggcactgggtggcagcaacctttttttctagtagttttttcccagcagttttccatttctccacagtatccttttcatttagaggagcttaataaatgcttttt

SEQ ID NO: 3835 - DNA, 159 bp, Homo sapiens
cctgtgcagtcttaggctatctgtgctttcatttttcttcacacggtggcaggtctacactgcccagccccaggggtgggccttcctcacctcttccctcttgattttcagtctcagcttttccagtcccctcccccaaaccagcaatagcagaagcag

SEQ ID NO: 3836 - DNA, 328 bp, Homo sapiens
aaaaccaccgacagcccttgggttggcaagaaggcaggagtatgtatgaggtccatcctggcatgagcagtggctcacccaccggccttgaagaggtgagcttggcctctctggtccccatggacttagggggaccaggcaagaactctgacagagctttgggggccgtgatgtgattgcagctcctgaggtggcctgcttaccccaggtctaggaatgaacttctttggaacttgcataggcgcctagaatggggctgatgagaacatcgtgaccatcagacctacttgggagagaacgcagagctcccagcctgctgtggaggcag

SEQ ID NO: 3837 - DNA, 212 bp, Homo sapiens
gggaggatggcctaagcctgagaaattgagactacagtgagctgtgactgcaccacttgcacttcagcctgggtgtcagagtgagaccctgtctcaaaaagaaaaaaagaaacagttacttcttgtcttatacaagtcattccagcaaacagaaaaagtgtgaaagctgtcaacctctttaggctgaagaatcctgattcccaaatctgtgg

SEQ ID NO: 3838 - DNA, 356 bp, Homo sapiens
ttttttaagaaagacatctggattgtagggtggactcgataacctggtcattatttttttgaagccaaaatatccatttatactatgtacctggtgaccagtgtctctcattttaactgaggggtggtgggtctgtggatagaacactgactcttgctattttaatatcaaagatattctagagtggaactcttaagaccagtatctttgtgtgggctttaccagcattcacttttagaaaaactacctaaattttataatcctttaatttcttcatctggagcacctgcccctacttatttcaagaagattgcagtaaaacgattaaatgagggaacatatgcagaggtgctttt

SEQ ID NO: 3839 - DNA, 272 bp, Homo sapiens
ccacagaaaaatgggcagttaacattccttttactttagttttgagggagggggaatggagagagggagagaggacacagggaaacttacagcaaccattttcgctgtttatatttttcttgaggaagaaaacaaacgcacaaatcctggtgttaggaatagtttaagcatatatcttcagtattattcttccaggaccaaagtaagtcctgatgcaggaaatgagtgagtttcacagcttttggagcccttactccatccaggaagcccag

SEQ ID NO: 3840 - DNA, 205 bp, Homo sapiens
ctgtggtggtgccttttggagaagagcagagatacacatgccatgtacagcatgaggggctgccgaagcccctcaccctgagatgggagccgtcttcccagtccaccgtccccatcgtggggcattgttgctggcctggctgtcctagcagttgtggtcatcggagctgtggtcgctgctgtgatgtgtaggaggaagagctcag

SEQ ID NO: 3841 - DNA, 168 bp, Homo sapiens
ctgccatgtggcagcagcaggagctactagaatattctcagcacaggaatgaggcttccttggtttccatgtctgtaagggttactgatcacttaccttcttctctttcagacttgaaatctgtagacatttctttattgatatggcaaattgcttgcagatattttt

SEQ ID NO: 3842 - DNA, 251 bp, Homo sapiens
aaagaagacagcgtctgctttgaacaggccctttctgagattagcctcaccttaatactctttgctctgcaataggccaatcaatatccacatctatatccacactatgttcagctcgcatttcgtagtatgccatttttccaccctgcaagtaacccatctctatcaaatgtcttttagcaaaataaaatgagccattttcatataattctccatcccagtcttgtcgacgaggccgtttagctggattt

SEQ ID NO: 3843 - DNA, 409 bp, Homo sapiens
  unsure (361): n=A,T,C or G
aaaatggtttgaaatgtagggaggttttgtctgtttgtgtgaagaatattttgcttcctttgggaagttctggggtttagaaacctttcttctgcctgggcgggtgaggaggttggcctctggccttggacctgcctctggatgttgactgggggaacggagttcagcccgcctgtggtctgcggatgccggattctaggctgtgaattctccacccactgatttgggtggatgtaagtgagtctccctgtcccctctttctctcctcatgtgtgaacataaaggtactcatgcatcacaggactttcctgtaggtgctgatgtctatacaagcactttgctgttataaaggactgctganctgttgaagtcagtaactctttctgtcttcctgtatgtaaaataaaat

SEQ ID NO: 3844 - DNA, 232 bp, Homo sapiens
tgagagttcctgtgctgtgtggaattcaacactaatctgctgtaagtatggagctgggtatgtggaacatttgcagggaagtttgtttctccgcttgtttttccaggggtattcgagatgacattgaagaggaagatgaccaagtgagttcctatgcagtatttctatcttttatttttatccacaaagtctatactggggacaagctagagcttgccttcactcaaaatgg

SEQ ID NO: 3845 - DNA, 103 bp, Homo sapiens
taaaaaaatgaaagctagacaatagctgcaattttttgttaacaaagcaaatcacttcaacgtgaataggagtaatctcatctctgcacctccatggacctca

SEQ ID NO: 3846 - DNA, 190 bp, Homo sapiens
  unsure (51): n=A,T,C or G
  unsure (58): n=A,T,C or G
  unsure (110): n=A,T,C or G
  unsure (116): n=A,T,C or G
  unsure (120): n=A,T,C or G
  unsure (135): n=A,T,C or G
  unsure (146): n=A,T,C or G
  unsure (180): n=A,T,C or G
aaaggtatccgggagattggcagtttgtaatacaagaattatgtgcccccnagaaggnttctggcctcagtgtctctatctgtctaatgggcagcagatcagacaagggnctgtcngctnttgacagggttcaanggcatctcctntaaatgactcactgtctctggagaaatatgtgancattttcaca

SEQ ID NO: 3847 - DNA, 287 bp, Homo sapiens
ctgccgttgacagaaggaaagattgtccattcggggggtgcccgaacgtcgccccttctccggcccagaacctttttgtaagttacaccctcacgttctgctccttccacttctgcaaactttccagggttgggtaggcaaaaaggcggcttcgctgaggactgtttactgctttaggtttttttggaattcaaaactgttaactgctgacatgaatggtgtgctatgacctagttatacaagacaaagatggattccaagtcataaggaaaaatccagatcttttt

SEQ ID NO: 3848 - DNA, 244 bp, Homo sapiens
ccttggtgaccatcagtttcagatgcaactcttacagcggagtcttggaatcatgcaaacagtgaagggatttttttatgtttcattacttcttgacattctgaaagagataactggaaagttccttgattcagaaaacagattcagatgaagaagttgcaatgctgttggacacagtccagaaagtatttcagaaaatgttggaatgtattgcacggagcttcaggaagcagccggaagaagg

SEQ ID NO: 3849 - DNA, 232 bp, Homo sapiens
ccgatatggctgagatcgagaaattcgataagtcgaaactgaagaagacagagacgcaagagaaaaatccactgccttccaaagaaacgattgaacaggagaagcaagcaggcgaaatcgtaatgaggcgtgcgccgccaatatgcactgtacattccacaagcattgccttcttattttacttcttttagctgtttaactttgtaagatgcaaagaggttggatcaagttt

SEQ ID NO: 3850 - DNA, 330 bp, Homo sapiens
  unsure (239): n=A,T,C or G
  unsure (284): n=A,T,C or G
  unsure (305): n=A,T,C or G
aaaaaaaagatccaagatgggcattatattcattgtatgtttacaaattcttacattttagttattcttcagcaaaaaatccagatggatgtttttttcagaaagtgttgaatgggtttacaaagtttttttgtaaggaacaatattgcaaattactaaaattgtatttttataggctgtttgctcttttgtggatattgtgcctgtcaggattcttgaagttttttttttatagtganataatggagttggtcttagccgctgcaggagcccttcttttctgnggattcatcatctatgacacncactcactgatgcataaactgtcac

SEQ ID NO: 3851 - DNA, 175 bp, Homo sapiens
ctggaaatgcagaaatcacccgtcttctgcttctctcatgctagtagctgtagactggagctgttcctatttggctatgttggaaccctcccagtcccagtaaaatttttcatttggaaaacagaagatgggaaaaaaacacagaagtcactgatccattgcaatagtggaattc

SEQ ID NO: 3852 - DNA, 353 bp, Homo sapiens
ctggcacgtgctcagactcggcatgagaacaaaaccggaacagtgctttcccacgtgcccctgcctcccaccctggccctgaacagtaagtccagaggcagagacgtggggcaagtggaaaaagaatctctgcaatagctagcctcagcacaggaagaaacacttccacccatccacaaaatctgggctgaagttctagatgcatatggcctacctttgggtatgaaccttctaataccttgtgatctgtctcagtggcgtctggcagaaaagctccacgaaaggggcaaagggacagaagagcaggcagtggcagtttccaggtaacagtgctgccacccaggtgaccatgg

SEQ ID NO: 3853 - DNA, 401 bp, Homo sapiens
  unsure (17): n=A,T,C or G
  unsure (26): n=A,T,C or G
  unsure (103): n=A,T,C or G
  unsure (114): n=A,T,C or G
  unsure (198): n=A,T,C or G
aaggaattggacagaancttcttcanaagatgggctacgtccctggacggggcctcgggaagaatgcacagggtatcattaacccaattgaagccaagcaganaaagggaaaangtgctgtgggggcttatggatccgagcgcaccactcagtccatgcaagacttccctgtggttgactcagaggaagaagctgaanaggagtttcagaaggagctgagccagtggaggaaagacccaagtggaagcaagaagaagcccaaatactcttacaagaccgtggaagagttgaaggccaagggcaggattagcaagaagctcactgctccccagaaggaactttctcaagtcaaggtcatagacatgacaggccgggagcagaaggtctactacagctacagt

SEQ ID NO: 3854 - DNA, 341 bp, Homo sapiens
  unsure (199): n=A,T,C or G
  unsure (297): n=A,T,C or G
  unsure (334): n=A,T,C or G
cctgggccccggtcacgtcgccaaccatcttcctgtccctagacttcacggagtaggcgaatgctatgaagcccagacagcaccagttcaagaagagggtgttgaacagggaccagacgacatggtcgggcacggaggtctcgctgtggatgttgatcacggtggaccttggaaggatggtgctggggggtgcccccancacagccacctcatgttcctccttgtgcatcttctggctttggggaaggaagtgttgagtgaaggtttgagaagtgtggttttctgcgtggagcgaanggccgctgtggtgtccggatgctgggacggtgctcanttgagac

SEQ ID NO: 3855 - DNA, 218 bp, Homo sapiens
ccattgggctgggagcaggcggggccgtgggggccgggggcctttccccctgcaggtggtttctgtcggaggaccagctagagggcgtccaagaggagttatttccaccccagtgattagaacatttggaagaggtggaaggtactatggcagaggttacaaaaaccaggcagcaattcagggcagacctccttatgctgcttcagcagaagaagtgg

SEQ ID NO: 3856 - DNA, 417 bp, Homo sapiens
ctgtccaacttgcaatgacttccatggacttgtgcagaaaatcatggagctacaggatattttagccaaaacatcagccaagctgtctcgagctgaacagcgaatgaatagattggatcagtgctattgtgaaaggacttgcaccatgaagggaaccacctaccgagaatttgagtcctggatagacggctgtaagaactgcacatgcctgaatggaaccatccagtgtgaaactctaatctgcccaaatcctgactgcccacttaagtcggctcttgcgtatgtggatggcaaatgctgtaaggaatgcaaatcgatatgccaatttcaaggacgaacctactttgaaggagaaagaaatacagtctattcctcttctggagtatgtgttctctatgagtgcaaggaccagaccct

SEQ ID NO: 3857 - DNA, 186 bp, Homo sapiens
  unsure (171): n=A,T,C or G
ctgaggcgctgtcctgggcagcctggttctgtgtgtgtggcctcaaggggccagagtgaggccggcttcctcctgggctcagtgcccctggatgggaggtgggcatgaacaggagaggcttccgagaatcagagtgtgctcagccaggaaaggcggaggccacctattcangaaacggggctgcag

SEQ ID NO: 3858 - DNA, 194 bp, Homo sapiens
ctgagggtgagtcctggagctccctgtgtcaactcaagcaagccacttagcaattctgggcctcagtttccccatctggaaaagggaggtcctcagggtgttgccatcaaaagatggttgtaatgtttcaatatagttccgcatattacacattcagcacagacccgggcatcggagcagtcccgaggcaccag

SEQ ID NO: 3859 - DNA, 306 bp, Homo sapiens
ctgcaggtcttgcacagacaaaaacaaaaaacaaaacccagaaaacaaaacaaaaaaccacaaaagaaagtttactacacaaaaccagtttctgataaagattctcctccccctcattactccacagtgaggatgataaggcgaggaatcccgccccaagagtcagaaaacattccaaacaccaaattctcatgcagaatggggctttagataggagctgggtattactgggagtgagatggtaaacctggttagcttgtctagggcgcaagaatcagtgacagttcaaacactggaatgttgcag

SEQ ID NO: 3860 - DNA, 168 bp, Homo sapiens
aaggctcctctgtctaccgcatcttcaagcgctggcaggcagtgaaccagcagtggaaggtcctaaattatgacaagaccaaggacataggaggagatgcagggggagggacggcagggaagtcaggccccaggaactcacggacgggccccacctctggggccacga

SEQ ID NO: 3861 - DNA, 333 bp, Homo sapiens
taattgagtattcagtaaacactgtgctcatctgctttttcctggcctccctccatttcctcctccctctccctctgcccttgcacatctgctttccttgtagcaaggggaagttgattgttggcccctgccttgcccagatgtggagtgtgaattcagcattctcccagagaatgagtgctgcccgcgctgtgtcacagacccttgccaggctgacaccatccgcaatgacatcaccaagacttgcctggacgaaatgaatgtggttcgcttcaccgggtcctcttggatcaaacatggcactgagtgtactctctgccagtgcaagaatgg

SEQ ID NO: 3862 - DNA, 311 bp, Homo sapiens
  unsure (13): n=A,T,C or G
  unsure (84): n=A,T,C or G
  unsure (95): n=A,T,C or G
  unsure (209): n=A,T,C or G
  unsure (233): n=A,T,C or G
  unsure (268): n=A,T,C or G
  unsure (270): n=A,T,C or G
  unsure (280): n=A,T,C or G
aaagcttctgggngtgcctttcaaattttgaacaagctgccttgtctaaacatcaatttctactactctgtagccttaaaatgngctctatttanatccacaggacccttctactggtgatatgaaaaacagaatacagaaattaagagaatcactttttactcaacaattaggggaagtaagtcaaagccctcctcttgcgacagcanatttcctgcgggccacctgttcancgccttgataggggatagggtgatcaaggcactcncnaaaacagttnattcaggtatggaatgtcagaattcctttgg

SEQ ID NO: 3863 - DNA, 194 bp, Homo sapiens
  unsure (1): n=A,T,C or G
ncagaagccctacaagaagatgaaagggccggaggtcatggccttcatcgagcagggcaagcggatggagtgcccaccagagtgtccacccgaactgtacgcactcatgagtgactgctggatctacaagtgggaggatcgccccgacttcctgaccgtggagcagcgcatgcgagcctgttactacagcctgg

SEQ ID NO: 3864 - DNA, 417 bp, Homo sapiens
  unsure (2): n=A,T,C or G
  unsure (12): n=A,T,C or G
cncggcagccgncaaggaagaccagcctgcctctggtcggttcctggcgctctgcgtttcgtgaccttgtccagtagaaggctatttaattttcacaactgcttgaattttgacatacaagatgaagcaagatgcctcaagaaatgctgcctacactgtggattgtgaagattatgtgcatgtggtagaatttaatccctttgagaatggggattcaggaaacctaattgcatatggtggcaataattatgtggtcattggcacgtgtacgtttcaggaagaagaagcagacgttgaaggcattcagtataaaacacttcgaacatttcaccatggagtcagggttgatgggcatagcttggagcccagagactagacttgattcattgcctccagtaatcaaattttgtacttgag

SEQ ID NO: 3865 - DNA, 269 bp, Homo sapiens
tggtattgctgtgccagaggggaggggatgaggggctctgcgaggaaggagaggagggtcccatcctcagatacagcagtgtgcggtgagaagaccccagtaccgcgtattgtagagattgaggtggggagagaggaagtcagggagaggcgcctgtggccccaggggcaactgaccacgaatccccttcccacccaagccttgtcctgacggtgtgcgtctcccagacccaggccaatgccagggccatccacaggctccggaagcag

SEQ ID NO: 3866 - DNA, 328 bp, Homo sapiens
  unsure (12): n=A,T,C or G
  unsure (15): n=A,T,C or G
ccaagcccaggntanaaaggtgggcagactaatggtgggaatagcctgagaagggaaggccattcattcatttattgagcacctatcattcaactattcacccattcagcatttattgagtgcctactatgtgccaggcactgggcgaggctctggggacgcatgcatgaacaagattacaccctggcttctttcaagccctggatcgaggctcatcagtttttgaaactccgtctagaagcctgcaggagaggtgggaaggctggacgtgctgtccccacccagtcagcggattggggttaagagtgagtaagtgatcactgctcag

SEQ ID NO: 3867 - DNA, 485 bp, Homo sapiens
  unsure (11): n=A,T,C or G
ctgctttctcntccgcaaaaactacgctgcttctctttgtcctcttcttggacctccgcagcttgacctcaggcagggtgctccccggggagatcggttcctcctgctccactctcggcgtcttgggtgatgctaattccaggtcaaagctctctgaggtaggcttgctgggggtgctgcagtcagaattcatggaagccagagagatgatggacatctgtctgtatgagcgcagcatagacctgggacggcccactctcctgtcgtcaaagtcaggcatctctcggacaccgtactccttctccaccttcattttcaggttcttgaaacattcctccatccggtcatggaagggtcgcaagttatctgacacccttttctcatggatcttaatcccagctcccaagaaggggatctgccatgcaatcaggtccttgaggtgggtcagcttgtcctggtcctcagggtggcccctgacatactct

SEQ ID NO: 3868 - DNA, 312 bp, Homo sapiens
  unsure (12): n=A,T,C or G
ctgcagaggttngtccagtggctaaaagaggcagaagaggagtcatctgaagatgactgaagtcacactgcctgctcctttgggtgtgattgagtgccctcctggctcctgggctgggacaagtgaggaactagctgtagagggatgagtgaccaccatccaggctgagactgaaaggagcagaggctggaactacagtattctttcccctgctagcaaccatgtgcctcccatcctgactgtggagttgggatgtggaagtggggctggaacaaagcttctgccaagggaggagctaagcaggcccggcag

SEQ ID NO: 3869 - DNA, 278 bp, Homo sapiens
  unsure (157): n=A,T,C or G
  unsure (230): n=A,T,C or G
  unsure (233): n=A,T,C or G
  unsure (253): n=A,T,C or G
  unsure (260): n=A,T,C or G
tgtaaccagtgtgtgttgagaaggaccaacaccaaaccaccctggggaagggggacagggaaacatttaacacagacgatgatcaggatttgccccaaaccaccccaagagagaggactgagtggaacaaaaaagtgacccccagaacctctcttantgtgagggtgggtagaataagaactgacacacctgcccgggcgggcgctaagggcgaattccaacacactggnggnccgtactagtggatccagcncggtccnagcttggcgtaatcatgg

SEQ ID NO: 3870 - DNA, 269 bp, Homo sapiens
cttcgaaccatggaccaggcccccaagtccctgatggcctcagaggaggagtaaatgtggggacctagaggaggagctgaaaattgttaccaacaacttgaaatccctggaggcccaggcggacaagtattccaccaaagaagataaatatgaagaggagatcaaactgttggaggagaagctgaaggaggctgagacccgagcagagtttgccgagaggtctgtggcaaagttggagaaaaccatcgatgacctagaagagaccttgg

SEQ ID NO: 3871 - DNA, 453 bp, Homo sapiens
agattgaacacaggtgacctggtatagatacacactgtactgtgggccagaaccatggactacattttaagccatgttgtgggcccttcctgcctacagaaaaggacacttgagtggagtcacacttgggttgcctaatttattaccttaactagaaacattctaagtatgggagcctgttctggaggatagcttctaaaccaaatctaaaactatctttgcacacaagtgttgtgaagaggtaagcaggggatcagagctccatcttctgtgaccacttctccagggactgccacctatagggctcaggttggtaccaacagccctgcatagtagagtcactgtcaatcatcttcccacttgtaagcaggaagacaaaaagtctcatgaaatagaaacgaaaacactgaacatggccttcatcgtcctaatgccacaagtttcctgggatgg

SEQ ID NO: 3872 - DNA, 436 bp, Homo sapiens
  unsure (237): n=A,T,C or G
  unsure (372): n=A,T,C or G
  unsure (378): n=A,T,C or G
ctacctaccaagggtgaaaactatattcacagaattggcagagggggtcgatttgggaggaaaggtgtggctataaactttgttactgaagaagacaagaggattcttcgtgacattgagactttctacaatactacagtggaggagatgcccatgaatgtggctgaccttatttaattcctgggatgagagttttggatgcagtgctcgctgttgctgaataggcgatcacaacgngcattgtgcttctttctttgggaatatttgaatcttgtctcaatgctcataacggatcagaaatacagattttgatagcaaagcgacgttagtcgtgagctcttgtgaggaaagcattggctttatcctctttanagttanactgttggggtgggtataaaagatggggtctgtaaaactttctttcttagaaatttat

SEQ ID NO: 3873 - DNA, 471 bp, Homo sapiens
  unsure (10): n=A,T,C or G
ccagttgctntaagtggattggatatggttggagtggcacagactggatctgggaaaacattgtcttatttgcttcctgccattgtccacatcaatcatcagccattcctagagagaggcgatgggcctatttgtttggtgctggcaccaactcgggaactggcccaacaggtgcagcaagtagctgctgaatattgtagagcatgtcgcttgaagtctacttgtatctacggtggtgctcctaagggaccacaaatacgtgatttggagagaggtgtggaaatctgtattgcaacacctggaagactgattgactttttagagtgtggaaaaaccaatctgagaagaacaacctaccttgtccttgatgaagcagatagaatgcttgatatgggctttgaaccccaaataaggaagattgtggatcaaataagacctgataggcaaactctaatgtggagtgcgacttgg

SEQ ID NO: 3874 - DNA, 234 bp, Homo sapiens
caggagtttggtagaggagtgatctaggtgaggggaatggaaggtgcagagaccagagctgagagggcctgaggcactttccagagcgtggggaggggcctccaccaaggcgagaagggctgcaggtccagatcaccagcgtttgtagacagtagtgtggcgcttggagtttacctgagggccagtggagctccagggacctatcaggacggggacctgtggggactgggaagg

SEQ ID NO: 3875 - DNA, 247 bp, Homo sapiens
agtgggcctcctactccccagcacaggtgcaggaggaactctggaagcactgctctctgtcagtgatacagcttccaaggtgttcttgagtagcagacattgtccctcagaaggggtgaccccacgggcatgcgcaccctgttccagcgggggccttttttgtagatgggcttgacggagccaggagcccagcgcgtcaggtaccggttgagttggggtttgctcttcggaacaactccttcaggaa

SEQ ID NO: 3876 - DNA, 272 bp, Homo sapiens
aagcacaacattctctacttcctcacctacgccgacgagtacgccatcggctacttcaaaaagcagggtttctccaaggacatcaaggtgcccaagagccgctacctgggctacatcaaggactacgagggagcgacgctgatggagtgtgagctgaatccccgcatcccctacacggagctgtcccacatcatcaagaagcagaaagagatcatcaagaagctgattgagcgcaaacaggcccagatccgcaaggtctacccggggctcag

SEQ ID NO: 3877 - DNA, 311 bp, Homo sapiens
  unsure (12): n=A,T,C or G
ccactaccgggntggacctcctccttcccccagcactccactcagggaaaatcaattccatcaaaaacaattgattttaccacctacaaatgggcaacatctacactccagtctcttcccactcacagactgtgcctcctataagcctggtatctcagaactctgagagtgggcttccccatggataccagggctcccaggccgggccactttacctaagtaggtgttgtccttctcatacagagctataatctcctgccaatccttcatccgctgtgaagagtatcggccaaaaatattcttcgtggagg

SEQ ID NO: 3878 - DNA, 175 bp, Homo sapiens
  unsure (11): n=A,T,C or G
ccctcccctgntcagaatctgataccaaagagacagggcccgggcccaggcagagagcgaccagcaggctcctcagccctctcttgccaaaaagcacaagatgttgaggtgagcagggcaggcccccggggaggggccagagttttctatgaatctatttttcttcagactgagg

SEQ ID NO: 3879 - DNA, 327 bp, Homo sapiens
gctactttattgcaacaactctagcaaattaatgcacaaatggcagaatggtatttttcaacttttatgagaaaagtaaaggcagttatagtagaagagagcatcatgagtcgactgtgctcagatagggctatttgcttttccccaactatgctccatacttttttcttttcatatgttttttttgagtcggggtcttgctctgctgcccaggttggagtgcagtgtcatgatcatagctcactgtaacctcgaccttctgagcttgagtgatcctcctgtctcagcctcccaagtagctgagactgcaggtgcatgccaacacag

SEQ ID NO: 3880 - DNA, 230 bp, Homo sapiens
acgtgtatgcaaatgagtgatggataaggatgagtcttggagttgcgggcagcctggagactcgtggacttaccgcctggaggcaggcccgggaaagctgctgtttactcatcgggcagccacgtgctctctggaggaagtgatagtttctgaaaccgctcagatgttttggggaaagttggagaagccgtggccttgcgagaggtggttacaccagaacctggacattg

SEQ ID NO: 3881 - DNA, 256 bp, Homo sapiens
caagagacgtctctgaagccaccgttcctgattattcagaggcagggtccacagtgagtgactcggtggggctggaggaacccagggtgacccagagggggctctggagcgggtccctaacatctgaaaaagtcctcccagggaactcggagctggaacttccaggcagcttcgggggtgacatttgtatccggccagccgagcggggaaaggagaccttgtgtcctggcaacagggagagccgggactgggatgg

SEQ ID NO: 3882 - DNA, 315 bp, Homo sapiens
aaaaccacctccacctctaaccttgggtaaaactgggcttagtcgctcagttagttgtgacaatgtcagcaaagtaggtcttcctagtccaagtagtttagttccaggaagcagcagccaactaagtgggaatggaaatagtggaacatcaggacctagtggaagtactaccagcaaaactacttcagaatccagcagctctccctcagcatcccttaaaggcccaacttcacaagaatcacagctcaatgctatgaagcgattacagatggtcaagaagaaagctgcccaaaagaaactcaagaagtaatgtgg

SEQ ID NO: 3883 - DNA, 261 bp, Homo sapiens
ctggtaaaggtgactgtacagatgcgcattttccttttggtataaatggtccacagcactaactggtaaggcttattgtacagtatattgtcagtattcttctggttcagcataccttatagttcatatataacctgtattaattgtatagattgtgcattaaaagctgttaccaagttgtcagaacataagagcgaaaacaaggtcatatgtaatattttgtttgtaagtatcctttgtatcatagcaaaggaaatgttt

SEQ ID NO: 3884 - DNA, 295 bp, Homo sapiens
  unsure (54): n=A,T,C or G
  unsure (88): n=A,T,C or G
  unsure (100): n=A,T,C or G
  unsure (172): n=A,T,C or G
  unsure (178): n=A,T,C or G
  unsure (201): n=A,T,C or G
  unsure (212): n=A,T,C or G
  unsure (229): n=A,T,C or G
  unsure (235): n=A,T,C or G
  unsure (262): n=A,T,C or G
  unsure (273): n=A,T,C or G
  unsure (278): n=A,T,C or G
ggtgcctaccaacaagatggtgatgctgtcctgcgaggctaaaatctccctcantaacatgcgcatctactggctgagacagcgccangcaccgagcagngacagtcaccacgagttcctggccctctgggattccgcaaaagggactatccacggcgaagaggtggaacangacaanatagctgtgtttcgggatgcaanccggttcattntcaatctcacaagcgtnaacccngaagacagtggcatctacttctgcatnacctcaagganccccnagctgaccttcggggaa

SEQ ID NO: 3885 - DNA, 297 bp, Homo sapiens
  unsure (12): n=A,T,C or G
aactaaatacantgttggtcttgcctgtccttcaaaatcaacaacagattgtctctcggctccagggaggtgtcatttctatagaaattagaagctttctgatttctagatgaggttttacaattgtttcttacagtcatgtgcactaagtactctttttgtaagcagaggtggctggctctgcagccttaaggccattttttaagtcaccacgtctagaagtcacatgaactctgctcagcaataatctgttctcagaacagacttttcaacctgctgccggatttctccattcag

SEQ ID NO: 3886 - DNA, 147 bp, Homo sapiens
  unsure (30): n=A,T,C or G
  unsure (96): n=A,T,C or G
  unsure (122): n=A,T,C or G
ctaagtttgctgggggccttcatttctcangaccaaaggtggaaggaggtgtgaaaggaggtcagattggactccaggctcctgggctgagtgtgnctgggcctcaaggtcacttggaaagnggatctggaaaacccacattcccta

SEQ ID NO: 3887 - DNA, 184 bp, Homo sapiens
  unsure (122): n=A,T,C or G
  unsure (131): n=A,T,C or G
tgagaacaccttggatgcctttctcttgcaatgtcctccatgtccatgtaaaatccagtccttccaggccctgcctggctctaaacctcatccccttcgagggccatctgctgtggacagtngagctgtgnaaccttcagatttcccacacattacagcaaatgcaaatacacatagaaatcag

SEQ ID NO: 3888 - DNA, 286 bp, Homo sapiens
  unsure (18): n=A,T,C or G
  unsure (23): n=A,T,C or G
  unsure (155): n=A,T,C or G
atgggccaccaccagtgngacancaggacatcctaatatatggatcttgatttttaagtttcagtatctgaacttcgtaaattagtaacttttagctgggaaagtatagcatgaaaccagaggttctcagaatgactgtaagatagcttacattncctctttttgcctttatctccccaactaaaatacaatggggaagaagtctgcctatgatctttgaatgagctttttaaggaagaaatattatatattgtttgttaaagtttattgaaataaagaatcattt

SEQ ID NO: 3889 - DNA, 234 bp, Homo sapiens
  unsure (13): n=A,T,C or G
  unsure (47): n=A,T,C or G
aaagatgtggaanatggggtacaattaaaaccatgagagttgtgcanggaacagccgtagggcctgtttgcaccttcagatattgcctgctcccaaaaattcagacccccagatgcagggcaagacaataagaaagggtgagtgcaagcaaggagagcctcctgctaagaggctgaggtcccctctggttccaaggatgggatgtcagccttgaccttccggggtctgcagtgg

SEQ ID NO: 3890 - DNA, 218 bp, Homo sapiens
aaatgaaagccctttagtctgtactgaatcctttaatcatctccctccatctttttttttttttctggtcacagcgattgaacaggagaagcaagcaggcgaatcgtaatgaggcgtgcgccgccaatatgcactgtacattccacaagcattgccttcttattttacttcttttagctgtttaactttgtaagatgcaaagaggttggatcaagttt

SEQ ID NO: 3891 - DNA, 438 bp, Homo sapiens
ccaactaaatcatggcctgtctgcttacccattcaatgtgctgggaaggggccaatgatttcttaaactgtttcctagagcaggggctctaaaaccctgggtagcagaggactgtggtccaaaccaagccaaaagaaacaggctggggtagggaagcatggtgactgcctggcagaaaaggcaaactctgggccccatagggaaaagtgcattctttgcacctcagagatattgcagaaccagtgttaacactatgagactttgttaggaggggaaaaaataaaaccctggaagaatctttcacctgaactcaacttgactggagttcagtccaccagtctcaggggaagggggaagcacctagctccacagcagcactgagtctggccctcccgccccatctccccagcccctctcagcaactaggccaggcttcag

SEQ ID NO: 3892 - DNA, 576 bp, Homo sapiens
  unsure (508): n=A,T,C or G
tcaaaaatacctattactttagattaacatacttttcctaagagcttagcatttgctaaattgtttcctctaaaattctgctcatctggaccagtgacagttgaatctcagtccttccactgtcagagagtactgagagagcacaccatatctgctctgctcaggaactgaaaagtttatccagtaataagattatggactgccagtctggcaatgcaatatgaatccatgttgagcttgacagatgttagtctctgcaccagtagtagctaagaaatctgattggttagcagccaatgagcaatttctcacatactgccacaataaactaaccacagaaatggaaaaattttttttcctacattaaaatgaaaatatctcataagcacattatctcaagtttttcctgagagggctactcaaagagatacatatatatatatatagcaagttcgatctgaattacataatcagcgagactcaaagtacaatcatcacagaagattgngaattataagcagcattatatcaaattaaaacttgtactagcaaagaatttccttatatatcaagctc

SEQ ID NO: 3893 - DNA, 187 bp, Homo sapiens
aaagaaagaaaagaggaggactctcatacaactctgcatgaaacaccaacaactgggaatcactatccgagcaatcaccagccttgaaaggcagcagggtgcccaggtgaagctggcctgttttctaaaggaaaatgattgccacaaggcaagaggatgcatctttcttcctggtgtacaagtcttt

SEQ ID NO: 3894 - DNA, 310 bp, Homo sapiens
cctcggccgagcccgccggccagcctgagaagccaggctggctgctggtgaatgtgaacgctccgggtaaggctcggtggctgctgcggtcccagacccttcaccggcccttgggacccagggctaggcgtaacctgttggtgctgtcccccaaaacgcaggcttaagtccactccccgccctaagttctctgtgtgtgtcctgggggaccagcagcactgtgacgaggctaaggccgtggatatcccccacatggacatcgaggcgctgaaaaaactcaacaagaataaaaaactggtcaagaagctgg

SEQ ID NO: 3895 - DNA, 331 bp, Homo sapiens
ccacggtggggcagggtaccaccaagatccttcagtctgagctcagcgagtgtcccatctccacacttactgtgcacccggatcacggcctccagagagcggatggcattgaggttgggtttctgtttccagccttcttctgaaaggggatccacctatagaaaacagtacatcagccaccagtctctcagggacccacaggcccagctcactcccaccccaggggccccagccttctagccacaagcacactctacctaggccaggagatgctgcctggacctaacttggaacagaggctttcgcttcgcctaccttgtttcaggcttgg

SEQ ID NO: 3896 - DNA, 387 bp, Homo sapiens
ctgtggttctccaccacagagagaagaaaagggagggagatggagtgcgcaggtctgagaaggctttcattctggagcatctgcaggagcctgcaccatggcccagtagcacccctttttctccgtgagctgctggtgggttcccccctcccggatagcgcctccttccagaaagaggatgtggtcagcctgctccaccaggctgaggtgctgggtgatgagaagcactgagcgggagtaccgctcagggctttcgtacaggagctgctccacctgtaactggctgtttgcatccagggcactggtggcatcatccaggataagtacacacggtttccggatcaatgctcgggccaacgccactgcctgtcgctgaccccctgacag

SEQ ID NO: 3897 - DNA, 452 bp, Homo sapiens
aaaacttgctttgtttagaattcccacctcatttttccatggacaaaagtattctttatgtcctagtgcacttacaatttggtattacctgggagtgaaaagaaatattacagccatgcctaactgacttcttgaggtaagattgttctgtcagaaaaccctctcccagttcccctgcagcttttcaggaatccacatctctccagagctctttgttctcatgggtggcacctccagagtgaagaagatcctttgtcaagaagggaaacagaggggaaatgagagggtcctgcaggcagagctggaatcaacttccactctgcctcttgcaagctgtgtgaccctgggcacaatttctccttcctctggaaacctctgttttcttagatttggagcagggtggtcacactgaccttgcagagttctgagaatcagagacagaacataaaagg

SEQ ID NO: 3898 - DNA, 318 bp, Homo sapiens
  unsure (16): n=A,T,C or G
ctgccctctgtaaatnagaggtggggaaagcacccaccctagaagctctattgcccgaagattgtaaccctgaggagcctgaaaatgaagacttccacccttcctggtccccctcaagcctccccttccgcacggacaatgaagagggctgtgggatggtgaagacctcccagcagaatgaggatcggccccctgaagattcttccttagaactccctctggcagtgtgacaggcgctagaggtcctgcctcttacccattctctatttattcccttattttatctaacaccatttcaaaacaaaactgtagaagcag

SEQ ID NO: 3899 - DNA, 128 bp, Homo sapiens
  unsure (14): n=A,T,C or G
ctggttactttgtnaccattagaatggtaaaaatttaattaatgtaattaaattattgggagaaagcttaaaactttcgacaatactgctttgttaataacttgttacaaattaaattttatgttttt

SEQ ID NO: 3900 - DNA, 289 bp, Homo sapiens
  unsure (36): n=A,T,C or G
  unsure (54): n=A,T,C or G
  unsure (188): n=A,T,C or G
  unsure (190): n=A,T,C or G
  unsure (191): n=A,T,C or G
ccatgtccccagaattgaagccagagaatcgctcanatatccctgagggccggncgttatcaaaagagatgattaggacaggggcctggcctggcttctggtaataccagtgtacattgttactcccaatattgtttcccccacaggtaatcttggccgtctttcctggggccactgacactgagggngnntgagtcaacacataggaggtcacagagtctgtgcagtgagagaggaggccgaggaggagaacggtccaggccatggctgaggcaccaccagtgctgct

SEQ ID NO: 3901 - DNA, 452 bp, Homo sapiens
ctgggctgtgcctcggtctctatgcgcctcggtctctgtgcgcctcggtcccgcctcaagcaccgggtggcgtctccgctgtagtgttctgagttcaagttgcctcggaagtcccagttggggatacgctctcgcgcaccaggtacgcctggtgtttctttgtggtttttcggattctttttggggagtgcggggagtcacagttagaaggcggccgggtgttgctggaggaaagtgctgaggtccagagcgtagtccgagggctccgaagtcagattaaagggctcgaggacggcggacacaggggtgggcgccagggatgcggcgttaggggcgtcctctggaggcaggggcgccggcacaccctcttcagccatcaggatctggcagaagacgatggtgagcagcagaaagagaagccttttggctgggttcggttcctcgactggcag

SEQ ID NO: 3902 - DNA, 203 bp, Homo sapiens
ctgtcaagggcagcagattatcagcgcaaatccagaaaaaccctgtgcatcatcattcttatccttgtcattggagttgcgattatcagtctcatcatatggggattgaaccactgaagttataaaggagcacactgtcgcactacattgtctaaattatgtaggaagattcctgtaatcatgttttttttaattattatttt

SEQ ID NO: 3903 - DNA, 633 bp, Homo sapiens
  unsure (562): n=A,T,C or G
  unsure (622): n=A,T,C or G
aaaatgttttaatgtatatgtgttatgggtcataggtactcattagtatgcttcataatttattcacgttagatatactctttatagatatcaaatattacatattataatttcttaaaatctgctgtggtggaaataaatgaacacatgaagtctccctgaaagaaaatcagtgtttcttgggaagaaccaagattccctgacagaagctaccctatgtagaggacaaagtaggtcttcaataaatattagttggtttactgcttctcccaaggatacatctggagggtctgcattcctttctcattggtgccgcctgaccacagaactagctttttccgtgacatctaacctaaaccccgcagtcctaagtcctgacacgtatgacaagatgctgccacctggtggatacagaatagatttaatgaaatggctaggaagtctttcactctagttggtggaactggcaatagggtgagagggaagcaggaatgagaagacaaaaattaagaaacaggaaaaggaaggagctccatctctaatatggaggtaggaaaaaaangggactatcatctaaatgagactgaagagtccctagaggagaatggcttccctctccttncttctgagact

SEQ ID NO: 3904 - DNA, 294 bp, Homo sapiens
cctatgaggagtatgttttatctgttgggaatttagatgagcgggtatttcttggagaggatgctgaggaggaaattgggactctctcaaggtgtctgaacgctggttcaggaacagagactgctgaaagggtgcagatgaaaaacatcttacagcagcattttgacaagtccaaagcacttagaatctccacaccactaactggtgttaggtacattaaggagaatagcccttgtgtgactccagtttctacagctacgcatagcttgagtcgtcttcacaccatgctgacag

SEQ ID NO: 3905 - DNA, 225 bp, Homo sapiens
ctgccctccggtgggccggatctctagattcacattagacacagggactctctgtacacgtatctgagatctcaggctcctttttttgatgctgtgagtcactgtctccacctcacaccagtaagaccctgagtcttcagtccacatggcagggatctggagtctgggggacctgctccagcccaatccgagggtctggctatctctgaagagggagaattgcag

SEQ ID NO: 3906 - DNA, 268 bp, Homo sapiens
aaagatatatgaaaagggttttatttatttaacagacagacaatggaacaagcaaacaatgggagcaagtcctttgccaaaaggaacacagagggtcatgatgatgctactcctccaaggatttcagagttcccagacgcctagttttctgtctagttcttctggaagatgttattcttggggagcaataggtcctcgagtttggggctctttcaggttctctctccatttccccattctgcgctctaatctctctggttttccaagg

SEQ ID NO: 3907 - DNA, 219 bp, Homo sapiens
aaagcctaaaaatgccataggaggtcaccagtccttatgttgtactctgaattcctaggatttcaccttggaggtcacagcagtgctatgtagaaagaagaatgtactagggggagattattcttagaaaaggacagtactttggttggagtagaatcagtccacaccattcataacacaaacaccaggctctgtgggctgtgaggtggggagcagagg

SEQ ID NO: 3908 - DNA, 268 bp, Homo sapiens
ctgcctatcaaaacagtacaacttttctaggaaatgcaattggcaaagacacttacgatgctgagaagtacacaaggtgaaactgctccagtttttctcatagcagggtcagcaggaaagcaagtggtgcccctggtcccatctcacacaggtgagactgcaccgagaggtaacgtggccctcacagcccaccacgcctggccttcgcccaattctgaaacttcgtaggatagagctggaaagtgccacatggtgaagcgagatccag

SEQ ID NO: 3909 - DNA, 373 bp, Homo sapiens; identical to SEQ ID NO: 142

SEQ ID NO: 3910 - DNA, 285 bp, Homo sapiens
aaagtgccacatttggcagtacaaatgagtctgagtgtaatagcccagagatttatatatagttgaatgtctaaaatggtaaaatgtgccactgtgtcaagttacagtggcttatgtttttcatagtaattcaaatgaacttcctatttttgatagtaaatgtcatttaatagtatacttgccatttgagcctcactgcaaaattagtgcagaggagaaaacaatttttaatgtaatcttgattttacctcatatactgtacattccaaaaactctaaacttttt

SEQ ID NO: 3911 - DNA, 192 bp, Homo sapiens
ctgtggccccacgaggcaggacttcaataactcgcggcttgtcaatgatccgggccgttcggtttcccttttccacaatgccaacgatccacgcttggtgaccctctccgtacttggaggatttgatttcagaacaaaagcgagccgcctgttctcttggcagacaaatcagtaatcccccagaggtttcag

SEQ ID NO: 3912 - DNA, 308 bp, Homo sapiens
attctctcctgacggaagagtttttcaagttgagtatgctatgaaggctgtggaaaatagtagtacagctattggaatcagatgcaaagatggtgttgtctttggggtagaaaaattagtcctttctaaactttatgaagaaggttccaacaaaagactttttaatgttgatcggcatgttggaatggcagtagcaggtttgttggcagatgctcgttctttagcagacatagcaagagaagaagcttccaacttcagatctaactttggctacaacattccactaaaacatcttgcagacagagtgg

SEQ ID NO: 3913 - DNA, 535 bp, Homo sapiens
aaagagaaacttaaatcctgttgtattctttcaacacaagcagtgatacctctcagagtctgctcaaaagctcagctctgtggactccgtgacaaaatgtacgcgtccactgccgaccctcttggtttctgaaaccaacctttcttcctgctctcctctttaagagcaaaccccaacatgtataaggtcacagcaagtggtagccaggaaaagctgtgggacccctcatttgagtcacatccatatggcatggagaaagaaaacctctctgccagaaggaactgaactctggaagtcctaaggaaggtcaccatgctcagcagataggaaagcattgccaagggctgtccctcaagagcttagttttcttagggagaccagaaagacatcagatcctgactgccctgttttgctcaagttctgaaatgagtggcatgatgaagagctggtggagctgagggaaagagtcaaccatgtggggtggggtagtgaggaaggtgtatgaggaaacaaactgggccctgacgaaacaggc

SEQ ID NO: 3914 - DNA, 575 bp, Homo sapiens
gagcacggagatctcgccggctttacgttcacctcggtgtctgcagcaccctccgcttcctctcctaggcgacgagacccagtggctagaagttcaccatgtctattctcaagatccatgccagggagatctttgactctcgcgggaatcccactgttgaggttgatctcttcacctcaaaaggtctcttcagagctgctgtgcccagtggtgcttcaactggtatctatgaggccctagagctccgggacaatgataagactcgctatatggggaagggtgtctcaaaggctgttgagcacatcaataaaactattgcgcctgccctggttagcaagaaactgaacgtcacagaacaagagaagattgacaaactgatgatcgagatggatggaacagaaaataaatctaagtttggtgcgaacgccattctgggggtgtcccttgccgtctgcaaagctggtgccgttgagaagggggtccccctgtaccgccacatcgctgacttggctggcaactctgaagtcatcctgccagtcccggcgttcaatgtcatcaatggcggttctcatgct

SEQ ID NO: 3915 - DNA, 221 bp, Homo sapiens
aaaacattagatggtgctgaaaagccttctccctccctggatgaagcagtcaaacagacagctactctgcgcatacactccacgcattagcatgcgcgtggggctcagagcaacaggtgggagtttcagaagcattctggtttctccccactcctcacccctgcagcgcggttgcgtaaggtggcttgtaacaagacaactgcatttataaatttaatttt

SEQ ID NO: 3916 - DNA, 230 bp, Homo sapiens
aaatactgagctgggaggcagggaaggaagtagtggggctggcttaagggtatagccgcctcaggggagtcacccagcagcagtcacctggtaggtccagagagtgagatgggatcaggaactggcatagacctcagtcattggtcctcaagctgaggggtggaactgtagctgggcagggcccgggcctcccgaggtgcccatgtcccactgacccaaggacaagatgg

SEQ ID NO: 3917 - DNA, 373 bp, Homo sapiens
aaacacaacagaaatccattaatgtacgctgcagatttttttaagtagccttgaaaatcagcttcagtagttggagcagtgctgagctagaagtacttgtcatgttctctgttctctcaatgaattctgtcaaaacgctcagtgcagaaaattcagcgtttcagagatcttcagctaatcttaaaacaacaatcataagaaggcccagtcgatgacactcagggttctacagctctcccacatctgtgaactcgggtttggggatgttggttaagtttgtggctggtcctctggtttgttgggagttgagcagccgcagagtcacacacatgcaaacacgcactcttcggaaggcagccactgtctacatcag

SEQ ID NO: 3918 - DNA, 624 bp, Homo sapiens
  unsure (520): n=A,T,C or G
  unsure (574): n=A,T,C or G
  unsure (615): n=A,T,C or G
ctgtggtcaagtacacggatatgcatgtacaaggatatttattggtgttgcatataatgataaattattgagagttttctaaatgtacattttcctccttctggtagccatcttctctacgaagagtgactattgcctctttacccagaaatattggaaatgcaggaatggtggctgggatggaaaataatgatcgattcagtagaaggtcaagcagttggcgtattttggggtcaaagcagagtgaacaccgtccctcattacctcgatttattagcacctattcctgggcagatgctgaagaagaaaaatgtaaactaaaaactaaagatgactcagagccatctggagaagaaacagtagaaaggacaaggaagccaagtctttctgaaaagaaaaataatccatcaaagtgggatgtctcttcagtttatgacacaatagcttcctgggcaacaaatctcaagtcctccatcagaaaggctaataaggccctctggctctctattgcattcattgnactggttgcagctttgatgagcttcctcacaggccaattattccagaagtctgnggatgccgctcccacacagcaagaggactcatggacgtctntagaacata

SEQ ID NO: 3919 - DNA, 537 bp, Homo sapiens
cctcaggagggtgttggcaaggctggggcggggcctccaggctcttcccacaaaaggtgtggcgaggccagcaagtgtgggagagaggtgggaaggaggcagaaaggccatgcagagccagcgcatgaagccagaggcgcgttgcagacggcgctgggtacctaccgcctctgtctgctactctgcaaaatgctaccagcgcctgctaatcctgaccttcatgcccccaggtgaatcccacaaccatcctgaagccgggtttcctcattcctgataatgggattaaaaagaccttcctgggtgttatttgtgaggatttcataaaatagtgtaaaaatgctgactcatacccagcatggagaggccgctgggactattctgccatgactgtggtctcttggtttagagcatttagggccaaactgctggcatggttgaccctaagctggagattggaggctgctttaaccaggctgtggccctagaatctgtgggccatggcaaaaggatcctgaagaagtttccggccggcctctg

SEQ ID NO: 3920 - DNA, 412 bp, Homo sapiens
ccttacctgggaggccagacccatcctctccttaagccacaccctaactcatctctacatgctgggtggtgacaagcaaggacaccccaatctgcttggctccttggctggcagcagcacccacacatccctgcccaccacctgctcaggctccagatcccaaggaggaggtggaaggtgcctgccctccattatcaggcatgcaacatttattagaagccgcacagtctctcttgaccagtgttccgcatctgagccacaggatgcagaaaatgacttgagtgattctcgtcaattcttccaaggatggtatgtaactagtctcattctagaaagaagttaactcattatacacagtggatggcttaagggattagggcttcattctctcccagaccctggtagtaaaagg

SEQ ID NO: 3921 - DNA, 247 bp, Homo sapiens
  unsure (166): n=A,T,C or G
  unsure (203): n=A,T,C or G
ctgcgggccccttagcctgccctgcttccaagcgacggccatcccagtaggggactttcccacactgtgcctttacgatcagcgtgacagagtagaagctggagtgcctcaccacacggcccggaaacagcgggaagtaactggaaagagctttaggacagcttanatgccgagtgggcgaatgccagaccaatgatacccanagctacctgccgccaacttgttgaggtgtgtgtttgactgtgag

SEQ ID NO: 3922 - DNA, 229 bp, Homo sapiens
  unsure (7): n=A,T,C or G
ggaaaanggatggcaaattccctgtctttctggatccaaatcttacgattgctaggggcctggcagttctaaaaactgacttcgtggtcaagtagctttggagtcactgactgtctccagacgtccatttttgcacatgagaaatgaggatataatactacagaagaggcatcttacccaaccaatgcaccttacttctctgtgaaacacaggggatgctgggcgcagg

SEQ ID NO: 3923 - DNA, 543 bp, Homo sapiens
cctggcagcactggagggcaggcagggaaagtagggtgggtaacccagcctggcaaatgcacggcagctagaaaacctcttcaggttctggggtggctgggccatgagaggggaggccaggcagggctgtcaaggtaaccggggtcagatcatggagttgcctgccaggctccacaggagtgggggacagaagcagagcaacccagctaccagccgggccctgagctccctcagggtgaccagggaggagctgtgactggctggggaggcagggctggggccgaggttccccaggacgacaggagggagccaaggcactctaagaggtggaagaagaggaccagaagctggtgagtgcatcactggagcccataggagggctcctgactgtcctcaaaagcctcagacctcagtgtccactttctccatccaagaaatggggctgtgatctctgcttatgacagcacaagcttgcacagaagtggaggcgggaaataagcacaagtgtgccttcccagcccggcctgggtccaggcagaacag

SEQ ID NO: 3924 - DNA, 181 bp, Homo sapiens
  unsure (165): n=A,T,C or G
aaaagcaacaagaagaaaaccaaacaatgctgatagactcagaaaaggagtggggggcagtcaccactgctgggcgtggcatccgccttgggcctttctccgaccttctggtgtggccgccctgggggccaggccctcgccatcctccccatccttgttcctcancaaatggcattagcag

SEQ ID NO: 3925 - DNA, 482 bp, Homo sapiens
ccacaagatatgttctagagacgtccatgagtcctcttgctgtgtgggagcggcatccacagacttctggaataattggcctgtgaggaagctcatcaaagctgcaaacagtacaatgaatgcaatagagagccagagggccttattagcctttctgatggaggacttgagatttgttgcccaggaagctattgtgtcataaactgaagagacatcccactttgatggattatttttcttttcagaaagacttggcttccttgtcctttctactgtttcttctccagatggctctgagtcatctttagttctgtaaataaatgttgtttttaatatttgaaactagggataatatgctataattattcataaaatattgctgaatcttactgtaactcaagaggctcacaaatatttgttctgttttagggaaagttgataaatatctaactctaaaaatcaaatcaccagatttataattt

SEQ ID NO: 3926 - DNA, 168 bp, Homo sapiens
tttgaaattttctggcaggatcagtgtgtcaatctcctccaagatcttcataaactgctctattgtggcttttactctcctatcaagtttgcagagagcttcagcttgcaaatccttgggcagaaaaccctgctggattccagtaagctctttattcaactcttccag

SEQ ID NO: 3927 - DNA, 196 bp, Homo sapiens
aaaaattatgagttaatgctgcctgtgtctatggggttctgtcttctttgatagccatctattcatctggatcatgggaccctctctaatccctccaccaatcaaataagctattgctattggtttggagttgagatatcagtctcggaaacttctgaaaaatgctaataattacccaaggattatgtcaaatttt

SEQ ID NO: 3928 - DNA, 528 bp, Homo sapiens
ccagcacgctacaggggcttcctatgcgcttgggatacacaggggctggaggcttcccaggagtttgtcttgaacatctggaggtttgaatttgtcccactgaccttttctttcagcaagttcccctgaaatttgggctgctgcttgggtgaatatcccaggatgggggttccattctaggagtggactggcaggctgagcctcccatggagctgatccagccaggatacagagaaggggaggcaaaggctgagacagaaccagcttgagagcggaggcgcaactcttgtctcctggtggccttgagcatttcacaatagggggataaaggataggagcagaaaagtggggctgacttcagaaatggggtcctctagagctcacgggagggtgttagattggagtgggagcttagtggaggtgagccttagaggcaaaagtctccagaccaatccagggcccctcttctatccgggggcccctcttctatccagggcccctcttctgtctgggagcccctcttctatc

SEQ ID NO: 3929 - DNA, 520 bp, Homo sapiens
  unsure (351): n=A,T,C or G
ctaattcgggaaacgtgcaccttgactaattcggttttctgtggctacgagagcaggcttggcgggcggaggcgccagcggatgtctcatgcaaggatcgtctctgtggctaagcctcactttccgctccgcccgggtgctctctagagcccggtttttcgagtggcagtctccagggctgccgaatacagcagcgatggagaacggcaccgggccctacggagaagaacgtccacgtgaagtccaggagacgacagtcaccgagggggctgccaaaatcgcctttcccagtgccaacgaggtcttttataacccggtgcaggaattcaatcgggacctgacatgtgctgngatcaccgagtttgctcgcattcagcttggggccaaaggaatccagatcaaggttccaggagagaaggacacgcaaaaagtggtcgtggacttgtcagagcaagaggaggaaaaggttgaactgaaagagagtgaaaacctggcctcaggagaccaacctcgcacagcg

SEQ ID NO: 3930 - DNA, 519 bp, Homo sapiens
  unsure (20): n=A,T,C or G
  unsure (28): n=A,T,C or G
  unsure (75): n=A,T,C or G
  unsure (76): n=A,T,C or G
  unsure (92): n=A,T,C or G
  unsure (98): n=A,T,C or G
  unsure (108): n=A,T,C or G
  unsure (130): n=A,T,C or G
  unsure (138): n=A,T,C or G
  unsure (145): n=A,T,C or G
  unsure (205): n=A,T,C or G
  unsure (221): n=A,T,C or G
  unsure (253): n=A,T,C or G
  unsure (292): n=A,T,C or G
  unsure (304): n=A,T,C or G
  unsure (308): n=A,T,C or G
  unsure (358): n=A,T,C or G
  unsure (369): n=A,T,C or G
  unsure (405): n=A,T,C or G
  unsure (435): n=A,T,C or G
  unsure (459): n=A,T,C or G
  unsure (463): n=A,T,C or G
  unsure (466): n=A,T,C or G
  unsure (474): n=A,T,C or G
  unsure (490): n=A,T,C or G
  unsure (494): n=A,T,C or G
  unsure (497): n=A,T,C or G
ccaacacccacttctctggntgtataanacagggacctaaaaagggaaaggatgggaggaggatcatcctgcagnngatcatgtagggcttnatgctntaaatggttntgcatttccggagatgaaacangtctcttnaccacanaactactgcagatcatagccctatggtctggctggttttgtcaatctggcagttcagggncagtgcaaaggacatncccaacacctcaatcacacatacacagatggngatgattccgatatacaggaaattggaatgaaaccacantcttgctttcgnatancaaccctccacttttcgatctgaggggcaagatgctggtgggccactggnccaatcactcntgccatttataccacaacactgcagaaatgactggntggagtcccacgctgccttggtgctattgnctgagtggtaacggtggatgctgncggncanacccttanccacatactcattcancttntgntcatatacaaagagcaggatgg

SEQ ID NO: 3931 - DNA, 411 bp, Homo sapiens
ccaagtcgggaaggagccgtatatatgcatatgggattcctataatgtccagactgtgtctcttcttaaagatgtccatacacatggagttgcctgcctggcttttgactcagatggacagcgtttagcctctgtggggttggatgccaaaaacacagtctgcatttgggactggaggaagggaaaacttctggcgtcagccaccggccattctgacaggatttttgatatttcctgggatccatatcagccaaacagagtggttagctgtggagtaaaacacataaagttttggacactgtgtggaaatgccctgactgcaaaaagagggatatttggcaaaacaggggatcttcagaccatcctttgccttgcatgtgccaaagaagacatcacctactctggtgcttt

SEQ ID NO: 3932 - DNA, 532 bp, Homo sapiens
  unsure (10): n=A,T,C or G
  unsure (140): n=A,T,C or G
  unsure (265): n=A,T,C or G
  unsure (314): n=A,T,C or G
  unsure (331): n=A,T,C or G
  unsure (454): n=A,T,C or G
  unsure (525): n=A,T,C or G
ctgggcgtangtcacatcctggggggcttcagatgcagcagcctcagtgtccatctgcctgtcctcttccgcctgtctgtcctttgtgtccaggaattccccagacagtggggaaggaggagaggccatttctctcctangtctggagtgtttcacctcggcatacgtcactgcctgggggtcttcatcgtgtgggctctgctggagagagacagtggtgggggtgtccctgaatcctcctgaccccctggagtcaattttcctnactgttccccgggtgatccgattacatccctttcccgatggactctcanggacgccctaaggccgnggagggtctggccgctccctcgctgtggttctggcctctgctcctcactctgacgttgcccatttggctgcagcctcacgggccttcctgcaagagctcgctgctgcctgggggcctttgcanggttgtttcctctgcctgcaggggctcgtccatcagaggatcgtgtgccccactctgtccaggcttctcanatgacag

SEQ ID NO: 3933 - DNA, 390 bp, Homo sapiens
ctgaagtacaaaatttgattactggaggcaatgaatcaagtctagtctctgggctccaagctatgccatcaaccctgactccatggtgaaatgttcgaagtgttttatactgaatgccttcaacgtctgcttcttcttcctgaaacgtacacgtgccaatgaccacataattattgccaccatatgcaattaggtttcctgaatccccattctcaaagggattaaattctaccacatgcacataatcttcacaatccacagtgtaggcagcatttcttgaggcatcttgcttcatcttgtatgtcaaaattcaagcagttgtgaaaattaaatagccttctactggacaaggtcacgaaacgcagagcgccaggaaccgaccagaggcag

SEQ ID NO: 3934 - DNA, 550 bp, Homo sapiens
cctggcagcctggctggacagtcaatgtggagggcagtggtgagggccgggctggggcaggggcaggaggagagaagggaggccaccatggacagaagaggtccgcggccacaatggagctggagagaggggctggagggattgagggcgaaactcggagctaggtgggcagactcctggggcttcgtggcttcagtatgagctgcttcctgtccctctacctctcactgtcttctctctctctgcgggtctttgtctctatttatctctgtctttgagtctctatctctctccctctcctgggtgtctctgcatttggttctgggtctcttcccaggggagctgttccggtggaatgtttcggacctaggtggcctgggctgtggcctgaagaacaggtcctcagagggccccagctccccttccgggaagctcgtgagccccaagctgtatgtgtgggccaaagaccgccctgagatctgggagggagagcctccgtatgtcccaccgagggacagcctgaaccagagcctcagccaggacctcacca

SEQ ID NO: 3935 - DNA, 387 bp, Homo sapiens
atttttagtagagacggtgtttcaccatattggtcaggctagtctcgaactcctgacctctggtgactcacctgcctcagcctcccaaagtgctgggattacagacatgagccaccatgcccagcttacctcttcatggtttcattaatcagcaaagaacacctaatcctgacatccagctgttttttcctagctgccaagactgttgaggaagatgagagaattccagtactaaaggtattggcaagagacagtttctgtggatgttcctcatctgaaattttgagaatggagagaattattctggataagttgaattgggatcttcacacagccacaccattggattttcttcatattttccatgccattgcagtgtcaactagg

SEQ ID NO: 3936 - DNA, 270 bp, Homo sapiens
cctgcctagcttctgcatagcccggggctgggcggtccccgggagtgctgccacctcccctacactttcatcctgaggcaggatttgctagacgtcggcttgcctctcttccccagcaggagggcaggagtcactaagtgctgcagaaaagatccgcgctggagattgcccgtcccccccatgcctttccccagaaacagttgagagaatgggtagctggtgggaccagaccggtttcccagaggacaggaaggccaataaaaatatcag

SEQ ID NO: 3937 - DNA, 601 bp, Homo sapiens
  unsure (561): n=A,T,C or G
aaaaaggtctctctctttttcacaagctagaaagtatccttcgtatgatgaagattcaaattgcatcttattatcatgtcctgggacacttctctgaaagaatatgatgtcactttttgtatccttgatgttatcaggaggattcatttccttaaaggaaataattttgttctcacaggagagagttgaaattttctcacacttcacagagatagttacagccatacctctaggctggctatctttatacatacttataataaatatggtccggggtgcattatctctacagtcagaatcagtcatatcttcaaatagaggccgatttccttggtcaatgaagagaacttggtcattcaaatttcttatgactgataatttagattcaagcttgccaaagtaatcggattccaggttttcatcatcttcagctataaagtaaagcgtattgtcaataaatttcattgccacaaagttgatgcaattgtcttctactggttcagcagccatctttattcctgcgacaaatagtttgttgcgagaggaagcgatctggaaggnctgaggttcctttcctcttcccgaagctgtgtagactgca

SEQ ID NO: 3938 - DNA, 323 bp, Homo sapiens
gtgacaggagccgaagcagcagcgcaggttgtccccgtttcccctcccccttcccttctccggttgccttcccgggccccttacactccacagtcccggtcccgccatgtcccagaaacaagaagaagagaaccctgcggaggagaccggcgaggagaagcaggacacgcaggagaaagaaggtattctgcctgagagagctgaagaggcaaagctaaaggccaaatacccaagcctaggacaaaagcctggaggctccgacttcctcatgaagagactccagaaagggcaaaagtactttgactcaggagactacaacatgg

SEQ ID NO: 3939 - DNA, 222 bp, Homo sapiens
  unsure (7): n=A,T,C or G
  unsure (23): n=A,T,C or G
  unsure (33): n=A,T,C or G
  unsure (55): n=A,T,C or G
  unsure (71): n=A,T,C or G
  unsure (73): n=A,T,C or G
  unsure (90): n=A,T,C or G
  unsure (158): n=A,T,C or G
  unsure (183): n=A,T,C or G
  unsure (198): n=A,T,C or G
atgaatnaagagtttcctatggngaagttaacnttctaccattgcacataaattncgacgctctggccctnangtgcccctgaagcgaanttctggaagacggctgtgtgtgtacccccagcccatttctctaaagcacgtctgcacaattccaagtntgcttttctttttatgatgaggaangaaacaataacagtnatcattcagtagatatttgaattg

SEQ ID NO: 3940 - DNA, 430 bp, Homo sapiens
ccttaaaggagaccagggggaacctgggccctctggaaaccccggcaaggtgggctacccagggcccagcggccccctcggagcccgtggcatcccgggaattaaaggcaccaagggcagcccaggaaacatcaaggaccagccgaggccagccttctccgccattcagcggaaccccccaatggggggcaacgtggtcatcttcgacacggtcatcaccaaccaggaagaaccgtaccagaaccactccggccgattcgtctgcattgtacccggctactactacttcaccttccaggtgctgtcccagtgggaaatctgcctgtccatcgtctcctcctcaaggggccaggtccgacgctccctgggcttctgtgacaccaccaacaaggggctcttccaggtggtgtcagggggcatggtgcttcag

SEQ ID NO: 3941 - DNA, 172 bp, Homo sapiens
ccttgacttgcttgtaagatgattctcagagatcggctgagttaaaaaagatgacgacttgattaccaaagaaagtagggccaactttgacaaatctggctctgctgaccctgtcactcccagatgtagcatagactcctaaacagaacctcaagtctgattgaggataagg

SEQ ID NO: 3942 - DNA, 516 bp, Homo sapiens
  unsure (8): n=A,T,C or G
  unsure (36): n=A,T,C or G
  unsure (435): n=A,T,C or G
  unsure (507): n=A,T,C or G
aaatgacnaaactggaattatttcaacccggaaatnattgtttcaaatttccatggttaaaggtttgctcaagcaaatcttaaaacacaggtatgtatttcagaagatcaaccaaattcgagtttgcatcccattttgggtacattgtaaatagaaatttcaaaatcttcctcaaaaatatctgcatttgttttccagattcttgcaacccaaaacaaaacttcacagaaactctgcacaagagttggcagacagctaaaccttctccaaattgagttatggacaataaggtcttgattatagcagaattggaaggtctatttacaaacctgcacacagtgctgtgtaaattgggtgctggggcacattgattggcagggaaaggccagggaggcagttgaatccctggcatttttcaaagcttttttcctaggntcattattcctagaattttgaagcttattaagacattccctatcctatgtcatactctagagcactctagtnagaatcctg

SEQ ID NO: 3943 - DNA, 118 bp, Homo sapiens
  unsure (3): n=A,T,C or G
  unsure (24): n=A,T,C or G
  unsure (40): n=A,T,C or G
  unsure (41): n=A,T,C or G
ctngatgcctcatgaatcaacggnggagcacacacacgtnnatatcaatgagatggagtctcctcttgccacccggaaccgcacatcagtggatttcaaagacactgactacaagcgg

SEQ ID NO: 3944 - DNA, 219 bp, Homo sapiens
  unsure (9): n=A,T,C or G
  unsure (10): n=A,T,C or G
  unsure (23): n=A,T,C or G
  unsure (36): n=A,T,C or G
  unsure (42): n=A,T,C or G
  unsure (48): n=A,T,C or G
  unsure (123): n=A,T,C or G
tttgtgccnnaactggacctgcnggttggtaccaanggctgntgccanccagccggagtacaggtcatctccaaatttgctgaacttggcaaagctctggaaaacagccccggcctgggatgngagtgtgatgctgctgttccagggttcttggctaacgtggtggcccttgaccacattctccaagtcggggaattcctgggcaaagatcccttccag

SEQ ID NO: 3945 - DNA, 504 bp, Homo sapiens
ctgtctgtcatctgctgcgatccggcagcctctcttcactgctacatgtgctggaaggacaaataaataattgtggttgtgttcttaatggggacgagcagacacactgatctgaacatctggcccaagtgaagcatggcatatagtgcccttggaagaaaattaggcctcaaatgacagtagcattgaagtgtttgctgcagagttgagggaaacccccagccaccctcccggaatccgagatagggtggcacatctgtcctgacagacgaggagtgtaactgaaccaggaatatttcctccattcctgctctcccactgcacacagggtggtggcacattatccctctggggggtggggacgcctgttgttttggctcaatttgggtttgttggtcacatggagctcttccatttcgtttagctgaataatgagttgttcctagaggagacagcctgtctctccttgttgcccccaaagcccatgccctgccgtggtggcag

SEQ ID NO: 3946 - DNA, 393 bp, Homo sapiens
ccttctacaccacggaccgggtcatgactgtgtcctttcataagtatggagagtacttcccaggaactggggacctacgggatatcggggctggcaaaggcaagtattatgctgttgactacccgctccgagacgggattgatgacgagtcctatgaggccattttcaagccggtcatgtccaaagtaatggagatgttccagcctagtgcggtggtcttacagtgtggctcagactccctatctggggatcggttaggttgcttcaatctaactatcaaaggacacgccaagtgtgtggaatttgtcaagagctttaacctgcctatgctgatgctgggaggcggtggttacaccattcgtaacgttgcccggtgctggacatatgagacag

SEQ ID NO: 3947 - DNA, 452 bp, Homo sapiens
  unsure (255): n=A,T,C or G
ctgggctgtgcctcggtctctatgcgcctcggtctctgtgcgcctcggtcccgcctcaagcaccgggtggcgtctccgctgtagtgttctgagttcaagttgcctcggaagtcccagttggggatacgctctcgcgcaccaggtacgcctggtgtttctttgtggtttttcggattctttttggggagtgcggggagtcacagttagaaggcggccgggtgttgctggaggaaagtgctgaggtccagagcgtantccgagggctccgaagtcagattaaagggctcgaggacggcggacacaggggtgggcgccagggatgcggcgttaggggcgtcctctggaggcaggggcgccggcacaccctcttcagccatcaggatctggcagaagacgatggtgagcagcagaaagagaagccttttggctgggttcggttcctcgactggcag

SEQ ID NO: 3948 - DNA, 506 bp, Homo sapiens
  unsure (490): n=A,T,C or G
ctggagagggggcttacgacagtcgctcatgcagtgccaggacttccaccagttgagtcaaaatctgctgctgtggttagcgagtgccaagaaccggaggcagaaggctcatgtcaccgatccaaaggcagacccccgggctctcctagagtgtcggagggaactaatgcaactggaaaaggagctggtagaacgtcaacctcaagtggacatgttacaggagatttcaaacagccttctcattaagggacatggagaagactgtattgaagctgaagaaaaggtgcatgttattgagaagaaactcaaacagttacgggagcaagtgtcccaagatttaatggccttgcagggaacccagaacccagcctcacccctgcccagcttcgacgaggtagactcgggggaccagcctcctgcaacatccgtgtcagctccccgagcaaagttcagagcagtgagaactacagaaggcgaggaggagacaganagcagggtccccggca

SEQ ID NO: 3949 - DNA, 177 bp, Homo sapiens
ccacatataacattattttgagaaaggaaagaaagtgcatgccccaaaagggatgccttccttcaccttgcaggtagctggaactttgatagtggcagaaaccacaatggagtagggttcacagaaatggcctgtgaaacagaccctattcctagagagacagaggaaaaacctcag

SEQ ID NO: 3950 - DNA, 361 bp, Homo sapiens
  unsure (337): n=A,T,C or G
  unsure (346): n=A,T,C or G
cgggaaacacaggccattaacagcagcctgtccacgctggggctggttatcatggccctgagcaacaaggagtcccacgtgccttaccggaacagcaaactgacctacctgctgcagaactctctgggtggtagtgctaagatgctcatgtttgtgaacatttctccactggaagagaacgtctccgagtccctcaactctctacgctttgcctccaaggtgaaccagtgtgttattggtactgctcaggccaacaggaagtgaagacggatccagatctctgtgtgtgtgtgtgtgtgtgtgtgtgtgtgtgtgtgtgtgtgtgtgtccctatgtntatgtatcnggtgaggggtgggag

SEQ ID NO: 3951 - DNA, 446 bp, Homo sapiens
  unsure (14): n=A,T,C or G
  unsure (24): n=A,T,C or G
  unsure (25): n=A,T,C or G
  unsure (30): n=A,T,C or G
  unsure (52): n=A,T,C or G
  unsure (53): n=A,T,C or G
  unsure (60): n=A,T,C or G
  unsure (65): n=A,T,C or G
  unsure (66): n=A,T,C or G
  unsure (76): n=A,T,C or G
  unsure (78): n=A,T,C or G
aaacaaacaaacanacaaacaaannaaggntgggggagggagggaaagagannagctctncactnncctttgttgnantctcacagtataacagatattctaattcttcttaatattcccccataatgccagaaattggcttaatgatgctttcactaaattcatcaaatagattgctcctaaatccaattgttaaaattggatcagaataattatcacaggaacttaaatgttaagccattagcatagaaaaactgttctcagttttatttttacctaacactaacatgagtaacctaagggaagtgctgaatggtgttggcaggggtattaaacgtgcatttttactcaactacctcaggtattcagtaatacaatgaaaagcaaaattgttccttttttttgaaaattttatatactttatgatagaagtccaaccgtttttt

SEQ ID NO: 3952 - DNA, 393 bp, Homo sapiens
ctggcagatggaagcctggttctctttggcagcaacatgcatcacgttgtacctgcacccttcctgcacgatagtggggttgtctcctgagcctatcagataccgggggttgctccagataaggtcagaaaaggtgtcctcctctcccttctccacagctttccgaagcttggcggtgaggtcctgcgtgcggggatttttgtaactgttcgctcgctctttgttgactgtttctgattccgacaagcacaaaccatctttcaacctgtcattgctaaagagtggagctgttttcacaggagacagtggtaaggacgttttgcttggagaagggaaataatcacaaattcctctagcaaatttctcagcgtcttctctggtagaaaaagcttt

SEQ ID NO: 3953 - DNA, 621 bp, Homo sapiens
ctggtgaaggaactcaaggaggctttaggtattccagccgctgcctctttcaaacatgtcagcccagcaggtgctgctgttggaattccactcagtgaagatgaggccaaagtctgcatggtttatgatctctataaaaccctcacacccatctcagcggcatatgcaagagcaagaggggctgataggatgtcttcatttggtgattttgttgcattgtccgatgtttgtgatgtaccaactgcaaaaattatttccagagaagtatctgatggtataattgccccaggatatgaagaagaagccttgacaatactttccaaaaagaaaaatggaaactattgtgtccttcagatggaccaatcttacaaaccagatgaaaatgaagttcgaactctctttggtcttcatttaagccagaagagaaataatggtgtcgtcgacaagtcattatttagcaatgttgttaccaaaaataaagatttgccagagtctgccctccgagacctcatcgtagccaccattgctgtcaagtacactcagtctaactctgtgtgctacgccaagaacgggcaggttatcggcattggagcaggacagcagtctcgtatacactgcact

SEQ ID NO: 3954 - DNA, 295 bp, Homo sapiens
cctctgagcagaacgaggtaaatcttcactgttagctacaaagagcactgcatgaaagtgtgtgcaagatgactccatgaggttttctttttaagtttatgtatatttacagaaaagtgaaatgtgttggaagaataaacaccccttcttgtggacacttttagagaggagaatttgggctgggaaaaaaggagatcctttttatttttttgctgttctctactgtttgtcttttctgtagttaatattaatattaattgtattaatattctgactttaatattagaaacttttt

SEQ ID NO: 3955 - DNA, 295 bp, Homo sapiens
  unsure (164): n=A,T,C or G
  unsure (202): n=A,T,C or G
cctctgagcagaacgaggtaaatcttcactgttagctacaaagagcactgcatgaaagtgtgtgcaagatgactccatgaggttttctttttaagtttatgtatatttacagaaaagtgaaatgtgttggaagaataaacaccccttcttgtggacacttttanagaggagaatttgggctgggaaaaaaggagatcctttntatttttttgctgttctctactgtttgtcttttctgtagttaatattaatattaattgtattaatattctgactttaatattagaaacttttt

SEQ ID NO: 3956 - DNA, 319 bp, Homo sapiens
ctgtcaagtttccatgaacttacacttatttatgattgcgtttctgacctgagatgtatgctgcctgttattgcagtagcattagtttcagattcttttgccattgcaaagtaccccttataaaccagcaatgtcatctgtgaggaagcaaattctcaagtgtctgtcatttacttggttctttttctttgtggtcttcacccttataccctggaaaagtctgtaattaccttagccaggaagatagatggtcatggcaagcgcacagcaccagacttactggctcaccaagatgatggaaaaaggcagatgatttttt

SEQ ID NO: 3957 - DNA, 515 bp, Homo sapiens
ccatccctgagcttgaatagcagtgggttcagtgaaattctgtcttgcaataacatccatgacatttgcagggaaattggcttcataaaaatttagaactggcttcgggcagttgtgacctctaactgtaatttccttgcttcttctgtatgtttccacctcttgtgctgtgcgcctagccaaatcagggtgctcttgataaaaattcttctcaaatttaggcagctcatcaagattccacttctttttaactaatttctccccagggtttccaaacttctttccagataagggccctgccctacttcctccaaatcgaggtgcaccaaaccctcggtcccggccgcggtctcggtcactcgaataacccgacatggcgtcaatggttgcggttggcggggaacgaagtatatagaaaagcgtgcgacaagtcgctggaaatggcctcgatgacggcgaagccttgcgggggcggcagcggaggaaggacaccgatgacaccagccgaagctgca

SEQ ID NO: 3958 - DNA, 499 bp, Homo sapiens
ctgctcccggttcacgagggaggagtggtggtagcgatcccgagtggcgaagtctgcattctcctgggtgagctgagtcgtctccatgtcaaccttagccagggacggcgccaagatgatctgctcctgaggggaccgcaagctcctgcaggaggggagcaagagagacctcatccaccggaaaaagctgaagttggaggctgatccaaggtgaagccctggactggcccggccaatgtagaaatacacgatggcagcaacacccatgttaaccagggtatacacccactgtatcacaaacatgatgagaagggacccaacagcccccaacagggggacccaggggttgcacatgtgggtatagaaagaagtggatcttctccagacatcttgttcttggagcctggacttcaggaagaaatctaaaaaatagccaaagatttggctgccaaattgctatcaactctctactgttttttaggaaaatatacctatgagc

SEQ ID NO: 3959 - DNA, 349 bp, Homo sapiens
  unsure (32): n=A,T,C or G
  unsure (41): n=A,T,C or G
  unsure (60): n=A,T,C or G
  unsure (71): n=A,T,C or G
  unsure (75): n=A,T,C or G
  unsure (154): n=A,T,C or G
  unsure (160): n=A,T,C or G
  unsure (177): n=A,T,C or G
  unsure (190): n=A,T,C or G
  unsure (193): n=A,T,C or G
  unsure (224): n=A,T,C or G
  unsure (283): n=A,T,C or G
  unsure (315): n=A,T,C or G
  unsure (329): n=A,T,C or G
  unsure (331): n=A,T,C or G
  unsure (340): n=A,T,C or G
aaaagactattttactaaatttggagaggtcnttgactgtncaataaaaatggatcccancactggacggncaanagggtttgggtttatcctgttcaaagatgcagccagtgtggagaaggtcctagaccagaaggagcacaggctggatggncgtgtnattgaccctaaaaaggncatggctatgaanaangacccggtgaagaaaatcttcgttgggggtntgaatcctgaagccactgaggaaaagatcagggagtactttggcgagtttggggagatngaggccattgaattgccaatggatccaaagtngaacaaaagacgangntttgtgttnatcaccttt

SEQ ID NO: 3960 - DNA, 582 bp, Homo sapiens
  unsure (509): n=A,T,C or G
  unsure (515): n=A,T,C or G
  unsure (518): n=A,T,C or G
  unsure (524): n=A,T,C or G
  unsure (529): n=A,T,C or G
  unsure (553): n=A,T,C or G
aaactaccatggggagaaatgaccacacctatcaaaaaagcagtgtcaaactaatttacatttttatacagatcagatgtttatttagtattgttttcatatatgcattgagtatgtaaggacagagttagatgagcctctgaagacatctcatatactctgggctcccaccgtttcaggttcttttagtgtctcagaatttccagctaattcttcggtctgcatttcacatatttcaccagataaatggtttttctgttcttcttctaccattttctttcttagatctgcctctgaatatattgtcagtttcagtggtaaatcttcaacttttacaaaatcttcttcatcagacttttgacttatattaccagattctgcttcatagtcattcactaacactggagattcagtatcaggacttccagccagagagctttcaggagtttcctgagcagatttaacttctttgactctaggcactaagggttccatttcaggtaaacgtnacggcnaanggttangctgntgagttgaatcaacagtaggaggngactccttatgggcagcactatttacctg

SEQ ID NO: 3961 - DNA, 289 bp, Homo sapiens; identical to SEQ ID NO: 3644

SEQ ID NO: 3962 - DNA, 528 bp, Homo sapiens
aaaaatatatgattttgctccttttcttcccatgtgcatcaggcccactctacaaaggttgaatcctggcttgtctgagcccgtgtgatcccacggtcattccaatgtataagaaagtgggtactgggaacactctggaaacagtttagttgatccttctaaaggcacacaggagaaaggagtatccttttcctgcctttgggagttgttgtgaatgattaacaaacctaaagctgctgcatgggtcaccctaccatctcaggaaagctgacgtgctgtgtgtgatagagagatgagctacgaaattccaggatcactggtgatgacactggcctgctgagttgagcatccctggagatgcccagccttggatctatcggctatgtgagataatgggttaaagaaaaataaagccactagatgtaatttcctgttattagcagcagaacacatcttcactgaaatactcattccacacattttggttctaccttgtaattccacaccacgagtctcatataaaatgag

SEQ ID NO: 3963 - DNA, 295 bp, Homo sapiens
  unsure (8): n=A,T,C or G
cctctgancagaacgaggtaaatcttcactgttagctacaaagagcactgcatgaaagtgtgtgcaagatgactccatgaggttttctttttaagtttatgtatatttacagaaaagtgaaatgtgttggaagaataaacaccccttcttgtggacacttttagagaggagaatttgggctgggaaaaaaggagatcctttttatttttttgctgttctctactgtttgtcttttctgtagttaatattaatattaattgtattaatattctgactttaatattagaaacttttt

SEQ ID NO: 3964 - DNA, 341 bp, Homo sapiens
ccaccctcccacacgggatattctaagccgctgacaccatctaacttttctgaaagaaattaacaactcagccgatctttaccaggctaaaatcacagaactgggtcccctgaaagccaggctttcatgccacatccacagctactgctgtctagccaagtctataacatcttcttgcccttattaatacatatgttacataggtttacgtatgttaatccctaatgacttgacttaaccttgtcacagccaggcgcggtggttcatgccctacaatcccagcactttgggaggccaaaatgggtagatcacctgaggtcaggagttcaagaccagcctgg

SEQ ID NO: 3965 - DNA, 598 bp, Homo sapiens
  unsure (580): n=A,T,C or G
cacgtcgtgccaatggcccgctatgaggaggtgagcgtgtccggcttcgaggagttccaccgggccgtggaacagcacaatggcaagaccattttcgcctactttacgggttctaaggacgccggggggaaaagctggtgccccgactgcgtgcagggtgaggccgggattcgggggctgctgtccaatggaaatggcaggaaggtcgagcctacggccagaaggggggcttagcggaggcagagtcttggttccagacatccgcggagcaatctgagctgtccccaagtctccttctattaaatcctaccccgccctgccaagagcgctcttccttttaccaccttacccggatgatcttggaatctagttccttaaaacttctcactcccccagtaccattagtgtcttacaggatacgtgagttggtcagcaaatacatgtgctttccattgttacgggcgcggtggtgcaggggcaaatcgggactgggatttggtccttacccttaacgtggctctaagaccagaagggaacacctgacttctgttgacctcttcagttagctgcaggttaaagnctgagtgcttaccaagac

SEQ ID NO: 3966 - DNA, 344 bp, Homo sapiens
aaacatcatcttttcatagttttgatctgtttttataattcctgcattcaattcactggcaaaaactctatcattgaaagtgctggcaggaccacttcttaggctgtcccagttggcaaccatttctttcacccactctacccaggtgtacagacggagaatacctgcatctgccatggcttccacaaagttggcatcttctacagtgtcaccagcatcagccagagccaaacgcactccatctgctgaaaatttgtcaatagcttgggtcaaagtgaggaagttgcctgtggattttgacatcttctcagagttcaggaggagatgtccatttgctctcacag

SEQ ID NO: 3967 - DNA, 387 bp, Homo sapiens
  unsure (11): n=A,T,C or G
tatgtgcatantttcataaagcagacatttccatgaggaaaagaggatggtggtgaaaggggaggggtgaagggacatctccaagtcacagaggctgcaaaactcagcatgacttgtggacggagccacaggccacccagggcaacaacacccacataactcaccaagtggttaacggctctaaaccagggtcaacaggagaggggacaaaagtcactccttgattttgctgcagcttaaagataagttctacctcagcttatgctagcccttatggggcaaaaaagggaaagtcattctccccaagtccaggctgggccgtcaaacagggagtggggtgtcagccccagacctcaatgaggtccccagattccatgcccaggtcag

SEQ ID NO: 3968 - DNA, 458 bp, Homo sapiens
ctgtgaccttgccaaggagcagggcccatacgaaacctatgagggctctccagttagcaaaggaattcttcagtatgatatgtggaatgttactcctacagacctatgggactggaaggttctcaaggagaagattgcaaagtatggtataagaaacagtttacttattgccccgatgcctacagcttccactgctcagatcctggggaataatgagtccattgaaccttacaccagcaacatctatactcgcagagtcttgtcaggagaatttcagattgtaaatcctcacttattgaaagatcttaccgagcggggcctatggcatgaagagatgaaaaaccagattattgcatgcaatggctctattcagagcataccagaaattcctgatgacctgaagcaactttataaaactgtgtgggaaatctctcagaaaactgttctcaagatggcag

SEQ ID NO: 3969 - DNA, 433 bp, Homo sapiens
  unsure (160): n=A,T,C or G
  unsure (288): n=A,T,C or G
  unsure (317): n=A,T,C or G
gcggcagagacagaagagcggggtcggggccggctgaccaggaacctgggcgagcagcggcgggggcccgagggattctgaaggaagatttccattaggtaatttgtttaatcagtgcaagcgaaattaagggaaaatggatgtagaaaatgagcagatnctgaatgtaaaccctgcagggtattttccctaattctccatggtgcttcaatagcatgttattatcataaaaatgaacagttttgtggaatagatgaccaaataaaatgctgggactgaggaagtaangaatgaaataaatggaaattggatttcancatcctccattaacgaagctagaattaatgccaaggcaaaaaggcgactaaggaaaaactcatcccgggactctggcagaggcgattcggtcagcgacagtgggagtgacgccctt

SEQ ID NO: 3970 - DNA, 275 bp, Homo sapiens
  unsure (18): n=A,T,C or G
  unsure (23): n=A,T,C or G
  unsure (29): n=A,T,C or G
  unsure (36): n=A,T,C or G
  unsure (41): n=A,T,C or G
  unsure (42): n=A,T,C or G
  unsure (165): n=A,T,C or G
  unsure (237): n=A,T,C or G
aaactgagagaaattgtngatantttggntactttnggttnntgtattgtactcctttgtatgactcttctccaatttatctattatactatcggttgacaccagggttttatcaagtttggaatgtatgctactatgacattcttggcacctgtcctagaatanaatttttaggccccaggatatgctttttgtcaactttaagaaatgacaccaccaggccaagcacctgtaatnccagtactttgggaggccgaggcaggcggatcacctga

SEQ ID NO: 3971 - DNA, 222 bp, Homo sapiens
  unsure (80): n=A,T,C or G
aagccctttaagtaatgatataactagaaactacgtttcatctcaaaggaaaaaccacaggtgatatattctcatgcttnaggttaaaaacctctcttaaaaggctaggtttgcgaaagccttcctaaaattatgcttctgttgttactatcaatttgatattcagccagaaaaattaaaaataattattaatcccaaagcatactttcaaaatttctacta

SEQ ID NO: 3972 - DNA, 290 bp, Homo sapiens
cctgtaaagactttaagagaagaaacagcacctggactgtgagaaaaagagtctctgaagacatctgacctggacaggctgccatctcttatgattatttcctgtgtggctgtgaaggttaacgggataaagccctcactgtcagcagagagaagaatccagtgggaatcatgtagcatttcaatgagagaaaggccaaaagtctgctgaactgtactgagccttagtttaccatcacagagaagcaccgctcttttttcaacaacaggacctagataataaggtttctg

SEQ ID NO: 3973 - DNA, 321 bp, Homo sapiens
ccatttgacataaaggagacagcccctggtcccagcttgtcagctctgctgccgacttgctgacttatcaacttcctctaggtgtttccactccaccctggcctgctcagagcctcagtttacccctgcattaaaatggtggggggactggtcaaaggactcttatgtcactgcagtgtcccattctaggattgtctgaaggccagagtaggggttggggggagtgtggacaaaccccgcaaatcagagtggggaaggtgagtggtagagagggggtctctgaaggcccttggggctgacagggccaggcagcctccccag

SEQ ID NO: 3974 - DNA, 554 bp, Homo sapiens
  unsure (525): n=A,T,C or G
  unsure (526): n=A,T,C or G
aaatgtttacttccaagacatttacttgaaagttgaatgttttgatgttctgtcccatggggtccttattgtaatctagaccatcttgttctagatgggcacttaagccctgtttcttcatagtctgttatgctgtcatttggacctggatgcttcctgtttcttccagcaatttttgtttgtgttttttgttgttgaagagaggaacatttaaggagttagataaactggtaattttcagatgtgtagaaaattgcataggtggtgaaagccaatgccataggctctgaaattttactatttcctacatcaggaaatgtgtaccaaaagtgctaaaatgccaagaataattttgagtatctaaagatagataaatcttttcatctgagtggaaatggcattatgactttatattctcatggttttccttgtaccttgaaattgagcatcacttgaattggagccccagaagcaaggttaaagtgagttactactgagtttctggtgttcctaacttatcccttnnggtatatatgtagaagataacaaagcag

SEQ ID NO: 3975 - DNA, 442 bp, Homo sapiens
ccaacatagtgaaaccccatctctactaaaaatacaaaaattagccaggcatggtggcgggcgcctgttatcccagctacttgggaggctaaggcagggagaattgcttaaaccggggaggcgggggttgcaatgagctaagatcgtgccgctgcattccagcctggttgacagagtgagactccgtctcaaaaaaaagaaaaggtagcattaagcctggtatgttttattttcctgtttgttagaaacctagattcatttttaatcttcaccagcatcacatttgaaaatagtgaattgggcagcttggcatttgtgctgaattccttataaggcgttgtgtaggagggaagattacatgattacaccaccagacccctgggtctttgatattaggagagcttggcatgtaaggagttggggagttgggcttgtctcattt

SEQ ID NO: 3976 - DNA, 569 bp, Homo sapiens
  unsure (539): n=A,T,C or G
ccttccagactcagaccagaccctctggtggtaaatggacattttcctacatcggcttccctgtagagctgaacacagtctatttcattggggcccataatattcctaatgcaaatatgaatgaagatggcccttccatgtctgtgaatttcacctcaccaggctgcctagaccacataatgaaatataaaaaaaagtgtgtcaaggccggaagcctgtgggatccgaacatcactgcttgtaagaagaatgaggagacagtagaagtgaacttcacaaccactcccctgggaaacagatacatggctcttatccaacacagcactatcatcgggttttctcaggtgtttgagccacaccagaagaaacaaacgcgagcttcagtggtgattccagtgactggggatagtgaaggtactacggtgcagggacttgcatgtcctaaagcactggctgaaggaagccaagaggatcactgctgctccttttttctagaggaaatgtttgtctacgtgctgactccatattttcctacttgnggcagcgactgcatccgacataaaggaaca

SEQ ID NO: 3977 - DNA, 411 bp, Homo sapiens
  unsure (386): n=A,T,C or G
ctctctgcctcttgctccctccccagttcccactctgcctcctaaacagcaatttctgccgtcctctcctgggctggtgttggaatcaccctctaaaccccttgcccctgctgatgaggatgagctgccgcctctgattcccccggaaccaatctctgggggagtgcctttccagtcggtcctcgtcaacatgcccacccctaaatctgctggaatccctgtcccaaccccctctgccaagcaacctgttacgaagaacaacaagggtacttgccttggtttgccgtgtgcatggtgtgtctgtcgtccacacccctcttgggcgctacccaccaatactaaccctgtgatgcgccgctttctccagtgaatctgcttgggcttgnatgtagaacatagaatgataatttt

SEQ ID NO: 3978 - DNA, 412 bp, Homo sapiens
  unsure (15): n=A,T,C or G
  unsure (25): n=A,T,C or G
  unsure (45): n=A,T,C or G
  unsure (76): n=A,T,C or G
  unsure (170): n=A,T,C or G
  unsure (179): n=A,T,C or G
  unsure (187): n=A,T,C or G
  unsure (226): n=A,T,C or G
  unsure (271): n=A,T,C or G
  unsure (272): n=A,T,C or G
  unsure (304): n=A,T,C or G
tgacattgataccanatctgaattntacaaacacattgtgctttntggagggtctactatgtatcctggcctgccntcacggttggaacgagaacttaaacagctttacttagaacgagttttgaagggtgatgtggaaaaactttctaaatttaagatccgcattgaanacccacccngcagaaancacatggtattcctgggtggtgcagttctagcggatatnatgaaagacaaagacaacttttggatgacccgacaagagtaccannaaaagggtgtccgtgtgctagagaaacttggngtgactgttcgataaactccaaagcttgttcccatcatacccgtaatgctttcttttttcctttattgccaatctttgaactcattcaactccaggacatggaagagg

SEQ ID NO: 3979 - DNA, 378 bp, Homo sapiens
cctgcagcacgtggggctgtatacgcctaacattgtggaggccactgagggggtggcaactgctggaggccagttcctggctccccctggggcatactaccagcagccaggaaaggagaggcagatccgagctgcagggcacgagcctcatctgcttgctcgacaggggatcctgctagatggtgataaaggcaagtttctgcttcaggtcttcaccaagtccctttttactgaggacactttcttcctggagctgattcagaggcagggggccactggctttggtcagggcaacatcagagctctgtggcagtccgtacaggagcaatctgccaggagccaggaagcctaaggatgcccagggctgggtgcagccag

SEQ ID NO: 3980 - DNA, 216 bp, Homo sapiens
ccaggctcaggccctggggtgaaaggagacaggtgctgccaagaccatacatcagtcatctggcagcagctcgagaagcatgtcctccacgccgtcaatcttgatgtggtacactaagcgccagaaactggagtctgaggatcggtatcgtccatcagggtagagctgtcacatgataggcagcaggcttgggcctatctgggtgggggtcatagg

SEQ ID NO: 3981 - DNA, 349 bp, Homo sapiens
ccaagtgtttgtgttacaggttccaaggagcaggggcctcgacaaaggaagggagcagccccagcagagaagaaatgtggagcggaaacccagcacgaggggctagaactcagggtagagaatttgcaggcggtgcagacagactttagctccgatccactgcagaaagttgtgtgcttcaaccacgataataccctgcttgccactggaggaacaggtggctacgtccgtgtctggaaggtgcccagcctggagaaggttctggagttcaaagcccacgaaggggagattgaagacctggctttagggcctgatggcaagttggtaaccgtgggccgggaccttaagg

SEQ ID NO: 3982 - DNA, 277 bp, Homo sapiens
ccaatgagttcaaaaagcacgtttgcagggcttcctgaatgccgtcgaggcatggcttcatgagggccatcgcgggcaccccgatgtctctgtgattccctggcaggctgcgtttctcaatactgagaccctagtttgctctgacttctaaatgagctctctcatccttcatcagaaggataaggaacctggcctgcactctttgggttaaacatgggtagagaccgtctcaggatgaggacctcttggggaaagtacaaacctctgctccctgtgg

SEQ ID NO: 3983 - DNA, 447 bp, Homo sapiens
  unsure (435): n=A,T,C or G
aaattgtaaatggagctaagtccaagaaagtacttgaagctctcttccagcgagcttaattgcgtaatccctgttgtcctccagggtaagctgacacgtctacataactggttttccacaggcatcttcagttattgcttgtcaggtggactgttttggatttaaccatgtaatccatgggaccaattgagagtcagctacttttataggcatcaaagtattctcagacacctttaatatctttatgaaaacttaatttttggccttttatcaatatgtcataacagcattctgaagtcagacattgttaaattgagctattaaactaatgagttttatgtaagttatatggtcttaatttggtacttgtaaatagcactagttagactctttagaatactccaagagttagggcagcagagtggagcgatttanaaagaacatttt

SEQ ID NO: 3984 - DNA, 288 bp, Homo sapiens
ccagtcctggcgcagcacccccagccgcagcaggcactgcttcttggctgtcatcacaaagtagtgggtgtcgtccttgtagtacacaatgttctccagatcaatgcctgggggtacagggcaggggacagtagatatgtctcctgataatgcatcaccttccctaaacatcccaacatggcctgacctctgagctgggatcccagcttaggctgcggtgagtgctccacgcatagaaccccacgagtcctgatgacacaaacaaccatctgtcccaggcccaggagg

SEQ ID NO: 3985 - DNA, 504 bp, Homo sapiens
gtcacaccaagcccgttcacaccaagatcgtgaacatgcctgatcacgtctgaagggcacgtgaccctgttctgaagtggcctgcagctcccgtggccctcagcaaagccaatggacgtgtactctgcttcctccaggaagccctccccccgctcccccctctggtagacacgtcttgtggttggtgtccacaaggaagttcctgattagcctcggagctgcccgatggcctctccactcctggcacatggcctgctggctggcctggggcagaactacagagggccggagctggagatgtggtctctgggagtcactctgtacacgctggtctttgaggagaaccccttctgtgagctggaggagaccgtggaggctgtcatacacccgccatacctggtgtccaaagaactcatgagccttgtgtctgggctgctgcagccagtccctgagagacgcaccaccttggagaagctggtgacagacccgtgggtaacacagcct

SEQ ID NO: 3986 - DNA, 443 bp, Homo sapiens
atgaccacatggatgatatggatgatgaagatgatgatgaccatgtggacagccaggactccattgactcgaacgactctgatgatgtagatgacactgatgattctcaccagtctgatgagtctcaccattctgatgaatctgatgaactggtcactgattttcccacggacctgccagcaaccgaagttttcactccagttgtccccacagtagacacatatgatggccgaggtgatagtgtggtttatggactgaggtcaaaatctaagaagtttcgcagacctgacatccagtaccctgatgctacagacgaggacatcacctcacacatggaaagcgaggagttgaatggtgcatacaaggccatccccgttgcccaggacctgaacgcgccttctgattgggacagccgtgggaaggacagttatgaaacgagtcag

SEQ ID NO: 3987 - DNA, 503 bp, Homo sapiens
ctgggcacaaccctcaccctggtctgtcatgcctgtttttcctacactcagcggcaaagctgcaggagcagggctgagcctggaatagcccttcctagtcccctcttctcagcccactacccatccatcagtcaccagccgtcacctcccctcccgtgctccaggctgggggagggagagcccagtggtggatccagcctgaagtcctgccctctctcatctgtctggaaaggaggtagcacctttttcgggaaacgggttagggagtaaagactgcaccctacatggtcctggtggtgggggggataacagtaaaggaatttgcaacgttttaatgccatgcctgatttttgggtcaggagtggtgacttgggtaaccacttggcgggggggcctgggattccctgctgtgtgccgtgataacagcaaatggtgataaggagaaagccaagacctgtggcctgatgcagggctgggggcggggggtgatcacttcagcaggc

SEQ ID NO: 3988 - DNA, 214 bp, Homo sapiens
ccaagttgggccgcttggtcaaggacatgaagatcaagtccctggaggagatctatctcttctccctgcctattaaggaatcagagatcattgatttcttcctgggggcctctctcaaggatgaggttttgaagattatgccagtgcagaagcagacccgtgccggccagcgcaccaggttcaaggcatttgttgctatcggggactacaatgg

SEQ ID NO: 3989 - DNA, 387 bp, Homo sapiens
gcgcctgctccccggacgaaatccgcggaccgggctttaggttcgccggaatcccacgctcccgacttctgcttccgggtcggagccatggcggtggcaaattcaagtcctgttaaccccgtggtgttctttgatgtcagtattggcggtcaggaagttggccgcatgaagatcgagctctttgcagacgttgtgcctaagacggccgagaactttaggcagttctgcaccggagaattcaggaaagatggggttccaataggatacaaaggaagcaccttccacagggtcataaaggatttcatgattcagggtggagattttgttaatggagatggtactggagtcgccagtatttaccgggggccatttgcagatgaaaatttt

SEQ ID NO: 3990 - DNA, 104 bp, Homo sapiens
  unsure (4): n=A,T,C or G
  unsure (12): n=A,T,C or G
  unsure (23): n=A,T,C or G
  unsure (24): n=A,T,C or G
  unsure (32): n=A,T,C or G
  unsure (39): n=A,T,C or G
  unsure (77): n=A,T,C or G
ccantgtccatncacagttgccnngatgtggnaggccancgtgtggaaatggatcctggtgagatccgaggctctgnttttactcctcccatgttctttcaaga

SEQ ID NO: 3991 - DNA, 315 bp, Homo sapiens
  unsure (92): n=A,T,C or G
  unsure (105): n=A,T,C or G
  unsure (198): n=A,T,C or G
  unsure (202): n=A,T,C or G
  unsure (250): n=A,T,C or G
  unsure (302): n=A,T,C or G
aaagtaaatacagcttttagatataaatctttcaaaggttttctttgaagagctgtgaggtgactatttcagatttgatgaacagtaatttngtcagtaaacttntcaaaaaaccaatccaagaaagaattgttttctttttccctccatgtggtcggtttcattcttaaggaaggtctgatgcagtaagaagatgcntttnacaaacctttacacaagtttgtgaactgtcaactaaagacaccacctntgatgtggatggtttcattcaatccatgttcgaccagctttatatcttctanatcgtctttaatg

SEQ ID NO: 3992 - DNA, 509 bp, Homo sapiens
aaaccttaagaaccacataatactatataatgcttttctgtacaaatctcaagaaacactttcattcattaaaacatcatgaaaatccttaaatgtgttaaatggaaaaaaatgaaaccatgaacaaaaaagctatacatgtaggtgcatatttatctcctcctgagttgggagaaatctttctaagcatagaaacaatggtagcaaaagagaagaatagatttggctggattaacaataaaaaatttctgccagaaatatgaaaattcaatttagacaaaattcaatataaacaaaattaatatagacaaaggtggtaaacaggtggttctcagagaagataaatacatgattatttaacataaaaagaaatgttcaatgtttctagaagacaaataattacaaacctaaacaaattgtatatttgttagattggcataaattataataatccaacattgagttaggtggaatataaattggtaaaatatttctggaagacaatttgg

SEQ ID NO: 3993 - DNA, 228 bp, Homo sapiens
ctggaagatggccgcactctttctgactacaacatccagaaggagtcgaccctgcacctggtcctgcgtctgagaggtggtatgcagatcttcgtgaagaccctgaccggcaagaccatcactctggaggtggagcccagtgacaccatcgaaaatgtgaaggccaagatccaagataaagaaggcatcccccccgaccagcagaggctcatctttgcaggcaagcag

SEQ ID NO: 3994 - DNA, 215 bp, Homo sapiens
ccagaacttcctatactatgttgaataggagtggtgagagagggcatccttgtcttgtgccggtttccaaagagaatgcttccagcttttgcccattcagtatgatattggctatgggtttgccataaatacctcttattaatttgagatacattccattgatacctagtttattgagagtttttagcatgaagggtgttgaattttgtcaaagg

SEQ ID NO: 3995 - DNA, 396 bp, Homo sapiens
  unsure (143): n=A,T,C or G
  unsure (365): n=A,T,C or G
  unsure (366): n=A,T,C or G
  unsure (372): n=A,T,C or G
  unsure (381): n=A,T,C or G
aaagctggctcaagactggcccaggcataatactgtcaatctaaaggtaaccggcaacatcaaaaagtacatctcaaaagaatcaggcttaaagataaacaggagaactggaaatatctaagagtaagaagtgtaaacaatanaaaagaggtagggtttagggttctcatcttgggatttccccaggtcttcaagcttctatccttcctgggttctgggtcatgggcctccagattccggccgttagtcttgagatacctttttcgcttgggtcctctatccatctaggtaggctttgtgacaggggccttccatccttgggttgtaggtcttccagctacaaccctgggctaatcttaggtcgnnggcctngtgtcacangtctcagttcttagg

SEQ ID NO: 3996 - DNA, 281 bp, Homo sapiens
ccaccataagtcctgatacaaccacggatgagctgtcaggagcaaggttgatttctttcattggtccggtcttctccttgggggtcacccgcactcgatatccagtgagctgaacattgggtggtgtccactgggcgctcaggcttgtgggtgtgacctgagtgaacttcaggtcagttggtgcaggaatagctgtggactgggttccaatcaggggctggctctccatatcatcgtgcaaggcaaccacactgactgtgtactcagaacccggtctgagg

SEQ ID NO: 3997 - DNA, 262 bp, Homo sapiens
ctgatgcggaaggagttcaccctggagttctcccgagaccggaaatccatgtccgtgtactgcacgcccacccgccctcaccctaccggccagggcagcaagatgtttgtgaagggggctcctgagagtgtgatcgagcgctgtagctcagtccgcgtggggagccgcacagcacccctgacccccacctccagggagcagatcctggcaaagatccgggattggggctcaggctcagacacgctgcgctgcctggcactag

SEQ ID NO: 3998 - DNA, 218 bp, Homo sapiens
ctgctctgatgctctgctccaggtcatggtaaatggctttgtagctaaatcagagagaaacgtggctcttttagaaggcaggggccagctaccctttgtcccagcccagtgccagccacagcaggtcccgtggtctctgccctctgtgagttggtttcacagacagagccagaacactcctcccttggctcaggtggaaggtcacgggccgccacgtg

SEQ ID NO: 3999 - DNA, 528 bp, Homo sapiens
aaaccggggtttgagaagtataataacttggatctgtttcggtatctcttaaatattccaggaccaattgacattccatctcgtttatgtaaagggaattttgatgatgatatgtttaaccaccaagttccttatttgtggctgatttactgcctttgtcatcctcttcaatcaagtattaaagaaacagtggaggcatatgaggcagcattaggggtggctatgagatgtgatatagtacagaagatatggatggattatcttgtctttgcaaataatagagctgctggatccagaaacaaagttcaagaattcaaattttttactgatttagtgaatagatgtttggttacagtccctgcccgataccccattccttttagcagtgctgattactggtccaactatgaatttcataatagggttattttcttttatttgagctgtgttccaaagacccagcattccaaaaccttggaacggttttgttcagttatgccagctaattctggacttgcattgaggtta

SEQ ID NO: 4000 - DNA, 182 bp, Homo sapiens
aaagtatattggaattcgtaactaaagtaataaataaatgcttgaaatatacccagtagaaacttatttttattatccaatccttttgataagaaatgcctctagtgttatgtacaaacttgatcttctttgaaatgtgttgtccactgcttttctgtttctgtcacagtagctataaacag

SEQ ID NO: 4001 - DNA, 311 bp, Homo sapiens
ctgaatatggaagagatctttttttactagagatctgcagaagaaacgcaatcttctgagcacaatatggaatctaaaggttttatcacttagttgttcatattatgaacctaaaaataatggcataaagtttggggatgccaggcatactttttcatgtttggtgttgagttattttacttttctaacccaacattccttggtgagaccattaaatccaaacacttgtcaccgttccttctcatagtcactctgggtcatcagcatgtcccagtcactgcagcaatgccttgtgtttgtttcattttttt

SEQ ID NO: 4002 - DNA, 505 bp, Homo sapiens
  unsure (439): n=A,T,C or G
ccagtatcgttttggtacttttgtacctctatctgactccatgcccctgcaagtgtaaaaccaagagacagaaaaatatgctacgccaaagcaatgcccattcatcgattctcagtcctggccccgctagtgatgcctccgctgatgaacggaaggcaggtgcaggtaaaagagtggtgtttttggaacccctgaaggatactgcagcagggcagaacgggaaagtcaggctctttcccagcgaggcagtgatagctgagggcatcctaaagtccacgagggggaaatctgactcagattcagtcaattcagtgttttctgacacaccttttgtggcgtccacttaatttgtgcctatatttgtatgatgtcataatttaatctgttcatatttaactttgtgtgtggtctgcaaaataaacagcaggacagaaattgngttgttttgttctttgaaatacaaccaaattctcttaaaatgattggtaggaaatgaggtaaagta

SEQ ID NO: 4003 - DNA, 460 bp, Homo sapiens
cctctctttatctctttcaggatttccttcattctgccgtttgtaggaggcaccaggacgcacggactctatggaaaggtgggcagggaggaattaacagcagcacctctgtgcccaagaggaacaagagaggaactcagaagtaggagtgatgagaacaggggcttctgagcattttctggtggccctaaactctttcctaccctactttcaagttgggctgcctgagcaatcaccagtgaaggggaataaataatgggagaaaaaaatctccatttaaggcaagaagccaaggggaactgtcaggataagaccagtcaaggataacaagggcagaaaggaatgagaaaaggttcatagaaagacaagacattgaaagttgaagacaaagatcacatcttattcatcactgaaagtacctagtcgaattctctccatccataaagctgacactggaagg

SEQ ID NO: 4004 - DNA, 324 bp, Homo sapiens
  unsure (10): n=A,T,C or G
  unsure (20): n=A,T,C or G
  unsure (27): n=A,T,C or G
  unsure (47): n=A,T,C or G
aaatcatgtntaataaatgnttgtatntaaatgcatatgtacagaancctatttcaaaaggaaatcaaagttgctagtaaaatgtttgagattacatttagaactaactgataatgcatatagattgtagaaaattttgtgatttgtttctgtgtgataagggaagctgttggtctttgaattcatttaattatgtcaaaatagttccccaaagatttaattttaagttgcttcttaaagagtaattttattttttatgtcatgtggcttcatattagtattgtgtgagttacatgttttgctttatattttataaaatttttt

SEQ ID NO: 4005 - DNA, 508 bp, Homo sapiens
ctgataacgttcacagccccatcctcagcacgtggattcgagtcaccgtgagaattccggtatctcaccctgtcctcaccttcagggctcccagggcccacactgtggtgggggacctgctggagcttcactgtgagtccctgagaggctctcccccgatcctgtaccgattttatcatgaggatgtcaccctggggaacagctcagccccctctggaggaggagcctccttcaacctctctctgactgcagaacattctggaaactactcctgtgatgcagacaatggcctgggggcccagcacagtcatggagtgagtctcagggtcacagttccggtgtctcgccccgtcctcaccctcagggctcccggggcccaggctgtggtgggggacctgctggagcttcactgtgagtccctgagaggctccttcccgatcctgtactggttttatcacgaggatgacaccttggggaacatctcggcccactctggaggaggggcatc

SEQ ID NO: 4006 - DNA, 397 bp, Homo sapiens
ccaccatcacagtccaggatgaagaggagtacagggtcctgtgagctgtttgaccactgttctaagaaagactatgtgtgcccaaaagcacataagcatctatgttgagagtaagtttgtatcctgcgttggtctcagaaagaacgtgaatgcttaagattttgaaagtacataatattttatactttgggagagagctttaagagtccctggaaatactttttaatttttttaacttaaaattcaagagactgaatcacttttctcattgattaaatgtaaagattattgagaaacctatagtaaatgaaatttgtaagatgttttctcaaatatatgctgtgcctgtacttatatacagtctttcaagagagatacaaacaaggcagaaacattt

SEQ ID NO: 4007 - DNA, 466 bp, Homo sapiens
ccacgttcctggccgaggacccgaaggttaccctgaccatcttcgttgcccgcctctactacttctgggacccagattaccaggaggcgcttcgcagcctgtgtcagaaaagagacggtccgcgtgccaccatgaagatcatgaattatgacgaatttcagcactgttggagcaagttcgtgtacagccaaagagagctatttgagccttggaataatctgcctaaatattatatattactgcacatcatgctgggggagattctcagacactcgatggatccacccacattcactttcaactttaacaatgaaccttgggtcagaggacggcatgagacttacctgtgttatgaggtggagcgcatgcacaatgacacctgggtcctgctgaaccagcgcaggggctttctatgcaaccaggctccacataaacacggtttccttgaaggccgccatgcagagct

SEQ ID NO: 4008 - DNA, 399 bp, Homo sapiens
ctggggactggtgcttgctgaaacccaggagctgaacagtgaggaggctgtccaccttgcttgactcactgggaccagcaaagcctgtctttggttaggctcgtgtacttctgcaggaaaaaaaaaaaaggatgtgtcattggtcatgatatttgaaaaggggaggaggccgaagttgttcccatttatccagtattggaaaatatttgacccccttggctgaattcttttgcagaactactgtgtgtctgttcactaccttttcaggtttattgtttttatttttgcatgaattaagacgttttaatttctttgcagacaaggtctagatgcggagtcagagatgggactgaatggggagggatcctttgtgttctcatggttggctctgactttcag

SEQ ID NO: 4009 - DNA, 325 bp, Homo sapiens
tgctgctctggctcccaggtgccaaatgtgacatccagatgacccaatctccttccaccctgtctgcatctgtcggagatacagttacaataagttgtcgggcctctcagaatatagatcggtggttggcctggcatcaacagaaaccaggcaaagcccctaatgtcctaatttatgcgacttccagtttagaagaaggggtctcattaagatttactggcagtggatctgggacacaattcaatttaaccatcaccagtctgcagcctgacgattcagcaacttattattgtcaacattattctgcatctcttcgcagttttgg

SEQ ID NO: 4010 - DNA, 494 bp, Homo sapiens
aaaggctacgttcagtttcctataggtgatattgttaggatctactagcaaatgatttggtaacctgacatctttgtattcatgtccaaaaaaattcttttataagaacaaaaatggtactcttagcctcattcactggagtattactaaaaagcatgatattcttactctattttgggtacattatgacagagaggttattattaccaactgtcagtagaactgaggcttcttgagtaaaggggattgaggtaaacctttggaagctggtgaatacatttcaagacacaacatggcacctgtgtctagctctatggtacaacatggtactatgacacatataatgggttgccagatggggaaggcagcttctctgcaactgagctgagatctcaaaatagacaatgtcaagatggaatgagaagggaaaaacagcatgtgtagacaggtagtgacaaaaggctaattaaggactgaaagaaaccagtggacct

SEQ ID NO: 4011 - DNA, 481 bp, Homo sapiens
ctgaaaagcatgcttgatatagtagagcatgatctcctcaaacctcacttgccctctgtcacttatttgagattagatggcagcatacctcctggtcagaggcattccattgtttcccggtttaataatgatccatctatagacgttctgttacttaccactcacgttggtggcctgggacttaatttgacaggcgctgacacagtagtatttgtggagcatgactggaatcctatgcgagatctacaagccatggaccgggcccatcgcattgggcagaaacgtgtggttaacgtataccgattgataaccagaggaacattggaagaaaaaataatggggttgcagaaattcaagatgaacatagcgaatactgttattagccaagagaattctagtttgcagagcatggggactgatcagcttcttgatctgtttactcttgataaggatggcaaagcagaaaaagctgacacctcta

SEQ ID NO: 4012 - DNA, 445 bp, Homo sapiens
  unsure (136): n=A,T,C or G
  unsure (372): n=A,T,C or G
aaatgaagaacttttccttgaattttttgttgtcttcgttggttcttggcttgctttttggcttgtttctttgcttttttctgtaagtgcttacttgttccagaaggaatatcacttctctcttttatgtaactgncgttatctttttcttcctcactatcttgatcttcatcctccactgtctttttcagatttttatcatttacacttttcttaccactctgatcatctaaaactgggagggacaaatcaaggaaagattcatgaaccaaggagacagttctgcattgatcacacatgatcatactagttagttcaccaccaaagatgcggtcaacaaaacttggcattgattttttcttctcataattnggtgttcttctgctctcatcccatccaataagtagcgaagcagctcctggctgtcttgctgctgatagccttt

SEQ ID NO: 4013 - DNA, 539 bp, Homo sapiens
ccaggtacagcagcatggcctccatgacctggtgcttcttcaccaccaggtggctgtccgtgcccagcccgtgcaggatgggcagcaccttctccgcaaagtgcagggggcgctctgcctcctccctctcgttgacctcaaagcaggtccaatagtccttctccctgatgcccacgttccggcgatccaggatctccagggtgagctcctcagcagtcatggatgctgggaccttgatatgctgctcagtctctgccttcttctcttccagatacactgtgcagatgaagtcaccggcatgctgggtcccactggcagtgccagccacgcgcatcttcacaatggcagtgatctcctcccgctgcttcctgagctcttcctcatccacactaaacaccaccacatagtggttaatgaggtcttccaccacacggccagccttgtagtcctgcccatctgtctggaagagcgtgggcccaaacacaattgccaagttgtgcacgttcatctggttcgtgtctgagaagcactgaacacag

SEQ ID NO: 4014 - DNA, 528 bp, Homo sapiens
  unsure (469): n=A,T,C or G
cctgggctggcgccctgtgtacagaaatctctggacaccgaatggtttcagacgccgagcaatggcctggcctatgcgccccagcccgatgatgccgacagtgctctgcgtgagtccatagccacacagccagaggggcttccacgaggtccagccaccattcttcacttcctcgatggcctccggcaaccggcggcaggtggtaagtagcggggagactgcgagttcggcggtggtatctgtcaggacatctggggtgtagccaactcggatcccacgcttcttgatttcatccaaagccaagtggtcgatgcccacagacatggtgctgatgactttgagattggcccctgcagcatccaggatcctcttgtccacgtggtcggagaggaggcagagcaggccgtgggcccccgccacacctcgctctagctccttggcagggatgggctcatccgagtcccactgntccacctcacagcctcggcgggtatcctgcgggtgacgaacaccttcatgagtcgcacc

SEQ ID NO: 4015 - DNA, 486 bp, Homo sapiens
  unsure (473): n=A,T,C or G
ccagtgggatggttaggctcaagtttgacaaaggcacctgccacagtaggcttgaataaagtgggtgagtcttagacctatcgaaaagcatactaacagggtgctgatagatgggccacataacaccccggaagatcagcagggccttgtgtaggctgctgcagcatttttttttttttttcttttttgagatggagtctcactctgtcgcccaggctggggtgcagtggcgccatctcggctcaccgcaagctccgcttcccaggctggggtgcagtggtgcgatcttggctcactgcaagctccgcctcctgggttcacgccattctcctgcctcagcctcccgagtagctgggactacaggcgccaccaccttgcccaactaattttttgtattttttagtagagacgaggtttcaccgtgttagccaggatggtctcgatcttctgacctcgtgatccgcctgcctcanactcccaaagtgc

SEQ ID NO: 4016 - DNA, 492 bp, Homo sapiens
aaaatctcccactttttaatgggacatgtccaggtaggaaaggacagattttatgtactgaaaatcttgaaactataaagtatgcattttgtctgactttattacattagataatttaggccactcctacctatttgcaattatattttttctgaaaaggatttcaatttaggtagccatttaagataacctttccaaatgctctgagaactagacattaatagttactggcctcagatatcagaacacaaatgcttagttacactggtaattactacctatgaggaagaaagtgtagtggaatctgacaattaatgagaatcaacttgcagggtctaaatgaataaacaaagaccaaaaataaggtgaaacatttccttcaagtatatattaaaaaactacacgaaaaaaattctacctgaaataaataatatttatacttttgtgccagtcttgaataattagaggaaaaaatgaagtaaacaaagaaac

SEQ ID NO: 4017 - DNA, 270 bp, Homo sapiens; identical to SEQ ID NO: 3318

SEQ ID NO: 4018 - DNA, 504 bp, Homo sapiens
aaaatattttgaacacttcttgttggattatatcagaggtgtgactacattttaacaaaagtggactttttaagataagtctggtcaaagaagtgcagaaacagtaagtcaatatgatagaaatagtaggtcaaaatatgatgtgttagttcaattaatgtatgaactcctgccaccatcaaaagacaaatattaaaaagctacatctttagtctagttctgtattttaccagaggcacatttagaagaaaaacaaaagggtcacccaaatactaaattgttttcaaccattacagtaaatagagccaaacctagaaatttcaaaaacaatccattttatattccagaaatctcctttatccatgtgctaatcatccagaacacaattttctaaaaatagtaagacaacagtttcacattaatcataacttttttaattaacaagtagtgaatcgggcactttaagatattgtttactacatactgaaataaacagatctgttt

SEQ ID NO: 4019 - DNA, 233 bp, Homo sapiens
ccttgagattttgctgcctggactgtaaatctggccgaggctgagaagagcaaacaaaggagcaactgtgggaactgacagctcaaggactctggcatcagggtaggcccttggctgactttctcaggaggtgctgtcggggctggtcttcccgccggccaccacatacatcttaaaattacagagggtgtgagtgaccctaagatggttcagcaggcactggaggaaggagg

SEQ ID NO: 4020 - DNA, 403 bp, Homo sapiens
aaagccagtgctctaagacctcagcttttatctcagaaccccatgggttccagaccaagagtacaggaaatcaaattgttgtcctgtctgtctatagcttggaacagggagctttgattactgactccggttccacacactgtaagatcaaaaaaccatctccacatttgaaagagatgtaaggtgtattcatagggatggtggctcaacaaatcaagcaaactggaatcaaggggagggggaagggaatgaaatggaaagggaggctgattcccttcccctgacttaccactaatttactaggctacctactttcatgagtaacctctcacagctacccagcacatgccacaatcctatgctcttgccttcttttatctgcactgtgtgaagggactctttt

SEQ ID NO: 4021 - DNA, 357 bp, Homo sapiens
ctggggctgaggatggagtccaagactgagaaatggatggaacgaatacacctcaatgtctctgaagggccttttccacctcatatccagctccctccagaaattcaagagtcccaggaagtcactctgacctgcttgctgaatttctcctgctatgggtatccgatccaattgcagtggctcctagagggggttccaatgaggcaggctgctgtcacctcgacctccttgaccatcaagtctgtcttcacccggagcgagctcaagttctccccacagtggagtcaccatgggaagattgtgacctgccagcttcaggatgcagatgggaagttcctctccaatgacacggtgcag

SEQ ID NO: 4022 - DNA, 307 bp, Homo sapiens
aaagccacagtaagttacaaaaggcaaattcatagatgctctttgaaagtgaatgtaactactatacttggtattctacttcccccacgcccccagaagtttttgatgctatagacactgatatatagtttgaaactctcactataaaattactaggctaagtctatcaagacttgaaagtttgttttgctgaggtaggtgaaagggtaatctctgttctttccaggtgactgcatctgcacaggcttccctgggaggacttcatcaacagcacagttacacatcaaagtcctttagctctccccag

SEQ ID NO: 4023 - DNA, 175 bp, Homo sapiens
ctgcagtgtccctttttatatcatgctagtgttgagacatacttgactaacttgggaacagttcgatatattgacgaccgtcaacttaagaaaatcaacagcttttggccccagcgtccaagtgaacttttcatggagtgcagaatctcaaatggacaaaatactttgtcttttt

SEQ ID NO: 4024 - DNA, 307 bp, Homo sapiens
cacaaagccaatgctgaggagatgaccaagtaccacagcgatgactacattaaattcttgcgctccatccgtccagataacatgtcggagtacagcaagcagatgcagagattcaacgttggtgaggactgtccagtattcgatggcctgtttgagttctgtcagttgtctactggtggttctgtggcaagtgctgtgaaacttaataagcagcagacggacatcgctgtgaattgggctgggggcctgcaccatgcaaagaagtccgaggcatctggcttctgttacgtcaatgatatcgtcttgg

SEQ ID NO: 4025 - DNA, 271 bp, Homo sapiens
aaaaataatattacattaagttttcctggtctaataaccaactttgagaagtacagtggaagggtatagaacttcctatatcttctatacttttaatgccaatttgatttttattgtgatgtgatatttaacagtatgctaaaaataaaattgactgaattgtatgattttgtccacaacattgaagtctctttttgctaaaatattacaaaatgaatccagtaaacactttccaatggcctaagttagagatgaattcaacttttttttt

SEQ ID NO: 4026 - DNA, 407 bp, Homo sapiens
ctgctcccggttcacgagggaggagtggtggtagcgatcccgagtggcgaagtctgcattctcctgggtgagctgagtcatctccatgtcaaccttagccagggacggcgccaagatgatctgctcctgaggggaccgcaagctcctgcaggaggggagcaagagagacctcatccaccggaaaaagctgaagttggaggctgatccaaggtgaagccctggactggcccggccaatgtagaaatacacgatggcagcaacacccatgttaaccagggtatacacccactgtatcacaaacatgatgagaagggacccaacagcccccaacagggagacccaggggttgcacatgtgggtatagaaagaagtggatcttctccagacatcttgttcttggagcctgg

SEQ ID NO: 4027 - DNA, 443 bp, Homo sapiens
tttctataaagaaaagaagtttaattggctcatgattctgcaggctgtacaggaagcatagcacccaaatcactgggctttggggatggtctcagggagctttttcaatcatggtggaaggcaaaggggaagcaggcacatcatatgacaaaagcaggagggagagagagagagtgtgtgtgtgtgttggagggaggtgccacacttttatatgaccagatttcatgagaactcactatcatgaagatagcaccaagccataagggatcagcctccatgatccaaacacctcccaccaggccccacccccagcaatggggattgcaattcaacatgacatttgggcagggacaagtatacaaactgtaccactggcctgatgaagacacagcccatggtgcctacaaattctcactacctagtaggcaattaatattggaaaa

SEQ ID NO: 4028 - DNA, 525 bp, Homo sapiens
aaatacaaaatagaatgttatatatcttgtagacagtcaaatatttgatgttttatgggacataatcatttgggaagtttttgttgtaaatgaagagttagtttgttgctattaatttgtttgacacataagttcattcctaaaagttagagatgttacataaagaagggttgaggactttatttcagaagtcatttaattttttctttattttctttcagattttgtatggtttattcagaagtgccaaatttcagtgaacccaacccagattatcgaggacagcagaacaaaggggcacagagtgaacagaagaataattccatgaatagtaatatgggtacaggtacatttggaccagtgggaaatggtgttcacactggccctgaatcaagggaacaccagttttcacatgctggcagaagcaatggccggggacttataaatccacaactacaaggaacagctagtaatcaaacagtgatgaccacaataagtaatggcagggaccctcggagagccttt

SEQ ID NO: 4029 - DNA, 330 bp, Homo sapiens
ctgaactattgacaagttttccttaataaggcaaaatccccaactgtgatagatgcataacggtagccgctccacttaagcagtacagtttaacccgccaccattcgatgtcttaacatgttccaagaagaacaatgtcatcttggttttaaggtgatgcatcttgtttttttctgatagaaaaagaataatgtgctttttattctcctagagatttggtgtctgtgaatggttgtagctctgtgacatttaccatacatttctcagcttccacccatcaatttgctgagaaaaaaaggtatgctacaaatcgcagcaatagagcacttt

SEQ ID NO: 4030 - DNA, 493 bp, Homo sapiens
  unsure (456): n=A,T,C or G
ctgctgccatttcatggtgaagctcttggatgatgggactttcatgatccccggggagaaggtggcccacacctcgctggacgccctggtcaccttccaccagcagaagccaattgagccgcgcagggagctgctgacacagccctgcaggcagaaggatcccgcaaacgtggattacgaggatctcttcctctactccaacgcagtggccgaggaagctgcctgcccggtgtctgcccctgaggaggcctccccaaagccagtcctgtgtcaccaatcaaaggaaaggaagccgtcagcagagatgaacagaataaccaccaaggaagccacttcctcctgccccccaaaatcccctcttggagagacccgccagaaactctggaggagcctcaaaatgctccccgagagaggccagagggtccggcagcagctaaaaagccacctcgccactgngaacttgtcgtcactcttggatgtccggagatccacg

SEQ ID NO: 4031 - DNA, 240 bp, Homo sapiens
aaaagtattgtgttttatttctttatttcaccaccatttatatgtatgaactatgatcaaggcttgcctatgtcctgtggagcaaggccaagaaatatgctttatattggttatttgatcttcagcatcagattatcactattgcagaggtgggcaaaaccatgcaaaaagaagaggaagtatatttgcattaatggcattaaatgaagtacagttgaagctgcagagttttaccagtgg

SEQ ID NO: 4032 - DNA, 285 bp, Homo sapiens
ttcagattctgtctctgcttccgaaagggcagggccttctagagcaaggcatttttcagagcaccccagcacatctaaaatgaatgctcaagaaactgcaactggaatggcgtttgaagaacctatagatgagaagaagtttgaaaagacagaagatgggggagaatttgaagaaggtgcttctgaaaacaatgctaaggaaagtagccccgaaaaagaggctgaagaaggctgccctgaaaaagaatctgaagagggctgccccaaaagagggtttgaaggcag

SEQ ID NO: 4033 - DNA, 499 bp, Homo sapiens
aaacccatgagtttatgccctgggctccttagcccacaatagtgtaataaaagtgccccgggctggtttgtgcttatttctgccattgtccctcccacgttcccagagaggtcattctttttggtccaactcttgctgtcctttcttaccacctgtgcaccccacttggagcagtgggaggaaatctgggtttgtggccccacaaaggctgtatatgtaaagatacacctatgtatgtggtggaactcacctttacacacaactgcagcttttccttggagtctgtaccaggtggtggttatggggtctgaaccaaaggatagcagctcttcattcctcttctgacatgtgcatgctgctccccccagccctgggctttcctgaattgccaagcctggtgcctttccaaaggactagcagggcctgtggtggagccagcagaaccacaggagagtgccctgcctgtctcagtggaagtgtattattgttttaaggatag

SEQ ID NO: 4034 - DNA, 615 bp, Homo sapiens
ccttgcctcagatccaaggtcactcggaagaggccatgtctaccctcaatgacactcatggaggaaatgctgagagaagcattcagatgcatgacacaaggtaagactgccaaaaatcttgttcttgctctcctcattttgttatttgttttatttttaggagttttgagagcaaaatgacaacacccagaaattcagtaaatgggactttcccggcagagccaatgaaaggccctattgctatgcaatctggtccaaaaccactcttcaggaggatgtcttcactggtgggccccacgcaaagcttcttcatgagggaatctaagactttgggggctgtccagattatgaatgggctcttccacattgccctgggggtcttctgatgatcccagcagggatctatgcacccatctgtgtgactgtgtggtaccctctctggggaggcattatgtatattatttccggatcactcctggcagcaacggagaaaaactccaggaagtgtttggtcaaaggaaaaatgataatgaattcattgagcctctttgctgccatttctggaatgattctttcaatcatggacatacttaatattaaaatttcccatttttt

SEQ ID NO: 4035 - DNA, 254 bp, Homo sapiens
aaagcgctgatcctgtttatttggcaggaaaacgagacaatccagcagcccaggagggacaggtggacttaatcctcctcctcgtcgtctccagccccagccccaccctggcccttcttggcattcttcctcttcacgcggcccgggcggccacccccgtagggagagcgcagagagaagtcgacgtgcttctgggaatccaggcggacaatgaaggacgggatgttcaccacctgcttgcggaccctgtccag

SEQ ID NO: 4036 - DNA, 360 bp, Homo sapiens
ctgttgtgagaaagccttcagcagcaagtcataccttctagtgcatcagcaaactcatgccgaagagaaaccctatggttgtaatgaatgtgggaaagacttcagtagtaaatcatacctcattgtacatcagagaattcatacaggagagaaactacatgaatgcagtgaatgcaggaaaacattcagtttccattcacagcttgttatacatcagagaattcacacaggtgagaatccctatgagtgctgtgaatgtgggaaagtcttcagtaggaaagaccagcttgtttcacaccagaaaactcattcaggacagaaaccatatgtgtgtaatgaatgtgggaaagcttttggttt

SEQ ID NO: 4037 - DNA, 242 bp, Homo sapiens
ccaagaaggatgtccacatgcctaagcacccggagctggcagacaagaatgtgcccaaccttcatgtcatgaaggccatgcagtctctcaagtcccgaggctacgtgaaggaacagtttgcctggagacatttctactggtaccttaccaatgagggtatccagtatctccgtgattaccttcatctgcccccggagattgtgcctgccaccctacgccgtagccgtccagagactggcagg

SEQ ID NO: 4038 - DNA, 373 bp, Homo sapiens; identical to SEQ ID NO: 142

SEQ ID NO: 4039 - DNA, 504 bp, Homo sapiens
cctcgaggagtcaatttgcctctgtgtgcctcagtggagacaagtgggaaaacatggtcccacctgtgcgagaccccctgtcctgtgctgctcactcaacaacatctttgtgttgctttcaccaggctgagaccctaccctatggggtatatgggcttttacctgtgcaccagtgtgacaggaaagattcatgtcactactgtccgtggctacaattcaaaggtatccaatgtcgctgtaaattttatggcactatttttattggaggatttggtcagaatgcagttgttgtacaactcataaatactaactgctgattttgacacatgtgtgctccaaatgatctggtggttatttaacgtacctcttaaaattcgttgaaacgatttcaggtcaactctgaagagtatttgaaagcaggacttcagaacagtgtttgatttttattttataaatttaagcattcaaattaggcaaatctttggctgcaggcagcaaaaacag

SEQ ID NO: 4040 - DNA, 410 bp, Homo sapiens
aaaatgttcatgtagaaaattaatgaactataggaatagctctaggagaacaaatgtgctttctgtaaaaaggcagaccagggatgtaatgtttttaatgtttcagaagcctaactttttacacagtggttacatttcacatttcactaatgttgatatttggctgatggttgagcagtttctgaaatacacatttagtgtatggaaatacaagacagctaaagggctgtttggttagcatctcatcttgcattctgatcaattggcaagaaagggagatttcaaaattatatttcttgatggtatcttttcaattaatgtatctgtaaaagtttctttgtaaatactatgtgttctggtgtgtcttaaaattccaaacaaaatgatccctgcatttcctgaagatgttt

SEQ ID NO: 4041 - DNA, 405 bp, Homo sapiens
aaacaggccgagaagaacgtggagaagaaaattgacaaatacacagaggtcctcaagacccacggactcctggtctgagcccaataaagactgttaattcctcatgcgttgcctgcccttcctccattgttgccctggaatgtacgggacccaggggcagcagcagtccaggtgccgcaggcagccctgggacataggaagctgggagcaaggaaagggtcttagtcactgcctcccgaagttgcttgaaagcactcggagaattgtgcaggtgtcatttatctatgaccaataggaagagcaaccagttactatgagtgaaagggagccagaagactgattggagggccctatcttgtgagtggggcatctgttgaactttccacctggtcatatactctgcag

SEQ ID NO: 4042 - DNA, 349 bp, Homo sapiens
ctgacaatctatgggggcgggggggggggcgcggcaaaaaagcaatgatggaccttggctgatccccccgacccctttcttaacaatataggtagatgtctatcgtcagcttgcctctttgccaagacctagggggcggctctgccatgagctgctgtgtgctgccctccccaccttcagcacactcatctacacacacacaggtagcacccacctcgatgagaccgccttgctctggcctgccccaaccctggaagttgaaaacatagaaccatttatttctgcttctactctctgtgcccatgtcttgtccacgaaactttgctgaacttccaggaccttacacctg

SEQ ID NO: 4043 - DNA, 373 bp, Homo sapiens
ccaaaactgcgaagagatgcagaataatgttgacaataataagttgctgaatcgtcaggctgcagactggtgatggttaaattgaattgtgtcccagatccactgccagtaaatcttaatgagaccccttcttctaaactggaagtcgcataaattaggacattaggggctttgcctggtttctgttgatgccaggccaaccaccgatctatattctgagaggcccgacaacttattgtaactgtatctccgacagatgcagacagggtggaaggagattgggtcatctggatgtcacatttggcacctgggagccagagcagcaggagccccaggagctgagcggggaccctcatgtccatgctgtgtcctg

SEQ ID NO: 4044 - DNA, 368 bp, Homo sapiens
aaatttccaaccttaagtgaatttgtggaccaaatttcaaaggaactttttgtgtagtcagttcttgcacaatgtgtttggtaaacaaactcaaaatggattcttaggagcattttagtgtttattaaataactgaccatttgctgtagaaagatgagaaaacttaagctttgttttactacaacttgtacaaagttgtatgacagggcatattctttgcttccaagatttgggttgggggcactaggggttcagagcctggcagaattgtcagctttagtctgacataatctaagggtatggggcaaggatcacatctaatgcttgtgttccttatactctattatatagtgttattcatgattcag

SEQ ID NO: 4045 - DNA, 289 bp, Homo sapiens
catttagcaagttggttttggttttttcttctttacaaaatatttttatttttgttacccttatgtttatggtttagatttctttggccttatcaagcttttcttattttgtcttcaacaaagttaaatccagcatataaaacaagatttctacaaactgggtatctttttaatactttgtttccaaaggatgcaaggtgttgtaaaccgactgtccaagttactgaaacctgggggaatgctgttatttcgagactatggaagatatgataagactcagcttcgtttt

SEQ ID NO: 4046 - DNA, 309 bp, Homo sapiens
gtcggagccatggcggtggcaaattcaagtcctgttaaccccgtggtgttctttgatgtcagtattggcggtcaggaagttggccgcatgaagatcgagctctttgcagacgttgtgcctaagacggccgagaactttaggcagttctgcaccggagaattcaggaaagatggggttccaataggatacaaaggaagcaccttccacagggtcataaaggatttcatgattcagggtggagattttgttaatggagatggtactggagtcgccagtatttaccgggggccatttgcagatgaaaatttt

SEQ ID NO: 4047 - DNA, 132 bp, Homo sapiens
ctgtgagccaccctgcccggccacttttgtatgatttctaatgtatttgtaatttacctaacaaattgcctaatctgctatgttaatgtatttatgaattaaaataaatacgactgcaaaaaaaaaaaaaaa

SEQ ID NO: 4048 - DNA, 456 bp, Homo sapiens
  unsure (160): n=A,T,C or G
  unsure (386): n=A,T,C or G
  unsure (388): n=A,T,C or G
  unsure (405): n=A,T,C or G
  unsure (413): n=A,T,C or G
  unsure (414): n=A,T,C or G
aaataaataggagtacactgtaaaataataaaagtatattgtatagtaaatacataaatcagtaatatcttttattatcactatcaagtattatgcactgtacataattgtatgtgctagacttttatatgactggcaatgcaggtttgtttacaccagncatcaccacaaactcatgactaatgtattgtgccacattacaatgtcgctaggtaacaggaatttttcagctccattataatcctatgggaccaccatcatatatacagtccatcattgaccgagatgtcattaagaggtacatcaacagaaataatgtatattatgtacaaaaataaatgaattaaaattaaatgaatacttgataaatgacaagttataaaagncnatttctgattctaaaanatacatgnnaatattttttctacagagcatggaaaatacattagatgttat

SEQ ID NO: 4049 - DNA, 435 bp, Homo sapiens
cctgttgaggagaaactgaggccagccctggcggagacctagcccagcggggtaaggagggtgggggaaaactgggtctgaaggaatgagggccccctccctctgggctttcctcctagagggcctcagtccctcctgctggctgggctgcacgacccccaatccttgctcccctaacccggaggagggggccagaccagggagggcagtggacagggagcctgggggagttggggagcgcagggcagggtccatggtgtgcagagggggtggcagccacctaggtggtcagttcctggcagcgatgaccacagagagtgccacaccccccaaggcaacagcagtcgccccaaacagccacttccatgggatggactgtggataaaaaggaggggagagaagggtggagggaggtcaagactggcctctggggcc

SEQ ID NO: 4050 - DNA, 206 bp, Homo sapiens
  unsure (77): n=A,T,C or G
ccaccccagtaactgacctgctctcctgttggagctctacatgggacaccagctcccatgcatttatccctcttcanacctcactggtgagaagctgggcttctgggtccccatgctgcttcatcccacctcccaaccctgtcttcaggcccactgctgatcccagtctagaaccacagcaccgcccccatcctgcatgaagaagg

SEQ ID NO: 4051 - DNA, 163 bp, Homo sapiens
  unsure (123): n=A,T,C or G
ctgtttgccggcaaatatcagacgctgctggtcaggtgggataccctccttgtcttgaattttggccttgacattctcaatggtgtcactgggctcgacctcaagggtgatggttttgccagngagggtcttcacaaagatctgcatgtttgcgtcagctcgg

SEQ ID NO: 4052 - DNA, 379 bp, Homo sapiens
ctgatggagatgactctactgcaaaaatgacaaccagcaagaaagcgggtggtgcccgtttcctccctggggaccctcagagggccaggccattctcttccttggtgtgactgcggatccagggtaagaagtgtgagactctcgtgtagacgcctggcttgtccttcagggcacatccacggccccagctcacaattccagtcaaagtcatgcggccttggagggaacagacgaggggtccccctgagtctccctggcaggaatctgttttccactgtgggtcagcagcacacagcattttggtggtgacttcagagccgtagtagtggggctgctgacactcccggtgggaaatcagcttcacaacagtcattttcag

SEQ ID NO: 4053 - DNA, 373 bp, Homo sapiens
ttgaactctctgagataaacggagatgcagggtcaaactacataaatgccagctatattgatggtttcaaagaacccaggaaatacattgctgcacaaggtcccagggatgaaactgttgatgatttctggaggatgatttgggaacagaaagccacagttattgtcatggtcactcgatgtgaagaaggaaacaggaacaagtgtgcagaatactggccgtcaatggaagagggcactcgggcttttggagatgttgttgtaaagatcaaccagcacaaaagatgtccagattacatcattcagaaattgaacattgtaaataaaaaagaaaaagcaactggaagagaggtgactcacattcagttcaccag

SEQ ID NO: 4054 - DNA, 382 bp, Homo sapiens
ctggccctgattgcgggcacggcagtcgtgggtgtggtcctggtcctggtggtcattgtggtcgcagttctctgcctcaggaagcagagcaatgggagagaagcagaatattcggacaaacacggacagtatctcatcggacatggtactaaggtctacatcgaccccttcacttatgaagaccctaatgaggctgtgagggaatttgcaaaagagatcgatgtctcctacgtcaagattgaagaggtgtttggtgcaggtgagtttggcgaggtgtgtcgggggcggctcaaggccccagggaagaaggagagctgtgtggcaatcaagaccctgaagggtggctacacggagcggcagcggcgtgagtttctgagcgagg

SEQ ID NO: 4055 - DNA, 306 bp, Homo sapiens
ccactggcatcgcagcttcctgtctgtttatatattgaaagttgcttttattgcaccattttcaatttggagcattaactaaatgctcatacacagttaaataaatagaaagagttctatggagactttgctgttactgcttctctttgtgcagtgttagtattcaccctgggcagtgagtgccatgctttttggtgagggcagatcccagcacctattgaattaccatagagtaatgatgtaacagtgcaagattttttttttaagtgacataattgtccagttataagcgtatttagactgtgg

SEQ ID NO: 4056 - DNA, 255 bp, Homo sapiens
ctgccctgtggtttcacatgataaggcactacttccaaaatcttccacttccacaaaacatctgtttcccagaagacctgagaagcatattccaacaggcggacacgcccgaccctccccaacttaaaatccacaccaatggcagcaccgtgtggaaagtgagacattcgttcagtgacctggggtttttctgggctgttggagcagccatagcaaatggcaagttctgctgtctgggctgctgtggttctctgg

SEQ ID NO: 4057 - DNA, 332 bp, Homo sapiens
  unsure (224): n=A,T,C or G
  unsure (299): n=A,T,C or G
  unsure (301): n=A,T,C or G
  unsure (312): n=A,T,C or G
  unsure (315): n=A,T,C or G
  unsure (324): n=A,T,C or G
aaagaactaatttgtaaattatgacacaaaattttattaacaaggaaatatccattaattgactactacagtaaaaactttataatgcttgtatcatgaagaaagaccttccttttccttatatattaattgaactacataggcttgctgtacattttgttattcatgttataagaattctagattccattgcttttgaaatatgtttctttttaggaactaanagtcaacttatagtttgatttctgttttatttgtactgtgtttctgattttgtgggtttctaaataaaaagatcnancccaccacttncantatactgtnttctattt

SEQ ID NO: 4058 - DNA, 229 bp, Homo sapiens
  unsure (13): n=A,T,C or G
  unsure (15): n=A,T,C or G
cattatgggtaangnggggttgggcggggctttaattccatccagataatgctggatggcttgggaccacttggcagtccttcgctgcttttctgtgctgcagtggctatggagtgagcaaggctcctcagggagctatttctataggaagcacaattctggacggtatggctggggaagcgtaaagagggttaacaaggataagaaacctccaccccttccccttcag

SEQ ID NO: 4059 - DNA, 567 bp, Homo sapiens
ccaggctggtcttgaactcctgacctcgtgatccacccacctcagcctcccaaagtgctgggattacagacgtgagccactgcgcccggcccagctagtctatatctttcaagtgggaaatgtaatcagttcccattcaaggttattactgataggtgaggacttattcttgccattttgttaattgttttctacttgttttgtgcatcctttgttcatttcttcctctcttattggttatcattgtggtttggtggttttctgtagtggtaacatttgattcctttctttttctcatttgtatctgctccaccagtgagtttcatgttttcatgatgcaaatatcagccttttgctttcagatgtagaacatgttaagcatttctcgtagggctggtatagtggtgatgaatgccctcagtttttgcttggctgggaaagactttattactctttaatttttgaaggacaactttgccgagtatagtgttcttgcgtgacagttttctttttcctttagcacttttaatgtattatcacattctctcctggcctgtaaggtttctg

SEQ ID NO: 4060 - DNA, 309 bp, Homo sapiens
ctgcacttactcactgatgggaaaagttctttgagttacacagtttcaaacaggaacagccaggagactggggacttaaatcataactattgtataaataatgggagctgttccctgagctaaacgccgccctttggcagaggtagagccttttggcagagggaggcaggagaagagtgtgggaagtgaagaagttcctgaggtgacaaagtgaattgcaccggagagaaggggggataaagctgcttcccagaaactaggacagcaacacctggctggtccccgaggacgaggacgggacaagaaagg

SEQ ID NO: 4061 - DNA, 469 bp, Homo sapiens
ccatcatgtcgcgcacagccagcatcagcctgttcaggccctggttgcggttcagacccccagccactccttcctcgggcctctccccctccatggtatagtttggcaacagtgaccggaagaagagagcaatggtgtttccatggctgataggacttagcctctctggcctgacgtaggagtagattgtgtccgaaggaggcagaggatcaaaccccatcacagactgcgtggtcacgtccgggggcagggcagcgacggcttccttgatctcagagaggatcacatggcggtggatattcctgggtgcacgctggtagagcaccttccgccggttctcacaggcttccacggccgggtccccggcgtccactgcttgcagaacctcgtggacgttctcctccagccagctcatggtggcgggctctttccagagaaagtgtgacctcccaaggtacaggttcaccag

SEQ ID NO: 4062 - DNA, 281 bp, Homo sapiens
  unsure (7): n=A,T,C or G
  unsure (68): n=A,T,C or G
tccatanctataaaaatcgttacggccaggatatgccggaacagaacactccccactggggtcctcanccttggatgtcagctcggcccctcaaggggtccctacacctggaagctgattccactcatcagtctcgagctgggcgcatgtggagttgatgtggagttgtagctgactggctggtggggtcagcctggcctcccagtgtggagcatgggcaccagcctcactgcgtggtcgccctagggcatatgctgcgggctgttgtggcattcctgtgg

SEQ ID NO: 4063 - DNA, 111 bp, Homo sapiens
aggctgcagcagcccttgtgacagggctgtggtcacccttagctagcactgacaagatctccatcatctcactctccatcagggtgctggcaatctccctcgaggacctcg

SEQ ID NO: 4064 - DNA, 234 bp, Homo sapiens
ctgaaaatccatcagtgccagcataccaatgaacctctattcaagtgtacccaggaaggatgtgggaaacactttgcatcacccagcaagctgaaacgacatgccaaggcccacgagggctatgtatgtcaaaaaggatgttcctttgtggcaaaaacatggacggaacttctgaaacatgtgagagaaacccataaagaggaaatactatgtgaagtatgccggaaaacattt

SEQ ID NO: 4065 - DNA, 171 bp, Homo sapiens
ctggacgcacggaggccacactgagtatgtcatcaatctgccgactgttgaagttggacaggcccagcgcctgcaccagccccttagccaccagtgcctccagagccttccaagtctccttgtagtgggtggagtcgtagcatatagtcccatcagcattcttggggaagg

SEQ ID NO: 4066 - DNA, 568 bp, Homo sapiens
aaaatgcattttcccttgtcctgtctttaactagatatacatgcttatatttatagtgggtttcacagactataaaattgaatgtatgaaatttttatttatatcagtgcttttaataatgaagatatttttggagtaatggtgctgtcttgtagcgagttattaatcatagtaagatttttttctcttcatttgctttttttgtttcatattaacaattttttttttacacggacacaaccctctgacagtctttccaaatattaaaatcatttgaatatgtatgctgtgatctgaacactgctcaagccatcaagcagtcttcatacagtttgcattataaaatctcattaaattctccaagaaaaaataagttgaagaattttatttcctgaccatgcatcccctggatttctgagtttcagttcagattgtagatgacaatataagctgccttccgaaattgtcaacatctgaatgttaagtccattttccccatggaagaagcccgtagttccatgaagtatggattaccatttgtatttttcactaacagtaaatgtatttt

SEQ ID NO: 4067 - DNA, 389 bp, Homo sapiens
aaaagaaattcagaaactaagcggttggagaggagcattggaaatagagggggatgctatgagatgggggttgggagcagagaagaaactgcaggagggcaaagtgtaactagcaatataccttctgtgatgctccagaaacacatgtctgctaagattaacttgattggagtttcttatgaaacaggctgatcatcaagatttttaactcaggtttcagtgaaaaaattggaaacttttacaagaaagatttgagaagtagaaggcaggcagcaaattttccagatattatgcttgcatttcaaattcctgtttcaggcttttcaagtaggcatgcacattcccaaagccatgatatttggctaaatacacaaggaccccagtcgcac

SEQ ID NO: 4068 - DNA, 425 bp, Homo sapiens
ccttcctccgcttccgctgcacctcttccttgtctgggggcagaggaaaatgagattgagcccagttattgtgtcatgcctcaggggcccttcccagaagagccctcagggccggctcctaggaagcacctcctgggaccctcgcacttctgacttggctcatgcatccccacatctagctcttgggaccttcttctagcccagcctggccccccgccagcaccctgaggtcctcagcccagctccaccttccaccagagggtaataggtgaactgtttggaatcagacacgtcccctcctcgcttgcgtttcagttgcagaaacactgttacaggccgctcaatcttcatcttgtgataggggggtgtccggaacacaatggcatactgtttatgcacatctgtgggagagaagtccccaaagg

SEQ ID NO: 4069 - DNA, 361 bp, Homo sapiens
ctgaagcccaagaactgctgatacactgcagatgagaaaacatttgctactctcccagctctggcctttcttaagctaaatgatgatcacaacaatatagatcacttgttctataaaacaattttggcttacatgtatagcaagctgcactgccagcatttacatttgcaacaacatttcaatcccttttttgactctagaggttgcaactcttcagctttattggttcagcaatttagtcccaaattctcatgaaaaatttacactttttaatccagcatttattcccttgaaatgagttactacacctatgtaaatttttttaatgtttgaaccccaaagataaaataaatacattttt

SEQ ID NO: 4070 - DNA, 486 bp, Homo sapiens
aaaagagtaaaaaatggttttctggttccaagatggctgaataggaacagctccagtctacagctcccagcatgagtgacgcagaagacaggtgatttctgcatttccaactgaggtactgggttcatctcactggggcttgtcagacagtgggtgcagaccacagagtgtgagctgaagcagggtggggcatcacctcacctgggaagcacaaggggctgaggaattcccttttctagccaagggaagctgtgacagatggtacctggaaaatcgggacactcccaccctaatactgtgcttttccagtggtcttagcaaatggcacaccaggagattatatcctgtgcatggcttggagggtcctatgaccacagagcctcgctcactgctagcacagcagtctgagattgaactgcaaggcagcagcaaggctgggggagtggtgtctgtcattgctgaggcttgagtaggtaaacaaagtgg

SEQ ID NO: 4071 - DNA, 527 bp, Homo sapiens
  unsure (476): n=A,T,C or G
gacaaaatggcgaagatcgccaagactcacgaagatattgaagcacagattcgagaaattcaaggcaagaaggcagctcttgatgaagctcaaggagtgggcctcgattctacaggttattatgaccaggaaatttatggtggaagtgacagcggatttgctggatacgtgacatcaattgctgcaactgaacttgaagatgatgacgatgactattcatcatctacgagtttgcttggtcagaagaagccaggatatcatgcccctgtggcattgcttaatgatataccacagtcaacagaacagtatgatccatttgctgagcacagacctccaaagattgcagaccgggaagatgaatacaaaaagcataggcggaccatgataatttccccagagcgtcttgatccttttgcagatggtaattctttcccacttttctataagtattcagaaatttatttgtattaagttgnctttagccctttgattttttttggcatgcttctgaatttgcttttcttttt

SEQ ID NO: 4072 - DNA, 342 bp, Homo sapiens
ctgatactgtataagacaaagccaagatgcaaaattaggctttgattggcactttttgaaaaatatgcaacaaatatgggatgtaatccggatggccgcttctgtacttaatgtgaaatatttagatacctttttgaacacttaacagtttctttgagacaatgacttttgtaaggattggtactatctatcattccttatgacatgtacattgtctgtcactaatccttggattttgctgtattgtcacctaaattggtacaggtactgataaaaatctctagtggataatcataacactctcggtcacatgtttttccttcagcttgaaagctttttttt

SEQ ID NO: 4073 - DNA, 400 bp, Homo sapiens
ctgccgcaatttccatgccaggatatttttccgcaaatcagtcggttgaaattcagaggggtcagaatgactcgacctgtccttcaatgttgataataaatgtctcagccaaaaaccttccttgagctgccatgcttttccccttgacctgcacctcttcccctaaaacttctgcagggaagcccctggcggaggcgccattgaaagcatggtcttgccagtggctggcaaggcggttttgttctgctcagtttctggagagggttggatgcgtcccctgccatccagccctccccgcttgaggccagcactgagtctgggacactcagcgggaagggggctggcatcgccagcgacccacacattcctcacgtagcttctgctcccaggaaggtagttt

SEQ ID NO: 4074 - DNA, 131 bp, Homo sapiens
caggacttaagacaaatgggactgatgtcatcttgagctcttcatttattttgactgtgatttatttggagtggaggcattgtttttaagaaaaacatgtcatgtaggttgtctaaaaataaaatgcattt

SEQ ID NO: 4075 - DNA, 116 bp, Homo sapiens
aaaaagctgatacttgacaagattttggatgaagacttatatatcaatgccaatgaccaggcgatcgcttatgtgatgctcggaaataaagcccaaactgtactaaatggcaattt

SEQ ID NO: 4076 - DNA, 229 bp, Homo sapiens
ccacatccctgcatttatttgtccgggaatagtggcattcctaatttagtaaaataaaagaatagactgtaaaattatgctgacctataattatacctataggatcaattaataaacatgtcaggttaatatctactgtagcaatgtggtagtaaattttctttgggtattaaatataaatgtgtacatataaataattttggtatattagtcataatgtatatatttt

SEQ ID NO: 4077 - DNA, 324 bp, Homo sapiens
aaatttcataaccagcctgtttagattccagtcttcctagctatatcacatatgccttgttgatatgctctttctgctttctttagacttaatgtttgacgggggtgggggtgtctggaagaacaggaaaggtggggatcctaaggcagattaaaggactccctccaccccactacagcctcccataactctagtcatccctctcatagtacaggactgatttctctgtgtctgtttgtacacacaaatgtgcatacagacataaattcccccaccccataccaaggtggttacctagcaggaatgagcgtaggtggctgctgg

SEQ ID NO: 4078 - DNA, 337 bp, Homo sapiens
aaatgagaatacagctttacttaaatgaaaatcccaatgtttcttttgggtgtagacctcattctttccttcatagaaagaactgtaaactcagtaaattcttaatctcttgtataataatcggatgagagccaagcattttcttaaagatcctctaaaaagaatggctttggaatgactagaaaacatttgtggagtgtgggagctatgcttgcattatttgcttaattcatgtgcttggatgttgtgctttcagtctattcaacaatatttaatcaattattaaattttcttagagacatacacttaaatgaagcattttaattgagtatttttt

SEQ ID NO: 4079 - DNA, 267 bp, Homo sapiens
ctgggctggcgccttagctgtctgctgcactgcggccaccgtgaaggcctgtttcagggtcatcataatttcatcaaccagagcctcatttgtgcactgaaacacgtaacagacaaaatgaaagccgccacctccggaagactcccgacagataaacccaaagtggtccacgtgtctgatgccctgagagcaaaaggatatctccttaaaatttttctccaatgctattttttggtgtcaggactgatgaggtaaacttcagactgg

SEQ ID NO: 4080 - DNA, 268 bp, Homo sapiens
  unsure (199): n=A,T,C or G
  unsure (262): n=A,T,C or G
  unsure (267): n=A,T,C or G
aaagcttcttgttttaattaaaaacaagcacatattaacagccacatgtgaatgccaaatgattaaaacaaaaaaacaaaaacaagagccatctacactgcagctagggaaagcaaacttcttggcttaagagaagtgagggatgtgtgtacgtgtgtgtgtgtgtgtgtgtgtgtgtgtgtgtgtgtgtgtgtttcanaaaagccactccagtctgggaaaataaaagcacagaccatttctaatgactggttttgtttcnccagna

SEQ ID NO: 4081 - DNA, 568 bp, Homo sapiens
aaagcaattggaagagcatatgaacacgggccagctagcaggattttcacatcaaattagaagtctgattttgaataatatcatcaataagaaggagtttgggattttggcaaagaccaaatactttcaaatgttgaagatgcatgcgatgaataccaacaatatcactgagctagtgaactatttggcaaatgacttaagtttagatgaagcttcagtcttgataactgaatattcaaagcactgcgggaaacctgtgcctccagacactgctccctgtgaaattctgaaggtaaagctgatggaaagttcttaggttctaacttgacattgtttatattcctagggccttaaaattgacaagccttttctagtgttctggagataaatgtatttttatgtgtaactgtaatttttatattttactttttgtgttagagagttctaaactagaaatcaagagaccacagttctaatctcagccctgccactgggcagcaaagcctaatgtgggcttagtcttcagatctggaccccatggtctctcaggtgctttccagcattacca

SEQ ID NO: 4082 - DNA, 410 bp, Homo sapiens
cctgctccattccaccctctgggggaggcgcccaatccccttgcgaccggtcatgaggtcttcccagctcaggactccagggcacctcccctcgggcctggtcaggaagcagcacctgagggtggatgttctcagaggatacagacggaacaccttccaggttctcaaatttctcttctcctgttgtctcagtctcccaagctctctctgcatatcctccacaagggtcaccgcttcttcgccgctctccggatgcagctcctgcaccctgctctggatctcctggggcaggatggtcaggaactgctctaacaccagcagctccaagatctgctccttcgtgcgcatctcaggccgaagccacccatggcaaagctcttggagccggctgagggcttcccggggaccag

SEQ ID NO: 4083 - DNA, 262 bp, Homo sapiens
ctgttgactcagattcggcattttaattacattgtttccaagtatgatattctgagagtgtctatagcacttagtgtctgcttcatataaactaccagttattatatatttatgatgcaagtagttttccaaatgtggtgaaagtctgagtctttttatccccatgggtaaaatctgaatctggctctctgtgtctctcagtgcttgtttattactggtcagagagtaaattcttgataaaagctgttgacttggctctcac

SEQ ID NO: 4084 - DNA, 546 bp, Homo sapiens
ccatacctaggactagcccgatctgtgtgtcagccactgacccattttaccagtgaggaaattgaggctcagagaggttaagtgacttgcctgtggtcacacagggaacaagggcagagccagaatgtcaacggaggagtgtacaccctttcaactacgctctgtgcgcaatgtttaaccggagcctcgtgtattcatttgtaagtcacagaaaataattatatttacagggggaatctaaagatttcaggggacaacctgtagactgactctcatttagcaggggcccaataagcgattatgcccatccacttgagcttgtactgacgtaactactctcctcatgactaccactcaaagaatatacaaaggacctctcattttcccagaaataacctctctatatgaacaggcacagccaatgtggaatggccttatgtctactgagcacatcacatgcacagctcttcatttcatccccacactaatcatgtaatacaggcatgactgtccctatctgacagaggaggaaacagggtagagttt

SEQ ID NO: 4085 - DNA, 525 bp, Homo sapiens
ccactacgataagcaggtagctgggttttgtagtgagcttgctccttaagttacaggaactctccttataatagacacttcattttcctagtccatccctcatgaaaaatgactgaccactgctgggcagcaggagggatgatgaccaactaattcccaaaccccagtctcattggtaccagccttggggaaccacctacacttgagccacaattggttttgaagtgcatttacaaggtttgtctattttcagttctttactttttacatgctgacacatacatacactgcctaaatagatctctttcagaaacaatcctcagataacgcatagcaaaatggagatggagacatgatttctcatgcaacagcttctctaattataccttagaaatgttctcctttttatcatcaaatctgctcaagaagggctttttatagtagaataatatcagtggatgaaaacagcttaacattttaccatgcttaagttttaagaataaaataaaaattggaaataattgg

SEQ ID NO: 4086 - DNA, 318 bp, Homo sapiens
tgttcctaaaataaaccatttattgaaaaaagaacctttttcttaaatttcagtaatcagccttttgcattacaaacctgcagcttgccaacaacaacaaaaaaggtaaaggtttcacagtcagtgcactcaacaaacaggagattaaaaacaaggtatgggacgcctgataacactacaacttcttttgaacctagaaaggtcaaaacactacgctgatgtcacggttctcagtcgcgcgagacacggaggagacagaggcgatggtccgtgtacagtagtaatggcacttaacatgcagcttctttaacctcgtgg

SEQ ID NO: 4087 - DNA, 542 bp, Homo sapiens
aaactccaaattcctttatcgaagcagctatctgctaatattactgaatggcaagtctttggaaatgatagttaaccgaaaatgcagaaagaatcatagcaactaatgataatgacgggtaaaggatagaaaataaaatttttagccacaggttgtggttacagcatccaggccatcaccgacatctcggcagggctatgccgccacttcgtattaaacgtctactcctccgagaatgcccttattaaattaagtgcaaagtaaggcatcccaccccagacagagggatccacattctttaatcatgatgcgggccactgtaacagggagatggatgcaggacgcagacggggtggggcgcccaagcgacgcacttagacggtgatctgttggttttctctgaaaaatgatctctggtgtgaggcacaaatatctggaaacatccggaagacctggtctggcggcggctcctcgggggcctgcatcacagagccggctccacagctcttcccagcctcttctgccagttgccggacatacag

SEQ ID NO: 4088 - DNA, 549 bp, Homo sapiens
  unsure (509): n=A,T,C or G
ctggcagctcacattttacattagagagtggggtccccacattttacattacagagcggggtccctgagctgcaggaggagagcctgcagggctcttgggtagaattgcacttttgcaataagggaaacgggagcaatgtttcagcctcagtttctatttataatactgacacaaaaagaatattgctggatacatagcatggatctagatagagcagctccaggagttctcacggtgacagcccccctcactcacagacaccatgtgatactaatagggcttagacacaaagcactgaattcccaaagcattgaagagaaagacagctctcagtctgagtaaaaccgtattgagagaagaaaagaggttgaaagaatcttaaagacaaattcagattacatgtaacattggtcaaattgaccagaaaatattcttccaaagaagttcttctctaaacaccaaaagtgcacagctactctcagcatgagaaatacaagtattatgaganagagggcttattctgagcagaatttccatctctgctgctc

SEQ ID NO: 4089 - DNA, 275 bp, Homo sapiens
ccttcttggagcccctgggcaccctgggctactgtggggctgtgggcctgttacccccaggcgcagcagctccctccggctgggcccaggctccactcagtgacacggctcaagtctacatggagctgcagggcctggtggacccgcagatccagctacctctgttagccgcccgaaggtacaagttgcagaagcagcttgatagcctcacagccaggaccccatcagaaggggaggcagggactcagaggcaacaaaagctttcttccctccag

SEQ ID NO: 4090 - DNA, 248 bp, Homo sapiens
caccaactatgaggcgggcaaggatgactatgtgaaggcactgcccgggcaactgaagccttttgagaccctgctgtcccagaaccagggaggcaagaccttcattgtgggagaccagatctccttcgctgactacaacctgctggacttgctgctgatccatgaggtcctagcccctggctgcctggatgcgttccccctgctctcagcatatgtggggcgcctcagtgcccggcccaagctcaagg

SEQ ID NO: 4091 - DNA, 555 bp, Homo sapiens
ccagcagtggggcaagacaggtattttagatagggcagcaagggaagacctcgtgactttggagtgaaaatgtgaaagaagcaaaggaattagtcatgggggtgtctgcagagagagcatttgggggagagaaaaccacaaacgcaaatatgtcagaagtgagcctggcattttcaaggggcagcaggaggccacgtggctggagctgatgcccaacagggagagaactaggaggctggtcctggcgtcctcggtcctagttgatcacacagccttgtcagtcatgatggactcctcatgaaaaggagggcaacttctctgaagctcttataacaacttctcatcaaaggcatctctcacacaagcaatgcgctgccctactttgctattctggaccttgtcatcacatcataagcaggcgatccattatccgtacttactaggctctactggagttccacagccggcacagaaaaaattctgggctgccaccacaaggtccctcctgaatacgaaaaataatactagttacatttcagagaaggccaatggcac

SEQ ID NO: 4092 - DNA, 539 bp, Homo sapiens
aaatgtgagaatttcaagcagtaaaattactcaaaagtctactggatttaacttacaagttcttcagtggtaatctgttcaaaagaattattttagagttgttaggtatacttttgatgtggttgatatttctggtatccaagaagaaatctcccaagatcctacctaactttttgtaactaaagcagcatacatacacagggagtgggaaaatgtctagactggtgagtacacatgccaacatttttccagaattttctgcctccctatacggcttgagtaaggggtttagagattttagactatacttgggaatttgtctatttcttttgcagttctgtcaatttttgtatcatgtattttgaagcatttatgttattatgtacataaatatttaggactgttatgttttcttgattaattgaaccctttgtcactataaaatgacattgtatattgctggtaatatttttgctatgaaatgtactttggtattaatacaaccactcttcctcagccttcttttgtcaagtgttagt

SEQ ID NO: 4093 - DNA, 598 bp, Homo sapiens
  unsure (547): n=A,T,C or G
  unsure (588): n=A,T,C or G
ggaggccacatgctcctcaaagctgttgatgcgaggctttttggtgggttcggggctggctagcggggtgacactattgcgtctcatgagcgggttaggtcccttctttgcatcctctgacctctcccggtatgtgcagacggactccacgttcaggtagatggattccacacggcagccataagcgacaggcgtcagtttcaggacggtgtgaagagggcatttcaggtagggcatctcctctgcactcttatccaggaagtaggcaagcaggcagcgcaggacggcctggtggcagatgaccagcacattctcctgccgctccagctccatgatcactggctccaagcgctggaccaggtcctggtaggactccccggtggggtagcggtaatagtacttgtcctgctcccgcagcgcatactcctcagggtaggtgtccctgatctcctcgtaggtcagctcctcacagacgcccgcgtcgatctcattgagcgccttccactgctcgtagggcagccgcagcgcctcggcccgtctggatggngctcttcagccatcaccatgtcacccacaccagcagcgggnaagtctgttc

SEQ ID NO: 4094 - DNA, 241 bp, Homo sapiens
ctggtggagcactacacctcagacgcagatggactctgtacgcgcctcattaaaccaaaggtcatggagggcacagtggcggcccaggatgagttctaccgcagcggctgggccctgaacatgaaggagctgaagctgctgcagaccatcgggaagggggagttcggagacgtgatgctgggcgattaccgagggaacaaagtcgccgtcaagtgcattaagaacgacgccactgcccagg

SEQ ID NO: 4095 - DNA, 458 bp, Homo sapiens
aaaaatcagcggccgggcgcagtggctcacgcctgtaatcccagcactttgggaggccgaggcaggcggatcacaaggtcaggagatcaagactatcctggctaacacggtaaaaccctgtctctactaaaaatacaaaaaaattagccaggcatggtggcaagcgcctgtagtcccagctactctggaggctgaggcaggagaatggcgtgaacccaggaggcagagcttgcagtgagccgagatcacgccactgcacttgagcctgggcgacacagcgagactccatctcaaaacaaaacaaaacaaaattagctgagcatggtggtgtgtgcctgtagtcccagctactatggaggttgaggtgggaggatcgcttgagcccatgaggcccaggttacagtgagccaagatcgtgccactgcacttcagcctgggtgacagaaagagaccttctc

SEQ ID NO: 4096 - DNA, 332 bp, Homo sapiens
aaatagaaaacagtatattgaaagtggtgggtttgatctttttatttagaaacccacaaaatcagaaacacagtacaaataaaacagaaatcaaactataagttgacttttagttcctaaaaagaaacatatttcaaaagcaatggaatctagaattcttataacatgaataacaaaatgtacagcaagcctatgtagttcaattaatatataaggaaaaggaaggtctttcttcatgatacaagcattataaagtttttactgtagtagtcaattaatggatatttccttgttaataaaattttgtgtcataatttacaaattagttcttt

SEQ ID NO: 4097 - DNA, 434 bp, Homo sapiens
aaatttttgaagggtacccatcaacaagccaaatattcgccggttcctttgctttccctttcatccatattttgatcctggataaggtctctacgtgtgcgctctttggaggtagctacaactgaagactgcaatgctggctttttaacatcatcatcctccgggtcgctttcctggcgtgattctcttctggtccgacgctccccgcccagcctactgactgccccttcaaggtctctctgtttggctgggggtcctcctccactatctgagaatccacgcctcagtaataaactaccacgtcctctacctccaccaggaccagaaagggccagcaatctggcttggatgggcctcacgtcattcggatcccgcccggtgagcttgcgaatgttctcatccacgttcttaagactctctttggccttttccag

SEQ ID NO: 4098 - DNA, 373 bp, Homo sapiens
ccaccctgaccatcaacagggtcgaagccggcgatgaggccgactattactgtcaagtgtgggatcgtaataatgaccatgtcgtcttcggcggagggaccaaactggccgtcctaggtcagcccaaggctgccccctcggtcactctgttcccgccctcctctgaggagcctcaagccaacaaggccacactggtgtgtctcataagtgacttctacccgggagccgtgacagtggcctggaaggcagatagcagccccgtcaaggcgggagtggagaccaccacaccctccaaacaaagcaacaacaagtacgcggccagcagctatctgagcctgacgcctgagcagtggaagtcccacagaagctacag

SEQ ID NO: 4099 - DNA, 573 bp, Homo sapiens
  unsure (540): n=A,T,C or G
  unsure (546): n=A,T,C or G
ctgcacccctggtttcagctcttctaactgtgaaagccccatccaaggctaacattcgagaggcacagggctgccaagggtttcttctgcccacttagtccccagtggctcaggctccttccttggaagttccctggggtaggtgaggcagaggcagatctccgaggaacttgactgactgagcaacgaagaccctctctgagttttcctcccaaggtcttagggtggcttggcagtccccaccccctcacactgtctcagggtctctaccctcaacaagattagattccttttagccagaaagagtagtgagaggctgccaattgggtacacctggggctttcagggctggagtgcccagagcctcctgaggtcagagttcagaggttaaggtatgtcaggggatggaaaaggagcagatgaccccatttgacctttaccagcgaggtctgagggtcctgccttcaagtgcagagcccccaacacattcagatggggctggacagacacaaagctacagggttcccctgaggggcagangctggnaagggccgccctcccactcagccctca

SEQ ID NO: 4100 - DNA, 424 bp, Homo sapiens
aaagtaccttctggtgaaggcaaacccaacaagcttctacagaaatttagtataaaaagtttagtgtgatgaaaactatattaccaactggaatgaagtacaataaactactaacaaacatactaacttgctacatatactaactaaaataaattagaattgtcaagttaataccactacccaaaataccagagatccaatatgtgcctatccataatgaagagttctttaattgtttagctccataccttccactaggcacaaatatcaaaggtcattccgcaaagccgtccatgcatcagtatcacatttgtgcaaaggcagatttatcagataaattctttgcaacttctgagggcttcaattaagtaacttaaaactatgaacttaccaactatgtagtaatttaatcaaagaatgtttt

SEQ ID NO: 4101 - DNA, 255 bp, Homo sapiens
cctgctgtgtctttgactcttgatcagagccagtcacaggcttctttggaagcagtagaagtcccttcaatggcctcatcttggggtgggccacatttttctccagaacataaagaactgtctaactccccactcagggagaacagctttggatcacctttagaatttagaaactcaggcccacttggtacagaaatgaatactggattttcttctgaggttaaagaagatttgaatggaccgtttcttaatcag

SEQ ID NO: 4102 - DNA, 572 bp, Homo sapiens
cctcgagctcccttcagcgaggcaccttacgcatggaataggaggtttcacccacctgaaaccttctaaatacaatatcaatggtgaaaaaccaaaaacaagagagaaaataaaaacaagatcattagtaaaagttcaacaaagcaattgaaattctttggatgtctattacatatgggaatgaggacagtctcaagtctgtaatatgggaaacatgcagaagggagagggttaatcagggctattgcatacagcagggatttttgctggaagaaaggctcttcattttctacaaagacaacttaattttgcttccatctactaggaatatgctggcttgaattttcaaatgcactgattacaaaagaaatacattgcatttcactcaagagtattttcttgtttactaagttctcacaaaaaaacagaataacatttttcaaactaggtgtctccagagctctgaaataaagaagtcagcaacctaaggcaggcgcaatgtctcagcctaaaccgatctctaaagctgcagtgaagtgcaattcatgttagctgtccgcttggtggggtga

SEQ ID NO: 4103 - DNA, 548 bp, Homo sapiens
cctttctgaggcagcagcaagcagctccaaacctccgaaagcttatttatgggacagtgacagaagataatgaagaagaagatgatgatactctagaagagcttggagggttgtttcgtgtcaaccagcctgacagagagtgtaagcacaaggctgactctttggactgctccagatttcttgtggaggccccccatgactgggatttagaggaggttatgaacagtatcagagattgcttcgtgactggaaagtgggaagatgataaagatgcagccaaggtcttagcagaagatgaggagctctacggtgactttgaagacttggaaacaggggacgtgcacaagggaaaatcaggccccaatactcagaatgaagatatagagaaagaagttaaggaagaaattgaccccgacgaagaagaaagtgccaagaaaaagcatttggataagaagagaaaattgaaggagatgtttgatgcagaatatgatgaaggagaaagcacatattttgatgatcttaaaggagaaatgcagaaacaagcacag

SEQ ID NO: 4104 - DNA, 261 bp, Homo sapiens
ctgtggactccacctggggccccaatacaagagcacccgtcaccccggcctgggttttttcagggccccttgggacacagggctcaccatggagtgctgtaggtccaggctatggagctggcagcaggctttggctagcatgaccagagcgtcagcagtcacaccgtggcagccggagagcttgaggaaagtgagccgaggacagcactcacctaccagacctgcccgggcggcgctcgagccctatagtgagtcgtatta

SEQ ID NO: 4105 - DNA, 353 bp, Homo sapiens
ctgccatttgcaaaaacaaggaaaaaaatccgaaactttcttttgttgcactgacagggtctgtacttttttttttctttttgagtcaggactatggagccgagtagttgatcttttaatatagccgtgtttacttgtattaacttacagttaacataggaaaaatacaagtaaggatgtgagaatttgcattttaatgggaaattttcaacccttaatctgaaaacagaagacagtcttaatataaatgtactgtgaagaatgctattgatgtttatggtttctgattacttttcaaattttgatgtttttttgccagttggcttttcttaaatgaaaacactgttccattt

SEQ ID NO: 4106 - DNA, 368 bp, Homo sapiens
ctgccggcgggtaacggtgaaaatggaccggagaaggcttcgcccaaagacatgagtggtttcgtagcgggggaggctatcacagctctggggcacgtggcagtaacagagccatctggtgtaattgaccttgtaggtagccacgtcctcagcctgagacctctgccgaaactgggcaggtgtctcaagcttccagtagttaaggcagagcaagaacatctttgagagctcgaacatcgtctgccgctcccggggagccaggtgactaaacttgtactgcacaaagttcagcacaccctgctcaatattaggtttctcaaatggagggctgcccagggacccctccaccacaggccgggtcatctgca

SEQ ID NO: 4107 - DNA, 373 bp, Homo sapiens
ccaacatggtgaaaccctgtctccagtaaaaatacaaaaaatagctgggtgtggtggtgcatgcctataatcccagctactcaggaggctgaggcaggagaattgcttgaactcgggaagcagaggttgcagtgagccaagattgtgccactggactccagcctgggcgacagggcgagactctgtctcaaaaaaaaaaaaagggaaaagaaaatgtagatttccattgtccaaagtgacagcgggaggatgggtcttgagtttctcaggttggagaagcagctccacgaaggtcctgagcttgggtccactgtacatgggacagctccaaaagaggaaggtcccagcactgcatctagtagtgaggcatcag

SEQ ID NO: 4108 - DNA, 247 bp, Homo sapiens
ccagtgactttatgtctggacctcagtttattcatgtgaaaaatggacatgataacaatagtcattagatggtagggttttgatttgggggctggaagagatgctgtgtatagtgtatgggcctaaagtaggcactccatgcatgagaactagcatcactgttcattaatttttaatttattttaggatggtctagtctatgcagtcgagttctcccaccgctctggccgtgacctcattaacttgg

SEQ ID NO: 4109 - DNA, 305 bp, Homo sapiens
atgatctggatagagaagatgaagttagattactcaaatatctctttactctaatccgtgctggaatgacagaagaggcacaacgactctgtaaacgccgtggtcaagcatggagagctgcaacacttgaaggctggaaactgtaccatgaccctaatgttaatggaggaacagaattagaacctgttgaagggaatccatatagacgcatttggaaaataagttgctggagaatggcagaagatgagctttttaatagatacgagagagcaatttatgcagctttaagtgggaatcttaagcag

SEQ ID NO: 4110 - DNA, 332 bp, Homo sapiens
aaagaactaatttgtaaattatgacacaaaattttattaacaaggaaatatccattaattgactactacagtaaaaactttataatgcttgtatcatgaagaaagaccttccttttccttatatattaattgaactacataggcttgctgtacattttgttattcatgttataagaattctagattccattgcttttgaaatatgtttctttttaggaactaaaagtcaacttatagtttgatttctgttttatttgtactgtgtttctgattttgtgggtttctaaataaaaagatcaaacccaccactttcaatatactgttttctattt

SEQ ID NO: 4111 - DNA, 423 bp, Homo sapiens
  unsure (10): n=A,T,C or G
  unsure (15): n=A,T,C or G
  unsure (24): n=A,T,C or G
  unsure (45): n=A,T,C or G
  unsure (47): n=A,T,C or G
  unsure (48): n=A,T,C or G
  unsure (127): n=A,T,C or G
  unsure (189): n=A,T,C or G
  unsure (222): n=A,T,C or G
  unsure (225): n=A,T,C or G
  unsure (279): n=A,T,C or G
  unsure (392): n=A,T,C or G
  unsure (403): n=A,T,C or G
aaaaaagtanttgcngggtttgtnaagattctttccactttttgncnnattaaatattttataaagtcatatgacatatacatatgatgacttttctgcctttctgcacagttagaaagtcattcangaaagacaatgataccacaaaacaacactcagagaatgcacattccacagcactgacatgtntcatctatggtcctggtctacaacatccgccgnggnctaaacacacactatggctgttattaaacaaaacatcccatttctacttacttnaatcagaaggaggatgaagctgctgctaacatttcgataacatatctgattctatcaagtgaaactacactgaatttaatgggggtactggctgacagatcaaacttaagttntagacagtctngtctaaaataatagaggttt

SEQ ID NO: 4112 - DNA, 318 bp, Homo sapiens
aaaacaatccttaactagctagcaggacatttactttggattctgcataactgcaaactgacatatttgtaaagctaaaaatcagttttaatacatgattaacagaaactctcatcatgctcattactttaactattgccctttcaatcgctatagaaatatcacttaatccaataagcttgatttcaatagtccaggaagaaaaggtcaaaaaggcacaatgtgaccttagctgacaagaataaccatcctgtctcaagtcttttgtcagtccctggcatgaattacaacattattttcaaaataataaaacatttt

SEQ ID NO: 4113 - DNA, 533 bp, Homo sapiens
ccatcaatttgtcctccatccatgtgcttcagcgccttctcggcttcatctggattctcaaactctacgtacgcatagcctttggacagatggggatgcatcctttccacgggcatgtcaatcattttaattttcccataggtggaaaatatctccatgatgtgatcctttgtcacattccgggtgagtctcccaatgtgcactttggtgggcttaggagatgggctccgccttttcctctccttttcatctcttttaggtggtttggatttggagcgggagcgcctcctgttgtcgtgtctgcgccgagaaggacttggagagccagaagagctgctagagctggagctgcgggaggtgctggagcttcctgagcggctggatgctgaggaagagctggagccactgcttgagccagtgctggtgctggagcctgagctggaagtcgagctggaccgagacctggtactactgctaccactggaagcgctgcgcctctttcgggttttgtcccggccgcgatccttctcact

SEQ ID NO: 4114 - DNA, 133 bp, Homo sapiens
  unsure (5): n=A,T,C or G
  unsure (16): n=A,T,C or G
  unsure (23): n=A,T,C or G
  unsure (40): n=A,T,C or G
  unsure (58): n=A,T,C or G
  unsure (63): n=A,T,C or G
  unsure (73): n=A,T,C or G
  unsure (112): n=A,T,C or G
gcctncaccttctcanaactgcntagggcgtgagctttgntggtgatgtgacctccanaacanactgtgagcngatttttttctttaatcctgagcctatgcttgctgctgnccttcttgactttcaactagg

SEQ ID NO: 4115 - DNA, 83 bp, Homo sapiens
  unsure (60): n=A,T,C or G
  unsure (70): n=A,T,C or G
  unsure (71): n=A,T,C or G
  unsure (75): n=A,T,C or G
ttttttttttttttttttctggaaggttctcaggtctttatttgctctctcacattccangaattgactnntttnattaatcc

SEQ ID NO: 4116 - DNA, 452 bp, Homo sapiens
ctgagaattaactactgacagtatccagcacttctggaacacgcggtacagctctttggctaatagttctgcagaattgaagtctggctcataagtgacactgaaatgtaagagatgcaaatactggaaaactatattcatgaggagtatgttcagggtcttcctgaggttttcaactgttcttcccagcccccaaaactcagaagaggctgtcatatgagatgacgcatgaatcactcaccaggcatcttactcaacatggctcctgcatgttcaataaataaagcatcttttatttactgagggcgctaagacttagaggtgtggtgaaagagcactggctttagagtcagaagacctgcattcaagccctacttctacctcacagccttcgtgtcccgaagcacatcctatatatgagtctcaatttttatgtctataaaatgaggttt

SEQ ID NO: 4117 - DNA, 375 bp, Homo sapiens
cctaggtgatgtgactctcctgccttggccctgccttcaggaaaaattgtgatgtgactctgggtttattacctagatgatgtgactcttgtgttctgcatgggcaagcccaaaggggtcattgtggcatatctctgggcacatcaaagaagtggtgtaatttttctctcattccaggactctagtctcagtagggattgtgacatatcactgggcccataacctatgtaatgtgattctagtatcctgcttgggccctgcttacaggaaagattgtgacatttggctgggcccatcacctagttaatgcgactctccttttcttcctgtgccctgccctcagtggagattgtgacaaatttctgggccaatcag

SEQ ID NO: 4118 - DNA, 453 bp, Homo sapiens
ctggagtccttctacatccagacgtacccctgagcagaaggctctggtgattggtggagaggcttgtatgtggggagaatatgtggacaacacaaacctggtccccaggctctgagaggaagagagtgggattgctacccacattttaatgaaggtggagctgagccgtagaactctctgggagccatccaacctggctgtggctcataacaaggcccagagcaggggctgttgccggaaggctgtggagcaacaagttgacatctgacctgacatttgcctatgaacgtttgtcacacttccgctgtgagttgctgaggcgaggtgtccaggcccaacccctcaatgtaggcttctgtgagcaggagtttgaacagacctgagccccaggcaccgaggagggtgctggctgtaggtgaatggtagtggagccaggcttccactgcatcctgg

SEQ ID NO: 4119 - DNA, 285 bp, Homo sapiens
aaacatggctcacatcccttttagaaagttatggcagggaagcaagtagagagcaggtggtaaactgaggattggtgcctacattggtacctacagtgggtcctacagtcatttttgtgcggatcaggagatgaggtgaagagaaggaaagcttctcatttgcataatgccttgaaatgaccctaggtttctagcgggcaccgagaaaccagagatgccccttgttgtctgtctgggagatccaaggagacatctggcagtgttgagaagagatgaaggtgacag

SEQ ID NO: 4120 - DNA, 455 bp, Homo sapiens
  unsure (8): n=A,T,C or G
  unsure (13): n=A,T,C or G
  unsure (17): n=A,T,C or G
  unsure (38): n=A,T,C or G
  unsure (70): n=A,T,C or G
  unsure (151): n=A,T,C or G
  unsure (157): n=A,T,C or G
  unsure (174): n=A,T,C or G
  unsure (181): n=A,T,C or G
  unsure (197): n=A,T,C or G
  unsure (200): n=A,T,C or G
  unsure (401): n=A,T,C or G
  unsure (416): n=A,T,C or G
  unsure (417): n=A,T,C or G
ttacttangatgnttgngatctgccgaccttgctatanatgccatgttaccaatgatttcctgtggtggnggcttgccattgtttactctcttatttaccaacttctggcctaagcatgacagtgggcaccttcccccagccctggctggncccagngcctgtgttctgtgttngaaaggntttatatatatataanatnacatatatatgtagaaatatatgtaattttgggggccctgttccttgcacattttacagttacctcatttttcccatgtatgtatttgagaaaatgctaatatatagagaaaaaaatggttcttaaagcttaaatgtgtggttttttccattccatgggattcacattggtttgtagcatttaacataactagtatgttgnattatatatatgtgnntactgattgaaatttttaacagatttgtacttttttta

SEQ ID NO: 4121 - DNA, 251 bp, Homo sapiens
gttcccgagaggctcctgaaggtggtgaagcgggtcttggtggcagtcaatgtgaagtctgtggctgaggcactgcaggacctgctctttgagcgggatgaagagtacctaatggactgtgactggcggtgggaccctgtgcacaccaaagggtccatagtccgtggcctctattatgaggaggtcagactaaaccgcctgctctgtttggaccctgtggactactttgctgaacctgagtgtgagtttgg

SEQ ID NO: 4122 - DNA, 432 bp, Homo sapiens
aaatattaattttctcttaatttcgtgtttccttgcacataatagcactgcccctaacttcagagatgctgattgcagttaaaaaatcaaaaagaaatgatgtgaatcagaaaataccatgttgtattgaaagcaaatcaaatagtgtaaacaccatcaccagaactctgtgcgaacaagctcccaagaggagggcagcttgtaacttacaaagactgttagagaactcagagcatcagagcataaagcatgtgggatccaaagagacacatttggaattccagtttggggatggtagttgcaagcacctaaacagtttgccaaggaatgtttctcctgagtttgttccttgtgaaggtgaaggaggctttggtttgcacaagaagaaagacctactcagtgataatggttctgaatcacttccgcattcag

SEQ ID NO: 4123 - DNA, 218 bp, Homo sapiens
cctggagtcccgacagccggtctgccaggcacccgcctccgcttcctactgctgcttgcattccgccggctggctgggttccttctgtcaatgaaaaagacaaggcttgtagagagcaaagccagctccattcaccaattagctccaatcaacaatgaaagccaagactgaatgagttcattctcattgaaaaaaatggttactgcaaatatactttt

SEQ ID NO: 4124 - DNA, 295 bp, Homo sapiens
gtcgggattaggtgaaagtacgtagttgtctttcgtaagttaaaatgataattgggccgaaacttactgccttacctaaaaggcagcgcagtcaggatattggtaggtcgggggcggctttggaaacccttaagtttacaagcatgcgcggacttgagtgctcattaggtcgccgggcgtccacgtgcagccctggaccctgaaccccggcgtgcgtgggccgtgggccctcggggaaaggttccgtgcactcggggactccggtgaagcctgttcagccgtctgtgtcatgtgg

SEQ ID NO: 4125 - DNA, 309 bp, Homo sapiens
  unsure (239): n=A,T,C or G
  unsure (243): n=A,T,C or G
ctgttactcctcagggatttgggatgccccttgggggattcttgggaatgacccatcacaattcctcaatctgcacttttgtgcggagattcccttggtcacttttgaaatgaactcagatgtgtttggagatagctgtgccgtttttgccttctttccctcttgtagggaaaccttcgcttattcccccaagttgctggcaggtgtgctgaaaatttggcaatggactcaaggctganctanaagaggaatttctcatttttgtggttgacaattagggggtggaaaggcaaggcaaaccatctgcag

SEQ ID NO: 4126 - DNA, 321 bp, Homo sapiens
ctggaggtagcatttaacttgctgtcgaatcttctggaagcaatccacgataggaacagttggaatagtatgaatccgacttaatatatccagagctacattgaccagtccttgtttccgggcgatttttccatactggatgatcgctgaagctgatgcatgaaccccaagcatagcgttatttgaactgggatcatgctgagagctattctcataggcagttacaatcgcctggtaatgatgctgcctccacatgaagatgctgctccagtgggacaagtcgtcagacacgatgggcagtcggttcctccaggtcttcac

SEQ ID NO: 4127 - DNA, 577 bp, Homo sapiens
ggagcacggagatctcgccggctttacgttcacctcggtgtctgcagcaccctccgctccctctcctaggcgacgagacccagtggctagaagttcaccatgtctattctcaagatccatgccagggagatctttgactctcgcgggaatcccactgttgaggttgatctcttcacctcaaaaggtctcttcagagctgctgtgcccagtggtgcttcaactggtatctatgaggccctagagctccgggacaatgataagactcgctatatggggaagggtgtctcaaaggctgttgagcacatcaataaaactattgcgcctgccctggttagcaagaaactgaacgtcacagaacaagagaagattgacaaactgatgatcgagatggatggaacagaaaataaatctaagtttggtgcgaacgccattctgggggtgtcccttgccgtctgcaaagctggtgccgttgagaagggggtccccctgtaccgccacatcgctgacttggctggcaactctgaagtcatcctgccagtcccggcgttcaatgtcatcaatggcggttctcatgctg

SEQ ID NO: 4128 - DNA, 586 bp, Homo sapiens
ctgctcaactcgctctgcacagcagtcaaagccatctcttcggcggtgcgcaaggcgggcatcgcgcacctctatggcattgctggttctaccaacgtgacaggtgatcaagttaagaagctggacgtcctctccaacgacctggttatgaacatgttaaagtcatcctttgccacgtgtgttctcgtgtcagaagaagataaacacgccatcatagtggaaccggagaaaaggggtaaatatgtggtctgttttgatccccttgatggatcttccaacatcgattgccttgtgtccgttggaaccatttttggcatctatagaaagaaatcaactgatgagccttctgagaaggatgctctgcaaccaggccggaacctggtggcagccggctacgcactgtatggcagtgccaccatgctggtccttgccatggactgtggggtcaactgcttcatgctggacccggccatcggggagttcattttggtggacaaggatgtgaagataaaaaagaaaggtaaaatctacagccttaacgagggctacgccaaggactttgaccctgccgtcactgagtacatcc

SEQ ID NO: 4129 - DNA, 452 bp, Homo sapiens
ctgcaacagcagagcaaggccagcaagatcctcattgtagactgggacgtgcaccatggcaacggcacccagcaaaccttctaccaagaccccagtgtgctctacatctccctgcatcgccatgacgacggcaacttcttcccggggagtggggctgtggatgaggtaggggctggcagcggtgagggcttcaatgtcaatgtggcctgggctggaggtctggacccccccatgggggatcctgagtacctggctgctttcaggatagtcgtgatgcccatcgcccgagagttctctccagacctagtcctggtgtctgctggatttgatgctgctgagggtcacccggccccactgggtggctaccatgtttctgccaaatgttttggatacatgacgcagcaactgatgaacctggcaggaggcgcagtggtgctggccttggagggtgg

SEQ ID NO: 4130 - DNA, 545 bp, Homo sapiens
ccagggcgactggcggataaggtcttgtgcgtggcctcgaggcttaaaagtagcagtggggctttgtgaaggacaaaatggcgatggcgggccgtgtaggtcccccttcctatgatgaggaccttttcacagacctgtactgagctccgtgaggataaataactctgaggagatgggccctgcaagcctcttgcttagccgtctgttcagaaaatagcgttttcgaaatgccctgagttgacctaatgtcttattgggctcctgtctgcaggatttacgcgcacgttggaaccgaagagagctctgttgttgcagtaagttcttacggccatttcttaatctctgctctttcgttgagtgtgtggaagttgctacggggatgattttacgaactgaactctctctttctgatggattagtggagaaaacagaaaattctgagtagcactgtactgtacgcaacaaatgtcagggccctattgatttgtctgaggtgttagtgaagggtgttattttttcagatgttcagcccacaagagcttact

SEQ ID NO: 4131 - DNA, 580 bp, Homo sapiens
ctgaaaagcatgcttgatatagtagagcatgatctcctcaaacctcacttgccctctgtcacttatttgagattagatggcagcatacctcctggtcagaggcattccattgtttcccggtttaataatgatccatctatagacgttctgttacttaccactcacgttggtggcctgggacttaatttgacaggcgctgacacagtagtatttgtggagcatgactggaatcctatgcgagatctacaagccatggaccgggcccatcgcattgggcagaaacgtgtggttaacgtataccgattgataaccagaggaacattggaagaaaaaataatggggttgcagaaattcaagatgaacatagcgaatactgttattagccaagagaattctagtttgcagagcatggggactgatcagcttcttgatctgtttactcttgataaggatggcaaagcagaaaaagctgacacctctacttctgggaaagcaagtatgaaatcaattcttgaaaacctgagtgatctttgggatcaagagcagtatgattcagagtacagcctggaaaattttatgc

SEQ ID NO: 4132 - DNA, 483 bp, Homo sapiens
aaaaaatctggcttgttacaggcaaattcacttgccacaagctgtccagtctaatcgacaggattccgattcctgaacagtgtcattcgaatcagaatgtcagagctgagtctgctgttctgacttaaggaacaacttgactcagtctcttgatggctggagaatgcacatcctagctgtcactggggctacaggcaggtcagtgagcacgctaaaattttccttctcaattacacttcaaatagcaggcatattactcgtataagatgctatctgatgatactaacctttctgctggtaccctcccactgctcctaaagccacaccttaatatacattctggtgctgtgtactaatgtagttccactgtcaagtcttaacattcttcaaaccagtgtctggggttgatagactatttgtttgacatggcacaatgttttgaattgggtgggaatcttttcccccagttagaaaaacagattt

SEQ ID NO: 4133 - DNA, 409 bp, Homo sapiens
atggtatttcattaaactgttgcatacccagttagcacagtaggtggggagtctgcttcatttctatcattccatttttctgattaaactgtcaaatctgtcattgcatatgccatcgttttctagcaaaatcccatgattggctataaacgttttgtaagaagtcactctccttgaaaatactgaacatagctgtataggtttgtgattattagagaatatgttaataaaacttcttgtaacggctaactgccacctaaaatatgctgggttttctgttgtttgagtgtgttagagaaatttgaatgtttttgtcagttacgagtcagccgtaattagattagtttaaggacaggtcaggattagagaagagttgtttttgtgttttgttaatgtctgagtgattttt

SEQ ID NO: 4134 - DNA, 231 bp, Homo sapiens
cctcccaggaacagaactcggatccgaaaagcccagagaagctagagctgcccctccaacactctcggatccacatggtctgtgttctctagacccccctgcatgttagcggtgttctctctctgtggactgactgtccttctcagtgaacatgtccacccgacagctcctgagtttatatcatctcaaccctcacaacccacagaggctgtgtctcctagtcacagcttt

SEQ ID NO: 4135 - DNA, 541 bp, Homo sapiens
  unsure (519): n=A,T,C or G
ccagtacacccatgaatttgatggagatgaggagttctacgtggacctggagaggaaggagactgcctggcggtggcctgagttcagcaaatttggaggttttgacccgcagggtgcactgagaaacatggctgtggcaaaacacaacttgaacatcatgattaaacgctacaactctaccgctgctaccaatgaggttcctgaggtcacagtgttttccaagtctcccgtgacactgggtcagcccaacaccctcatttgtcttgtggacaacatctttcctcctgtggtcaacatcacatggctgagcaatgggcagtcagtcacagaaggtgtttctgagaccagcttcctctccaagagtgatcattccttcttcaagatcagttacctcaccttcctcccttctgctgatgagatttatgactgcaaggtggagcactggggcctggaccagcctcttctgaaacactgggagcctgagattccagcccctatgtcagagctcacagagactgnggtctgcgccctggggttgtct

SEQ ID NO: 4136 - DNA, 395 bp, Homo sapiens
ccatcagtccccaatttccccgaggtaagataggacgacaaaatgggacaagatatttgaagtgaggtcagtccaatttggatatcatagaagaaaagaaataggatgtgctaggttaagcctgagatggtatctgggaagtcacattcatgatgtgaactgaaagaacacaggtgctacagtgcagaccaaaacccagcctgactcgacccaacagggtcaggtgtggatctgtgagtagtgctcactgagcccccacgagcagtgtctggcagggcaccgctgctccatagtgtgcttttagaacctgccagaggagctccagcaataggaccacgtgccccattcatcggaatcagggtcctatattcactgagttttccatctcaggacag

SEQ ID NO: 4137 - DNA, 292 bp, Homo sapiens; identical to SEQ ID NO: 29

SEQ ID NO: 4138 - DNA, 332 bp, Homo sapiens; identical to SEQ ID NO: 4096

SEQ ID NO: 4139 - DNA, 387 bp, Homo sapiens
ggcgagggcgctggccgagaggtgctcggcttgtagcaggtcccgcactccagcctctcgctgccagggtttgctctctgcttgtcctgggctgaggtgtccatgacggagtcatccaaggaggaaaaaatctgttccgggtgagcccaggccgccccggatatgcgatggctgaggagcagacaccagggaccacactgaggttgggtttcagaccaagatactggattctcctagttaagataaagagctttgggtgcctgacagtgaaaatggtgtaatctgcgttaacagttcacagcttgaaggcatgacaattaaagaacacacatggacttgtggcacatggaaatgtgcgcacagaaaaaggaaatctataattctttt

SEQ ID NO: 4140 - DNA, 417 bp, Homo sapiens
ccagcacatagcgatataactgacgtaaatgctgccagtcttaccaaagactgttcccttttagccaccggagatgattttggtttcgttaagcttttttcatatcctgtcaagggacagcacgcaagattcaagaagtatgtggggcacagtgcacatgtcactaacgtgaggtggctgcacaatgactctgtgctgctcacggtgggcggcgctgacacagccctgatgatctggaccagggagtttgtggggacccaggagagcaagctggtggacagcgaggagtcagacaccgacgtggaagaggatggaggctatgacagcgatgttgctagagaaaaggccattgactacaccaccaagatttatgctgtgagcatcagggaaatggaaggcaccaagccacaccagcag

SEQ ID NO: 4141 - DNA, 481 bp, Homo sapiens
gtgtgcccatctccttgaggaagcccactctatttttggtagcatgacgggccactgagaggtggaaagggcacaagaaccatgagatctcctggaaatgcttccctgggaaggcaatttcatgaatgaggtcttccaagcaaatgacgccaaacttccccaggtgctcctcaatcactgtattgtctgtcagagggatggtcttattcttgaccttggcttgtccacgtttcaaaatgagttctcggacagacttcagatttggaaatccccaggtcacataaggttccactatacgcagcatttttagattctggggggtgacttttacaaagacaccactaaaaattttctttaggcgaagtcttgcaatggttctctgcaccagtaaactcacgccgtcaatcctcaggacttcagcacgtatgcctgaaaaatctcccaacactggtgaacgcctttcacatctttcaggtctcag

SEQ ID NO: 4142 - DNA, 503 bp, Homo sapiens
aaatggtctctacaacaaattgtcacttgttgggttcaattaagtgctcattgtataagtgcacatggtacaaatcaacaccagcttataggattgtggaaagaattaagagatgaatttagtgatcttatataccctgtcagttggtcatattgtggaagagctctacaaaacttactgtactgttaactccaagattttcttccaataacagggatgctagccagatatttaataatcaaagaccaaaaatggcagtttaatttttctacccaatatcctatggcatatgaatgatccaaatttgaagctccaaggataggaaaaagcttacttgtgcctgtcctagacaagtactagagtttatattgaaatcaaaacttctaaaaataaaaatcagtaagattaattttactcatttttctaacacgagtcagtatgcttgaagttttcattgtatttgatgtcatgtaaatttactgtaaaaaataagaaaaaatttt

SEQ ID NO: 4143 - DNA, 304 bp, Homo sapiens
  unsure (188): n=A,T,C or G
  unsure (199): n=A,T,C or G
cctacagacttatttcttcttggacacacccacggtgcggccacggcggccagtggtcttggtgtgctggcctcggacacgaaggccccagaagtgacgcagccctctatgggcccgaatcttcttcagtcgctccaggtcttcacggagcttgttgtccagaccattggctaggacctggctgtatnttccatccttnacatccttctgtctgttcaagaaccagtctgggatcttgtactggcgtggattctgcataatggtgatcacacgttccacctcatcctcagtgagttctcccgcc

SEQ ID NO: 4144 - DNA, 554 bp, Homo sapiens
  unsure (526): n=A,T,C or G
ccacagcccatgcgaaggcccgcatgagcaagactgtggacctgcaggatgcagaggaagctgtggagttggtccagtatgcttactttaagaaggttctggagaaggagaagaaacgtaagaagcgaagtgaggatgaatcagagacagaagatgaagaggagaaaagccaagaggaccaggagcagaagaggaagagaaggaagactcgccagccagatgccaaagatggggattcatacgacccctatgacttcagtgacacagaggaggaaatgcctcaagtacacactccaaagacggcagactcacaggagaccaaggaatcccagaaagtggagttgagtgaatccaggttgaaggcattcaaggtggccctcttggatgtgttccgggaagctcatgcgcagtcaatcggcatgaatcgcctcacagaatccatcaaccgggacagcgaagagcccttctcttcagttgagatccaggctgctctgagcaagatgcaggatgacaatcaggtcatggngtctgagggcatcatcttcctcatctga

SEQ ID NO: 4145 - DNA, 559 bp, Homo sapiens
  unsure (547): n=A,T,C or G
cctttatatgtaaataacaaaatagtgattttaattcatatagatgtatttgtttatctaagtatgcttttatactctctgctatatttttgtatcaattaagtgtgcctggcagcatgaagaaagtcagtacaacaatggtttctctctgttgtgtaaaactgaagttggaagtgggtaacccgacaatggcacagcagcttcacaagatcctgagggatcagcctcctcctttcgtgctgcctcactaccctcagtccttggcttctgcctcagagtctaagatggctactttagatccaggcaccaagccctcatcattacatcatctcattccaagaaaaaaaaagaagcaatgacaagtattccctctccctgtaaagacaccccctagaagtccaaagtaacatttctctttccattctttgttacgaatgagactggaaaatacagtgtgtatttgggaggctgtatgcctagctaaaaatcaggaggcttattactaactaagaaggaagaatgtgatactgaaggtcaactggcaggntttgccacagtg

SEQ ID NO: 4146 - DNA, 556 bp, Homo sapiens
  unsure (529): n=A,T,C or G
ccacgtttcttgggtttggtggcaatgctgctcgacagagatacgaagacagaatatttgccaacaccattcaaaagaacaggctcctgggtaaacagactggtctgactcctgatatgccgtacttggacccctgcctacccctagacattaaagatgaaatccagcaaaatggacaaaccatatacctacgagggactggagactttgacctgtgtcgagagactatccagcctttcatgaataaaacaaacgagacccagacttccctcaatggggtctaccagcccccaattcacttccagaacagtgaattctatggcttctccgaattctactactgcaccgaggatgtgttacgaatggggggagactacaatgctgctaaatttactaaagctgcaaaggattattgtgcaacaaagtggtccattttgcgggaacgctttgaccgaggactgtacgcctctcatgctgacctccacaggcttaagtatcagtgcttcaaatcggcctggatgtttgaggngtttcataggggcttttcgtttcctgt

SEQ ID NO: 4147 - DNA, 161 bp, Homo sapiens
  unsure (35): n=A,T,C or G
  unsure (61): n=A,T,C or G
  unsure (101): n=A,T,C or G
  unsure (107): n=A,T,C or G
  unsure (121): n=A,T,C or G
  unsure (131): n=A,T,C or G
  unsure (133): n=A,T,C or G
  unsure (136): n=A,T,C or G
  unsure (146): n=A,T,C or G
  unsure (152): n=A,T,C or G
  unsure (156): n=A,T,C or G
tgatggttactgagtcggcacctatgacagctaanagagctttcttaaagactgcctcagngtcttcttggcttttggcaccttcactccactctgcccangaaatncacaatggcagacnaacctggggntncangtgcacaaangcttcntcanaaagc

SEQ ID NO: 4148 - DNA, 440 bp, Homo sapiens
  unsure (17): n=A,T,C or G
  unsure (18): n=A,T,C or G
  unsure (19): n=A,T,C or G
cagtttccatgtatatnnngtctatattatgtttgttattgagaaataggcatttttgggaagaaagaatttggcattttggaaataatcagaaaattaaaaaatgcacacaccactttcccattcttctccccaccccaacccctacccctatcctcaaatgcttagctagtgaaatattaaaatgttgtaatagaaattggagtcaaggtctccttgctgaagagaccatctattttcagagactggaaggagagagaacaaaccaatcaagagtcattggtttgttgcctctattgttttatttctgacctgcgcaaatagcttttgaagtggagatatgctagttcttggcaactaatacttttctgggcatgcattttatgaaataataggtatgtatctgcctcattcttttaggctatgtgtttctctagttt

SEQ ID NO: 4149 - DNA, 174 bp, Homo sapiens
aaataaaatgtttctaactagatttttgatttgtgttcaatattaacacttcttaatttgatatatttgagagtcagacattataattgttaaccttattcatacatacctacattcagaattgaaaggtgttggttaagtcttgaacatcactattctatgcataaaacttgg

SEQ ID NO: 4150 - DNA, 319 bp, Homo sapiens
cttccggcctcgagtctcgctcaggctcggttttaccccggagtctattcgaagggggctgctacgtcagcgcgtctcagcgtaagacggcgctattccgctgtaacagcttccggcgggtcctggatgttgatgtcctgcatctaacgcggtgtaacccccgaagccgagcgagctccggaggaatttcagtatctgctacggtaacttcatcagcccgccaagatggcgatgcaagcggccaagagggcgaacattcgacttccacctgaagtaaatcggatattgtatataagaaatttgccatacaaaatcacag

SEQ ID NO: 4151 - DNA, 544 bp, Homo sapiens
ccaaacagaaagcagctcctgaagccaagaaacagaaagtggaaggcacagaaccgactacggctttcaatctctttgttggaaacctaaactttaacaaatctgctcctgaattaaaaactggtatcagcgatgtttttgctaaaaatgatcttgctgttgtggatgtcagaattggtacgactaggaaatttggttatgtggattttgaatctgctgaagacctggagaaagcgttggaactcactggtttgaaagtctttggcaatgaaattaaactagagaaaccaaaaggaaaagacagtaagaaagagcgagatgcgagaacacttttggctaaaaatctcccttacaaagtcactcaggatgaattgaaagaagtgtttgaagatgctgcggagatcagattagtcagcaaggatgggaaaagtaaagggattgcttatattgaatttaagacagaagctgatgcagagaaaacctttgaagaaaagcagggaacagagatcgatgggcgatctatttccctgtactatactggaga

SEQ ID NO: 4152 - DNA, 557 bp, Homo sapiens
ccacatttgtgaccatcataaaagctaagtggtatttctgtgtagtttccgtctggaactgctttcccattcccgggaacccatagccgggccagccagggtcccgaacacaggcccaaagtttattaaaccccgatcataacctccagcaggcatttcatttaatactgagcttagttcctgctgggtaaggcattccgaggtaaccagggccctctgggcaccccctcaaaagccagctcttcgagggtgagtactccttgtttctactgtgagtcgcgtcttgattttccctttctttgatgtctcagtgtgtgtcccaaacacctgcatctcatggactgtttgtgcccatgcccagttcctggcatgccaggccctgggctcaggtgcacaactgactctctttttcactccctaggggaaccccctcggaaggggaagggttgggtgctgacgggcaggagcacaaagaagacacattcgatgtgttccgacagaggatgatgcagatgtacagacacaagcgggccaacaaataggtatgttcacaggcc

SEQ ID NO: 4153 - DNA, 430 bp, Homo sapiens
aaattatgaaaactaaggcttttgtgactgtttagcttcctgctttcttaagctacctgatgggttctgtatcctttcagactaggccatttaactgatttgtggcttgaaggaatttcacttccttgggtgctggtaccttattcacagcagatggtcatgcttagaaaaccctgcttcagggtcagtgactgaaaaaccaggggtgccatgccagtgcctttgtcagggctgttttctgcttaaccactttctcagaataatgcagaagaaacccagtccgctaccttttgagtgtgtgggaagataagtaagtgttcaggtgggaatggtagttgcctctcgcatcagggtttgcatggagaaggaagaggtgcacactcctgccacagagattcatgtctttgatgtggcaatgtctctgcgtggt

SEQ ID NO: 4154 - DNA, 437 bp, Homo sapiens
aaatgtgttctatcaaacacctaccttggcttcttccaagcgacccagggctttgagcaggttccccaggtcactgcgaacacagtacaaatcaggattgtactgaagagcagagacgtaagcttgtactgccccttccatgtcacccgctgctaccaaggcggctgccaggttaatatgaccatcgatgaaatcaggtttgagacgcaatgcatgtcgataatgctcaattgcctcctgcaactgccctctttccttgtacacattccccaaattcgaataagcttctgccagaagggggttctgtttaattgccagagtgctaaagtgagcagatctgtccagccttcgacactggaagtgtatagatgaaagtaataaaagcacaccagtattgtctggctcttgtctccagagctgcatgcagtgtctctcag

SEQ ID NO: 4155 - DNA, 147 bp, Homo sapiens
ctgacatattattatatctatgggatgaattaataagcatgtcagattaatatctactgtaacaattagatagtaaattttctttggatattagatataaatatctaagtagaagtaatttcaatatactagtaatgacaaattttt

SEQ ID NO: 4156 - DNA, 475 bp, Homo sapiens
  unsure (14): n=A,T,C or G
ctggtggttaacangtggatcgtcatgttcagtagtttatacattatgtgagaagtaacgttctgattctttttcttacacagaattggcagagggggtcgatttgggaggaaaggtgtggctataaactttgttactgaagaagacaagaggattcttcgtgacattgcgactttctacaatactacagtggaggagatgcccatgaatgtggctgaccttatttaattcctgggatgagagttttggatgcagtgctcgctgttgctgaataggcgatcacaacgtgcattgtgcttctttctttgggaatatttgaatcttgtctcaatgctcataacggatcagaaatacagattttgatagcaaagcgacgttagtcgtgagctcttgtgaggaaagtcattggctttatcctctttagagttagactgttggggtgggtataaaagatggggtctgtaaaatctttctt

SEQ ID NO: 4157 - DNA, 417 bp, Homo sapiens
  unsure (18): n=A,T,C or G
  unsure (20): n=A,T,C or G
ccatcttcattgagaagncnaaagatggacagattctgcctgtaccaaacgtggttgtacgagacgtggcctgtggcgctaaccacacgctggtcctggactcccagaagcgagtcttctcctggggctttggtggctatggccggctgggccacgcagagcagaaggatgagatggtcccccgcctggtgaagctgtttgacttccctgggcgtggggcttcccagatctatgctggttacacctgctcctttgctgtcagtgaagtgggtggtctgtttttctggggggccaccaacacctcccgtgaatctaccatgtacccaaaagcagtgcaggacctctgcggctggagaatccggagcctggcttgtgggaagagcagcatcattgtggccgccgatgagagcaccatca

SEQ ID NO: 4158 - DNA, 353 bp, Homo sapiens; identical to SEQ ID NO: 327

SEQ ID NO: 4159 - DNA, 143 bp, Homo sapiens
  unsure (100): n=A,T,C or G
  unsure (113): n=A,T,C or G
  unsure (117): n=A,T,C or G
  unsure (124): n=A,T,C or G
  unsure (129): n=A,T,C or G
aaaattcgtttttgcaataatgacaaatgccctgcacctacccacatgcactcgtgtgagacaaggcccataggtatggccccccccttccccctcccantactagttaattntgantaattgnattgncagaaaagtgatta

SEQ ID NO: 4160 - DNA, 318 bp, Homo sapiens
cctgcagagctgctgaggagtttgtcaatgtctactacaccaccatggataagcggcggcgtttgctgtcccgcctgtacatgggcacagccaccctggtctggaatggcaatgctgtttcaggacaagaatccttgagtgagttttttgaaatgttgccttccagcgagttccaaatcagcgtggtagactgccagcctgttcatgatgaagccacaccaagccagaccacggtccttgttgtcatctgtggatcagtgaagtttgaggggaacaaacaacgggacttcaaccagaacttcatcctgaccgcccagg

SEQ ID NO: 4161 - DNA, 397 bp, Homo sapiens
  unsure (154): n=A,T,C or G
  unsure (211): n=A,T,C or G
  unsure (245): n=A,T,C or G
  unsure (246): n=A,T,C or G
  unsure (247): n=A,T,C or G
ccatctttggttcaagaggctacaactgaggccttgaagctttgcttttgtccactggctgttcttttacaagctttgttacaattcaaacgcaaaatgggggcaagagagacacggcgtcttttggaaagagtggtatatcagcctgggtatnccaaatctattgcatcaactgcacgttggtacctactgagacacttatatgccaaanatgactatgagcttattgacgtgctggtaaacannntgccaaaactcatggagatacaagagcattggaactgaatcagagattgtcctcacaataacattggattattttatagtaaggaagcaaagaaaaagctgtaagaatgaagcaatgaatcaagacttctacccaaagcaacattttttt

SEQ ID NO: 4162 - DNA, 566 bp, Homo sapiens
ctgaatgagcacccagaggcatgaagataacctggagcctatttcctggcaatgcaaattgtggctgctgcataactacaaattgtgtatcaagaaactacatagtttcaaggcttaaaaattacccagatttgggggagtatgggtggtgagaaaaggctgaaaggaatggacagagcatgtagacaaaggaagggaaaggaaaaggagacagtttcctgatttcatagcaactcaaagataacatgacccaatgacaggaaaatggagaacgtataaaaagcatccaaatcccctaaacaagatgacttctcctagctagcaggaataatgctactctgaacatacatagttcacaggtaagggaactgacccttcctgaaagggcaaaggcagggtaaggaagaatgggaagagaagaatacaaatgttttttaagatggaattgaaagttgaatataataaaaagcccagtacatctcacctgcagaagagtctacaggcatgttcctaaaggcaaataggactttctatcatatgtatgagaactaaatcaaagcttaaaa

SEQ ID NO: 4163 - DNA, 212 bp, Homo sapiens
  unsure (15): n=A,T,C or G
  unsure (18): n=A,T,C or G
ctgaaaagatctgtnttnaattctgcaaatctttattgagtgccaactatttgctgggcacaggctaggcactgattctgctggttctgagaaacataaatggtaccatagggaggtgtttcctcctaagtggcaggaggatgtttgctgggagttaagtgaaccaattcctcctctgcttacaccacgtgggggtaggtccagaactcagg

SEQ ID NO: 4164 - DNA, 370 bp, Homo sapiens
cagcccacggtctgtactgacgcgccctcgcttcttcctctttctcgactccatcttcgcggtagctgggaccgccgttcagtcgccaatatgcagctctttgtccgcgcccaggagctacacaccttcgaggtgaccggccaggaaacggtcgcccagatcaaggctcatgtagcctcactggagggcattgccccggaagatcaagtcgtgctcctggcaggcgcgcccctggaggatgaagccactctgggccagtgcggggtggaggccctgactaccctggaagtagcaggccgcatgcttggaggtaaagtccatggttccctggcccgtgctggaaaagtgagaggtcagactcctaaggtgg

SEQ ID NO: 4165 - DNA, 438 bp, Homo sapiens
ccacctaagcacacagctaagattacagaaccaggactcgataaattcgagcccaacaaactgaccaacccaggacagagcctagtcatcctgactccctcctccccaggccacacttctaaaggccagtttgctcaccgactctctgagtggtagtagggaggccacgagaggccggagcattaccagttggagccagatggcgaagagttgggcgaggcccagactggcgtatagcacttggcattccttggaagcctggtgaagagaaaaattgcacatcattgagaagtgatgtggaccagaacctaggctgtgcctcagagtggggaagaaggaaaggcaggggagaccaggacaggtatatcctgggctgtcaattactgttccccaccacctaccttgaggtctcccaccttgctgccagcgtggattagg

SEQ ID NO: 4166 - DNA, 461 bp, Homo sapiens
ccaaggtcaagaaacagctccgggacctggaggccaaagtcaaggatcaggaagaagagctggatgagcaggcagggaccatccagatgctggaacaggccaagctgcgtctggagatggagatggagcggatgagacagacccattctaaggagatggagagtcgggatgaggaggtggaggaggcccggcagtcgtgtcagaagaagttaaaacagatggaggtgcagctagaggaagagtatgaggacaagcagaaggttctgcgagagaagcgggagctggagggcaagctcgccaccctcagcgaccaggtgaaccggcgggactttgagtcagagaagcggctgcggaaggacctgaagcgcaccaaggccctgctggcagatgcccagctcatgctggaccacctgaagaacagtgctcccagcaagcgagagattgcccagctcaagaaccag

SEQ ID NO: 4167 - DNA, 521 bp, Homo sapiens
ccactgtccttgcaggtactatgcctggctttcgataatcttttgctcagaaactcatgctcaaaagagttcaggatctctgaggtaaggccaactttatgtgtgctggtgcagaaggctataagctcgcctaccattccctcctcattctgtccatactgaacacaaagctctaccaatttctcaattagagcctcctcgcagtctaggccgaagatctgcagctcctccgccagccaaataccttcaactgagaaatgtcattgagcgactccaggaagctaagcactcggagttatatatgcaggtggatttgggctgtaacttcttcgttgacacagtggtcccagatacttcacgcatctatgtggccctgggatatggttttttcctggagttgacactggcagaagctctcaagttcattgatcgtaagagctctctcctcacagagctcagcaacagcctcaccaaggactccatgaatatcaaagcccatatccacatgttgctagaggggc

SEQ ID NO: 4168 - DNA, 372 bp, Homo sapiens
aaacgtgggagtggggtggggcaggagaaatttccttaaaccagcgtttctgccaatagccacttcctggggaaccatctctacctggatggttgaggtttcaaaactagattccagcaaaatgaagacaaggcaaactatgaactggaaaaagtcagtagaccactcaccgccaagggttgagagtcttaatagaaaagtgtgcttagaagatgacaagcaggaaagcaggctaagcgtatgagtgggcgacctccagtgaagagatgcgaatggtcatccgcacagggaaaaaatatcagcctcacaattgctacatagagcatgtgggagcccatggattcggacagagctcccacacaaggcccaagg

SEQ ID NO: 4169 - DNA, 373 bp, Homo sapiens
  unsure (285): n=A,T,C or G
  unsure (286): n=A,T,C or G
  unsure (289): n=A,T,C or G
ccaccctgaccatcaacagggtcgaagccggcgatgaggccgactattactgtcaagtgtgggatcttaataatgaccatgtcgtcttcggcggaggaaccaaactggccgtcctaggtcagcccaaggctgccccctcggtcactctgttcccgccctcctctgaggagcttcaagccaacaaggccacactggtgtgtctcataagtgacttctacccgggagccgtgacagtggcctggaaggcagatagcagccccgtcaaggcgggagtggagaccaccnnacnctccaaacaaagcaacaacaagtacgcggccagcagctatctgagcctgacgcctgagcagtggaagtcccacagaagctacag

SEQ ID NO: 4170 - DNA, 247 bp, Homo sapiens
  unsure (175): n=A,T,C or G
ccagtaaacaaattctaaacctaactgcctattaaaagaggaactagattttcttaagagacagataaacccaattcctccaaggagtttgaggcatggtggtattgttgaggggtgaggagtgggaggaagttgcttttcacaacacctatggaatagttcacttataaatcantctcctgacgtatatggcggcatctcctaaggtgcctagtccctttggacccctgcattaaccactacttaa

SEQ ID NO: 4171 - DNA, 283 bp, Homo sapiens
aaacttgctaaacaattttcctctatcttaaatgctaaagtcaagttgcttttgacttaattcacacaagtttctggatgtataacatttgtccacctagtaattagtcttatacataaaatttcccttagctttaatttggctcctatcagtggggagttttggaattgaatcataactttacattatcgcccttccttcaaaataatgtcattaaccatatgaatgctgaagaactgcatatttgcagagcaattacttctgtgaaagagaaataattttt

SEQ ID NO: 4172 - DNA, 406 bp, Homo sapiens
gcatgcaccacacgtggctaatttttttatttttttgtagagtcagggtctcactgtgttgcccaggctggtctctaactccagggctcaagcaatcctcctgccccagcctcccaaagtgctgagattacaggcatgagccaccgtgcccagcttgtttattcttttattatctcttttctgttggactactagactataagcttcatgaacacaaggatattctactttgtcttaatgtaccttaatacactccatccctaccacagttcctgggatatattaggtgctcagtaaatatttcctgaatgaacatataaattctgtgcatctactgattattaaattgttttgtgatgaaaaggtctgatgaacgatatcataaggtaaatgctgaatttgattt

SEQ ID NO: 4173 - DNA, 547 bp, Homo sapiens
ctgcgtctgtctgaatggtgcgtgaaggctctcagaccttacacaccattttgtaagttatgttttacatgccccgtttttgagactgatctcgatgcaggtggatctccttgagatcctgatagcctgttacaggaatgaagtaaaggtcagttttttttgtgttgattttcacagctttgaggaacatgcataagaaatgtagctgaagtagagggggcgtgagagaagggccaggccggcaggccaaccctcctccaatggaaattcccgtgttgcttcaaactgagacagatgggacttaacaggcaatggggtccacttccccctcttcagcatcccccgtaccccactttctgctgaaagaactgccagcaggtaggaccccagaggcccccaaatgaaagcttgaatttcccctactggctctgcgttttgctgagatctgtaggaaaggatgcttcacaaactgaggtagataatgctatgctgtcgttggtatacatcatgaatttttatgtaaattgctctgcaaagcaaattgata

SEQ ID NO: 4174 - DNA, 355 bp, Homo sapiens
gtggccttgcagggggggatgtcgtggatgagcagggccagcaggaagaccttgaggaaaagctgaaggagtatgtggactgtctcacagacaagaggtacccctggctgccagccaactcctacacccagctccaagtgtgatcaagggagggctggcccatatgaccccccttctcgacctcccccagtgccaagacccggcagggtgctcttgagagcctgcgcctggccctagcgtcccgcctactccccgacttcttgctggagcgccgcctcacgctagccgatgccctggaaaagtgcctcaagaaagggaagggcgagtaacaagccctggctgctgctgtgctagg

SEQ ID NO: 4175 - DNA, 319 bp, Homo sapiens
ctgaaggaagtttccgtggaagaaagaccacccgttagccgagcagctccccagcctgagaaactgcagaagaacaatatcaccaaaaaaaagaaactggttgaggagctggctctagaccacgtgtttggctacagaggtttcgactgtcgaaataacctgcattaccttaatgatggcgctgacatcatcttccacacagcagcggctggcatcgttcagaacctctccacagggagccagagcttctatctggagcacacagatgacatcctctgtctcacagtgaaccagcaccccaagtacagaaacgtggtgg

SEQ ID NO: 4176 - DNA, 443 bp, Homo sapiens
  unsure (135): n=A,T,C or G
  unsure (315): n=A,T,C or G
  unsure (324): n=A,T,C or G
ccaaatcttttgggagccccaatagagcttatacacatcaggttgtaaccaggtggtatcgggcccccgagttactatttggagctaggatgtatggtgtaggtgtggacatgtgggctgttggctgtatattancagagttacttctaagggttccttttttgccaggagattcagaccttgatcagctaacaagaatatttgaaactttgggcacaccaactgaggaacagtggccggacatgtgtagtcttccagattatgtgacatttaagagtttccctggaatacctttgcatcacatcttcagtgcancaggagacnacttactagatctcatacaaggcttattcttatttaatccatgtgctcgaattacggccacacaggcactgaaaatgaagtatttcagtaatcggccagggccaacacctggatgtcag

SEQ ID NO: 4177 - DNA, 173 bp, Homo sapiens
ccaggctagtctcgaacccttgacctcaagtgatccacctgccttggcctccctaagtgctgggattacaggcatgagccaccacacctgtccgacagtgtagcaactttctaaaactgaaaaatctcaaaggagatcattggaactgacttgttcatttattttttgttttt

SEQ ID NO: 4178 - DNA, 567 bp, Homo sapiens
ccacaagaaagacctacaaagaccacatgggaggaaaaagaaacatctgtaaagactgaatgcgtggcaggagtaacatctaataaaactgaagttttggaagaaggaacatctaagatgatcacatgtcctacaaaaaaacagctacaaaagcaagtacacatggtaagatgcttgagtgaactttgtagagtttattggcactttgggttccctagtggaaatagtgtggtatgggagtagtcgggaatggcttgaatgtctagataaggcaagcttgggcaacacattttaatagtgtagaaatgagtagatcttattctataggccctggaaaaattcccagaatacttctggctgtaaatattagatgaactaactaacaattgctaaaaccatagaaaccaaagtttttttggtggtacagggatattataggatctcactctgccccccacccccattattagttgtgctatcggcagtgttttgtccatgtctcctttcttggttggctaattagcaacagctccaatcatcatgctaactcaagacaatatctgaagg

SEQ ID NO: 4179 - DNA, 510 bp, Homo sapiens
aaatgtcccttcagttgtaagagacaattgtgtgaagagccagtgtcagaatcgtgtgtgtgctcacatgcgtgcaagttactctagcaggagggaatccaagaagccactgagacatcctcattctgtcccttctgtctaggtgaggtcccagcttgaagagaaagaaaacaagaagttccctgtgtttaaggccgtgtcattcaagagccaggtggtcgcggggacaaactacttcatcaaggtgcacgtcggcgacgaggacttcgtacacctgcgagtgttccaatctctccctcatgaaaacaagcccttgaccttatctaactaccagaccaacaaagccaagcatgatgagctgacctatttctgatcctgactttggacaaggcccttcagccagaagactgacaaagtcatcctccgtctaccagagcgtgcacttgtgatcctaaaataagcttcatctccgggctgtgccccttggggtggaaggggcaggattctgca

SEQ ID NO: 4180 - DNA, 509 bp, Homo sapiens
ctgactgttggatgtgtccattgtcgccagtttggctgttgcccggacaggacaggacctccattgggcgcagcagcaggtggcaggggtgtggcttgaggtgggtggcagcgtctggtcctcctctctggtgctttctgagagggtctctaaagcagagtgtggttggcctgggggaaggcagagcacgtatttctcccctctagtacctctgcatttgcgagtgttccctctggctttctgaaggacagcagactcttgagtatactgcagaggacatgctttatcagtaggtcctgagggctccaggggctcaactgaccaagtaacacagaagttggggtatgtggcctatttgggtcggaaactgcatgtttcagaaagtttgtctctttttcctactcattatttgaagaagagagagcctgtggggatagccttatcttggtccacaggactgaagtgaagtcacttgggaaggggagacagaggatgagcggcgtctgtgt

SEQ ID NO: 4181 - DNA, 503 bp, Homo sapiens
ctgttcagactctagtaggcctcggtttgctgatctatgagcgatactggtttgtgtgtagccaaaaatccctacagaccagtggttgtcaggcgaggaaagttttataccccaggacatatttggcaacacctgagaacctttttgtttggcaccactcaggaagacgcgttactggcattgaggcaagggacagtgctgaacatcccacaatgtacaggacagcctcacagcaaagggtgacctggccccacatgtcagtagtgcagaggttaatccctgctctagagacaacacagggatcatgggacacaagtcactagccctggaccagccactgctcaagaggccacgtgcaatccacggcattcatctgtccctcttcctccactgttcagcacttgtcgtcaatctggaagctgctaagagcctgtctgtcactggcagagaaagagcagaccctgtgccggctgcaaaggccttgagttgcaggaaagtccagg

SEQ ID NO: 4182 - DNA, 526 bp, Homo sapiens
  unsure (452): n=A,T,C or G
  unsure (470): n=A,T,C or G
gcggtgcgacgaaggagtaggtggtgggatctcaccgtgggtccgattagccttttctctgccttgcttgcttgagcttcggcggaattcgaaatggctggcggtaaggctggaaaggactccggaaaggccaagacaaaggcggtttcccgctcgcagagagccggcttgcagttcccagtgggccgtattcatcgacacctaaaatctaggacgaccagtcatggacgtgtgggcgcgactgccgctgtgtacagcgcagccatcctggagtacctcaccgcagaggtacttgaactggcaggaaatgcatcaaaagacttaaaggtaaagcgtattacccctcgtcacttgcaacttgctattcgtggagatgaagaattggattctctcatcaaggctacaattgctggtggtggtgtcattccacacatccacaaatctctgattgngaagaaaggacaacagangactgtctaaaggatgcctggattccttggtatctcaggactctaaatactctaac

SEQ ID NO: 4183 - DNA, 384 bp, Homo sapiens
aaaattacacatcaagagatgataaaaggaataaagaaatgtacttccggagggtattatagatatgatgatatgttagtggtacccattattgagaatacacctgaggagaaagacctcaaagatagaatggctcatgcaatgaatgaatacccagactcctgtgcagtactggtcagacgtcatggagtatatgtgtggggggaaacatgggagaaggccaaaaccatgtgtgagtgttatgactatttatttgatattgccgtatcaatgaagaaagtaggacttgatccttcacagctcccagttggagaaaatggaattgtctaagccaaaagaaagtctaattatatacagagataaagctaaacgtaattattattt

SEQ ID NO: 4184 - DNA, 338 bp, Homo sapiens
ctgaaagcatgctttgttcatacaggtgtttataaccttggaactcctagggtatttgccaagttatcggaccaagttacagtgtttgaaacaagtcagcagaattccatgcctgccctgatcatcatcagtaatgtgtgacaacttggaaatttgtactgaaatccacaataatcagtttttgctggatgggttttacagcagtatttgatatacctaacttgttatggaggttgattgatatctgatccctgcaaaatactttgacttgtcattttgttgatgatgcaaagcacgttggactgagaatacttaacattctttttctgtatttcttt

SEQ ID NO: 4185 - DNA, 539 bp, Homo sapiens
  unsure (523): n=A,T,C or G
ctgatggagaatagctgaaaggtggaaagactttaccaaggaaggtctatataataggttaccacctaagaaatgaaacaactttctgaaagcccgggaaggagatgctctcctgagctcctcatgctccacaaggaggtcaaaatcaccaccctctttcagccactattttaagtttgaaataaacagcaagcttcctgccaccttgagtcttcctttgatgtgcactccctgcaagcaggtaagcagaggtcatctagattaaataggcacagaactcagatttactttctggacctcagcctctttattttaagtagaaataataatacaatatctaccttagagagttctagtgtgtattgtgctagcatagtgcctgacataaagtagggttcaaaattagaagatattttctgctttctttttctgaccatcatcttccttaatatcaaagccgtgccaccaaaatagtgccaccacagacaaggtaatctctagggtataaagtggggtgatctanagagagtaagcgagcc

SEQ ID NO: 4186 - DNA, 261 bp, Homo sapiens
aaaccatctggtttttaagaaatttggtaccaaaaattgatgagtagaggcaaaaatgccccttcatctttctctatatattttccagttgaaaacaaactaagaagtcctttaagaatttataatccgttccccattaacttaatttagcttttccatcactgttaatgatcagagtaacaaagtgtgaaaaataagaaaccatcattgatgttaattaacacatttagatgggccagttaaaacagcttcataagtttt

SEQ ID NO: 4187 - DNA, 514 bp, Homo sapiens
aaagcagtaagtcttaggtatacttacagtatgtctgtaagtcttatatactcagagaactccagccctgcctccttctagctgtgtgaccttgggcaagtgtctcaaattctctgtgcctcgaattatctgtgtctcaaattatctactctgtgagataaggagaataccacctaactcccaggcatgttgggaggattaaagctttcttacatgctctactgcatgaacagggcccagaagggcatctgtgttaggccccatccaagtgtttctgatctggttgacccccagacccccactgagaagcaccacagtgtgctatcaggtacctgtctaaaccagggcagaggaacgagcacacccctaaccacagccatcaaagggagcggcgactgaaggcaagaagtcatcttctagagactgtatattgtgcactaagtaatacttgtgcactaatgagtaatacacggtcctgggctgtcctgggtacacgcaggcacccagtacacgg

SEQ ID NO: 4188 - DNA, 232 bp, Homo sapiens
aaaaacaaaccttgaaatcagtttctcaagttaaaattctgatggatgtcacaaatagtaaggtcttccttactgagctctgtcatctgttttggcttttatgcatactgtgatttgggaggctgctgctcaacattctagcccatttccagagtgttccattattctaggacatggctgtcatgggagtctgcacaaggcaactaatgctctagatttaactgcctttttt

SEQ ID NO: 4189 - DNA, 457 bp, Homo sapiens
aaaaaactaaagtgactggcactaagtgaacttgagattatcctcagcttcaagttcctaagataagggctttcttaagctttcaggtgtatgtatcctctagatgtagacaataatgtcccatttctaagtcttttccttttgcttctccttaaattgattgtacttccaaatttgctgttatgtttttttcctaatactgtgatctatctgatctgcagacaagaaccttgtctctgttgaagagcatcaaggggagattatgtacacattgaaactgaagtgtggtgttactgacggaatgtgcagtaactcctcagatatctgttaaggcatttcccagatgtgatgccagccttcttacctgtactgaaagatgcttagcttagaaaaaaacaaaacagatgcaaaatcagataattttattttgtttcatgggttttcttatttacttttt

SEQ ID NO: 4190 - DNA, 285 bp, Homo sapiens
cctgggatgcagggagaaaggctgaccacaagttgagacaagatacagaaacaaacaaaaacagcagaaagtccgatcgatggtgtaagtgttgtgttcactgcttagggtgcaggtgagcttgatcgaggctcccagtaaggcagatgtagacgggggctgagtcagcacaggcagagcacagagacctgtggagaaaatgaagggcagtaggtagaaggagacccaggccatggttggagggacttccaagagctctattcgagactgcccagtggaacctgg

SEQ ID NO: 4191 - DNA, 294 bp, Homo sapiens
  unsure (160): n=A,T,C or G
  unsure (182): n=A,T,C or G
  unsure (232): n=A,T,C or G
ctgaccaacgagaaggtaggcgatgtggtgctacccccgtgggccagctctcctgaggacttcatccagcagcaccgccaggctctggagtcggagtatgtgtctgcacacctacacgagtggatcgacctcatctttggctacaagcagcgggggccanccgccgaggaggccctcaatgncttctattactgcacctatgagggggctgtagacctggaccatgtgacanatgagcgggaacggaaggctctggagggcattatcagcaactttgggcagactccctgtcag

SEQ ID NO: 4192 - DNA, 478 bp, Homo sapiens
  unsure (168): n=A,T,C or G
  unsure (426): n=A,T,C or G
  unsure (432): n=A,T,C or G
  unsure (443): n=A,T,C or G
  unsure (455): n=A,T,C or G
tgacaggaaaagcagcaatgacaagattacttaagtcttgtgaaataacacttctcttccttgacctgctgcttcccttttttaccacacacacacgcacacataccacagccctttgagactgaaagcagctctattgagaatagtagtgtcaactgtattatgtanaaattctaaagtttttgggattatttcatagccctgaccttgctacttctctccactttatgtggcaggtttaatctcaggtctccctcatacacttctcagcctcagcacctaaccctcacacaacactccagtattgatgcagtcaatcttgtataacattttttgaatgtccaatgtgcaaagcacgatgttggaaattatacagaggtgaataagacaaaaactcttgctctcaaagatgtcagtctttttctntgcaangataacacatntagagtaaaatncataaaggggacttaattttacc

SEQ ID NO: 4193 - DNA, 147 bp, Homo sapiens
  unsure (42): n=A,T,C or G
  unsure (104): n=A,T,C or G
  unsure (124): n=A,T,C or G
gcacgttggaaccgaacagagctctgttgttgcaatgttcancccacaagagcttactggtgaaggaatgggacaagacccatctttatgcaaagccagcgttncagtaatgttccagcatctnataatctatcctggggaattcag

SEQ ID NO: 4194 - DNA, 505 bp, Homo sapiens
aaaaggggtagctcactaaaaatacagcttagcgtaaaaagaaaaaaagacttcagggcaagaggatcctattatctttatgaaaacactgtgcagaaaagtccacagccacttaccctagagtaaagccagctcattaagcagccagcttcctacgctgagaggctctgcctcatcagtcagcccaggcgggaagacttcatgaatgctctgggatggacaccaagctactggaaggggaaatggttttccaagtgtccctgtatgttgctagcagaatggggagaggtctaattcctaatcacatttaccacttaggcccaatggcctggtctgatgagtgagacatctagtgaaatcgatcacagtctgacgcacacactgacaatcatatggaatcatttgaaatgggatctatcacaccatggtccttaatcgttccagtctattgccgcaggaagacacccgccagctcctgctctgggtggggtcaggctggtgagca

SEQ ID NO: 4195 - DNA, 375 bp, Homo sapiens
  unsure (355): n=A,T,C or G
ccattcccccagccttctccatgacgtaggccatggggttgcattcgtacagcagtctcagctttccattggggctcttcttgttagcggggtacagaaatatccctccgtagaccagagtgcgatgaacatcagccaccatggagcccacataccgggtcccataaggagctgaattatctggggggaacttcttcctctggatgtactcagtgacggcagggtcaaagtccttggtgtagccctcgttaaggctgtagattttacctttcttttttatcttcacatccttgtccaccaaaatgaactccccgatggcctttttagacaaggaaggaaaggtggagagatgacnagcgcactgggtcccccagg

SEQ ID NO: 4196 - DNA, 225 bp, Homo sapiens
ccagcagctcgctgatgtcctgcaggcggctcatgttggggaacttctcctggagcagcttcttcatcccgcgactcgcgcccacaggaacaactttgatgctatagtggcggaagtccagctcctgggagtcggggttgtagtcgatgaggaggcagcgcttgatggtgttcaggttcaccttgtgtacgttgatggaggggaacaggttctggaacatggtgg

SEQ ID NO: 4197 - DNA, 248 bp, Homo sapiens
ccatcttctctttcagggacaggctggcctgacatggaaggtgaaacaaggcagcagcccctgcctccaggagaactctgcagactgcagtgccggggagctgaggggtcctgggaaggagctatggagtcccatccagcaggttacagccacatcctctaaatgggcgcgatttgtcctgccacctagaaaaagttcacatgtggacagtgagcagccaaggtctcttcagagggaccccaggccag

SEQ ID NO: 4198 - DNA, 516 bp, Homo sapiens
  unsure (480): n=A,T,C or G
  unsure (498): n=A,T,C or G
aaaggcaaatctttactccttaaagaaaaaatacaaactgtggtatttttaagagatcgttatattttacataatataaacaaaatcactaatgcatctatatgcttggtttccttaaactacaatgaaccacagaatgggtgaaaatgcatttactttttggtggcaaataaacatactggaaaaaacacgtaacacatagcatgcctttttttccttactgtctacacacaggaactgacataaccaagttttaatagccgccacctcctcttccctgtccaaagtagccagttccataggcccccctaccacctcctcgctggaatcccccagatcctctgtagcctccactaggccctctgtagtctcctccagagttgcctctaaagccacctcgggaaactcctctatagcctccaccaacacctgcaccatatcctgcccgaaaggagttggcgctgccaccatagcctccgntaccatagcctccactgntatagccaccgccatagc

SEQ ID NO: 4199 - DNA, 362 bp, Homo sapiens
  unsure (19): n=A,T,C or G
aaatgtgctgcattttatnacataaaagtagttagtaaaaagatatactactaattttaatttaattttaactaaaataaaagatattttcactagaatgcagaatattcctctgaacacttccctcatacatcattcaatattataaattaaacacaaagagcctctccacttagatttttatcatgcatcctacattgtaatgtctttactcttccatagaaaaggtaaaaaatattgcccacctaacaaaaaagaatgtctcatatctttgatgaagcagcaattgatcacatgctttcacatgtgaatagaatgaaaagcatgaagtaatttgagttgaattacatcattcacttttt

SEQ ID NO: 4200 - DNA, 345 bp, Homo sapiens
aaatataatttaagaacccctccaagcaccggcgtccgtttctgggttccaccaccaactaccgcccttttcactacctcaccccacaccccttcataggacacagcttgggggtcccaggcggggtccggggatgtgggatgaccaaggcactgttctggaaacagacatgatgatgggcccctgtttcaacttgggcaaaggaggccatagtgaaacaggttccctccaacacaaagttatgacaaggacggtagaaaaacaaaacgaagaaacaaaaagggaacggggagaaaaattaagaccaaaaacaaaactcaaaaaccttcaatatgaaggcagcag

SEQ ID NO: 4201 - DNA, 495 bp, Homo sapiens
ctgcactgggagagctgagagcctccatgacagaccccagccagcgtgatgttatatcggcacaggtggcagtgatttctgaaagactgagggctgtcctgggccacaatgaggatgacagcagcgttgagatatcaaagattcagctcagcatcaacacgccgagactggagccacgggaacacatggctgtggacctcctgctgacgtctttctgtcagaacctgatggctgcctccagtgtcgctcccccggagaggtgaaggcgcgggcagctccctgagtggtggggctcctctgggtgccacctcttgctgggccaagtctgcagaccagggactcatgagctcgtctccgcaggagcatgcggcgatgctgagtttcatcaaataggacgcagcagaagttgggaagcactgcagaagatgggttgtcttccagaaagaccactgttttggggaacagctcggctctttcttcggccgctggtggttg

SEQ ID NO: 4202 - DNA, 455 bp, Homo sapiens
ccaacagtgccacctgttgatgacgaagagatgctacacttgagtcctcagccaccacagccccagaggtaatgattgtgacctgaaagacaaaaggaggtcttccattccacctgcagtatactctccctccccacaatccaaataaacatccctccaattaaggtgctgggaacaacccagaagagaatggataaaaccgtatgggtcagattaattagcctgaggctcagagctaagtaaggctgggtttcctcccaacttagagcccaatttaatttagggattttgaatcacagaaggacagagctgtaaaaaattccaaagatattttaatcccctcacttgaaaatggacagaagtccatggaaaagtgatttgcctaaggttgcacaacaaatcagggttgaattgagatttagaaagtgtctcttgacctccattcaactgctttt

SEQ ID NO: 4203 - DNA, 465 bp, Homo sapiens
aaaaaacaaaaaattaaaaattacccaaattccttattagaaaaagagacaattacctggttctacttaggatctgtgtatgttctaagtctttctctcctttagaaaaaaagagataatctgattctattttggatctgtgtacattctaagtctttctctcatttagagaaaaacattctcaagtctatagaagaggaaaaaaaattaagattaggaccaacatttcaagctgccttttggaaagaaaattaaaaacagaggtagatggttaattattagtggccaagttactcaggtgactaattttttcttggtacacattcaccaaaattttatacttgaagccaaatagtaaataactttaggagtagagagtaatacctagcagaagttattttctttatgtcaaagaaaagtaatagaagcaaaccaggcttacgacccctgttaaggagatgattg

SEQ ID NO: 4204 - DNA, 396 bp, Homo sapiens
  unsure (387): n=A,T,C or G
ggcgctccgggcctggaatccctacgcgtccctttgggtttagcacgatgagctcaatcggcactgggtatgacctgtcagcctctacattctctcctgacggaagagtttttcaagttgaatatgctatgaaggctgtggaaaatagtagtacagctattggaatcagatgcaaagatggtgttgtctttggggtagaaaaattagtcctttctaaactttatgaagaaggttccaacaaaagactttttaatgttgatcggcatgttggaatggcagtagcaggtttgttggcagatgctcgttctttagcagacatagcaagagaagaagcttccaacttcagatctaactttggctacaacattccactaaaacatcttgcanacagagtgg

SEQ ID NO: 4205 - DNA, 79 bp, Homo sapiens
ggatcacttgaggtcgggagttcaagaccagcctggtcaatatggtgaagcctcatctctactgaaaaaacaaaaattt

SEQ ID NO: 4206 - DNA, 162 bp, Homo sapiens
  unsure (20): n=A,T,C or G
  unsure (21): n=A,T,C or G
  unsure (22): n=A,T,C or G
  unsure (39): n=A,T,C or G
  unsure (89): n=A,T,C or G
  unsure (94): n=A,T,C or G
  unsure (105): n=A,T,C or G
cttttttttttttttttttnnnttttttgatgtataaanaggtttaattgactcacaattttgcaggctttataggaaacatggcgctnacgtntgttcaccctntcgggaaacctgaggaaggttaaaatgatggtgggaggtgaagggcatgtcacatgg

SEQ ID NO: 4207 - DNA, 523 bp, Homo sapiens
  unsure (232): n=A,T,C or G
  unsure (319): n=A,T,C or G
  unsure (346): n=A,T,C or G
  unsure (509): n=A,T,C or G
aaaaatgtagagtttattcatggagcatgccattgaggtttggatggtggcaggtaaaacagaaaggcaagatgtcatctgacattaggctacttataaataaatgtttatctagcttttatttcatgccctaatgaataaaacatgcttggaaaaagaaagtaacaagaagtagtggtatcatactttgtgggtttttttgggtttttttttttttttttttttttttganacggagtctcgctctgtcacctaggctggagtgcagtggcatgatattggctccctgcaacctccacctcccaggttcaagcaattntcctgctgagcagctgggactacaggngcgcgccactacacccagctagtttttgtatctttagtagagacagagtttcaccatattggctaggttggtctcgaactcctgacctcaggtgacccacccaccttggcctcccaaaatgctgggattacaggcatgagccaccgtgcctggcccatacttntataaattattatc

SEQ ID NO: 4208 - DNA, 420 bp, Homo sapiens
ctgtagcctctgcaagtgaaaatccaggccgacttgcagtcattggactgatgtccaagtgcaatcaccatacagcagctacaggcagggctggctgatagggagtatgggagaaggacacgctcagatgaaaacatgcatgcaacgattttcaccactgaacacactgttttctgtgatagaaactgtcggccctgctgggggacaagatattcacggcctcactagccagtgtgatgccaccagggcagcctgcccctgatgctcctttgttacctgctaaagaaggaccataaggtaaaaggcaccttaccttatggagtgagcccagaccccagggaaaagcttgggtagaacaatccaaggggcagcctgggtgtgagaatccagcccaagctagctgctctagaagcctggagg

SEQ ID NO: 4209 - DNA, 266 bp, Homo sapiens
ccttttgatttgctgtctaattctttagcatctcctcctgctggacttccatttttctgttgtgctacaagtgcattcaaaataatttttgttgccccagaccttggcagagtaacatttgtaagaaatggcaagttatttttcttggcaaatgcctgacttgtttctcgcctcttcctgaggaagcccccttctggaaacaaaacaatccattttcgatctctgctcctgtaattattttctaagtgcttcttgagaagcagcag

SEQ ID NO: 4210 - DNA, 552 bp, Homo sapiens
  unsure (510): n=A,T,C or G
ctggaccagagtgagaagtctgggtggggagggaggctgggaactgtcattgccctcaaacctccagtttgcagaggtctgtggggagctagacatttcttaaggaggtgagtgaagttaggattgcatttggtggaactgagggagattccaattccaactgaagctagaaggaagggcagacagtattcctgaacatgtgggaaatatcaagcttgaacctgttagttgaaggtaatactttagttgctactggtgcaaggtctgccagaggctggaggtggagatggaggcatgagagcagagttgagggtaacactatgggagccagccctgactcttaggctgccctggcctccagcatacactggacctgaggaggaagcatccctggagttcctactgacagactacgaggcagtgtgtggccgcagggcccggctggagcgcgaagtccaaggagccttcctccgcttcatggcctgtctgctcaagggctaccgggtcttnctgcgcccactcacccaggccccctccgagggagctcgtgat

SEQ ID NO: 4211 - DNA, 278 bp, Homo sapiens
aaaaacatctattgcacatctaccatgtaggaggaatgtgctcacactggagaacagaaaaaagttttcaatcttcattacctgcccatgaggggcttagtctagctgggaaggaaagaaagaaccaatcaaaaggagtttagtgccacaggagcacagcaaggagagaccaaactgcccaggattcaaggaggatcatccagagatctgtcagggggtttcctctaggtccccttcgtttgtctagaaggccacacaaataaagaaattagattttt

SEQ ID NO: 4212 - DNA, 497 bp, Homo sapiens
ccaggcgagcagggccagcaccaacagcgaaaagtcttggtgacagtgtgtgccctcgatactatgtgacaggaatggctctttacctcctgaacacccatatatacctcagtctaataatgaggaaaaaaaatcttaattcaggggtagaacaaaagacctgaccagcagccaaaactgtcaaggtcaacaaaacaaagtctaagaaaccatcccagcaggcagagcctagagcagcaactaaacgtaatgtggtgctctggacagatcctgggacagacaagggacgtcaggtaaaaattagagaaatccgaataaaatgtgggctttagttaatgaaatatatcaatactggtttattaattgtgacaaatgtcccataccagtgtgagatgctaataataggggaaacagtgtggagtgtatgggaactccagatactgtcttcacaatgttttttgtaaatctaaaactattctaaaataaaagatttgttt

SEQ ID NO: 4213 - DNA, 365 bp, Homo sapiens
aaatctgacttccaagtggcacccctgccgacggtcaaaacgccccctctcctggtgtgtgccctccatccccgcttcctgggggcagccggtttcttgctgtctggacaacagagctctgccaatgccacttatctcgcccgtccaggactttatcaccaactgtcctacttccgactccagcaaaggagcgacagcgagcacgtctgtgcttggctgtgactaacagggcctctgaataaagtgaaaataatcccactttaagctgcaagaggaaagacccacagaaggaaagtccttcacggacggagacccaggatcctgaaatgcagtgcgtcccttcaacgttctgagaataaaaattt

SEQ ID NO: 4214 - DNA, 524 bp, Homo sapiens
aaactaaatatataaatctataatgttaaacatatgttcattaaaagcatagcactttgaaattaactatataaatagctcatatttacacttacagcttttcatttgatcaggtctgaaatctttagcacttaaggaaaatgactatgcataattatacctgaccatgaaaaaaataagtacctcaaatgcatgcatttgcactggtgattctaactgcacaaatctttgtgccatcttgtatataggtattttttacatgggttgacatgcacacaacaccattttcattcagtatgaaccttgaggctgctgccatttttccacttaaccaaaccagcctgaaggtgaacctcgaaacttgtttcataaatctttcaaaagttgttttacatcaatgttaaaatttcaaaatgctgcagggtaatttaatgtataaaatattagtaagaaaaagtatgtattgcatacttagtagaatagatcacaacatacaaattcaattcagtgcatgctttaggtgt

SEQ ID NO: 4215 - DNA, 318 bp, Homo sapiens
  unsure (25): n=A,T,C or G
  unsure (27): n=A,T,C or G
  unsure (63): n=A,T,C or G
  unsure (65): n=A,T,C or G
  unsure (80): n=A,T,C or G
  unsure (88): n=A,T,C or G
  unsure (92): n=A,T,C or G
  unsure (148): n=A,T,C or G
  unsure (165): n=A,T,C or G
  unsure (173): n=A,T,C or G
  unsure (202): n=A,T,C or G
  unsure (215): n=A,T,C or G
  unsure (230): n=A,T,C or G
  unsure (244): n=A,T,C or G
  unsure (272): n=A,T,C or G
  unsure (295): n=A,T,C or G
  unsure (298): n=A,T,C or G
  unsure (302): n=A,T,C or G
  unsure (311): n=A,T,C or G
ttttttttttttttttttttttttngntggaaaccaacattttattgagcactcctgctcctngnaatctattccagtanattcttcnccgngggcatcacatatcacacaggggtgtgaccagcactccccctgctacctgccgtgngggcaggggcaggagtnaatggctnttcctgggcacaggccacagttaaccggngacaattgcaganccataggaattcatnttttaaaaaaaacnaaaactggaataaaaaaaaaacaaaaancctgagtataaaacctcagcagngtnccancactatctnggggttt

SEQ ID NO: 4216 - DNA, 599 bp, Homo sapiens
cctactatcagaaccaaccaatcaaaatgtccacttaactaagcagtgagcttaaaactgaaacttaaaactgtccatttaagtaagcagtgagcgtaaaactgatttacatcctagtgtaacctcattatcttgtgcagacaaacagtttacaaagtgtcaggccaggaccgcattttgagtagcaccggtacagaggaagagctcaatgatgagattctagatgagtacttcccaagctatctgtggtgaaaggccaatttttatttctaaaagaggtctacactgtgtaaataggataaaaatgaattataagaaaaataaaactaaaatataaaacaagtcctaaatttttatttttagcttcagacaaaattactccaattacaataaaagtttctgcttactcccaaataagcagacattctttagttataggaccagaatgagtctatgaactgactttcagtagcaatgttctgggcagtatcctgacgaagtatatgcttaaaattaaggtcaaacagcaaggttacagaagcttagtcctatgagaaattaacaatggaggcatataatatactagttaaccaactgag

SEQ ID NO: 4217 - DNA, 79 bp, Homo sapiens; identical to SEQ ID NO: 4205

SEQ ID NO: 4218 - DNA, 541 bp, Homo sapiens
  unsure (525): n=A,T,C or G
ccaggatggcctccatctcttgacctcgtgatccacccaccttccctcccaaagtactggaattacaggcattagccactgtgcccagccgaggctgtcatttttaaccggctctggatgactctgatgcagccatcctggaccttggctgtggtctggtaactggaacccagtgacgtaatcaggtgccatcgggggtcatgggaaagggggatccccaaggtctgaggtggactaggaagactttctgaagaacctgggtctgttagggcatcagccaatcaaggtacaagtaaatagaggcaaaatgagggtttgaactgtgagcagttggtcctggaaaagaaagaaaccaagagattatggggactcaatgggcttcttaagagagaataagttgaaatcaatgaccagaagaccctgatggaagtggaggagaatcatctcaggcaaactttttgtgtgccagtaacagaaaccctctttgtgtgatcacatgcaaagtataggatatttgcaatatanccatggggaggagtgc

SEQ ID NO: 4219 - DNA, 527 bp, Homo sapiens
  unsure (20): n=A,T,C or G
aaagatacaaaaaatcttgnatttttttttgtgtgtgtttacaagtagtaaatttattttcagaaagccagatttcttatatttgcataggcaatgaccagaaattcactcaataaatagtaagacaatgtaaactttatagaaaaaaaaaaaactcactcctctgaggcagagcccaaccttaggggtagagaggagtactgtaaataaatgttttaggagggaaataattccactcaactttcaacatttcaagtcttaaatccattggcagcatgtatagcaagtgggctaaaaagccagcctccaccaacagtccagcccacactacacatttcctttcgccaataaataccccagcctatgcttttagtaagaatcagcataggtaagcgcatgcttcaatgaaaaatagtcacaagcaaagagaataaaaccttttgtgacaatttcttgaaagctatgcttattaatactatgcagaatatttatatacagcaagaaaaagtttgttgcatttcaacttt

SEQ ID NO: 4220 - DNA, 511 bp, Homo sapiens
aaagcaatgttgtggatgtgtgaagagtttcccctctctctggtggagcaggtcattcccatcattgacctaatggctcgaacgagtgctcattttgcaagactgagagatttcatcaaattggaattcccacctggatttcctgtcaaaatagaaattcccttgtttcatgtcttaaatgcacggattacatttggaaatgttaatggctgtagcactgccgaagaatctgtatctcaaaatgtggaagggacccaggctgattcaggaactttcaggaccagcttcgaatggagggatcagccagacaaacacctatgacgcccagtatgagagggccatccaggagagcctcctcaccagcacagaaggcctgtgccccagcgccctgagcgagacaagccgttttgataatgacttgcagctagccatggagctctctgccaaagagctggaggaatgggagctccggctccaggaggaagaggctgagctccagcaagtcttacag

SEQ ID NO: 4221 - DNA, 458 bp, Homo sapiens
ctgctggataaggatgcctgaactttaatcatctttagcagaactttagctaataggtatcaagtgatcatcacttcttttcctcctccgacagcagatgcaggacaggaaggctgaggactctttctgatactcttctttgctactgcattccttcaggaattcctgcaaatccgtttcaggaaacccattctgttggaatttctttagaaagtacacaatgttgttaccttatttataaggcatgagaaattgctcttttgtcaacaaaccaagcccacctttgctaaaataaaactctcccacattgctagctcagatccaagaactgatatttacaatgatgaatcaatctgtcagtcccagaacaccaaggcagggccactgtgggaacagagaacaatccaaagaaaaacttcagaaagaaagcagagaagagccagggagaggtttttttt

SEQ ID NO: 4222 - DNA, 561 bp, Homo sapiens
  unsure (414): n=A,T,C or G
  unsure (417): n=A,T,C or G
  unsure (446): n=A,T,C or G
  unsure (506): n=A,T,C or G
ccttccctgaccattctctctaatggactgcatccatcattctcagtctaacacatacctcattttcttcatagaactcttcaatatctgaggtgttccaagtatttacttttgtgttatctcccctatcaaaatgaaatcactatacgagcagatacttttttcattgttactatgcacaacacctagaacagtgtctggagcatgtgttacacatatttgctaattgttagaattaacaaacgaattcagtgtgttctaaccagaaactgtaaactccccattttaatatgtagtctcatccatccttctttaccttttaccagggcttggtgtgtactttctaggctggtgaatgagggcctcaacaaggagtacagaaggagaattggaagtgaagttgcacaagccagnggntctatctattctatgatttttccccttgntctcagtataacagaaagttgcctttctgcccactctagctttttttggtcgaagggcangggtatgggtggcaggggtttggagaaagaggggagtcctcatcattttggcaat

SEQ ID NO: 4223 - DNA, 302 bp, Homo sapiens
aaaatgaaaagtgatcaaaagcaggtacattacaccctataccatattatgtatgggaatacatttcatatttctcaattatgatttgccaattttaccttctacattgagcccttctatggtccatgctcatcggctcaccaatggcatacactcaaaggattcctctttatgggtaactatctcaggacctgattttatgagctatgatttggtgcttgcagcatcttcagcactgtgtgtgaaaatgaaggcagtatttttgaatatttttctttgttgcagagataagcaggagtttt

SEQ ID NO: 4224 - DNA, 452 bp, Homo sapiens
  unsure (16): n=A,T,C or G
  unsure (17): n=A,T,C or G
  unsure (324): n=A,T,C or G
  unsure (327): n=A,T,C or G
  unsure (329): n=A,T,C or G
  unsure (350): n=A,T,C or G
  unsure (351): n=A,T,C or G
  unsure (353): n=A,T,C or G
  unsure (363): n=A,T,C or G
ctgtgctccattgaanngacttgtgaatcagccagtgtgatggctgcgacactggctaatggtggtttctgcccaattactggtgaaagagtactgagccctgaagcagttcgaaatacattgagtttgatgcattcctgtggcatgtatgacttctcagggcagtttgctttccatgttggtcttcctgcaaaatctggagttgctgggggcattcttttagttgtccccaatgttatgggtatgatgtgctggtctcctcctctggataagatgggcaacagtgttaagggaattcacttttgtcacgatcttgtttctctntgnantttccataactatgataattnnanacactttgcnaaaaaacttgatcctcgaagagaaggtggtgatcaaaggcattcctttggaccattggactatgaaagtctccaacaagaacttgcttt

SEQ ID NO: 4225 - DNA, 387 bp, Homo sapiens
aaagcattagctatgcttcatctgcatgctactatattttagaatctcatttttaggaattactatataaattgattacatattcttttgaagaacctcagtaataggaaatctatggcctctgagagtggatttactttttgataacagtcaaatcctatgactattgtgtaaaggtgaaggacccagctaggcaattctgcttggggttaaaataataataaatgtacctgaaaataaggaggttgacttcttatacagcagctacacaccagctcctcaaacacgcctacctcaggacctttgagcttaatgctctcactttgtggaatctttttatagcatgttctttttcactgatatgagttacaggtcacttaaaaaagg

SEQ ID NO: 4226 - DNA, 233 bp, Homo sapiens
aaattgtttcatatcaaaaaggtcaacatcttcacctggtcctttactcatctgaaaaacatcccaaactttctggtgctgatgaaattgcatataaatgatgtctaacagggcagcatcactgatacttgcacgcttttcctcacacagatggatcaagtgctgaactacagattcctttctctgtcggaaatttacagtctgcagttgattttcagacaaaaaatcccagg

SEQ ID NO: 4227 - DNA, 510 bp, Homo sapiens
cctagggaggccaggcaagaagcagaggacagtacgtctcggctctctgcggagtctggtgaaaccgaccaagatgctggggacgtgggtcctgatcccattcctgactcatactatgggcttcttgggaccttgccctgccaggaagcactgagccacatttgcagcctgcctagtgaggtcctgaggcacgtgtttgccttcctcccggtgggagacctctattggaacctgagcttggtgtgccacttgtggagggagatcatcagtgacccgctgttcattccttggaagaagctgtaccatcgatacctgatgaatgaagagcaagctgtcagcaaagtggacggcatcctgtctaactgtggcatagaaaaggagtcagacctgtgtgtgctgaacctcatacgatacacagccaccactaagtgctctccgagtgtggatcccgagagggtgctgtggagtctgagggaccaccccctcctccccgaggctgaggcgtgtgtg

SEQ ID NO: 4228 - DNA, 438 bp, Homo sapiens
  unsure (10): n=A,T,C or G
  unsure (11): n=A,T,C or G
  unsure (19): n=A,T,C or G
  unsure (20): n=A,T,C or G
  unsure (256): n=A,T,C or G
  unsure (343): n=A,T,C or G
  unsure (377): n=A,T,C or G
  unsure (378): n=A,T,C or G
  unsure (387): n=A,T,C or G
  unsure (389): n=A,T,C or G
  unsure (420): n=A,T,C or G
  unsure (429): n=A,T,C or G
ctacaatccnncactaacnntccatgtccagggtaaggatcgagatcgagaagcccacactgccagtgaaaaagctacgtctttactgcataaattagaggaagcaatttcggaacaacggaaccttcaaactataaatactgaattatcgaacacttgccaggcacttcagcagaagacaaggaaactgaagacaacaattgagtcacttcaaaaggagttcattgaaggggaacaccatggcttgctgtttcanagctttttagatgaggaatttcctcactatgattccctgtcctgcgcagatgcaattcaacaacctcttcaagaaaaattgaagcantgttgccacaaactatatggtggtcaagaagcannaatacatcnanacacccctgaccttgaaacatacgtgctggnacacacctntgctggatg

SEQ ID NO: 4229 - DNA, 427 bp, Homo sapiens
cctgcattgaggccaagcacgtgagggtgccccccacccacatgtgggtctgtgtgtgtgcgcgtggcgtgagagcatccccgccttgtgttgggtctgtgccccatggaggagggaggtggggtgtctcccccaagcacagcactcaactcttcacaggacaagtacatggcggacatggacgagcttttttctcaggtggatgagaagaggaaggtgagtgtgtgtcgcttgctgccgatggctggcaggtgctcgtgcagtgccccttttcagcctctgaccgtgtgcccctgtgccacagaagcgagacatccccgactacctgtgtggcaagatcagctttgagctgatgcgggagccgtgcatcacgcccagtggcatcacctacgaccgcaaggacatcgaggagcacctgcaggtgagg

SEQ ID NO: 4230 - DNA, 476 bp, Homo sapiens
ctgggggcgcagccgctgcccttccccggcatggacaagtcgggcgctgctgtctgtgaattctttttgaaagctgcctgcggcaaagggggcatgtgtccgtttcgccacatcagtggtgagaagacagttgtgtgcaaacactggctgcgtggcctatgcaagaaaggggaccagtgtgagttcctgcatgagtatgacatgaccaagatgcccgagtgctacttctactccaagttcggggagtgcagcaacaaggaatgtcccttcctgcacatcgaccccgagtccaagatcaaggactgtccttggtatgaccgtggcttctgcaagcacggtcccctctgcaggcaccggcacacacggagagtcatctgtgtgaattacctcgtgggattctgcccggaggggccctcgtgtaaattcatgcaccctcgatttgaactgcccatgggaaccaccgagcagcccccact

SEQ ID NO: 4231 - DNA, 258 bp, Homo sapiens
cctgggatgcagggagaaaggctgaccacaagttgagacaagatacagaaacaaacaaaaacagcagaaagtccgatcgatggtgtaagtgttgtgttcactgcttagggtgcaggtgagcttgatcgaggctcccagtaaggcagatgtagacgggggctgagtcagcacaggcagagcacagagacctgtggagaaaatgaagggcagtaggtagaaggagacccaggccatggttggagggacttccaagagctc

SEQ ID NO: 4232 - DNA, 254 bp, Homo sapiens
  unsure (105): n=A,T,C or G
  unsure (223): n=A,T,C or G
aaagtattggtgtttggagggaggcttataggaggaaagttggcttttagaagatcacatcaaggtaagcaactagttctatattctttttttgctgttgcttangaaaattttaattttccttttcttctgtagaaagtaaaatatgaattctggatattttgttacaagattatcctagtttttagagagctcaataatactaacacctcatgtatttcangctgcttcaggtctaattcaaccataaattt

SEQ ID NO: 4233 - DNA, 497 bp, Homo sapiens
ctggcttgtgaaatgagacaccttgaccaatatgctttgggtggacggtctcctacatgttcagtggaggccaccaggagcatccatgagcggggaaggggtccacacccttacatggcaagttgatacgatggggtgcttggtggatgggccatggaggtccgtgagctggaactgggcacacgccatcccagagggctcaggatgccccaggaaggaaagaagggcaacagactacacgattggacgtgtgtggttgactgggatgaagttggagggaggggcagggccttgcaggggattggtactgatcccagggaggaagtgttggggcttcatgaactaggatgaaaggaggcccctgagccatgacaaggggcacatccaggatttccgccaccctgaatttagtagagctagtaggccctggtcgtcactctgggcagggatgccgtcagccttgagggtcgccacccacctgtgtgttgccctctgtc

SEQ ID NO: 4234 - DNA, 366 bp, Homo sapiens
aaaggccgagaactggaaacagcctttcctccattttctgtgtattggtgatgggagtgataaccttttgggggagctttctaaatctcacagaagaggaaagtggcctgctctggcaggtatgtgcaagatacagtgtgtttcatctgttccggtgccaagaatgagcactgtactgtggcagttccctttggatttgtatgtgctctgggctcatgaagatattgcatcgtgagctgcagcagttgcactctttttcagtgacctaaaaatggcttatttccgaggaatgaaaggctgccatcattggctgtgggtgtgaaaaacctttcctagcttagagcatttgtatctacaatacatttt

SEQ ID NO: 4235 - DNA, 456 bp, Homo sapiens
cctcacactttcccatgaaaagggtgaatgtatataacctgagccctctccattcagagttgttctcccatctctgagcaatgggatgttctgttccgcttttatgatatccatcacatcttatcttgatctttgctcccagtggattgtacagtgatgacttttaagccccacggccctgaaataaaatccttccaagggcattggaagctcactccacctgaaccatggcttttcatgcttccaagtgtcagggccttgcccagatagacagggctgactctgctgccccaacctttcaaggaggaaaccagacacctgagacaggagcctgtatgcagcccagtgcagccttgcagaggacaaggctggaggcatttgtcatcactacagatatgcaactaaaatagacgtggagcaagagaaatgcattcccaccgaggccgcttttttagg

SEQ ID NO: 4236 - DNA, 408 bp, Homo sapiens
  unsure (16): n=A,T,C or G
ccagaggggccgtaanactggtacaagtttacaccataagaggcgacgtggtcagccacaatgtcttcacctccacaggggctcatcacggtggtcagggcaagggtccccagcatcagagctttgtttaggatcatcctcttcccaaggcagtcttagcagttgctgttctgagttgtagagcaattgtgaggacctcgagacaaggcaatctgaagacacccaaaccaaaccctgccaagtcaggttttggctaattagaaaaatcccctatgatgacacctcagttactagttgaagagtttgtattaagagccctggaaggagacagggcaatccccttgttgtgatgcagcctccactcagagtggacttgaggaaaatgttctagggatctctgctggtggt

SEQ ID NO: 4237 - DNA, 558 bp, Homo sapiens
aaaacataattcttgaaaggtatatgtacaggtatatatgaactcaaagcatgagaaatacaaagtatcaaataaaataaaaagagacagagagagtgatatttaccctccctaagtagaaaagtataaagctgtacctacctgataggaaataaccaacaaagagaggttttgccctccaaatggtatcatgttggggctctgtagcttttctttgcctttttttttgtcaaaaataatggaatggagaggctggaaaattgagaagagcagaaagagaaaattctcgtaggtctattgaaaagaaagttgaataaggagtgatttcaagagctaaggctcacacagcaagcagctaagagggactgcaaaggcttttgacaccaaggtggcctcaggtgaagagcaagtcccatatggatcccactgtcactggagtctctgcatacagtttcggttggaataaactgggaaagaaaaatgttagggatgcatagggaaagtgctaagaggaagaaaggagtgaggaaagctcaggctggctgtccaggcagacct

SEQ ID NO: 4238 - DNA, 370 bp, Homo sapiens
  unsure (47): n=A,T,C or G
  unsure (52): n=A,T,C or G
  unsure (62): n=A,T,C or G
  unsure (119): n=A,T,C or G
  unsure (141): n=A,T,C or G
  unsure (146): n=A,T,C or G
  unsure (151): n=A,T,C or G
  unsure (175): n=A,T,C or G
  unsure (176): n=A,T,C or G
  unsure (197): n=A,T,C or G
  unsure (234): n=A,T,C or G
  unsure (243): n=A,T,C or G
  unsure (245): n=A,T,C or G
  unsure (247): n=A,T,C or G
  unsure (257): n=A,T,C or G
  unsure (262): n=A,T,C or G
  unsure (266): n=A,T,C or G
  unsure (276): n=A,T,C or G
  unsure (284): n=A,T,C or G
  unsure (286): n=A,T,C or G
  unsure (326): n=A,T,C or G
  unsure (346): n=A,T,C or G
aaactatgaaggttgagaacacctgaagttttagtgttgaaatgaancatanacatactgcnaagttaattcaacatatcatttatttgaaacattattgtggtgttcatggtgattanaccatattgttaaacaatctanatgcnttttnatagttaaattgagcatttctgcnnaaatagaaagtcaaatgcctnatgtcttcacttataagtgggagctaaataatgtgtncacattganananattgtggagnaatanactntggagactcngaaaggtngnagggtgggattgagagatgagaaattgcctaatggctacnatgtacactatttgggtgangcttacgctaaaagcccaaacttc

SEQ ID NO: 4239 - DNA, 301 bp, Homo sapiens
  unsure (121): n=A,T,C or G
  unsure (126): n=A,T,C or G
  unsure (174): n=A,T,C or G
  unsure (264): n=A,T,C or G
  unsure (267): n=A,T,C or G
  unsure (291): n=A,T,C or G
ctggggatggtccccaaggttctggggaagcagctagaactggtgactctggagatgaggctgaaggtggccccaatgtttccgggaaatgagactgcttctggggtttgggattactaanagtancctttactgactcaggagatacaggggcaggtttctgtggttctgganaaggaacaggggcaagtttctgagactcacaaacagggactgattttgggggttcaggagaagaaacagaggcaggttttgaaggctcanganaaggaagaggtgtctgtagctcangagaaacaac

SEQ ID NO: 4240 - DNA, 367 bp, Homo sapiens
aaatggagctaagtccaagaaagtacttgaagctctcttccagcgagcttaattgcgtaatccctgttgtcctccagggtaagctgacacgtctacataactggttttccacaggcatcttcagttattgcttgtcgggtggactgttttggatttaaccatgtaatccatgggaccaattgagagtcagctacttttataggcatcaaagtattctcagacacctttaatatctttatgaaaacttaatttttggccttttatcaatatgtcataacagcattctgaagtcagacattgttaaattgagctattaaactaatgagttttatgtaagttatatggtcttaatttggtacttgtaaat

SEQ ID NO: 4241 - DNA, 373 bp, Homo sapiens
tttctagaatttggtgcaggaatatgtgttcatatccaggcaaacgggtgtgtttttatcttcagacaatgaaaccttctcctctggggctttgttgccaggaagattagaactaaatttatttttttcatttctgtcatgaaatcattccagatacctcttttcttctttccaaatggttttcacatgtgtttgaaatatttgtactttgaattgtcggattttccatgtcctcctttctcctttgtgcccagcctgagtcagcaccatcccgcattcagaacctcccagtgaaagggcagccttcattttgagaaggtggaaggtgttagggtttgggagacagctcatccaatctcccaagtctcatggt

SEQ ID NO: 4242 - DNA, 206 bp, Homo sapiens
aaatccagcagccaagtggtttcaacagactttctacttgaggtgaaaataataacactacaaacatatggcagagcttcgtacaagcatttcactcacagaggagtttatggtttcgaggatgtaggaaaagattttccaagtgtgaaaactaaatatatacaaaagcaatacattttgttattagttaaataaaatgtgtcttt

SEQ ID NO: 4243 - DNA, 368 bp, Homo sapiens
  unsure (156): n=A,T,C or G
ccatgtggtgagttcagggcccaaatcaagtagtaccagcaatcagggaactcctatctgttttgaatggattcacaccagccacaagcctggaaagatggtgtcacaatctacagtcaggcaggattctcctgtggagccctgggaagggatcancgatcactctggcattattgatggttcgcccagactcctgaacactgaccatcctccttgccaattagacatcaggctcatgaggcacaaagctgtctggattaacccccaggatgtgcagcaacagccgcaggacttgcaatctcaggtgccagcagcagggaacagtgggacccattttgtgacagatgctgcctctccctcaggccctt

SEQ ID NO: 4244 - DNA, 190 bp, Homo sapiens
  unsure (18): n=A,T,C or G
  unsure (20): n=A,T,C or G
  unsure (80): n=A,T,C or G
  unsure (85): n=A,T,C or G
  unsure (99): n=A,T,C or G
  unsure (100): n=A,T,C or G
  unsure (103): n=A,T,C or G
  unsure (110): n=A,T,C or G
  unsure (124): n=A,T,C or G
  unsure (127): n=A,T,C or G
  unsure (132): n=A,T,C or G
  unsure (145): n=A,T,C or G
  unsure (152): n=A,T,C or G
cctctattcaaaggcaananactctgggaaatgtaatcttcctctactggaaaaggaaaatgacactgtatgttctatancattnacttattataaggnnagncattganaacaatgaggttgnttngatanatcaaaaagaatnagaaatnccgctgggcgtggtggctcacgcctgtaatcgcaaaac

SEQ ID NO: 4245 - DNA, 373 bp, Homo sapiens
gcaagctggaactctttctgcaaatgactaagatagaaaactgccaaggacaaatgaggagtagttagattttgaaaatattaatcatagaatagttgttgtatgctaagtcactgacccatattatgtacagcatttctgatctttactttgcaagattagtgatactatcccaatacactgctggagaaatcagaatttggagaaataagttgtccaaggcaagaagatagtaaattataagtacaagtgtaatatggacagtatctaacttgaaaagatttcaggcgaaaagaatctggggtttgccagtcagttgctcaaaaggtcaatgaaaaccaaatagtgaagctatcagagaagctaataaatt

SEQ ID NO: 4246 - DNA, 375 bp, Homo sapiens
aaaaagctggatattgtggaagatagtatttatatagcttatggacccaatgggaaagcaactggcgaaggctttgtagagttcagaaatgaggctgactataaggctgctctgtgtcgtcataaacagtacatgggcaatcgctttattcaagttcatccaattactaagaaaggtatgctagaaaagatagatatgattcgaaaaagactgcagaacttcagctatgaccagagggaaatgatactaaatccagagggggatgtcaactctgccaaagtctgtgcccacataacaaatattccattcagcattacaaagatggatgttcttcagttcctagaaggaatcccagtggatgaaaatgctgtacat

SEQ ID NO: 4247 - DNA, 340 bp, Homo sapiens
  unsure (31): n=A,T,C or G
  unsure (76): n=A,T,C or G
  unsure (145): n=A,T,C or G
  unsure (315): n=A,T,C or G
  unsure (318): n=A,T,C or G
  unsure (324): n=A,T,C or G
ctgccccaaccactttgagggccttttccgntacaagagtatccctgtggaggacaaccagatggtggagatcagngcctggttccaggaggccataggcttcattggtaagggggcacctctgcccagaaatcccgaggggctncagaggagaggactgggggcacctgtctcctgggctgtgcacattccgtctgacaccactcccccatctcccttgcagactgggtgaagaacagcggaggccgggtgctggtgcactgccaggcgggtatctcgcgctctgccaccatctgtctggcatacctcatgcanagncgccgngtgcggctggacgagg

SEQ ID NO: 4248 - DNA, 178 bp, Homo sapiens
  unsure (12): n=A,T,C or G
  unsure (26): n=A,T,C or G
  unsure (106): n=A,T,C or G
  unsure (118): n=A,T,C or G
aaaattaagtanaacaaaaaacccancgcacctgttagagtcgtcactctctattgtcatggggatcaattttcattaaacttgaagcagtcgtggctttggcagngttttggttcanacacctgttcacagaaaaagcatgatgggaaaatatttcctgacttgagtgttccttttt

SEQ ID NO: 4249 - DNA, 262 bp, Homo sapiens
ctggcttgcctgctggcctgcttcctggagataggatgctcagacccaccgctgctcttcaggggtcgtggaaggaattaatgcacttccttctgtcccccaatctccgtccctttacgtgtctctggagctgagcaggtattctttttctttcttcatctcagtagagcttttacttttatccagcatttcttagctcggttggcaaactggatatttatgcacctgcatttcacaatccatctccaccgattattcctgg

SEQ ID NO: 4250 - DNA, 176 bp, Homo sapiens
  unsure (12): n=A,T,C or G
  unsure (29): n=A,T,C or G
  unsure (42): n=A,T,C or G
  unsure (72): n=A,T,C or G
  unsure (77): n=A,T,C or G
  unsure (83): n=A,T,C or G
  unsure (86): n=A,T,C or G
  unsure (95): n=A,T,C or G
  unsure (114): n=A,T,C or G
  unsure (132): n=A,T,C or G
  unsure (136): n=A,T,C or G
  unsure (168): n=A,T,C or G
aaatgggactgnaaatatgttttggtttntaagctatattancaaaatttatttttcaaaaatgcccactgngatgngaatgncanaatatattnttaagtgctttataactanttgtaaactttttttcanaagncttattttatacttgtgaaactgaacacaatnttgggaca

SEQ ID NO: 4251 - DNA, 373 bp, Homo sapiens
cctcaagtttcgggctgaagccaacagagtcccaaccagtgggcgtatcccaagatgaagaattttggaatacatacgagggtctgcaagaacagctcagcaggaatactcataaagagactgagcctgtgtatgagagggctgtgcctactcaacagattctagcttttcctgagcaaacaaacaccaaagactggacagtgacacctgagcacgtcttgcctgagtcccagcattgtttgtgctccccaaacctaaagtgatctcctgtctagagcaaggggaagagccatgggttcaagtatccccggagtttagggatagtgccggaaaatctcctacagggttaaagctcaaaaacgacactgaaaat

SEQ ID NO: 4252 - DNA, 302 bp, Homo sapiens
aaaaacaattcaacacacgtactgaaagttgctggtatacagtggtgagcaaataatagcagaccttcaggagcttatattccaaggacagggatggacattgataggagaatcacacaaacaaaacgcaaagtcacatcaggaagttctgggcagcaccttgcagaggtggtggttggatggaccatctgtagggagtgaagcaggagttacctgagtgattcggggaggaggggcccttcacatgtgcaaaggcccagcgcaggaagtgacgggagaggaaggccggggccaaactgcct

SEQ ID NO: 4253 - DNA, 376 bp, Homo sapiens
ccaaaccagactcttctctggtttgttcttcagaccacgaggtggaaccatctcttcaaaggagccctgccaccatcaccaaagctcacaccagaaaaaaccgccatttacacaacaaactgaacctgaaaaaggaacggaacatggtgcttccgccgtgaacaaaatcagcaagtgaatccgttttcctttcccgggctgttcgaaaaagattcggctagagaaaagggggcactgtgggcagcccgtaggggatggcctggagctgtggggcccgggctgagccctccctgccttttaactgcaggatgtaaactctatggaaatgtatagaacttcagtttctcccaaccctccacaacctcaactcttgaga

SEQ ID NO: 4254 - DNA, 365 bp, Homo sapiens
  unsure (10): n=A,T,C or G
  unsure (34): n=A,T,C or G
  unsure (134): n=A,T,C or G
  unsure (142): n=A,T,C or G
  unsure (210): n=A,T,C or G
  unsure (217): n=A,T,C or G
  unsure (222): n=A,T,C or G
  unsure (301): n=A,T,C or G
aaagaggttntttatacttttgtatttgaatagntatgtttcactgatgctgagccagtttgtgtgtgtgtgcatatatgtgaactgtaactgacaagatgaattactcagtttctctttctctaaagcttgtntgatgaanctggttggtcctttcagtgaacaaaaatatgaccccaaatctgtttgctctggcttttatttcttcangaagcanacttncacttaaatgccattttgtgattgtgtcaatcatacacattttatttacttcagagtttgaatagagagtacacatttnttctgcagatttatttcatgatgagtttgagttgcttagcagggcgtgtgggtcccgttgaagt

SEQ ID NO: 4255 - DNA, 376 bp, Homo sapiens
aaagccagtgctctaagacctcagcttttatctcagaaccccatgggttccagaccaagagtacaggaaatcaaattgttgtcctgtctgtctatagcttggaacagggagctttgattactgactccggttccacacactgtaagatcaaaaaaccatctccacatttgaaagagatgcaaggtgtattcatagggatggtggctcaacaaatcaagcaaactggaatcaaggggagggggaagggaatgaaatggaaagggaggctgattcccttcccctgacttaccactaatttactaggctacctactttcatgagtaacctctcacagctacccagcacatgccacaatcctatgctcttgccttctttt

SEQ ID NO: 4256 - DNA, 373 bp, Homo sapiens
aaaaattcttttaatagatcatgttattggcagtatttatataaaaaccatggatttagaaaggtatatttagctttattataatagatacgttactattttggaaatatatatattttcacacctgtagtactcttccccatttcctctgacactcatgcagaatgagatcaggcatatttgtggttgacatactctagatagcttttccaacaaatctttgaaaagcaatcttggaaaggaattcattaactaaatggggtaaaaggtttctttttctttgagagttaagtccttcctcaaaaaattttcttatgctccataaaattgaggtagaatattttcattattcttgcagctaagcaagacagcc

SEQ ID NO: 4257 - DNA, 378 bp, Homo sapiens
  unsure (157): n=A,T,C or G
  unsure (163): n=A,T,C or G
  unsure (289): n=A,T,C or G
atatggtggaggaaactatggtccaggaggcagtggaggaagtgggggttatggtgggaggagccgatactgagcttcttcctatttgccatgggcttcactgtataaataggagaggatgagagcccagaggtaacagaacagcttcaggttatcnaaatancaatgttaaggaaactcttatctcagtcatgcataaatatgcagtgatatggcagaagacaccagagcagatgcagagagccattttgtgaatggattggattatttaataacattaccttactgnggaggaaggattgtaaaaaaaaatgcctttgagacagtttcttagctttttaattgttgtttctttctagtggtctttgtaagagtgta

SEQ ID NO: 4258 - DNA, 372 bp, Homo sapiens
gatggagctcctattgtctatcatcactggctgcccagaatatttgtacaagtaaactgcactgccctgctgcccctgagcacacggacccgtccgaaccgcggggcagtgtgtcctgctgctccctgctgcggggactgtcctcagggtggtcctcacctctgcttccggcccctgtgtgcaaccctaacaaggccatcttcacggtggatgccaagaccacagagattctgatgtggtggaggccctcagcgaggagcacatggaggccgacggccacgctgcggtggtgtttggcacggtggtggacatcatcagccgtagtggggagaagattccagtgtctgtgtggatgaagaggatgcggcagga

SEQ ID NO: 4259 - DNA, 372 bp, Homo sapiens
  unsure (66): n=A,T,C or G
  unsure (91): n=A,T,C or G
  unsure (106): n=A,T,C or G
  unsure (149): n=A,T,C or G
  unsure (215): n=A,T,C or G
  unsure (246): n=A,T,C or G
  unsure (277): n=A,T,C or G
  unsure (284): n=A,T,C or G
  unsure (333): n=A,T,C or G
  unsure (364): n=A,T,C or G
  unsure (366): n=A,T,C or G
cttttaggctaagttacaaaattggggaagaggagctcataggtatattttcctaaaaaacagtanagagttgatagcaatttggcagccnaatctttggctattntttagatttcttcctgaagtccaggctccaagaacaagatgtntggagaagatccacttctttctatacccacatgtgcaacccctgggtctccctgttgggggctgtngggtcccttctcatcatgtttgtgatacagngggtgtataccctggttaacatgggtgttgntgccatngtgtatttctacattggccgggccagtccagggcttcaccttggatcancctccaacttcagctttttccggtggatgangnctctct

SEQ ID NO: 4260 - DNA, 376 bp, Homo sapiens
aaaaatgattacccaccaataacaaaattggcaaagtatatcttgaaatatagcttatgctcagacaaaaaaagtactactagcagacttacattaataagtcacagttttgaacagaaacatgtaaatactccaaggttcaaagtaccacatttagaaaatgttttgaattaaaaaagacaaaataagagtaccatggtttttaatactgatgaagcaaagtgtatccctcaacttcaaggtggcaacttgcttcgactgcttatttacagttagggtttttaggacaaaagtaaatttctagggtaaaaaagtcttcaaagagttgcttgcccaaattccatttggctagcaggcaataaggaaacagcaatga

SEQ ID NO: 4261 - DNA, 374 bp, Homo sapiens
aaaattagtcccctttatgcattttactctacatgtgttatccttgcaaagaaaaagactgacatctttgagagcaagagtttttgtcttattcacctctgtataatttccaacatcgtgctttgcacattggacattcaaaaaatgttatacaagattgactgcatcaatactggagtgttgtgtgagggttaggtgctgaggctgagaagtgtatgagggagacctgagattaaacctgccacataaagtggagagaagtagcaaggtcagggctatgaaataatcccaaaaactttagaatttctacataatacagttgacactactattctcaatagagctgctttcagtctcaaagggctgtggtatgt

SEQ ID NO: 4262 - DNA, 371 bp, Homo sapiens
ctgaaggtctgtgcgttctttctctattaggattatttcatccttcaacttggaaacaatcttcttgtcaggttttggtgcattttgaatagaatttagagcttgccttttatattcaagtttctcatttagttctcgcagtttgtttacagcaaaactggcttgttcattgatctgattggtaccatcatccacggcttcctcaccagcctcatctcttgggcccatctcatccttgttggaaatcatctgtgaggcatgtttttcttcctcttttatcaacaatttctcatacaggtcactgacaataaatgaagggtgatacctatcctttagggtctcataaacatcttcctggattttgtagaata

SEQ ID NO: 4263 - DNA, 370 bp, Homo sapiens
  unsure (56): n=A,T,C or G
  unsure (57): n=A,T,C or G
  unsure (151): n=A,T,C or G
  unsure (162): n=A,T,C or G
  unsure (239): n=A,T,C or G
ccaacatggcgaaacacctgtctctactaaaaatacaaaaattaggccgggcgcannggctcacacctgtaatcccaacactttgggaggccgacccagatgggtggatcacctgaggtcaggagtttgagaccagccttgacaacatggngaaaccccatntctggtagaaatataaaaaattaaccgggcatggtggtggacgcctgtagtcccagctacttgggaggctgaggcanaataatcgcttgaacccaggaggcagaggttgcagtaagccaagatcgtgcctctgcactccaacctgggtgatggagcaagactccatctccaaaaaaataaaaaatacaaaaattagccaggcatggta

SEQ ID NO: 4264 - DNA, 129 bp, Homo sapiens
  unsure (17): n=A,T,C or G
  unsure (24): n=A,T,C or G
  unsure (26): n=A,T,C or G
  unsure (35): n=A,T,C or G
  unsure (53): n=A,T,C or G
  unsure (60): n=A,T,C or G
  unsure (63): n=A,T,C or G
  unsure (95): n=A,T,C or G
  unsure (117): n=A,T,C or G
  unsure (120): n=A,T,C or G
ctgtggatgaacaccgngaacctnanttattgctngatattaaagaagaaatngaagatnaanaaaagacaattgaagattatattgataaaaanatgaatgatgctgattccactncanttgaagcta

SEQ ID NO: 4265 - DNA, 375 bp, Homo sapiens
  unsure (121): n=A,T,C or G
  unsure (294): n=A,T,C or G
  unsure (305): n=A,T,C or G
  unsure (327): n=A,T,C or G
  unsure (341): n=A,T,C or G
  unsure (348): n=A,T,C or G
ctggctcgatagtcgtaaatgaagagtgtgtccgaaaagactttgaatccagtatgaatgtagtacaggaaattaaatttaagtctaggatcagagggactgaagactgggctcctcctanatttcaaatcatatttaatattcatccaccactcaagagggaccttgtggtggcagcccagaattttttctgtgccggctgtggaactccagtagagcctaagtttgtgaagcggctccggtactgcgaatacctagggaagtatttctgtgactgctgccactcatatgcanagtcgtgcatncctgcccgaatcctgatgatgngggacttcaagaantactacntcagcaatttctccaaacaaacctgcc

SEQ ID NO: 4266 - DNA, 374 bp, Homo sapiens
tttgcttcttatgtctacaggaaaaagagacctgggcttagagtctgctgctgggaacggatgggatgtacatctctggctctcagagctggctcaccggcctcttccttttttcctccacatccagggcaagctggcctcattttttctgtctagggtggatgccttgagccctcagctccaacaggtaaagggcagggagggagagggagagcccggggatctgagcctggattgtctcttgctgctcctcctctagcttttctgtcctgccttcatatgcccatctgtgtccttcggcctcattgtcccatctcaggtttccctcagagctctctctgatctccatctcttttgggtgtcagtggggctgg

SEQ ID NO: 4267 - DNA, 374 bp, Homo sapiens
ctgggtctctgtccacccctctagggaggcaggactgagggaggctgggcgccccgtccctcctgcacttgctttccttcagtagggccctggcctcagcacaggtaacttcccccctcatttcagctcccagaggtctcttggttagtgcacttgaacccagccacccccaacccagaagctccaaaaagtgccaatgcctgggacccaccctgcagatactgttgtagttggtctgaggcacagcctggacttggggtttttttaaggttctgcatggggttctacctgctgctgtcacctggtctctgcagctctgttccaaagctgcagcctccaggaagccaccctgacttccccccacctaccttccc

SEQ ID NO: 4268 - DNA, 375 bp, Homo sapiens
  unsure (115): n=A,T,C or G
  unsure (124): n=A,T,C or G
  unsure (151): n=A,T,C or G
  unsure (158): n=A,T,C or G
aaatttagattacatttgagtgtgtaatgtagttgagcaaagtcattacgtttataaaatgtggcacattactatgggatagatgtttaatgtataaagaaataatatactcctntaagagtanttaaaaggcattacccaagttacctgnactccanactgagtattacctcatcaatgagcattttagtttattttttcatactttgtaaagctgttttgctaatctagagaaaaggccatacatattttgatttctctattaactgatgtgattacttcaattaaagtaatgtttataaaccacagtcattctttatatctaagttcccttgacccttttatacttataatttctaaggcggataaaagaga

SEQ ID NO: 4269 - DNA, 373 bp, Homo sapiens
aaatattgttaaagaattctcaaaggagtaaggttaatgagcaagattaaaatggcagcagcagatccaattgcgttttctttttcataagcctaaaagcatcgcggtgtgtttcagagctgcttcctctacaaattctgcatccacattgtcatgtccttcaaaaggatacagggcttgattggaggactctatatctgtcagaatttcaatgaagtagttcagaggcagaaattctacactgaacgatgacttgttaatcatagaattccgaggctgtttcttatagttctgaagcagtcgcgtcacgtggttccgcgaaatgatgttagaactcataggatgatcccaaagtctacaaatcttctgccca

SEQ ID NO: 4270 - DNA, 376 bp, Homo sapiens
ccaggctggttttgaactcatgaccttaagcggtctgcctgccttagcctcccaaaatgctgggattacaggcatgagctactatgcctggcctggtttgattttagagatagacaggctctgtgttgccctggctacagtgcagtggctgttcacagctgtgatcatggcacaccgcagccccaaactcaaggtgggctcaagctgtcttcctatctcagccttcctggtagctaggaccacaggcacactccaccacacccagctagttctaggtgttttgagtaagttagacacttggtgagctttgtgtataaaagactcagtgacctgcttagattaaaactagggcagtggaatgaaaaattctcatggg

SEQ ID NO: 4271 - DNA, 324 bp, Homo sapiens
ccaaactttacaggaagaatctcaatggcatattggcagatgaagctgggctgggtaaaacagtgcagatcattgctttttttgcccacctagcttgtaacgaaggtaattggggcccccatcttgttgttgtgagaagttgtaacatactcaagtgggagcttgaattgaaacgttggtgtcccggactcaaaatcctctcatatattggcagccacagagaactcaaagcaaagagacaggagtgggccgaacccaacagcttccacgtctgcatcacgtcctacactcagttcttccggggcctcaccgccttcacacgag

SEQ ID NO: 4272 - DNA, 372 bp, Homo sapiens
  unsure (237): n=A,T,C or G
  unsure (264): n=A,T,C or G
  unsure (321): n=A,T,C or G
tagggctgagatgttgggagccatcaatcaggaaagccgggttagtaaagcagttgaagtgatgattcagcacgtagaaaacttgaagaggatgtatgccaaagagcacgctgaattagaagaactgaaacaggttcttctgcagaatgaaaggtctttcaatcctcttgaagatgatgatgactgccaaattaaaaaacgttcagcttctctaaactccaagccatcttctctacnaagagtgactattgcctctttacccanaaatattggaaatgcaggaatggtggctgggatggaaaataatgatcgattcagtanaaggtcaagcagttggcgtattttggggtcaaagcagagtgaacaccgtcc

SEQ ID NO: 4273 - DNA, 359 bp, Homo sapiens
  unsure (306): n=A,T,C or G
  unsure (315): n=A,T,C or G
ctgtccccggcctgcagctctgggatgaggacagggcgacagggacttccgacctcctctcatagaaaaacgtgggtgctgcaccacccaaagtgaaaggctgaatttggaagtcccttttatcatacacattcagattgcctgtggaaattcagcaaaaatatgacatgcatttccattctatctgccttttaccttctcaaccttaaatcgactttcagttctgtgtcatgttttctcttctttttagaagacttctaatgacttgggaaaatacttttgaaggatgtgaaatggtgtttttgngtctgctgnttgttgagtatcggtattttcagccttggttccctgtggaggag

SEQ ID NO: 4274 - DNA, 364 bp, Homo sapiens
  unsure (327): n=A,T,C or G
ccacccaagaatcatagtagctcttcagttagctatcttgcaatctctgatataattctactatgtgaatagagtgaattccaattcttcatcaaaaagtgctggtggaggttgtcaggtgtgttccagtatagattcccaatccaacggccggcagatgggagagcagcagagatggaaattctgctcagaataagccctctttctcataatacttgtatttctcatgctgagagtagctgtgcacttttggtgtttagagaagaacttctttggaagaatattttctggtcaatttgaccaatgttacatgtaatctgaatttgnctttaagattctttcaacctcttttcttctctcaata

SEQ ID NO: 4275 - DNA, 253 bp, Homo sapiens
cctgggatgcagggagaaaggctgaccacaagttgagacaagatacagaaacaaacaaaaacagcagaaagtccgatcgatggtgtaagtgttgtgttcactgcttagggtgcaggtgagcttgatcgaggctcccagtaaggcagatgtagacgggggctgagtcagcacaggcagagcacagagacctgtggagaaaatgaagggcagtaggtagaaggagacccaggccatggttggagggacttccaag

SEQ ID NO: 4276 - DNA, 375 bp, Homo sapiens
aaaatacatttatttaactcacctgagttaataagctctgaatttcatgaaaattcacaaatgtgaatggcgatcacttaccttcaaacagtcttgtctttcatacctggtcctatgtgtttccactcatccattgtttcagtggtgaacgttcagtggtgaacgctctactatccaggaactgaaccacaacttctcattcaaggagagtggaagaaactagatgcatacttgccctggacatcaggctgtccacctaagatccacatccacaaaatcaggaagtttcccacttctgtgttgccttctccaggagttggtcccatagggtgacactgcatccacagaagcatcaaaagcacctgtgtccctgcc

SEQ ID NO: 4277 - DNA, 308 bp, Homo sapiens
  unsure (9): n=A,T,C or G
  unsure (26): n=A,T,C or G
  unsure (41): n=A,T,C or G
  unsure (45): n=A,T,C or G
  unsure (64): n=A,T,C or G
  unsure (69): n=A,T,C or G
  unsure (84): n=A,T,C or G
  unsure (98): n=A,T,C or G
  unsure (106): n=A,T,C or G
  unsure (167): n=A,T,C or G
  unsure (170): n=A,T,C or G
  unsure (214): n=A,T,C or G
  unsure (218): n=A,T,C or G
  unsure (226): n=A,T,C or G
  unsure (237): n=A,T,C or G
  unsure (267): n=A,T,C or G
gagatgcanaataatgttgacaatantaagttgctgaatcntcangctgcagactggtgatggntaaantgaattgtgtcccanatccactgccagtnaatcttantgagaccccttcttctaaactggaagtcgcataaattaggacattaggggctttgcctggnttntgttgatgccaggccaaccaccgatctatattctgagaggcccnacancttattgnaattgtatctncgacagatgcagacagggtggaaggagatngggtcatctggatgtcacatttggcacctgggagccagagc

SEQ ID NO: 4278 - DNA, 105 bp, Homo sapiens
aaacaaagaggtgacctaaatattttacattttgtaaatcctttggtacaggagataagtgggcacaagtgaggaatgatgtttgtacagcagtgatagtaatgg

SEQ ID NO: 4279 - DNA, 299 bp, Homo sapiens
  unsure (227): n=A,T,C or G
ctgtgagatggagaactgcagcctctgccgctgtggcagtgagaccgtgcgagcctcatccactctgcttttcacactctcctaccctgatggtagcaaaagtggtatacccttcagctcagttgggaaggctccccaaaatgtcctgtaatatcagggagagggtgctggggactaactgtgggtagaggggagaaccaggagtatagcatctaattttccctcanataaaactgggaagaactatgactttgctcaggtgctgaagcgaagcatctgcctggaccagaatacacagg

SEQ ID NO: 4280 - DNA, 337 bp, Homo sapiens
  unsure (82): n=A,T,C or G
  unsure (126): n=A,T,C or G
  unsure (173): n=A,T,C or G
  unsure (246): n=A,T,C or G
ctcttcttcagcacatgccaaagctgttcctcacggcctgtgagacaagagcatcttggatgtaggacaatggaagagttanatgccttattggaggaactggaacgctccacccttcaggacagngatgaatattccaacccagctcctcctcccctggatcagcattccanaaaggagactaaccttgatgagacttcggagatcctttctattcaggataacacaagtcccttgccggcgcanctcgtgtatactatcaatatccaggagctcaatgtctacagtgaagcccaagagccaaaggaatcaccaccaccttctaaaacgtcagcag

SEQ ID NO: 4281 - DNA, 356 bp, Homo sapiens
aaacagcaaaagaccaagaaataaaatttgagtcaattatttttcaaaatattctcaatgcacattatccttaattcccttattatagtgaaacatacaaatacagaaaaataccccatttaacaaatactagtgttaaatggttatttggcttaaaatctgagttaagaaaatcctttttagcaacctacatacagataagtagcaaactttattatattaaacaaattcattctgctaaaacatgtaaagaatttcatccatcatgtattctgatcccagtacaagtgtttattctcttaccgtcacgattcttatatgaaggaccaactcaaagagttgtcctagatataacc

SEQ ID NO: 4282 - DNA, 349 bp, Homo sapiens
  unsure (302): n=A,T,C or G
  unsure (325): n=A,T,C or G
ccagggggaggaagcagtgcagaagtctcataagccacccgctgccccgacgagtcggaactataccgagatccgggagaagctccgctcgaggctgaccaggcggaaagaggagctgcccatgaaggggggcaccctgggcgggatccctggggagcccgccgtggaccaccgagatgtggatgagctgctggaattcatcaacagcacggagcccaaagtccccaacagcgccagggccgccaagcgggcccggcacaagctgaaaaagaaggaaaaggagaaggcccagttggcagcanaagctctaaagcaggcaaatcgngtttctggaagccgggagccaagg

SEQ ID NO: 4283 - DNA, 328 bp, Homo sapiens
  unsure (80): n=A,T,C or G
  unsure (100): n=A,T,C or G
  unsure (108): n=A,T,C or G
  unsure (114): n=A,T,C or G
  unsure (146): n=A,T,C or G
  unsure (150): n=A,T,C or G
  unsure (222): n=A,T,C or G
  unsure (238): n=A,T,C or G
  unsure (266): n=A,T,C or G
  unsure (284): n=A,T,C or G
ccaggactgcgatttctagcgcgtgtcttcacattctatctctggggaagcaagacaaacaggctctacccatttccctncttttgtctccacaagccancacctaanatcctntgaatttgttcccatccaatcctgcaaacttncaanaagggcagtagataacttttcaaaagaaaaagaaattgcataaggtccctacataatactgaggctgaaacnagaaggggctgtccantgtaaaagcaaggcacttggggcagganccaggcaggtggcctgancagggtccctctcagtgagtcaacagtttgaggcgcgtaaacca

SEQ ID NO: 4284 - DNA, 371 bp, Homo sapiens
aaataacatgttaaatttgatgaattgatgacaaattgttttttggtaaactggtctttcagttgcttgtgcttgggtaagctgccctgcttctcctggtgagtggggtttatagtgaagacgccaggctacccagtggcactgaaagaggtggcaaaaccaattgtttctctcttctcactgcctgggccctgttgctggtgaattcaagttgcctggagactgtctcactggggatctggtgttttcctacaataaaacttctcactccagggtcctctcccatccgaggcatgcgtctagcatatctctaacagtctgtgcatttgtgatttatgcgatttcaaccaaaccttaaggctcttgggcag

SEQ ID NO: 4285 - DNA, 368 bp, Homo sapiens
  unsure (161): n=A,T,C or G
  unsure (246): n=A,T,C or G
  unsure (288): n=A,T,C or G
  unsure (295): n=A,T,C or G
  unsure (303): n=A,T,C or G
  unsure (306): n=A,T,C or G
  unsure (313): n=A,T,C or G
  unsure (331): n=A,T,C or G
  unsure (340): n=A,T,C or G
ctgagggcgacagaggatctaggctaacaggagagactccaggagtgggggcagatcccaaggcagcctcctgctccccagtggtgggtgccccagctctacctggtgtggcagggctgaggctccatgtgcatctgtgagcatgcgtgtgacaggtgcanagacgggggactggagggagacttttatacgttttgtacctttgtaaccagagagatgcttatgttatttttcagcttttctgtntcttggggggtttgaggctgggctgggagggggagggagatngaggganagatgcanttngaccccntttgggtcctgagcaaancctatgctnatatctctctccttcctggggtggactc

SEQ ID NO: 4286 - DNA, 363 bp, Homo sapiens
  unsure (6): n=A,T,C or G
  unsure (17): n=A,T,C or G
  unsure (28): n=A,T,C or G
  unsure (36): n=A,T,C or G
  unsure (39): n=A,T,C or G
  unsure (61): n=A,T,C or G
  unsure (65): n=A,T,C or G
  unsure (67): n=A,T,C or G
  unsure (78): n=A,T,C or G
  unsure (79): n=A,T,C or G
  unsure (137): n=A,T,C or G
  unsure (148): n=A,T,C or G
  unsure (152): n=A,T,C or G
  unsure (193): n=A,T,C or G
  unsure (247): n=A,T,C or G
  unsure (268): n=A,T,C or G
  unsure (276): n=A,T,C or G
  unsure (301): n=A,T,C or G
  unsure (309): n=A,T,C or G
  unsure (349): n=A,T,C or G
gagcanagatcgtgccnctgcactccancctgggcnacngagcgagactccgtctcaaaanaaananaaaaaaagagnncaagaccagcctgaacaacatggtgaaaccctgtctctactaaaaatacaaaaattanccaggcgcggnggcncgcgcttataatcccagctactcaggaggctgaggcagganaattgcttgaacccaggaggcaaaggttgcagtgagttgagatcgcaccactgncctccagcttgggcgacagancgagactncatctaaaaaaaaaaaaaaaatacngaaattanctgcctgtagtcccaactactcaggaggctgaggcagganaatcacttgaaccc

SEQ ID NO: 4287 - DNA, 372 bp, Homo sapiens
  unsure (9): n=A,T,C or G
  unsure (17): n=A,T,C or G
  unsure (92): n=A,T,C or G
  unsure (103): n=A,T,C or G
  unsure (113): n=A,T,C or G
  unsure (116): n=A,T,C or G
  unsure (179): n=A,T,C or G
  unsure (199): n=A,T,C or G
  unsure (242): n=A,T,C or G
  unsure (306): n=A,T,C or G
  unsure (335): n=A,T,C or G
aaagatatnagcctgtntgactacaaaggaaaatatgttgtgttcttcttttaccctcttgacttcacctttgtgtgccccacggagatcanctgctttcagngatagggcanaanaatttaagaaactcaactgccaagtgattggtgcttctgtggattctcacttctgtcatctancatgggtcaatacacctaanaaacaaggaggactgggacccatgaacattcctttggtatcanacccgaagcgcaccattgctcaggattatggggtcttaaaggctgatgaaggcatctcgttcangggcctttttatcattgatgataagggtnttcttcggcagatcactgtaaatgacctccctgttgg

SEQ ID NO: 4288 - DNA, 140 bp, Homo sapiens
  unsure (11): n=A,T,C or G
  unsure (13): n=A,T,C or G
  unsure (20): n=A,T,C or G
  unsure (35): n=A,T,C or G
  unsure (104): n=A,T,C or G
ctacatctgananaagcatnttatagttctgcttntggaccagaccatcctgggtttttctctgttctgctgaagggttccctccacgtgtccatcacctcggngaactcttgggagacctgggaagatgctggcctcac

SEQ ID NO: 4289 - DNA, 370 bp, Homo sapiens
cctcttccctgatggccgcgtcttcatggaagtaggagagaagactgtaaaaagcgaaaggcagcagcctggtgtgctgatccggggccacacggaggaggagccgccccagcctgaggtcactctctgtcaactgaaagagtgccagccaggatatcttcctcttctctaaacactcgaggattgctgcacaaacgtggaaagcctttggcaggtctgtggtgctatttgaggtcagatgtgacgacagcaggcccatcaaggagaagaagaaaaggaaaaccaatagctcctctctctcgcagtccagcttctttagctgcttcctgatgttttcttccctgacttgttgaatcgcaaagtgcagtgc

SEQ ID NO: 4290 - DNA, 375 bp, Homo sapiens
aaactggatttgttttgttttgagtttcaagtcccttttcactacaacaccgtccaaaactatctacctatctcttcttttttatccatctgcccgctgtattttaatgtcaatcctaattcagacaaatccgcaacttcatgatactggtaatttataataattcgtgatcattgctgttttgaaggaaaagagatgataaattctcttacggtttcaatcaggtaatggattttgttttacatctagttaggagaagaaaagtaagtgaaggaatcctctgatcatattgatcactatagaagcaaaagccaaatcagttcccttcattatcagtatttctcatgctgtacacaataaatttgttagactgag

SEQ ID NO: 4291 - DNA, 364 bp, Homo sapiens
aaaagtaagaagccacggcaccgctcaaattcattcagtgatgaaagagagttctctggaccttccaccccgacggggacgctggagtttgaaggtggggaagtgtctctggaaggtgggaaagttaaagggaaacacgggaagctgaaattcggtacctttggtggattggggtcaaagagcaaaggtcattatgaggtgactgggagcgatgatgagacaggcaagttacaggggagtggggtgtccctggcctctaagaagtcccgactgtcctcctcttctagcaatgacagtgggaataaggttggcatccagcttcccgaggtggagctgtcagtttccacaaagaaagagtagcagg

SEQ ID NO: 4292 - DNA, 375 bp, Homo sapiens
  unsure (38): n=A,T,C or G
  unsure (56): n=A,T,C or G
  unsure (61): n=A,T,C or G
  unsure (114): n=A,T,C or G
  unsure (136): n=A,T,C or G
  unsure (195): n=A,T,C or G
  unsure (260): n=A,T,C or G
  unsure (366): n=A,T,C or G
aaaaatctatttatttatcaaaacagtattggcacagnaattctcatattatcatnaaatnataaaattgctactttctgtactcaattctttagaatcctagaaattgcaaangcattcaatttaacaatattgnaaataacaatacaaaagaaagaactctgcatatttatggaaacattgttgatggtacanttctactgaaactcatacacatttcactatttaatttacatatggtcttgttgaaaaaaaccagnatgttttacttttttcaatttccttatgctaaaatacatgtaattctaaaggatatctcttaggtgttataaaaaccaaggaaggtccaccaccaagtcaaagttngagtcaaag

SEQ ID NO: 4293 - DNA, 373 bp, Homo sapiens
  unsure (123): n=A,T,C or G
tgaagatgtgggaggaaaagattgctcaaatgcgatgggaactgatgatgaagacaaaagaacacaccagaaagctttatcagatgaatgatctgtgtattgaaaagaagaaacttgattctnggttgaatacactacagaatcagcagggcaatgccttccagggccctcgggaagcagatgttgtggcaagagaggaggtcactgaattgatccaactccaggcggaaaggatttcggccttaaaggaggagattgctcttttgcgtaggaaaggcggtcttatcctcccacccattcagtctccacgagagaaagagatacagcccgcagacctttgagtttgctattttctcaaacccatacaagattt

SEQ ID NO: 4294 - DNA, 372 bp, Homo sapiens
  unsure (84): n=A,T,C or G
  unsure (87): n=A,T,C or G
  unsure (132): n=A,T,C or G
  unsure (255): n=A,T,C or G
  unsure (314): n=A,T,C or G
ccaacgtggtgaaaccctgtctctactgaaaatacaaaaattagccaggtgtggtggccgacgcctgtaatcccagctactcangancctgaggcaggaggatcgcttgaacgtgggaggcagaggttgcantgaactgagatcacaccactgcactccagcctgagtgacaagagtgagactccgtctcaacaaaaaaagaaaaagttataatgttttggggacttaaagattactgaagaggggataaaagtnaacactgcttacaaatacctgaacatggagagcacagtcaacacattcatgtggacagnacatgaacggatgtattaatacattacacagcttcttctatctgacctattcctcttg

SEQ ID NO: 4295 - DNA, 369 bp, Homo sapiens
ccacgtagatgaacttgtactgcgcctccgtctgcaccatgcccgagcgctgcgcccgcaccatctggatggtcttctggatgtcaatgtcacagtccaggcccttggtggagatgttctccatgagcatgtcgatgacaatgatggtgcctgtgcggccgatgccggcgctgcagtgcacgatgatgggccctgcgtgaggcagactttcctgccgctggttgatctggtccaggaagctgaggacacccccaggctcactggggaccccatggtcgggccagctcaggtactggtaatgccagatctcccgaatcaggtctccattgtccagcggggagacctgtaaggtacggagtttgtattcgg

SEQ ID NO: 4296 - DNA, 373 bp, Homo sapiens
  unsure (147): n=A,T,C or G
  unsure (232): n=A,T,C or G
  unsure (267): n=A,T,C or G
  unsure (351): n=A,T,C or G
tttttttttttttttttttaagataaggaatgtgtgtttagctttaatgtctattaaataggttggaaaaacaggccaagtgtagggacctgactcctgcaaagggcctaccgcagccctctgcactcaagcagcagccccatccanaccaggagtgtgttctgttctcctggcaggcagggctgataggtgtaggatggcgtctgtttcctttgcagtgtgggctggtcanaggagaaacagcaacttcctgctccttctcactgngtcgttggctcaccatagaccacgtcctgcattccctctgattctctcatggggagagccctggaccttctggtggtgtcccanctgggtgggttcaaggctgcta

SEQ ID NO: 4297 - DNA, 372 bp, Homo sapiens
  unsure (266): n=A,T,C or G
  unsure (324): n=A,T,C or G
  unsure (368): n=A,T,C or G
ccagtcacgaacatgttgcaagggtttatgatatggtttgagttgaaggctgaggttttctgaacaaatccatatagtgaaatattgctgagtttcttgagagagacgcattccttccattatctgctgcactgtggtattatttccatgcttcaattcaacagaacgatatgacccatccattctgtatattcgaactttttcatatggtttgttaattgcttccttcaacaattttgcagcttcttcccagttgttttgtttgntttcttcacaaatatttaatggagatcttccttgttggtctgttatatgtctatccgnttctgggtggtttaggagaatctgtactatttcagcatgtcctnctcc

SEQ ID NO: 4298 - DNA, 351 bp, Homo sapiens
ccagcgccagggtgcaggacctgatcgggctcatctgctggcagtatacaagcgaaggacgggagccgaagctcaatgacaatgtcagtgcctactgcctgcatattgctgaggatgatggggaggtggacaccgatttccccccgctggattccaatgagcccattcataagtttggcttcagtactttggccctggttgaaaagtactcatctcctggtctgacatccaaagagtcactctttgttcgaataaatgctgctcatggattctcccttattcaggtggacaacacaaaggttaccatgaaggaaatcttactgaaggcagtgaagcgaagaaaaggatccc

SEQ ID NO: 4299 - DNA, 370 bp, Homo sapiens
gctctgcgttctgtagtggcgctgcttgggcccgtggcggattgtaagctgctggttttgcggctgggaagagcggcgagagggttcggcatttttcgtcgggatccccgcaaggatgagtgctgccagagagtctcacccgcatggggtgaagcgttcagcctccccagacgacgatctgggatctagcaattgggaggcagcagacttgggtaatgaagagagaaaacaaaagttcttgagacttatgggtgcaggaaaaaaagaacatactggtcgtcttgttataggagatcacaaatcaacatctcacttccgaaccggggaagaagacaagaaaattaatgaagaactggagtctcaatatcag

SEQ ID NO: 4300 - DNA, 348 bp, Homo sapiens
  unsure (137): n=A,T,C or G
ccttcagaagttaaacgtgatcacttgtgctgggacagccaatagaggagtctgagatgatcatttccaaggagttcttcacagaggaggtagctttggagctgggctttgaggttgggcagtatttgaaacagtanagacggagcaaagaacccctgggcagaggaaacagtaagtgcaaggcataaagtgaaggtggagggtgttaccgcggggtgcactggttgcattacctcctggtggggtcagtcattcgctttcttttcctcctcaggaccagggctctttgaagatgaagaatgcccacaagggaacacaggcagaagatcagataagccaaagtcacag

SEQ ID NO: 4301 - DNA, 271 bp, Homo sapiens
cctcccagagaaggctggtgaccaggtcccaggcgggcaagactcagccttggtggggcctgaggacagaggaggcccaggagcatcggggagagaggtggagggacaccgggagagccaggagcgtggacacagccagaactcatcacagaggctggcgtccagccccgggtcacgtgcagcaggaacaagcagccactctgggggcaccaggtggagaggcaagacgccaaagagggtgcccgtgttcttgcgaaagcggggctgctgg

SEQ ID NO: 4302 - DNA, 371 bp, Homo sapiens
cctggtcccggctctctaggtccagggacattaaaaagtcagagtcctctgtggggagaaaagtgggtgaggacttgataagccctagtagatacttgtaggcccagttcttatctgcagatgggtgaccctcaacagtcacagagttgttttcactgcccacaaattcacagttttccaggacacacaggggcacgttgtgcaggaagatatgggtgtttttgaaggtacagaacttcacttggcaagtacccgggccatggacctggatgtgcccgttctcaaagttgcagttgtcaaactggacgtgacctgatgttgtcttatacatgatgggtgagaaccaggctggcgtgaagacgaggttgcac

SEQ ID NO: 4303 - DNA, 366 bp, Homo sapiens
cttttgagtcagataaccatcttgaattataggtgattaattttaacctggaacaatagtgtgttcttccaaatgtcatttcttactgaatgaagctgcttgatttatttgcttttgcaggcaaaccctgaagaactgtaaccagttgcatttacaaaatcataataacttggtttacttataactgaaattattcactgggctgtgcttacttttttctttttagattttgtggtggatgcaacccgcaagggtaacaaaattcgttttgcaaatcattcggtaaatccaaactgctatgcaaaaggtaggtacctttgacgtgagaattggaactcccttttcagtcctgtgatgatggacttg

SEQ ID NO: 4304 - DNA, 372 bp, Homo sapiens
ctgaggcataccgtgggaaagtttcccacaggctgattttctgtccatctcaagaacctgtatgttctcttctttccctttccccaggtgccccctgctgaatttagaaaagtaacaatatatcaatcaatttaaaaagggtagaatattttggaatgacgggttgtagtgttttctagagtgctttagttttgacattttatcagtattttccagaggtaaataaattttggaaggattattacttctctgttggggccctagagcaatttagtcttttatggaaaagctgactatctgggatcatatgctcagtttgtatatttgagatctgagagatcacgttctgaagtcttctcatatttagtacac

SEQ ID NO: 4305 - DNA, 222 bp, Homo sapiens
atgaaacagaattctatttgggcaagagatgcgcttatgtatataaagcaaagaacaacacagtcactcctggcggcaaaccaaacaaaaccagagtcatctggggaaaagtaactcgggcccatggaaacagtggcatggttcgtgccaaattccgaagcaatcttcctgctaaggccattggacacagaatccgagtgatgctgtacccctcaaggattt

SEQ ID NO: 4306 - DNA, 194 bp, Homo sapiens
  unsure (29): n=A,T,C or G
  unsure (49): n=A,T,C or G
  unsure (66): n=A,T,C or G
  unsure (67): n=A,T,C or G
  unsure (70): n=A,T,C or G
  unsure (98): n=A,T,C or G
  unsure (118): n=A,T,C or G
  unsure (131): n=A,T,C or G
  unsure (169): n=A,T,C or G
aaatattaaaagttaggtactgtaagtgntcttaaaacctgtaaacttnattctgtgggctagtgnnagngggacaaaatattcctaatgaaaggaantaccaattagttgatttgtnggtggcattcccnttttgggaaagcaatgtaaggttatgtctgtgtatgtnattcacacttaggcaagcatacaca

SEQ ID NO: 4307 - DNA, 585 bp, Homo sapiens
cctcggatgatgaagacagtgcccaccacaatgcccacgaggcccacagacaaccccagggcgcagaccacagtctctgtgagctctgacataggggctggaatctcaggctcccagtgtttcagaagaggcttgtccagtccccagtgctccaccttgcagtcataactctcctcagcagaagggaggagggtgaggtaactgatcttgaagaaggaatgatcactcttggagaggaagctggtctcagaaacaccttctgtgactgagtgcccattgctcagccatgtgatgttgaccacaggaggaaagatgttgtccacaagacagatgaggatgctgggctgacccagtgtcacgggagacttggaaaacactgtgacctcaggaacctcattggtagcagcggtagagttggagcgtttaatcagactgttcaagttatgttttaggacagcgatgtttgtcagtgcaaattgcgggtcaaatctaaattgtctgagaacaggcaaacaccagacagtctccttcctccccaggtccacgcagaactgctcatctccatcaaattcatgggtgtactgg

SEQ ID NO: 4308 - DNA, 308 bp, Homo sapiens
ctgctccagcatcttgtcacactcgtccagcacaaagtgcttcacattctttaggctgaagctcctattccgcacgagcgccaggatgcggcccggggtccccaccacgacatggggacagttcttcttcaacacttcttcatccttcttgatggagagaccaccgaagaacacagacaccttgacgctgggcatgtacttggaaaagcgctcatattccttgctgatctggaaggccagctccctcgtgtggcacatgaccaggaccgtcacctgtccgttgacaggctcaatctgctgtagggtgg

SEQ ID NO: 4309 - DNA, 522 bp, Homo sapiens
ctgactgtgaggccatcccacatgcttcatgtctccaaaatatacagacaaggggaagggccacattactgagggcagagaagaagcttaaccctggaatgagaattggaagggacaaatatccaaaccatatcaatgacggcaatgaacgaaggatacttgctcacattgtgtatactgctctttgaaaggatttcaaaaaccaaggtaaattttctaaaatgacctctgttgaacatctgacagcagtacttcctccttcctgaattctttaattccttggctcatgtgacagcatattctcctaattcttctgcttctctgcttctccatttttgttaaatactcctctttggatgttttgttaatcacgtatctttgcattaattttgccttttcaagatatttcattaaaatatgatttattactgagttcttttggtatcccccaaattttgcacctaagccaagtgcatcccctacatcaccctagtcccagccctcttttccattcttcctctt

SEQ ID NO: 4310 - DNA, 318 bp, Homo sapiens
aaagaagttttatgtccctgactctggctaaaattatctaatttccagatgcttttgtagatgactgaagtatttgtgagccacatattgggagttctagatttgagtgaatggcaggaaagggccatctccattgagatgattaagtgaaccaaactagttctcggaattctacagagaaggagggaatcagactgaggaagctgtgacataggacttgaagaccaaagactttgaaatttgcgagctgctcatgtgtgagttattatcactgctgtctttctattgagttacaaatctatatttttattgaagttt

SEQ ID NO: 4311 - DNA, 444 bp, Homo sapiens
  unsure (31): n=A,T,C or G
  unsure (34): n=A,T,C or G
  unsure (36): n=A,T,C or G
  unsure (46): n=A,T,C or G
  unsure (64): n=A,T,C or G
  unsure (69): n=A,T,C or G
  unsure (71): n=A,T,C or G
  unsure (100): n=A,T,C or G
  unsure (115): n=A,T,C or G
  unsure (121): n=A,T,C or G
  unsure (146): n=A,T,C or G
  unsure (164): n=A,T,C or G
  unsure (178): n=A,T,C or G
  unsure (184): n=A,T,C or G
  unsure (192): n=A,T,C or G
  unsure (213): n=A,T,C or G
  unsure (221): n=A,T,C or G
  unsure (251): n=A,T,C or G
  unsure (278): n=A,T,C or G
  unsure (292): n=A,T,C or G
  unsure (299): n=A,T,C or G
  unsure (315): n=A,T,C or G
  unsure (317): n=A,T,C or G
  unsure (385): n=A,T,C or G
  unsure (413): n=A,T,C or G
  unsure (417): n=A,T,C or G
  unsure (428): n=A,T,C or G
tttttttttttttttttttttttccaaagtntananaaagaacagngggcccaggggaccagcnctcancntacagaggacccgcgctggccctggtctntgagttccctcagtntttatngatcactatctctaccatctcgganaggaggatgtggccgganaatagggtaatagngggganagggtcancaggaaaacatgtgaacaaanatctctgngtcataaataagtttaaggaaaggtgctgngctttgatgtgcacgtacacaaacatntcagttcattaaanagcagtnttgccgccagcatgtntnacctccagccctaagggggttttctcctatctcagtaaacagaacatacaatcaggttttacaccaanacattccattaccagggacgagcagganacanatgccttcctnttatctgaactgcaaa

SEQ ID NO: 4312 - DNA, 372 bp, Homo sapiens
ctgatgcctcactactagatgcagtgctgggaccttcctcttttggagctgtcccatgtacagtggacccaagctcaggaccttcgtggagctgcttctccaacctgagaaactcaagacccatcctcccgctgtcactttggacaatggaaatctacattttcttttcccttttttttttttgagacagagtctcgctctgtcacccaggctggagtccagtggcacaatcttggctcactgcaacctctgcttcccgagttcaagcaattctcctgcctcagcctcctgagtagctgggattataggcatgcaccaccacacccagctattttttgtatttttactggagacagggtttcaccatgttgg

SEQ ID NO: 4313 - DNA, 332 bp, Homo sapiens
aaaagagctttccattgaagaagaaaacaggaaccaaaaaaaaaaaaaagcaaagagagagagaagacagcagataaatataggcaaatagaggtggaaaatataatcacgtagaatttagtatagtaaaggattatctctgaaaaacaaaaacagaaaactatcagagccaaataaagaaaaatggaaatgactggggaaaaccactcactaatgagttgaatgttcaagagaaactgagaaagagtactgcttatataaaaattatgtgaaattaaacaaaaatgtagtttagtaatgaatggtgtttaagcacttatggaatataaaat

SEQ ID NO: 4314 - DNA, 450 bp, Homo sapiens
ctggttctctcggagcttatatcgggccagcagctctgtcacctcctccttggtcatgacgacgtgctcagggactagctcgtgctccgtgatgttgatgagcagctcctgctgcagaaactgctccaggatgtacttgggggccatgtcgaccagggactgcttggcggagggtgtcatgccctgctgcaccacgatgagagcccgtgtgatgttctcctcctgcatgcgctggcagtacaccttgatggtcttgatgcccaccttgggctcctctggaaagaacacaaacatctggtcggtggggtcatcgttgtgggccaccagcacggtgaggtccgtgcgccgcggccgcccctcactcggcttgtccccaaattgggctttgaactcctccagggtctggtcaagctcgtcctgggtcaccagatagccacggtcgtggcacag

SEQ ID NO: 4315 - DNA, 420 bp, Homo sapiens
ctgtggcctggccgctcccaatgctgggggcttggcttggtgccccatccccttcctgactgagctctatgaaggactcttaaaaaaaataaaataaaatgcaagcaaagtgctttgaaagaagggaggacaccctattcctgctaaggggtagaggaagaaggtgaaggcagctaggtgcccataagagaaggctggcacaatcttcattcccgccagtgtgatttcagtctcaaaagatgagtatttggctgagaaatggaaggatactccaggccccctacggagttgtgctggggccatgctgagctgcccttgcaggcagccctgggtgctgggggcagacatgcaggacactgggaagagtcagaaccacaggtgggagggaatctcagagcccaggctccccactgagcttgg

SEQ ID NO: 4316 - DNA, 502 bp, Homo sapiens
ccttgcctcagatccaaggtcactcggaagaggccatgtctaccctcaatgacactcatggaggaaatgctgagagaagcattcagatgcatgacacaaggtaagactgccaaaaatcttgttcttgctctcctcattttgttatttgttttatttttaggagttttgagagcaaaatgacaacacccagaaattcggtaaatgggactttcccggcagagccaatgaaaggccctattgctatgcaatctggtccaaaaccactcttcaggaggatgtcttcactggtgggccccacgcaaagcttcttcatgagggaatctaagactttgggggctgtccagattatgaatgggctcttccacattgccctggggggtcttctgatgatcccagcagggatctatgcacccatctgtgtgactgtgtggtaccctctctggggaggcattatgtatattatttccggatcactcctggcagcaacggaaaaaaactccag

SEQ ID NO: 4317 - DNA, 365 bp, Homo sapiens
cctgcatccaaatagcaggtgaaggcacctggctgaccatcaatgccttccacattgtattcatcaccagtcacctccacttggccttcatagatcttgtccatgccaaacctattgagaagcctgcgggccagcagcaggccagtacaatatgctgcagcataatttgtcaggccaaccttcacaccatattttggcagttcgtgtgcatacgctgcgcagactatcatatccccctctatacgggcataagcaatctgacaaatgatatctctgtttgtcacacgaactatcatcctgtatttgggtgtgttgtatttatttttatcttgtatcaccaagcgtttccgagcataagaataagg

SEQ ID NO: 4318 - DNA, 409 bp, Homo sapiens
  unsure (74): n=A,T,C or G
  unsure (121): n=A,T,C or G
  unsure (125): n=A,T,C or G
  unsure (129): n=A,T,C or G
  unsure (133): n=A,T,C or G
  unsure (155): n=A,T,C or G
  unsure (167): n=A,T,C or G
  unsure (169): n=A,T,C or G
  unsure (171): n=A,T,C or G
  unsure (184): n=A,T,C or G
  unsure (198): n=A,T,C or G
  unsure (215): n=A,T,C or G
  unsure (223): n=A,T,C or G
  unsure (230): n=A,T,C or G
  unsure (244): n=A,T,C or G
  unsure (246): n=A,T,C or G
  unsure (275): n=A,T,C or G
  unsure (314): n=A,T,C or G
  unsure (328): n=A,T,C or G
  unsure (371): n=A,T,C or G
cctgaacaaggacctctgccctccctattcagacccttcgttgcctcacctggtcaatacaaccacttcacctntgaccgcaggggcaggggactagatagaatgacctactgagcctcgnctgnctgnctgnctggctggctctctctctctgnttggctctttgngngnctgacaggcgcanactgggtctctaanccttgttctgttctggncccctcantctgggntcttgtcggaacangnttgcccttgggttacgtgggttccatctnctggggaattgggaacaaggggtctgagggaggcacctnctgggagactttanaaggacccagtgccctcggggctgatgctcgggaatcacaganctgggacccaaagccaggatccagacccaaattgaggt

SEQ ID NO: 4319 - DNA, 193 bp, Homo sapiens
aaaaatcttttttccttaaaacaaaaacgattaaaaacttgggttttctaaagaaacttatattaatatgaagttacgaagatacacaaagctgaagtatctggaaccatttggctgcctgtagtcttcagcaagatcacaaagtactcaaaaactctttgaccttttcaaccagactttcatatttgtcttt

SEQ ID NO: 4320 - DNA, 509 bp, Homo sapiens
ccaattatttccaatttttattttattcttaaaacttaagcatggtaaaatgttaagctgttttcatccactgatattattctactataaaaagcccttcttgagcagatttgatgataaaaaggagaacatttctaaggtataattagagaagctgttgcatgagaaatcatgtctccatctccattttgctatgcgttatctgaggattgtttctgaaagagatctatttaggcagtgtatgtatgtgtcagcatgtaaaaagtaaagaactgaaaatagacaaaccttgtaaatgcacttcaaaaccaattgtggctcaagtgtaggtggttccccaaggctggtaccaatgagactggggtttgggaattagttggtcatcatccctcctgctgcccagcagtggtcagtcatttttcatgagggatggactaggaaaatgaagtgtctattataaggagagttcctgtaacttaaggagcaagctcactacaaaacccagctac

SEQ ID NO: 4321 - DNA, 156 bp, Homo sapiens
aaagcttatataactttattcagttgaaaatttattaaaccactagtatatgaaaggaattgaggtaagggctgggaaaaaaaataaggcataattcctgctctcaaagaatttaggatcttgagaaagacagagttcctacagggtggggaatgg

SEQ ID NO: 4322 - DNA, 320 bp, Homo sapiens
ctgtcctcccctcacaccagactggggagttcaggatgtgtggtcttctcttcgactacccagtggtcttggctgttcaaccgtactttctccagaaggatcagctcaatttgctgctcagatatttgggttaagcaaccatttggtatggagcaaactgcgagcaagcattttgaacacatggatttccttgaagcaggctgacaagaaaatcagagaatgtaatttataagaaagaatgccattgaattttttaggggaaaaactacaaatttctaatttagctgaaggaaaatcaagcaagatgaaaaggtaatttt

SEQ ID NO: 4323 - DNA, 308 bp, Homo sapiens; identical to SEQ ID NO: 3350

SEQ ID NO: 4324 - DNA, 335 bp, Homo sapiens
  unsure (309): n=A,T,C or G
aaatcctagcatcagaggtttgttcatatgtagcaggaggtcatctgaagtagcaggtcctccttttttagttttttcttaggggggtgggtgatagatatatggtgtgtcatagtcgtttgggagtctggcatcggaaacctcctttaatgcttggatttgtggttttgcaggtatgggcggagctgccattgccccacccacttctctggtagagaaagacaaagagttaccccgagattttccttatgaagaggactcaagacctcgatcacagtcttccaaagcagccattcctcccccagtgtncgaggaacaagacagaccgagatctc

SEQ ID NO: 4325 - DNA, 451 bp, Homo sapiens
aaaatttatgtatctatgtaagactggtgatagtaaatcttaaaacagtccagtggcaatctgctgctcagttaataattactaaaattcttggatccctgaatagaaattaaaaaaaaaaaaatacaagaggcagtagagtcaatacaagcttaatacaagcttagagtaaatacaagcttagagtcacttgatgactgttttactgttctccatattgtttttatttttaattaggccctaccatagtatttcacactaaaaacaaaggaattatattggctaatatagtctttgactcatttcggtatctcagtaaaagtaaactgtcttttcattgtttcaccagttggtggtgaaaatagcagtatgcatgcattatcactggtgtcacaaactgtaagctttgtaagttagcactttactcctatagctgatgtaatcaaacttt

SEQ ID NO: 4326 - DNA, 215 bp, Homo sapiens
aaaagagcgtgtttcttcggggcttgccgttcgttcgtttccagcctcaggaatttatggtcgcctttttgaatgaggtcacataatgagtatgactcctgaacagcttcaggcttggcggtgggaaagagaaattgatgagagaaatcgcccactttctgatgaggaattagatgctatgttcccagaaggatataaggtacttcctcctccag

SEQ ID NO: 4327 - DNA, 479 bp, Homo sapiens
ctgtaagagctggctgagctccatgacgatggacagtgaagatggctaccagacgtgtgtgtctgaggactccagcaggggtgccttcagtcggcagacgagtacagatgatgagtgctttatccccaaggagggggatgattttctgaggaggtcatcttcaaggaggaaccggagcatcagtaacaccagcagcggatccatgtctcccttgtgggagggcaacttatcaagcatgtttgggaccctgccccggaagagcagaaagggaagtgtccgaaagcaactcttgaaatttatccctggccttcatcgtgctgtggaagaggaagaaagtcgcttttgacggattgtggtgtcctttcaaattagcttatttcacaaatatctctagactcacccagatcccagcttggtgggaaagtgcagaagaattgcaaaactgacatcccatttcacagcaatagtgacctttattt

SEQ ID NO: 4328 - DNA, 411 bp, Homo sapiens
aaagtctcaagtaaaaaattttgaagaagattttatgagacagcagcgaacaattaatatgcaacagtctcaagtagaaaaatacaaaactcttttcgaagaagcaaacaaaaagtatgatggattacagcaacagttgtctccagtagaaagggaattagaaaataaaagaagactgcaaaaacaggctgcaagtagtcaaagtgccacagaggttcgcttgaatagagctctagaagaagcagaaaagtataaactggagataagtaaattaaggcaaaataacaaggacatagcaaatgaagaacacaaaaaaattgaagtgttaaaatcagaaaacaagaagctagaaaaacaaaaaggagaattaatgatagggttcaagaaacagttaaaattaattgatgtttt

SEQ ID NO: 4329 - DNA, 373 bp, Homo sapiens
  unsure (116): n=A,T,C or G
ctgacagaatagcatgttcattttagttttcagcactgaacataagtgggtcaacataaatgtttatacaaaatactgacttcaacaaaatacaaagcactttctttatctttcanaaactgaatatacacagcaagtttttttccaaaatattttcataggcaaaggattaaaaacgattttaattatacacatatggtcacaattttgccttaaaaagattgttgggaaatgtacataaggccgcttgtaaatgtacatcgtgttactgttatgtcttatgtccagaggaaaaaatgttatcatacagatttgctcttacttgggagtaggctattcaaaaatacagtactcttctgtacaaagaaaaaag

SEQ ID NO: 4330 - DNA, 418 bp, Homo sapiens
ccgccaagaggtggtgattgggagcccacaggcactggtcagaggccacctgctgctcctgctcctttgcaagcctctcaggacttgcgaggctcagaatgaatggatctggaacagggcttgcgagcctcagaatgaatggatctggaacagggcctgcgaggctcagaatgaatggatctggaacagggcttggtaaactgccaaggcacctggggactcgggagctctggcagggtcagcagaggaaggcagaaggcagggctgtctcacggcgtccccatcactgatgtcctctgctctcccctggcctttccagggtgcctgcggcagttgctggactttctccaccactggggccctggagtctgcgatcgccatcgcaaccggaaagatgctgtccttggcggaacagcag

SEQ ID NO: 4331 - DNA, 482 bp, Homo sapiens
ccacctctagatctgtgtttgccggtctagacgttatcggtgcacttccttgaagtgccaggttgcagcgatcccagagcgttgataacgtgatctgatccctaagttgagacctgtcttcctgtaacgcttccgaataagaggtccggtcgaaaagagttgaaagatacgaaattaggtggtcgttggaatcctgatcgcagtaaagtggtccttggtaactgctcgagtagaacatgtctgcatccgccaatagtccgctaatagggagggctgtgcgattaaaggcttccatcgattgggtagtgtccttcaagtgggtggcgaagagccagtcgggcatatgtcatgaaggtttctccgaccgattaatggtttgctgcttgactagcctagggaaataataataaaggtaaagtaaacttttttaatgacatatggggcacaaaataactggtgtcttgtaaatgttctgttttttt

SEQ ID NO: 4332 - DNA, 512 bp, Homo sapiens
ccacttgaccagggacttgcaaagttgttcctgtcacctgttgagagctcagacttccagccagggcctgagcactgaggggctggatggagcctgtcacagcttgtgcctgccccccaacattgacttggacagggaagaatgttatccctccattttcattggcaatacctagtgacagagaaaaaaagcatgaagaaaatgttgataataagaggttctccgggcagaggtttacaatttctgctctcccaaaccctctctccccatcactcctctgtcccctatgtcactctagccaaacctcgggtaacttttcaatacatgccacagagaaggaactcaatatccaactctgccttccttaccttgcacaggaatggttaccgtttgcccattgttggctgtgacagtgacggttgccatggtgaccaaagtctgtccaggaactggtgtgacagaaacagtctccccagatacattctgcacagggacagcattgactaggggct

SEQ ID NO: 4333 - DNA, 484 bp, Homo sapiens
  unsure (388): n=A,T,C or G
  unsure (407): n=A,T,C or G
  unsure (421): n=A,T,C or G
ctggagcagcagatagaagggacagggttgcacttataacaccactatcctcccagccctggttttatcatcatcatcgagaaaaatacaattaatcagcagtgatcaaaggtaagtctaaacattccatttaactaacttaaatgtgacctggtgtgccgtgtcattctataaatgacataacagaataagactcactttctaattcacagcctctggttcaatttcaagtaagcaaatacattttgctttggttttgcttacaatattctgggaaatgcaggctataaataatcactcaactgttttgtgggtcaacagaatcactactactttcagtttcgttgatgccatttatatcatgagctcaagcacacgggcgcttcanaaggcactataaagtttanttttgatgtggtgngatgttctgatctatcttgaaaggtaaagaaacccacaggattcagcgtcaagccaatccatg

SEQ ID NO: 4334 - DNA, 525 bp, Homo sapiens
ctgctcgacagcatatggcaccagcccattttcaatttgctgagcatcggccaaagcctgtatgcgaaagccaaggagctggacagagtgaaggaaattcaggagcagctcttccatatcaagaagctgttgaagacctgtaggtttgctaacagtgcattaaaggagttcgagcaggtgccgggacacttgactgatgagctccacctgttctcccttgaggacctggtcaggatcaagaaagggctgctggcacccttactcaaggacattctgaaagcttcccttgcacatgtggctggctgtgagctgtgtcaaggaaagggctttatttgtgaattttgccagaatacgactgtcatcttcccatttcagacagcaacatgtagaagatgttcagcgtgcagggcttgctttcacaaacagtgcttccagtcctccgagtgcccccggtgtgcgaggatcacagcgaggagaaaacttctggaaagtgtggcctctgcagcaacatgatgcccctgagta

SEQ ID NO: 4335 - DNA, 469 bp, Homo sapiens
ctggtgaacctgtaccttgggaggtcacactttctctggaaagagcccgccaccatgagctggctggaggagaacgtccacgaggttctgcaagcagtggacgccggggacccagccgtggaagcctgtgagaaccggcggaaggtgctctaccagcgtgcacccaggaatatccaccgccatgtgatcctctctgagatcaaggaagccgtcgctgccctgcccccggacgtgaccacgcagtctgtgatggggtttgatcctctgcctccttcggacacaatctactcctacgtcaggccagagaggctaagtcctatcagccatggaaacaccattgctctcttcttccggtcactgttgccaaactataccatggagggggagaggcccgaggaaggagtggctgggggtctgaaccgcaaccagggcctgaacaggctgatgctggctgtgcgcgacatgatgg

SEQ ID NO: 4336 - DNA, 467 bp, Homo sapiens
gcgagaggcgccggtgtttcgagccgtggcaccggcatcggctgacactgctgcctccagctagttatttcgtcctcttccgttcttcacccctacaccttggaggtgaacttctcacctgagggctgtaaagactcgtttgaaaatggagagccaagaaccaacggaatcttctcagaatggcaaacagtatatcatttcagaggagttaatttcagaaggaaaatgggtcaagcttgaaaaaacaacgtacatggatcctactggtaaaactagaacttgggaatcagtgaaacgtacaaccaggaaagagcagactgcggatggtgtcgcggtcatccccgtgctgcagagaacacttcactatgagtgtatcgttctggtgaaacagttccgaccaccaatggggggctactgcatagagttccctgcaggtctcatagatgatggtgaaaccccagaagcag

SEQ ID NO: 4337 - DNA, 256 bp, Homo sapiens
cggtgccagactcggaggcccccccagggtgggatcgtgccgactcgggtcccacgcagccacctctgtctctctcacccgctcccgaaacaaagagacccggacaggcagccaagaaagaaacgaaggaacctaagaagggtgaatcctggttctttcgttggctacctggaaagaaaaagacagaagcttatttgccagatgacaagaacaaatcgattgtttgggatgaaaagaaaaaccagtgggtgaattt

SEQ ID NO: 4338 - DNA, 308 bp, Homo sapiens; identical to SEQ ID NO: 3350

SEQ ID NO: 4339 - DNA, 347 bp, Homo sapiens
cctgccgggacggccttcgggcagtgatggagtgtcgcaatgtcacccatctcctgcaacaagagctgaccgaggcccagaagggctttcaggatgtggaggcccaggccgccacctgcaaccacactgtgatggccctaatggcttccctggatgcagagaaggcccaaggacaaaagaaagtggaggagcttgagggagagatcactacattaaaccataagcttcaggacgcgtctgcagaggtggagcgactgagaagagaaaaccaggtcttaagcgtgagaatcgcggacaagaagtactaccccagctcccaggactccagctccgctgcggcgccccag

SEQ ID NO: 4340 - DNA, 221 bp, Homo sapiens
  unsure (10): n=A,T,C or G
attaggacangggcctggcctggcttctggtaataccagtgtacattgttactcccaatattgtttcccccacaggtaatcttggccgtctttcctggggccactgacactgagggtgtctgagtcaacacataggaggtcacagagtctgtgcagtgagagaggaggccgaggaggagaacggtccaggccatggctgaggcaccaccagtgctgcttcc

SEQ ID NO: 4341 - DNA, 331 bp, Homo sapiens
ctgtttactgccagccagaagttcaggaagaacacagctccatctctctccagccggaaggacatggacctagcgaagtcaggtatcaagatcctcgtgcctaaaagccccgttaagagcaggaccgcagtggacggctttcagagcgagagccctgagaaactggaccccgtcgagcagggtcaggaggacacagtggcacccgaagtggcagcggaaaagccggtcggagctttattgggccccggtgccgagagggccaggatggggagcaggcccaggatacacccactagtgcctcaggtgcccggccctgtgactgcagccatgg

SEQ ID NO: 4342 - DNA, 300 bp, Homo sapiens
gagacgctctacgagaccatcataggctactttgacaaaggaaagatgtgggaagaggccataagtctgtgcaaggagctggcggaacagtacgagatggagatctttgactatgagctgctcagccagaacctgatccagcaggcaaaattctatgaaagcatcatgaaaatcctcaggcccaaaccagactactttgctgttggatactacggccagggattcccctccttcctgcggaacaaagtgttcatctaccgcgggaaggaatatgagcgaagagaagatttccagatgcag

SEQ ID NO: 4343 - DNA, 172 bp, Homo sapiens
aaatttagaaattcccacatgtttaagatatatgcccatcccctttttagagtaatcaaaatttctatcacagttcacatactggaatacatagtaaaattgagatgtgtccaagagattttcaatgttaattagctcattctaaatagccaatataaggtaacttctgttt

SEQ ID NO: 4344 - DNA, 177 bp, Homo sapiens
ctgcagctataacctcttcttcagctccagcctcagccccagctccaacccccatccttgcctcagtttcaaccccagcttctgtcaccattcttgcctcagcctcaattcccattcttgcttcagccctagcatcaacttcagctccaacgccagccccagcagcctcttccccag

SEQ ID NO: 4345 - DNA, 359 bp, Homo sapiens
gcaaatctgttgttaaattacttaaagaaaatttaacaatggcataggcaccttgtcaactaaatgattttcataaacaccaaaaagtagttaaaacttttgtatacataaccaaaaaaaaaaaaaaagaaaactgtacatttacagtatttgctgctgttcattccccaaaatacaattaggacataattggctattaaaaatttataaaatttaataaaaaactttgctatgaatgtagtgttacccacttttgcattaaattcaccttcataaatcaaaacatcatgactctcattcttaaattaaatgacccaaaattagaagttccaaaaaagttctgagaacaattatggttt

SEQ ID NO: 4346 - DNA, 263 bp, Homo sapiens
  unsure (12): n=A,T,C or G
  unsure (121): n=A,T,C or G
ttgacggggctnctatctgccttccaggccactgtcacggctcccgggtagaagtcacttatgagacacaccagtgtggccttgttggcttgaagctcctcaaaggagggcgggaacagantgaccgagggggcagccttgggctgacctaggacggccagtttggtccctccgccgaagacgacatggtcattattacgatcccacacttgacagtaatagttggcctcatcgccggcttcgaccctgttgatggtcagggt

SEQ ID NO: 4347 - DNA, 448 bp, Homo sapiens
ccacagctttagactcggcctcatgcacgcgggtgggtctcctatgccctcctcagtcttttttctggttgtcttgcttattttttaataaaactaaaccttaaaaatattcttaaaaacctaaaaaagccctttagatatttttaactgggcttgccattcatatatcggagactgtgtctgaacagtgttgcgctttcctaaccccggcaccgtcctgtccgtcccttggagcacttttcttcctgtgcgtcccgtgcttcctttgctcagttcacttctggctatttgcagcaaagaaggccgtccttttcaaggcgtcgcctcgcttccttgcatggatgaagaggagtgattgctacatgttcctttctgttcccgccgcccaatagagttatcttgttttggttatttcctttgtggcatcagcgtccccaagtgcggccag

SEQ ID NO: 4348 - DNA, 237 bp, Homo sapiens
ccttcccatcagcacagttcgtgaggtggctttactgaggcgactggaggcttttgagcatcccaatgttgtccggctgatggacgtctgtgccacatcccgaactgaccgggagatcaaggtaaccctggtgtttgagcatgtagaccaggacctaaggacatatctggacaaggcacccccaccaggcttgccagccgaaacgatcaaggatctgatgcgccagtttctaagagg

SEQ ID NO: 4349 - DNA, 478 bp, Homo sapiens
ccaagaacaaggcgtgtgccacagtcacgtagtgacacaggtcacatttgctttctgccagcagaagagactggactccagtgcaggggagtgtgcaaggacaggttctggggggtggaggcatctgtggacatcccagggcaggggtgagggccagaacatccctaggtcctgagactacagtttctccacatttagatcagacattctcttccaaggaaggaaaccaagagaggctggtgaaccgtctggtaatgacaagccctcacttttgcagccctcttggctggtccctcagcaggtcttccctatgagcctgcaaaggagacaggcaggaatgagttccatgttcgagatagggaaactgagggccagggagaggcagtgactcgcccgagggcacacggcagaatgcaggcagaggcagagtggccctgggcatcctgagtccagttctgggcactctgcacctcacagg

SEQ ID NO: 4350 - DNA, 413 bp, Homo sapiens
aaaagggagattttctgaagcattgtaatttcattgaaagtgtacttgtttcttgaaaaaaatttttgaacagtgaataatgatgtaatacaactttcaaatttctttacgctgttattttattcctattgtggtcacatgtgaaagcatgtgatcaattgttgctgcatcagggatattacagattcttttttattgggtattatgaccttttctataaaagaataaggacattaaaatgtaagatgcatgataaaaatgtaagtggagaggctctttgtagttaacttatattaagtaatgtataaggtgggggttctcatttgtataatcctagcctatgacttaatgttgatgttttgctttgtcttttggatggcctaacctacattaacatgttggcagaccatttt

SEQ ID NO: 4351 - DNA, 337 bp, Homo sapiens
ccaccctctacaccgatgaggcaggccaatttctgagtgtcgttcagagctgggggcaggtaggtcaggtgattactttccagggctagagtagctcaatcaagttcctaacgcttcccatcaacttgcctacctttagccgaggtcacaagctccagctcagaataggaggcacacatgcggcgtatgaggtcaatctgctccagggtgaggcgcagggcatcccggtcctgggtctggcatggcacataggctgaccagaactggggggaaggccagggtttggcttggatgggggctgctttggaggaccctggactgctcacagcctccacag

SEQ ID NO: 4352 - DNA, 411 bp, Homo sapiens
aaaggtacttcaaaagcttattggtgcttctgtttgttttatcccatccttatagtttttttctattgttaatagatgtttgtgaaaatagaaggagcactagttctagttcatgctttcttttgcttttccatagcttctaaaactaacagtgaaaatgatatattgaaacagtaaattatagatctataccagatttgtaattgtgtatttcattgctatttgaagtataaagtaatggttctgtataatttattgggaaggttgaatttccatagcttcaaaatattcaaatttttttgcatggatttagctacccttttcaaaatttccttttgatgaagtcattgactaaagcgtcattaaaacagaacaagaaaagaattccaaaaaccctccaaaattcctttt

SEQ ID NO: 4353 - DNA, 397 bp, Homo sapiens
aaattaaagtggaagaaaaggagctttacagttgatagtttcaactccctaaaataatgccaacaaggtaagcttgcatagaaaaaaaacttcaaattattactggctacatgcttaaaaaattagaaatgcaggtattataatcatagtgcaaaaccatggcagtttgtgatgtctattactgcctaaggttgagaaatagaccgtagtacctccagttatcacagtttctggtcttttaatcaattatttctgccaactagaagcaatatgtatgtaaagatgggcagcacacatctgctgtgctattaattaacgaagtttgaggtcatcaccaccacctaaattggaaccaggactagggtcttgttgtcttcttgccagttactgccagcag

SEQ ID NO: 4354 - DNA, 440 bp, Homo sapiens
ccagcctcgggtttcagaaaaagcgctggagccagcggaataccaaagccttgtttccccctggaaccggtttggtattatgcctggttgtggttcttcccctctacatttggtgttgacacatttctttaataagctttttccctatcctttttcctttcagtcctattgttaaaggtgtcttgggtccggtcttaaatcaatttggttgtgactctgggtcccagaaaaaagctgctatctcattagcggcttggtgtgttcgaaattcatatttgaaccacatagaaaacatacactaccagtaccattacttccctgcatatatatgtaaaaaaaaggaaaaataaaacaaatcacacagaacacagaggggctgctgaacaacgcagcatgagtgtaaatacattctctttcgggtcagacatttggcctgacag

SEQ ID NO: 4355 - DNA, 507 bp, Homo sapiens
aaatcctccaagggatgagaaccaacctctgaaaagggaatctggagactatcctttccaagtctgaactgggatgtgagctaacttttggattttagcagttatttctttgatgacctttccttcgtcatcaagttccaggcagcagttagtaaggctgaactttccgcatactccctcttcctgggctaggaggtagtctaaggccagtctattttgataaatgacatttctcatttttgtggcttgctgggcaagcagattcaaggcccctgcagtttcattggtaatgatttctagtactgcctgcaatcttataatgcggttaagcatgtaaactggggtgcggtatccccacattccatcttctgcccaggtggctgggccataatattgaattattctttcaggaggccattcactgtccttccaatctcctatagttatgcctcttttgcttttccttttagtttcatcatagatggggtatcctaaggcttctccctg

SEQ ID NO: 4356 - DNA, 147 bp, Homo sapiens
  unsure (80): n=A,T,C or G
  unsure (89): n=A,T,C or G
  unsure (115): n=A,T,C or G
  unsure (131): n=A,T,C or G
  unsure (137): n=A,T,C or G
ggtggtggagggaggattgggatgcctgaggagggtggagtaggtgctggggccaacacggaggacaaactgttggtcgngtccagctncgcaaggtcgatgaacgtgccttggntactgcactgactgtntccttncgagtcaggc

SEQ ID NO: 4357 - DNA, 226 bp, Homo sapiens
aaaaagaagacacttccatggcgaattgaattagcccaaactttccccccaaatgggacaaggtattacattttggagtttttcttcgagtcacaaactaaactccagatctctctgtccaaaatttcatcgcttaaagaaaaaaagttctaattacaggagcggatactgagctgaagaacttcccaatttgagttggttattcctactaaacgcagccacacag

SEQ ID NO: 4358 - DNA, 573 bp, Homo sapiens
  unsure (560): n=A,T,C or G
  unsure (563): n=A,T,C or G
ctgctcggaaagctctggacagatgcagtgaaggctccttcctgctaaccacatttcctcgtcctgtgactgtggagcccatggaccagttagatgatgaagagggacttccagagaagctggttataaaaaaccagcaatttcacaaggaacgagagcagccacccagatttgcacagcctggctcctttgagtatgaatatgccatgcgctggaaggcactcattgagatggagaagcagcagcaggaccaagtggaccgcaacatcaaggaggctcgtgagaagctggagatggagatggaagctgcacgccatgagcaccaggtcatgctaatgagacaggatttgatgaggcgccaagaagaacttcggaggatggaagagctgcacaaccaagaggtgcaaaaacgaaagcaactggagctcaggcaggaggaagagcgcaggcgccgtgaagaagagatgcggcggcagcaagaagaaatgatgcggcgacagcaggaaggattcaagggaaccttccctgatgcgagagagcaggagattcggatgggtcanatngctatgggag

SEQ ID NO: 4359 - DNA, 395 bp, Homo sapiens
ctgtttacccctgatcgtgcagcagtgcttgctgttccttagaattttgccttgtaagttctagctcaagttggggggtggtgatagacatttaagaagccatatatcttttcagaagtaggtgtgatgtactaaaagtttgagacactttctagaagtctcactatttaagttatgactagtattggatttttggcatgtctttgggtttcatgtttcttaacccaactgcctgcagggccttatggctgtcaggagcagttcttgggaattaaagtaattactgaagaagtattctagtgagaaaatgaatttatgactcagaagcccctaaagacatgggtactaagcaacaaaataagcagatgttaattaactgtaattttctcttacag

SEQ ID NO: 4360 - DNA, 576 bp, Homo sapiens
  unsure (495): n=A,T,C or G
  unsure (551): n=A,T,C or G
cagcattcgggccgagatgtctcgctccgtggccttagctgtgctcgcgctactctctctttctggcctggaggctatccagcgtactccaaagattcaggtttactcacgtcatccagcagagaatggaaagtcaaatttcctgaattgctatgtgtctgggtttcatccatccgacattgaagttgacttactgaagaatggagagagaattgaaaaagtggagcattcagacttgtctttcagcaaggactggtctttctatctcttgtactacactggattcacccccactgaaaaagatgagtatgcctgccgtgtgaaccatgtgactttgtcacagcccaagatagttaagtgggatcgagacatgtaagcagcatcatggaggtttgaagatgccgcatttggattggatgaattccaaattctgcttgcttgctttttaatattgatatgcttatacacttacactttatgcacaaaatgtagggntataataatgttaacatggacatgatcttctttataatttctactttgagtgctgnctccatgtttgatgtatctgagcag

SEQ ID NO: 4361 - DNA, 444 bp, Homo sapiens
ctggagggaagctgccacatctcctagctaagcagtctgacttacctgttgggaaacaaagggatattgctctaagattgattaggatgattgtagctagagtcttgaattctatctgtatacggcagagaaactttatagagtgtagagaggtgagcgaaaggatgcaaaagcactttgagggctttataataatatgctgcttgaaaaaaaaatgtgtagttgatactcagtgcatctccagacatagtaaggggttgctctgaccaatcaggtgatcattttttctatcacttcccaggttttatgcaaaaattttgttaaattctataatggtgatatgcatcttttaggaaagatatacatttttattatatagtgcttaataaaccaccccaaaatgatatcagttcttcccaacttgatctcattttggggtggttt

SEQ ID NO: 4362 - DNA, 353 bp, Homo sapiens; identical to SEQ ID NO: 327

SEQ ID NO: 4363 - DNA, 531 bp, Homo sapiens
ccagtgcttgtcctggcagtaaggctttcccctgtaacaagccagagccctccaaggtaccagactcttcttactacacaggtactaacaggctggcaggttagagttggtggagtctgaggagagatattttctctttgttgccaacatcctgtttaccaaaagtgtcaccccaccatcttccataagctgtgaaacaaaatcaatgaggtcactaacttagaagggaaagaaagttttctgggtctttgttttcttgatttggggtaatttatacaagggcatacaagttgattttaagatgtggaactgggaggtagactagtttggataagaactttgaaatgttccttgtggatccccatttctggtcatcaagatgtggatgtacatttcttaaaattattacatgctgcatctttcagcctggagactgtgcagaaacatgagaggtgatgacacactaattatgggaagcagaattactggctgatggcccctgaggctgtgtgtaacaaaatgacaggacag

SEQ ID NO: 4364 - DNA, 245 bp, Homo sapiens
aaagtcctatacttgcctgagatctagtgaattattttggtactccttttatgagaagtgaagttgcagagtttggcttctgcatgcgggtttaatgtgcttgtccccccgccccgactttcttaggtgcagtggagtagtgcataggtggtgcatcctgagggctcccgaggggcatcacctgcccagtggggaagtgagcctgctttcagttagaggcagggcctgtgattgttgggtcacag

SEQ ID NO: 4365 - DNA, 251 bp, Homo sapiens
aaaaggtccaagatgactgcagttttacaaaaatgggcagggtggaaagttgcaaacttcatgtgcttctggatatcaagatttgtttttatacaatagtcacagttaaaaacaccctgctggtaatacataattacactttattaaggtcataaaccagcaataaacaataaagcctatacaacttgtagttctacttaatcactgactggtacagctaacatgagataagtgaaaagttcctatggttt

SEQ ID NO: 4366 - DNA, 224 bp, Homo sapiens
aaaaatataagccccaaaaacaatgacacaaaattcatttggttaattcatgtaaaggaaaaaacagcaacaccaccacacaaacaggaaagtgggagtatgattaggaggggtgagatgaaaactattttacagtaacatttccaccaaaagactgtcctaagaacacgctgtcaatacagttcacagggaaaaagcaaatgtggtatttttttgtatttttt

SEQ ID NO: 4367 - DNA, 244 bp, Homo sapiens
  unsure (28): n=A,T,C or G
  unsure (72): n=A,T,C or G
  unsure (140): n=A,T,C or G
  unsure (141): n=A,T,C or G
  unsure (166): n=A,T,C or G
  unsure (179): n=A,T,C or G
  unsure (207): n=A,T,C or G
  unsure (221): n=A,T,C or G
  unsure (227): n=A,T,C or G
ctactaacgttgcttaacaaggatttanaaaaggaaatacattctctttgctggtataatggtataaatcanatcttcaaatctatgggaacgagtcatcttctctgtcctctatctcaagaaattagctcttttacagnngtttttatgaaatcttttctttcanttaaatcataagnaggataattttcatagacctttttgcanatctgtttcattgngacttnttccaagttagcactgg

SEQ ID NO: 4368 - DNA, 526 bp, Homo sapiens
ctgtagctaccttagtgacaaagtttaatcagcttcctgttgagctaaaaaaggaagtagagatgaaaggtgtgtggagcatgccatcaaaatactctgaagaaggagtttataacgttcagtacagtttcattaaagaagctgaacatcactgcttgttacatagcccaattcctgtgaactgccccataagattgctccatggcatgaaggatgacattgtaccttggcatacatcaatgcaggttgccgatcgagtactcagcacagatgtggatgtcatcctccgaaaacacagtgatcaccgaatgagggaaaaagcagacattcaacttcttgtttacactattgatgacttaattgataagctctcaactatagttaactagtatcacatgtttagttggtatgtaaactaatgtatccagaagattggaagagggataagaaatgaaagatcctgatactttaggtttttccctttcctctattttgtaaatataagatgagtattatttaatgatgt

SEQ ID NO: 4369 - DNA, 500 bp, Homo sapiens
ctggagcagcagatagaagggacagggttgcacttataacaccactatcctcccagccctggttttatcatcatcatcgagaaaaatacaattaatcagcagtgatcaaaggtaagtctaaacattccatttaactaacttaaatgtgacctggtgtgccgtgtcattctataaatgacataacagaataagactcactttctaattcacagcctctggttcaatttcaagtaagcaaatacattttgctttggttttgcttacaatattctgggaaatgcaggctataaataatcactcaactgttttgtgggtcaacagaatcactactactttcagtttcgttgatgccatttatatcatgagctcaagcacacgggcgcttcagaaggcactataaagtttagttttgatgtggtgtgatgttctgatctatcttgaaaggtaaagaaacccacaggattcagcgtcaagccaatccatgcccaggcacatcgcag

SEQ ID NO: 4370 - DNA, 542 bp, Homo sapiens
cctgtgttcaccctggtttattccagagtcacgtcagtcaatcacctctcatactgggcgtcataggtgtttgtctggctgatccctccattcgaagctggtcctgaaagttcctggctcctgctggactccagcagactttgctggatggcaaactgcattatctcgtaatcttcatcttgcaaatgcacatttctgccattgtcttgaacatagtaagattcgggaatttcaaacacagattgatcaacctcaaagtttgtgatgtgggaagctgaatcagcctgggtcccttccacattttgagatacagattcttcggcagtgctacagccattaacatttccaaatgtaatccgtgcatttaagacatgaaacaagggaatttctattttgacaggaaatccaggtgggaattccaatttgatgaaatctctcagtcttgcaaaatgagcactcgttcgagccattaggtcaatgatgggaatgacctgctccaccagagagaggggaaactcttcacacatccacaacattgcttt

SEQ ID NO: 4371 - DNA, 396 bp, Homo sapiens
ctgtcgccatgaagtaagcacgacccgtggttcccaatccgcttacatcctcgggcagaactcctctctgtcgtccctggcatggctgtagacaccctccctgatggactttcactttttgttgcagggtcgagctgtgcagttttagcgggtacaagatctaccccggacacgggaggcgctacgccaggaccgacgggaaggttttccagtttcttaatgcgaaatgcgagtcggctttcctttccaagaggaatcctcggcagataaactggactgtcctctacagaaggaagcacaaaaagggacagtcggaagaaattcaaaagaaaagaacccgccgagcagtcaaattccagagggccattactggtgcatctcttgctgatataatgg

SEQ ID NO: 4372 - DNA, 563 bp, Homo sapiens
  unsure (547): n=A,T,C or G
cggccgaggtaaaattctgagtgatccagggtatgacctagggaatgaactagctatgaaatactcagggttaggaatcctagcacttgtctcaggactctgaaaaggaacggcttcctcattccttgtcttgataaagtggaattggcaaactagaatttagtttgtactcagtggacagtgctgttgaagatttgaggacttgttaaagagcactgggtcatatggaaaaaatgtatgtgtctcccaggtgcatttcttggtttatgtcttgttcttgagattttgtatatttaggaaaacctcaagcagtaattaatatctcctggaacactatagagaaccaagtgaccgactcatttacaactgaaacctaggaagcccctgagtcctgagcgaaaacaggagagttagtcgccctacaggaaacccagctagactattgggtatgaactaaaaagagactgtgccatggtgagaaaaatgtaaaatcctacagtggaatgagcagcccttacagtgttgttaccaccaagggcaggtaggntattagtgtttgaaaa

SEQ ID NO: 4373 - DNA, 267 bp, Homo sapiens
aaatgcttccttcaaagaacaaagttgtttttggtgaaatacaatttttccatttttttctttaagtttctgaattacaattaattggaattttaatctactggttactgtgttggacagcatgggtcagaagaggagatgaaaaataacaaaaaattaataaatggtgataacagttgataaaaaagcaagcatgacattgatttagacaaatgtgattgttgagagtgattgtggaccactctccattagggtgttcaggaaagg

SEQ ID NO: 4374 - DNA, 214 bp, Homo sapiens
ctgccctcctccacctaaaccccttcgactcttctgctttgacaaagaaaatgacattggggaggggaggtgctccgcctcccagcttttctcaaaatagtcctatagatactggtaatctggaaatgaagaagtaattctgtctctgcacctacttttgcagaatgttcaaggaagtattctgtgttagtattaatgccaaaaagttgttttt

SEQ ID NO: 4375 - DNA, 145 bp, Homo sapiens
ctggaggtgctggaccgcgtgtttgagaggcagcactactcagacatcttcaccaccacagagcccatcaagcccgagcagaccacagagtattcagccatggcctcgctggctggtgggctggacgacatgaaggccaatctgg

SEQ ID NO: 4376 - DNA, 225 bp, Homo sapiens
ctgcaatactccctcttcagagatagccagaccctcggattgggctggagcaggtcccccagactccagatccctgccatgtggactgaagactcagggtcttactggtgtgaggtggagacagtgactcacagcatcaaaaaaaggagcctgagatctcagatacgtgtacagagagtccctgtgtctaatgtgaatctagagatccggcccaccggagggcag

SEQ ID NO: 4377 - DNA, 519 bp, Homo sapiens
cctttgaggcccagaacccagaccccaaagcgcctgtggtgctgctgagtgagccggcctgtgcccatgccctggaggctttggctactctcctgcgcccacggtacctggacctgctagtctccagcccagcttttccccaaccagtgggttccctgagtccagagcctatgcccctagagcgttttgggcgccgcttcccccttgccccagggaggcgtctagaagagtatggtgccttctatgtagggggctctaaggccagccctgacccagaccttgacccagacctgagtcggctgctcttggggtgggcaccaggtcaacccttctcctcctgctgtccagatacagggaagactcaggatgagggtgcccgggctggacggctaagggcacgaagacgatatctggtagagagggccagagatgcccgcgtggttgggctgctggcaggcacactgggtgtagcccaacaccgtgaggcactggcccacttgcggaacctgactcaggctg

SEQ ID NO: 4378 - DNA, 475 bp, Homo sapiens
ccagagccaggcggctcatcgagctctacaaggaagctgggatcagcaaggaccgaattcttataaagctgtcatcaacctgggaaggaattcaggctggaaaggagctcgaggagcagcacggcatccactgcaacatgacgttactcttctccttcgcccaggctgtggcctgtgccgaggcgggtgtgaccctcatctccccatttgttgggcgcatccttgattggcatgtggcaaacaccgacaagaaatcctatgagcccctggaagaccctggggtaaagagtgtcactaaaatctacaactactacaagaagtttagctacaaaaccattgtcatgggcgcctccttccgcaacacgggcgagatcaaagcactggccggctgtgacttcctcaccatctcacccaagctcctgggagagctgctgcaggacaacgccaagctggtgcctgtgctctcagccaaggc

SEQ ID NO: 4379 - DNA, 366 bp, Homo sapiens
ctgtagcttctgtgggacttccactgctcaggcgtcaggctcagatagctgctggccgcgtacttgttgttgctttgtttggagggtgtggtggtctccactcccgccttgacggggctgctatctgccttccaggccactgtcacggctcccgggtagaagtcacttatgagacacaccagtgtggccttgttggcttgaagctcctcagaggagggcgggaacagagtgaccgagggggcagccttgggctgacctaggacggccagtttggtccctccgccgaagacgacatggtcattattacgatcccacacttgacagtaatagtcggcctcatcgccggcttcgaccctgttgatggtc

SEQ ID NO: 4380 - DNA, 450 bp, Homo sapiens
ataaagcctaaagcaaagttagatttgggggttattcagccaaaattaccgttttagaccagaatgaatagactgcactgataaaatgtactggataatgccacatcctatatggtgttatagaaatagtgcaaggaaagtacatttgtttgcctgtcttttcattttgtacattcttcccattctgtattcttgtacaaaagatctcattgaaaatttaaagtcatcataatttgttgccataaatatgtaagtgtcaataccaaaatgtctgagtaacttcttaaatccctgttctagcaaactaatattggttcatgtgcttgtgtatatgtaaatcttaaattatgtgaactattaaatagaccctactgtactgtgctttggacatttgaattaatgtaaatatatgtaatctgtgacttgatattttgttttatttggctattt

SEQ ID NO: 4381 - DNA, 486 bp, Homo sapiens
ctgctccatgtccttcacctctgccagggcctcatcccggagaaggcccatctgctcgtggttgtagaaggggcaggctgcctgcttctcctgcctcctcctctttggcttctcctcctcagctcctttcttcttctctgagggtggcacaggcacaaagagagaaaacagagaggacagcaactgtccacgggcccgagagggggttgtgtaatgttgagacccacttccacagggtggggtctataagaccctcccaagtactgcctactgtgtctcatcggaacactgtaacgttttacttttgttctccagaaagagcccgtaaaatcatctccaagccaacgattcggaccagacgctcacccagagaataggaacactttttcccaaggagaggggactcagggaggaactggggtctcctctgccattctttctatgaaagacactgaatggtcttcagtcactgccacccctgcctca

SEQ ID NO: 4382 - DNA, 438 bp, Homo sapiens
ctgcagccccctggtgcccgcagcaaagcagacacttcccactgtccccaacaccagagggaggaaagtaaagaagcggacattgaagctagacctgggtgctacaagtgagatctacagcgactgttccacacaattgggggccctctcagcattctggggtggctagagtctctgtgtctctgggctttctcctgagtgttgtaccccatgctactgcgaaggtgaggacacggacactgagaaacaggagacttactgagacgtcactgatggtgatggctgagatgccttcccgatgggcgggcaggcgggtcacgtgggtgaggtggtccagatcccacaggatacaggtgcagtcctgggagccgctcaccaggaggctgaaggtgactgacgctgccaggcacgtgacagcctgtgtgtgtccatacaagg

SEQ ID NO: 4383 - DNA, 510 bp, Homo sapiens
  unsure (33): n=A,T,C or G
  unsure (66): n=A,T,C or G
  unsure (72): n=A,T,C or G
  unsure (74): n=A,T,C or G
  unsure (188): n=A,T,C or G
  unsure (264): n=A,T,C or G
  unsure (340): n=A,T,C or G
ccatacctaggactagcccgatctgtgtgtcanccactgacccattttaccagtgaggaaattgangctcananaggttaagtgacttgcctgtggtcacacagggaacaagggcagagccagaatgtcaacggaggagtgtacaccctttcaactacgctctgtgcgcaatgtttaaccggagcctngtgtattcatttgtaagtcacagaaaataattatatttacagggggaatctaaagatttcaggggacaacctgtanactgactctcatttaacaggggcccaataagcgattatgcccatccacttgagcttgtactgacgtaactactctnctcatgactaccactcaaagaatatacaaaggacctctcattttcccagaaataacctctctatatgaacaggcacagccaatgtggaatggccttatgtctactgagcacatcacatgcacagctcttcatttcatccccacactaatcatgtaatacaggcatgactg

SEQ ID NO: 4384 - DNA, 368 bp, Homo sapiens
cacagcatggacatgagggtccccgctcagctcctggggctcctgctgctctggctcccaggtgccaaatgtgacatccagatgacccaatctccttccaccctgtctgcatctgtcggagatacagttacaataagttgtcgggcctctcagaatatagatcggtggttggcctggcatcaacagaaaccaggcaaagcccctaatgtcctaatttatgcgacttccagtttagaagaaggggtctcactaagatttactggcagtggatctgggacacaattcaatttaaccatcaccagtctgcagcctgacgattcagcaacttattattgtcaacattattctgcatctcttcgcagttttgg

SEQ ID NO: 4385 - DNA, 193 bp, Homo sapiens
cctcaccgtgagaccttacaaagccggattccggcagagttcctctatctcgtcttgttgctgattaaaggtgcccctgtctccagtttttctccgtctcctgggacgtagcaggaaatcagcatcatggttgggttcaaggccacagatgtgccccctactgccactgtgaagtttcttggggctggcacag

SEQ ID NO: 4386 - DNA, 609 bp, Homo sapiens
aaaaaaaggcccccagggcaagttatttacagtttaattgccactgtcaactgatctggaccttgatcgggaccgggacctctggcgatccacagatgctggagacttagatctacttgaagaaccacgtttctggctcttctcaggcacgggagacctactaacagaacgggacttgctccggctccggctcctgctcctgcttcttgaccggctgtaagatttgcgactacgggaacgggatcggctacgagacctagaggaacttctggtccgggatcgagacctgcttcttgacctactgtgccttttgctgccttcaattaattttatttttctcccatttatttcctttccagaaagtttttcaatagcattctttaagtcaccataagaggcaaactcaaccaccccttcatttaatttaggtcggtgtgcatccgcaaacgttacttccccagcttgtctcatgaaatctttgagatccttaacacaagataattgtgttaagcaaagaagaggaaaggggacacacaaacaatcacatgatataaaaaaaacaagactactgaaagagaagatgttagataaagtacaaacatggcattt

SEQ ID NO: 4387 - DNA, 575 bp, Homo sapiens
  unsure (458): n=A,T,C or G
ccttattcctgcaatcaacagttgaacctcattttatccagcagaaggacctccatttcagacctcattggcaagaaaacaagcccatctcttctgaaagttaactgtttctttcaggaatgaggaaaccagctacattccttatggaaaggcttagatctcatttggagaaggtctttcaacctggtatctcctatttagcatcaaatgaagttggaggatcactcaaagtaagcgaccacttacaaccttcagcagagaccagcccttaggattcagagagatcattcacataactggtttctgacattttcattaacaacaacaggaaagaggcagttcccattacaaagcacttaaaattctagagataggggaatattccatcatggacattttttaagtggttattcactttaacttgaagtacaggttatctaccctgtattaaaagctgntgcctaaagacatctagtagtaccaagatgatgggatggaattttaacatcaggttttgtagccctactgaaaatttagcacgatcagcacaagtctagaaaccagactaccctgct

SEQ ID NO: 4388 - DNA, 397 bp, Homo sapiens
aaatatgttaaccagattaaagcatgcaaaagatccaatgataaagacattaaattaataatatgctaatagtatctaatttacccactatagggtctttatactctgtcacaaaaatattagtaaacatcaatttgaagttcggtgaacggacctgattcctgatttgtatatatgatatacccttgcatttatatggctaactttacaggctgtgttacagtacagttagaggaattggtataaatttactccccatactgcagtaaataatggttggaaatgattctcctaatttgctctgtgaactcagaatgcattaatgaattaacaacacaggtcactgagggaccaaaattcctcagtattcacattaacttttcccatgaaaagcttt

SEQ ID NO: 4389 - DNA, 471 bp, Homo sapiens
aaaggcattttggcattttggaataaagttacacaggtgcataccttatggaccaataatcccttgcctaaagaaacttttgcatatgtctatcaggaaacatgaataagaatatccagtgcagcattgtttacaatagtgaaaagctgaaaacaacttcaaaatatttatcttaggaaaactgattaaaaacctggaggaatctcagacacccaatattgagtaaaaaaggcaagtatgaaaaccatatataagataccaattttgtaaaagtaaaaacacttataattaaagaaattgttaaagagatatacatatatgtatataaacctattaaaaaaagacaatgggaaacaacaaaatcagattgatgctaccccggggatcaaggtaagtgattgaatagagaaaaactattcttggggctttgataatattagagatcttcttcataacctgggtggttccttt

SEQ ID NO: 4390 - DNA, 405 bp, Homo sapiens
aaaagtgtcacaagccacagtggagccatatacatgcagttcagcctgattttacccttattttcttctaatacagactccattacaattttggaccatctgcagagagtacagatacacaaaaccaaaacaagtatctatgataataaaatcttcagaaacttttcagacgtacctttcatggagccccctccctcccccgagtagaaccctaacagggacctcgtttgttcctgtgagtcctgccaggacttgtttaatgggtgcttggggttttggttttcctccttattcttcctcctcctcctcctcttcatcatcatcttcgtcatggcagtgtgtaatttcctggggggccagtgggaagaggttgggaggtttaatctcactaattgaccgtgtcag

SEQ ID NO: 4391 - DNA, 212 bp, Homo sapiens
ccatgagagtggagagctcaaccagtatagtgccaagtctggagaggtgttggtgaatgttaaggagcactcccggcagatcaacgacatccagttatccagggacatgaccatgtttgtgaccgcgtccaaggacaacacagccaagctttttgactccacaactcttgaacatcagaagactttccggacagaacgtcctgtcaactcag

SEQ ID NO: 4392 - DNA, 306 bp, Homo sapiens
ccaaaactgcgaagagatgcagaataatgttgacaataataagttgctgaatcgtcaggctgcagactggtgatggttaaattgaattgtgtcccagatccactgccagtaaatcttaatgagaccccttcttctaaactggaagtcgcataaattaggacattaggggctttgcctggtttctgttgatgccaggccaaccaccgatctatattctgagaggcccgacaacttattgtaactgtatctccgacagatgcagacagggtggaaggagattgggtcatctggatgtcacatttacct

SEQ ID NO: 4393 - DNA, 445 bp, Homo sapiens
  unsure (258): n=A,T,C or G
  unsure (304): n=A,T,C or G
  unsure (317): n=A,T,C or G
  unsure (329): n=A,T,C or G
  unsure (362): n=A,T,C or G
  unsure (364): n=A,T,C or G
  unsure (367): n=A,T,C or G
  unsure (376): n=A,T,C or G
  unsure (379): n=A,T,C or G
  unsure (383): n=A,T,C or G
  unsure (393): n=A,T,C or G
  unsure (395): n=A,T,C or G
  unsure (399): n=A,T,C or G
aaatgcattcattttacacttgtgagtttatcattgactttaagaggtagaaatgaaaaatgaaaattaaagctaaagcctttttatctattaatgcagatatattagaataagaatattttgggtttgtgtttattttttaatgaatttatgtttacttgatatggaaaattacgctttataggtggaaaagtagcaaataaagattaagtaaaagtaagtgaaaatgatggggaatatagtattggaattttatanctagttaaaacaataagtatcatctaatttgggtgtttattttgcngatgagaaaacanacctagaaccgnggcatgttttgcctgaaacatacagtgagttananacngggcctaanatngctnctagcatcanancaancccaagaatccatcagcaacctcagaccaacccaagaagataattt

SEQ ID NO: 4394 - DNA, 290 bp, Homo sapiens
  unsure (148): n=A,T,C or G
gtcaggacacagcatggacatgagggtccccgctcagctcctggggctcctgctgctctggctcccaggtgccaaatgtgacatccagatgacccaatctccttccaccctgtctgcatctgtcggagatacagttacaataagttgncgggcctctcagaatatagatcggtggttggcctggcatcaacagaaaccaggcaaagcccctaatgtcctaatttatgcgacttccagtttagaagaaggggtctcattaagatttactggcagtggatctgggacacaat

SEQ ID NO: 4395 - DNA, 447 bp, Homo sapiens
  unsure (368): n=A,T,C or G
aaatatatgggaggatgtgcgtaggttgtatgaaaataccaagtcattttatatcagggacttgcgcacccacagattctggtatctgtggaagtcctcggccactcccccgtggagacaggacaactgtgtgttgacagaagtcacatgggagaatgctcatagcagcccccacgcagtgacacaacctggaacaccgcccagtctgaccagcacagaaaagcagcacctgctgaattcatgccacgggggactccacagcagccaaaagagcgagctgtggctactgtatgatcagtggccccaccagtgatgcctcggacataacgctgagtccaagaagcctgagacccaaggggatagactgngggattccatttctgtagtattcagaaccaggccccactggtggacagtgttagaagttggaactgggttctcctctgt

SEQ ID NO: 4396 - DNA, 627 bp, Homo sapiens
  unsure (608): n=A,T,C or G
ccacctggtgagcagacctgagatgggatgggggacatacagaagagaccattacacgaggccccaggaagtaccctcagggcgttcaaacagctcaccctctcatccagctcactgagggctctggcctcttcaacatctgctccctaggacccctcccgaggctcgggcagcccctcatcctatatcccccacagcatgctaggttaccatttgccctctacccccattccacaggccaagggctcaggatcaccttgacccagcaagatcagcctcacccacttaccccacacagcccatggttggcagaacccctcctacaccctgaactctgacacagagaggcagccctggcccaatgtcaccagcacccattcctctcgctgccaatgacagtgacaagccaagcagcacgtgactagcacctgactcttgacatctgcaaggagcagtagcagagctgaccagccccctgggaatcaacatcaggcttctctacttttgtgccctctccctgccccacatggcccctagctcctgaaacagtcccagcaactgggctataaaggcccagaatcaaatctgagtatctagatgaggcttanaaatctaggtgctactcag

SEQ ID NO: 4397 - DNA, 262 bp, Homo sapiens
  unsure (148): n=A,T,C or G
  unsure (151): n=A,T,C or G
  unsure (160): n=A,T,C or G
  unsure (183): n=A,T,C or G
  unsure (205): n=A,T,C or G
  unsure (221): n=A,T,C or G
  unsure (227): n=A,T,C or G
  unsure (229): n=A,T,C or G
  unsure (234): n=A,T,C or G
  unsure (238): n=A,T,C or G
  unsure (248): n=A,T,C or G
  unsure (249): n=A,T,C or G
  unsure (252): n=A,T,C or G
ctgcccagacacatgggcttgtgacattcgtgaaaaccaaccctgtgggcttatgtctctgccttagggtttgcagagtggaaactcagccgtagggtggcactgggagggggtgggggatctgggcaaggtgggtgattcctcccangangtgcttgangccccgatggactcctgaccatnatcctagccccgagacaccatnctgagccagggaacanccccangnttggngggngccggcatcnnccntagctcacca

SEQ ID NO: 4398 - DNA, 323 bp, Homo sapiens
  unsure (240): n=A,T,C or G
  unsure (242): n=A,T,C or G
  unsure (261): n=A,T,C or G
  unsure (272): n=A,T,C or G
  unsure (273): n=A,T,C or G
  unsure (291): n=A,T,C or G
ccttcttcacattgtggcagaaactaacatcctttcaggaagatgggcactagggcaaaggtgcagccctcccaaaccccgggccctggtctcccaatctccaatatctccgcttctcaagccatatgtctctctcccacaaacagagacagccccttccctccagcattctctaccaagcccttcaaaccttgtcagcctgtctcatatgctggacttcccagctcctacccatcacanantacaaactgatccagccgntgaaggaggcnncagagaacactgaagggncccgagggcaccactgcacatcaaagcaccag

SEQ ID NO: 4399 - DNA, 316 bp, Homo sapiens
  unsure (161): n=A,T,C or G
cctgtcatgaataatcaccgttctcctttcgtctcgctcccctcgtacttctcgcctgtctgattctctaagttcatttcttggtggtggaggctcatttcttctggagtcactgaaatttttgggatatctttcgaagcttggatcttcccttcgtgcantaggtcgtgcttttttcccctcactttgaccaacaaagcgatcccgcctttcaaaagatgaagactgtactgctgaactctcaggaaacctgcctctctctcggtgatcaaagtcattaaatctgttctgttggcgagagtagtcggatccatgg

SEQ ID NO: 4400 - DNA, 243 bp, Homo sapiens
ctgttcttctttcagtcattccaactaaaacagacattttgcatagagagaataccagcccacttggtttcttgttttttattattggcgtcagctaggactatacgtggccttaaacgtcatgcactgatggacagaagagaaaaaaggatgaaaaaaaagacaaaggaggggaaagaggagcagcagtgaaaatttgtaataaaaactcttcttaatttataggtaagttttggcattttt

SEQ ID NO: 4401 - DNA, 493 bp, Homo sapiens
ctgcccagggcagcacagggcaggcaatgagtgtgagaccccacaatgcaacagacccttacaaaccccgcaaggccacacaccctgggtccatctgccctgctgtttcttcaggaaaaaacccagaatggaaatgctggagccccaggggctggagaccggggagaggtggcctgtaaggctgtcccatcaccatccccgcacgtcagaagcaccgtcacgttggaaaagaatgacgcttattccaccagttctgaagccagatgtcctcacaaccgaagcagccctgtttgtgcttgggctatgacttgagggtaattaaactgtcaaaacaccctccctactatttccattttcttgcagttggtgtcatttagtcactgcaggctgacagacttattacaggattgagacatgagaatgaacagtcagaaacctataaatgaactcaccacaaatggctgctggaaaggaagaaaactatctgtcgatg

SEQ ID NO: 4402 - DNA, 445 bp, Homo sapiens
aaaataggtgatcttgggcatgtaacaaggatctccagtccacaagttgaagagggcgatagtcgttttcttgcaaatgaagttttacaggagaattatacccatctaccaaaagcagatatttttgcgcttgccctcacagtggtatgtgctgctggtgctgaacctcttccgagaaatggagatcaatggcatgaaatcagacagggtagattacctcggataccacaagtgctttcccaagaatttacagagttgctaaaagttatgattcatccagatccagagagaagaccttcagcaatggcactggtaaagcattcagtattgctgtccgcttctagaaagagtgcagaacaattacgaatagaattgaatgccgaaaagttcaaaaattcacttttacaaaaagaactcaagaaagcacagatggcaaaagctgcag

SEQ ID NO: 4403 - DNA, 68 bp, Homo sapiens
  unsure (8): n=A,T,C or G
  unsure (10): n=A,T,C or G
  unsure (30): n=A,T,C or G
  unsure (34): n=A,T,C or G
  unsure (39): n=A,T,C or G
  unsure (42): n=A,T,C or G
  unsure (56): n=A,T,C or G
aaaaagananagagaaatggagaggttaantggnttccntanagttaaccaggtancaagctgggacg

SEQ ID NO: 4404 - DNA, 496 bp, Homo sapiens
  unsure (299): n=A,T,C or G
  unsure (347): n=A,T,C or G
  unsure (357): n=A,T,C or G
  unsure (406): n=A,T,C or G
ctgctttcacttctgcttcaacttcttctggcagcaactcagaaagcttggcagaggcatagttcttcctatcgccaactttctgtaaacatttgcagtatgttaaattatctgaaataatttttcctaattcagggaaatgccagccataccattctctacatcgcataatgtagttgtttagttctttatccaagtcatctaacaaggaaattgcctgaacaatcattgtgtctactttatcagcgctaaacttcaatctatatcgagacaggctgtgagccaatccaagacacatngctgccatttcacgtggttctaccccagggattaatccatccatttgngaacgaattnctctcataagttcattaacaacaggactatggatacaactgagattcancttttcctttatgacccctcctagtttagcatcagctactgccagcggttcatgggcttcttttactattttcttcagaacttttttcag

SEQ ID NO: 4405 - DNA, 418 bp, Homo sapiens
  unsure (35): n=A,T,C or G
  unsure (51): n=A,T,C or G
  unsure (110): n=A,T,C or G
  unsure (116): n=A,T,C or G
  unsure (118): n=A,T,C or G
  unsure (121): n=A,T,C or G
  unsure (128): n=A,T,C or G
  unsure (132): n=A,T,C or G
  unsure (149): n=A,T,C or G
  unsure (158): n=A,T,C or G
  unsure (166): n=A,T,C or G
  unsure (174): n=A,T,C or G
  unsure (298): n=A,T,C or G
  unsure (303): n=A,T,C or G
  unsure (356): n=A,T,C or G
  unsure (365): n=A,T,C or G
  unsure (367): n=A,T,C or G
  unsure (371): n=A,T,C or G
  unsure (380): n=A,T,C or G
  unsure (415): n=A,T,C or G
aaaaaaatgctggtctttattcaatataattgaanggtcacctagaaaatngaattgtgaattcagttccaaggtatttgtgtcttaaactatgaacaactttacttttntttcangncantttaatntatngttttaacagaaaactnacatatttngtttttgnaaaggaanccttaaaaatgtcatgctggtattgggctacaaccggaaaaatactgaaggtacacaaaagcagaaaggtaacatttagaaggatactgttttccaaacagggcaatgatgtgaatgatggtancatantatgtgtttcataaatttgtagaaaatattacatatggtataatcaggaattntaattggtngnttgnagtgtaaanaacttagacataaattttcaaaattacaagtgatntga

SEQ ID NO: 4406 - DNA, 565 bp, Homo sapiens
ggtaaagttatgtaaatatgtagctatgtaaatagctataaaataatatttacaattgtgaatagtatgtaaatagttgtgaacataactattgtgaataatatatgttatagttgtgaatgtaaatagtattcacaattgtgaatacaatgtaaatagctttcacaattgtgaatacaatgtaagtagctatgtaaatagtgaatacaatgtaaatagctatgtaaatagttgttatgctgattagggaataatgagaaggaaaaaaagtatacatattcagtacagatgcagtcatctttttttcccctcgaacatttttgatccacaattggttgaatccacagatggggaacacacagtcttggtaaatttaaccaacaaggagggtaaacgcatcccaacagggaaggtaaactgcacatccatcagtacctctagagggcatcactggtttatagctcaatacagtgactatatcagaataatggcctttagttttcctgaaagattaaattaggcttgctgttgttgaatgagataatcaaacatatgatgtaatttt

SEQ ID NO: 4407 - DNA, 597 bp, Homo sapiens
  unsure (583): n=A,T,C or G
  unsure (592): n=A,T,C or G
gcggcgtctcctccgggacgctgaggggcccgaggagaccgtgaggctctggcctgcagctcgcgccgccatggacgctgccgaggtcgaattcctcgccgagaaggagctggttaccattatccccaacttcagtctggacaagatctacctcatcgggggggacctggggccttttaaccctggtttacccgtggaagtgcccctgtggctggcgattaacctgaaacaaagacagaaatgtcgcctgctccctccagagtggatggatgtagaaaagttggagaagatgagggatcatgaacgaaaggaagaaacttttaccccaatgcccagcccttactacatggaacttacgaagctcctgttaaatcatgcttcagacaacatcccgaaggcagacgaaatccggaccctggtcaaggatatgtgggacactcgtatagccaaactccgagtgtctgctgacagctttgtgagacagcaggaggcacatgccaagctggataacttgaccttgatggagatcaacaccagcgggactttcctcacacaagcgctcaaccacatgtacaaactccgnacgaacctncagcc

SEQ ID NO: 4408 - DNA, 561 bp, Homo sapiens
  unsure (478): n=A,T,C or G
  unsure (509): n=A,T,C or G
  unsure (550): n=A,T,C or G
aaaccactccaacaactgctgtgaaggtcactgtgcagagaccctgggtaggggaggctggagccaggtgagtgtgacaggtcacagatggctctcaggccacctgccttcagctccttttgtttcgggttctagccagaagccctggggcctgtctcttgcctcttcttgtagcatgagacacccttgggggccctggggaagggaaggccagtggtgtggcttccctttcagcctagcaacgcccaaacccttttcctctacctggctccacttgtccccagatgctatctccaaattccaagtagcaaaattcctgggtttccccttcccagctcagagtcacttatggctggaatgtgggacaaactcttctaccagaaggtccagggcggttgcagcagctcaaaggtggggatgctggtgacattgactgggatggaaatgatggcccatggcagcccatgctgttccaganagcggcggatcatgtagccgtctcggccgancaggaggagggcggggatgtcagctgtgcgctgggtactgncctggatcatc

SEQ ID NO: 4409 - DNA, 121 bp, Homo sapiens
  unsure (45): n=A,T,C or G
aaatgttattaacatcaatacctactatttctagttaaaattcanatggagaagaaaaataatagctcccacgcattacatttgtaacttcaaatggtaagcctctcaggagctttccagg

SEQ ID NO: 4410 - DNA, 620 bp, Homo sapiens
  unsure (563): n=A,T,C or G
  unsure (584): n=A,T,C or G
  unsure (607): n=A,T,C or G
aaaggcaaatctttactccttaaagaaaaaatacaaactgtggtatttttaagagatcgttatattttacataatataaacaaaatcactaatgcatctatatgcttggtttccttaaactacaatgaaccacagaatgggtgaaaatgcatttactttttggtggcaaataaacatactggaaaaaacacgtaacacatagcatgccttttttccttactgtctacacacaggaactgacataaccaagttttaatagccgccacctcctcttccctgtccaaagtagccagttccataggcccccctaccacctcctcgctggaatcccccagatcctctgtagcctccactaggccctctgtagtctcctccagagttgcctctaaagccacctcgggaaactcctctatagcctccaccaacacctgcaccatatcctgcccgaaaggagttggcgctgccaccatagcctccgctaccatagcctccactgctatagccaccgccatagcctccaccactgtaactagaacctccccttctatatccgcttccattgncgtatcgggccatcttgggangacgtggaccatctccataccgngtactgccaatca

SEQ ID NO: 4411 - DNA, 265 bp, Homo sapiens
ccccttttaggtgttgcttgttcagtatctcaagcccagaaagatgaattaatccttgaaggaaatgacattgagcttgtttcaaattcagcggctttgattcagcaagccacaacagttaaaaacaaggatatcaggaaatttttggatggtatctatgtctctgaaaaaggaactgttcagcaggctgatgaataagatctaagagttacctggctacagaaagaagatgccagatgacacttaagacctacttgtgatattt

SEQ ID NO: 4412 - DNA, 233 bp, Homo sapiens; identical to SEQ ID NO: 4019

SEQ ID NO: 4413 - DNA, 460 bp, Homo sapiens
cctgaatctggaacatgccctggatccccccacctcagtcctcaagctttctggacccctgaagccaaggcagattctttctcccagcgtcatttctggggcaggaggaatctcttttctggtttacctgggccagacctaagaatagcaggatctctgaaaccacagggttttgatgtgtttttatcaagccaaatgtacaattgccaactgacactctggataattgagcacagggggtgccctcgtacattgtaccgtcactcccttctgaacagttggcagaccaaactgtttggaagctcagatactctggctcagggtaacacttttgttccccttacactcctcaactttccacctcagctagggaaagagaatgacagttaaggcttgacccaggattataatcgttagagcaagtgggagtttcagagacttaaggggcactgcagggagg

SEQ ID NO: 4414 - DNA, 350 bp, Homo sapiens
  unsure (9): n=A,T,C or G
  unsure (41): n=A,T,C or G
  unsure (101): n=A,T,C or G
  unsure (121): n=A,T,C or G
  unsure (154): n=A,T,C or G
  unsure (158): n=A,T,C or G
  unsure (160): n=A,T,C or G
  unsure (178): n=A,T,C or G
  unsure (237): n=A,T,C or G
aaaaatgtnattcctctgtacagtaaattacaaatctttanggatttttttgtaataagagaatttatatttgtaatggtctaagaatttttttgtaatgnggtatatagaattttaattnggagcacttataagctggtaagagagactatancatntnaattatcttggtttatgnttcagcatttcctctagaatttttgctctcaaatatgtgatttaatgaactaaaaacancactcatcagtcttgggaaatttgaactttgatcaacttaactaaagaaggaagggtagtaagaatttttcaaatacaaatatttgccaattcacagatgataacatttaagg

SEQ ID NO: 4415 - DNA, 211 bp, Homo sapiens
  unsure (50): n=A,T,C or G
  unsure (73): n=A,T,C or G
  unsure (85): n=A,T,C or G
ccaagcacaggtgtgtcagcttcttgctgacaaccaagacagcagcaagntccttgcaactggcttctgtaanacgacagttttncaacgacaacatctgcaggaagtgttttgggcgtgtcatggtcttgtacagcaacatggcaccctcatccaggagcacattggctgagagacgcaggtgcttcagggactggttggctttgaggac

SEQ ID NO: 4416 - DNA, 431 bp, Homo sapiens
  unsure (163): n=A,T,C or G
  unsure (314): n=A,T,C or G
  unsure (319): n=A,T,C or G
ccttccagggctgaccagtttgagtatgtaatgtatggaaaagtgtacaggattgagggagatgaaacttctactgaagcagcaacacgcctctctgcgtacgtgtcctatgggggcctgctcatgaggctgcagggggatgccaacaacttgcatggattcnaggtggactccagagtttatctcctgatgaagaagctagccttctgaacctcgcctgaagccagcctctctgccaagtcactcaggtcatgggcattgttcaagcctgagtggcagccgctcttgctcacctgttgaggaagggctggctnactgnccaccgtggcggcatctttaactggcctccactcaatgggaaactgactcgcctgtgaaagacacagtgggagagctgaaaatgaatcagaagctttatgtatatgattttt

SEQ ID NO: 4417 - DNA, 577 bp, Homo sapiens
ccaccacacccaattccttgctggtatcatggcagccgccacgtgccaggattaccggctacatcatcaagtatgagaagcctgggtctcctcccagagaagtggtccctcggccccgccctggtgtcacagaggctactattactggcctggaaccgggagccgaatatacaatttatgtcattgccctgaagaataatcagaagagcgagcccctgattggaaggaaaaagacagttcaaaggacccctttcgtcacccaccctgggtatgacactggaaatggtattcagcttcctggcacttctggtcagcaacccagtgttgggcaacaaatgatctttgaggaacatggttttaggcggaccacaccgcccacaacggccacccccataaggcataggccaagaccatacccgccgaatgtaggacaagaagctctctctcagacaaccatctcatgggccccattccaggacacttctgagtacatcatttcatgtcatcctgttggcactgatgaagaacccttacagttcagggttcctggaacttctaccagtgccactctgacagg

SEQ ID NO: 4418 - DNA, 472 bp, Homo sapiens
  unsure (137): n=A,T,C or G
  unsure (158): n=A,T,C or G
  unsure (284): n=A,T,C or G
  unsure (288): n=A,T,C or G
  unsure (303): n=A,T,C or G
  unsure (307): n=A,T,C or G
ccagggagcagcacgatccgtgtgaactgagttgggccctgggcagccagagccacacattccctctccatgggcctctgctgagacctatagggcttcacatgcatgcagtgcagtcccagggccagcagcatcancatcccctgggaacatgttanaatggcagtctcaggctctacacagacccactgaatcagtatctgtattttcacaggatcctcaggtgatccacaagcacatgaaagtgtgagaagcccttcctcttgctgaacagtttcctcatncaanctccttctcttccgntgtntcttagggaagccagaatacctcccggatttcctagggagtgcactggattttatgccagtttgattacccacagttttcttcctcattcattcattcattcagtcagtcagtcaaatagtaattgagcacctcctgtgttccagtatgtgttctgtctgcaccc

SEQ ID NO: 4419 - DNA, 432 bp, Homo sapiens
  unsure (172): n=A,T,C or G
  unsure (239): n=A,T,C or G
aaaactgataataatgctgaattatcttaagtgagatgttaagcccactttgttcttttaatgtaatggagcttatgggtagaagaccatgtctactaattacaaaaaaaaaaaaaaaccatgcattgctgcttttcctaccacttccagtaagaaaatgggtgttttgaanaaatcatttgccttgtcctcacggaatctgattaagccctggcctcttgattgtatagagtcattgngtatattccagttacctagatattcccttgagattttgatacaatttgagggaggcagaagtctgcagttgaagaaaaaaaataagtctgtttgtcatatttaagtagcctgtggctatttttatactgattttgatatcatgttcttttcatagtcgtattttgccaccgtaaacataaaaaaaaaaaaaaa

SEQ ID NO: 4420 - DNA, 284 bp, Homo sapiens
ctttctattagctcttagtaagattacacatgcaagcatccccgttccagtgagttcaccctctaaatcaccacgatcaaaaggggcaagcatcaagcacgcagcaatgcagctcaaaacgcttagcctagccacacccccacgggaaacagcagtgattaacctttagcaataaacgaaagtttaactaagctatactaaccccagggttggtcaatttcgtgccagccaccgcggtcacacgattaacccaagtcaatagaagccggcgtaaagagtgtttt

SEQ ID NO: 4421 - DNA, 321 bp, Homo sapiens
ctggcttccgagaggcaattctgtccttggaagccaggtttgaccatctgtaatcagccttgtgagaagtctcgtttgagggggccagggatggaacgggagggcgcatatcgtatgaggtatgggcattgtgttaagctgggggaagttgcagcttgtcctgaattacatggagaggaataaagtgggtgagtaggaggagccatttcatctgaaagcctgaggcccctctggtcccctcgataaaccccactggtgtcccaggccacaggtaacaggagaatagacatttaatgtcacagaatgtcagagcaggcaagg

SEQ ID NO: 4422 - DNA, 322 bp, Homo sapiens
ctgactaagagccctctggcacaaatggaagaagaaagaagggagcatgtagctaaaatgaagaagatggagatggagatggagcaggtgtttgagatgaaggtcaaagaaaaagttcaaaaactgaaggactctgaagctgagctccagcggcgccatgagcaaatgaaaaagagtttggaagcacagcacaaagaattggaggaaaaacgtcgtcagttcgaggatgagaaagcaaactgggaagctcaacaacgtattttagaacaacagaactcttcaagaaccttggaaaagaacaagaagaaagggaagatctttt

SEQ ID NO: 4423 - DNA, 456 bp, Homo sapiens
  unsure (323): n=A,T,C or G
  unsure (414): n=A,T,C or G
cctctgcgattttgaaggacaactgctgctaaggagtctatctgtgattggagggttgaaacagtattaggtaagtcttccaaactgtttgtaagatcttgtgagagggagcaatagtacatgagggaagtagaaagcccgaccactccggttccaactgcagtagtcattcctagtcgtactaggatgggtattaactgaacggccctgcattggcacacttgagtttttacagggataggtaggttttgtttcctgggacaatgtcgatttttgggcttagaaaaaccagagtacaggtaccagtccagttgatagggtancagaggtaggtggaggtaccgcacaggaagaatatgccttggctaggtaagtaaaattggttgtgtatgttaaaaagatgtgtaagcttgnggtctttgtatatccatgctcctagggtgcttgctaaggcag

SEQ ID NO: 4424 - DNA, 312 bp, Homo sapiens
ccagtcctggtgtctgagtgattcccagggcccagcaaagggaccaagtttccaggtcagcgacattggatgccttccctctgcctctgggagctatgggttggcatgcattggggtagagatccaatctggcctgaggctcactcaggacttcggggtgagaggaggggaggagctgagctgccttggctaatggggttgaaatttctgatcttaaactctccactgaatattctctcagagccctgaagacaaggggtaacaccccaaaatatggactcattttccactccaccttcattggccgagcag

SEQ ID NO: 4425 - DNA, 161 bp, Homo sapiens
  unsure (44): n=A,T,C or G
  unsure (73): n=A,T,C or G
  unsure (77): n=A,T,C or G
  unsure (153): n=A,T,C or G
cctatggaggtgcctatgatgtcatgagctctaagcacctttgnggtgataccaactatgcctggcccaccgnaganattgcagtcatgggagcaaagggcgctgtggagatcatcttcaaagggcatgagaatgtggaagctgctcaggcanagtacatc

SEQ ID NO: 4426 - DNA, 183 bp, Homo sapiens
  unsure (34): n=A,T,C or G
  unsure (43): n=A,T,C or G
  unsure (48): n=A,T,C or G
  unsure (50): n=A,T,C or G
  unsure (55): n=A,T,C or G
  unsure (66): n=A,T,C or G
  unsure (90): n=A,T,C or G
  unsure (93): n=A,T,C or G
  unsure (103): n=A,T,C or G
  unsure (108): n=A,T,C or G
  unsure (166): n=A,T,C or G
  unsure (179): n=A,T,C or G
  unsure (181): n=A,T,C or G
taactcaaaagctaataattaaaaatggaaccangtgagcagngcctnanatacntgcaaaacctntctgcacaaatgtgctccctgccntanaagacaaaanggatnggaatggagaagcctacaaccacccacgggtcctgacaaggctgacgggtggtaatcncaccttggaggcnangc

SEQ ID NO: 4427 - DNA, 145 bp, Homo sapiens
  unsure (27): n=A,T,C or G
  unsure (41): n=A,T,C or G
  unsure (92): n=A,T,C or G
  unsure (107): n=A,T,C or G
  unsure (116): n=A,T,C or G
  unsure (132): n=A,T,C or G
  unsure (141): n=A,T,C or G
ccagcatcacatccctctcctcattgngctcatccttgacnatgaagatcatgtcgaagcgcgacaagatggtgggcactggagtcaatgtngtcctcccccttcgnctcaccccngcggccgaacactganttggcagcngcca

SEQ ID NO: 4428 - DNA, 192 bp, Homo sapiens
ccaaaattgaaaggaaaaatttttttaaaatttctctaaatgtaggcctggctgggctttgaccttttccgtttttaaatcactcacagagggtgggacaggaggaagagtgaaggaaaaggtcaaacctgttttaagggcaacctgcctttgttctgaattggtcttaagaacattaccagctccaggttt

SEQ ID NO: 4429 - DNA, 612 bp, Homo sapiens
  unsure (611): n=A,T,C or G
aaacaaacactaggaatgtgctagttagggggagagataacgaggtggccacagaaatatccatcaagtagaataatctacatgcaaagactcatggtgagactgcattgttactgcaccaaagttaaagccatagctctcagagtgttctgccactgcttacctctttcttggcctgtttgatgtctccctcatccttgatgcctagtcctgaggtggaggccttctcagcctccattcggcttcccccagcccggccctccccaccttcattagtcttgaaggatgaatggctatcagagtcagcaaaaccaccttcactgacactattgcagctcaaccatgaggccaccttgttcttgggtgtctcttcggaggaaggtggattgcagccacctacagggattgagggaggaacaggaatatgtgggggtccaagatctggggggtgggagtccttggaagttgtctcagagagtccgttctctttctggccccgggtctgcctccgggtagcatagctccgccacactgaactggtgctgaagtcctcatccttacagaagttatcatctgagctatcatcattggactcttcagggtcctctgtnc

SEQ ID NO: 4430 - DNA, 411 bp, Homo sapiens
ccttgctacggcacattgtgaaggagttcaagagagagacaggggttgatttgactaaagacaacatggcacttcagagggtacgggaagctgctgaaaaggctaaatgtgaactctcctcatctgtgcagactgacatcaatttgccctatcttacaatggattcttctggacccaagcatttgaatatgaagttgacccgtgctcaatttgaagggattgtcactgatctaatcagaaggactatcgctccatgccaaaaagctatgcaagatgcagaagtcagcaagagtgacataggagaagtgattcttgtgggtggcatgactaggatgcccaaggttcagcagactgtacaggatctttttggcagagccccaagtaaagctgtcaatcctgatgaggctgtgg

SEQ ID NO: 4431 - DNA, 518 bp, Homo sapiens
  unsure (246): n=A,T,C or G
  unsure (252): n=A,T,C or G
aaaccaagaagaagagaagagaagaaatgccaatatattaaatgaaaaaattagggaagaattaggaaaaatcgaagagcaacaaaagaaaaagttagaagtgaagcaacttgaactcactctccgaatatacaaaatatggaattgaagactgtaagaagtaatttgaatcagctcaatcaatcgctggtaaaaattttatatttctaactttatttcatcaatattacttttaatatcccttcnatttantatgtattattcagaattatgataatgccgctataatatttaggtacaaacttttgtatatttcattcataagttttcatttctttcgggtatgtacctaggaatggaattgctgggtcataaggtacctatgcataaccttttcagcaatcacctcacagttttccaatgtgtgcactattttacttccccaccagcgatgtatgaaagatctaatttctctacggcctcaccagggtggagtgcggtggcgcactctcagctca

SEQ ID NO: 4432 - DNA, 427 bp, Homo sapiens
aaattaagaaaagtgaactatatgtatttgttttatacatttaaggcttagactcataaataatgctattgtttatgatttgaaaactttcaggcaaaatccaatttacatttttcccttccctagcaattacttttttccagcttcaactcttcttagttactaatactttgttgactctaaaaatgaaatcattcacaaacttttggtatatgatggagaatgaaaaactagagtcagacagctttaattgacattgtcaacacctccagttatcaggaatacatttttttactgccttaacctgtagtgcgtagaatatgcatcaatttcttgaaggagattcatgtttttataagaattttcatgtaattattgcaattgtggtcaaataaggaacgtttcctgcttgaaattatattgattt

SEQ ID NO: 4433 - DNA, 351 bp, Homo sapiens
aaaaaataacttaagaagcaagaggtccggccctttacttgtataaatacagcagcagaactagagtttcttaagacaacgtggagaagagtctgtgtttagcacctcaatcatcgatcttaacgttggaaacgtttctgatactgatggaagagtcttataagaaggtgaaatacttttcaagttcatccagcttttggcgactttgctaaaggaaagctcaaagtcaaaagttaatccatcttcaaagctggtaaaaatttatcaaactctttctctaggttaggcaaaaatgcatgcatagaacccataaattcagacttttcacagttttcggtacacctgtgcttt

SEQ ID NO: 4434 - DNA, 614 bp, Homo sapiens
cctttatatgtaaataacaaaatagtgattttaattcatatagatgtatttgtttatctaagtatgcttttatactccctgctatatttttgtatcaattaagtgtgcctggcagcatgaagaaagtcagtacaacaatggtttctctctgttgtgtaaaactgaagttggaagtgggtaacccgacaatggcacagcagcttcacaagatcctgagggatcagcctcctcctttcgtgctgcctcactaccctcagtccttggcttctgcctcagagtctaagatggctactttagatccaggcaccaagccctcatcattacatcatctcattccaagaaaaaaaaagaagcaatgacaagtattccctctccctgtaaagacaccccctagaagtccaaagtaacatttctctttccattctttgttacgaatgagactggaaaatacagtgtgtatttgggaggctgtatgcctagctaaaaatcaggaggcttattactaactaagaaggaagaatgtgatactgaaggtcaactggcaggttttgccacagtgtaaaaatcaggatttcatagatatacagaatttttgaataagtgactttacctcg

SEQ ID NO: 4435 - DNA, 560 bp, Homo sapiens
  unsure (167): n=A,T,C or G
  unsure (171): n=A,T,C or G
  unsure (310): n=A,T,C or G
  unsure (317): n=A,T,C or G
  unsure (334): n=A,T,C or G
  unsure (390): n=A,T,C or G
  unsure (449): n=A,T,C or G
  unsure (514): n=A,T,C or G
ccaacctgaaaccaaagtcctgggtccgcctcaagcggggcatctacaaggatgacattgctcaggtggactacgtggagcccagccagaacaccatctccctgaagatgatcccacgcatcgactacgatcgcatcaaggcccgcatgagcttgaaagactggttngccnaaaggaagaagtttaagcggcctccacagaggctgtttgatgctgagaagatcaggtccctggggggtgatgttgcctctgatggtgacttcctcatctttgaggggaaccgttacagccggaagggctttctgttcangagcttngccatgtctgctgtgancacggagggtgtgaagccaacactctctgagctggaaaagtttgaggaccagccanagggcattgacctggaggtggtgactgagagcacagggaaggagcgggagcacaacttncaacctggggacaacgtggaggtctgtgagggtgagctcatcaacctgcagggcaagatcctcancgtggatggcaacaagatcaccatcatgcccaagcatgaggacctc

SEQ ID NO: 4436 - DNA, 144 bp, Homo sapiens
  unsure (124): n=A,T,C or G
  unsure (135): n=A,T,C or G
aaatcataggggaaaagcagtcctgttctaaatcctcttattcttttggtttgtcacaaagaaggaactaagaagcaggacagaggcaacgtggagaggctgaaaacagtgcagagacgtttgncaatgagtcantagcacaaa

SEQ ID NO: 4437 - DNA, 526 bp, Homo sapiens
aaagagatatcaaaagtccctattttcatgagttccacatcacatattttgtgctttctttgaatagccaaaaaattttcttggggaaaatacgagagtaaaaccagagctaaggagctataagaatttggaatggcttcttgaaatcatgccgctccaagtatgtcataacctcgatcactcaaaaatacataactcccaaaccaagaatttctgagggcaaaagcacaccagcgtgtataggaaaggcaggggaagggatggaagggagagaaagagggaacaatgtagatttcctgttttataccaggaaaactaggccaaactcaatttaaatgaatagctccaaagcagtgcagtcagaaaaagttctcagtgtgacatagacttcagggaaacaacacgtcctgaaagaaacatgattcccctcaagccacaaaggattttctcatcaagtgttttcacctctgcattagatttggacacaagaagaggagagcatttactcaggtaaaaatagttctct

SEQ ID NO: 4438 - DNA, 560 bp, Homo sapiens
  unsure (301): n=A,T,C or G
ccaccagagaaatgcgaatcaaaaccacagtgagataccatctcacaccagttagaatggcaatcattaaaaagtcaggaaacaacaggtgctggagaggatgtggagaaatgggaacactttgacactgttggtgggactgtaaactagttcaaccattgtggaagtcagtgtggcgattcctcagggatctagaactagaaataccatttgacccagccatcccattactgtgtatatacctaaaggattataaatcatgctgctataaagacacatgcacacgtatgtttattgcggnactattcacaatagcaaagtcttggaaccaacccaaatgtccaacaatgatagactggattaagaaaatgtggcacatatacaccatggaatactatgcagccataaaaaatgatgagttcatgtcctttgtagggacatggatgaaactggaaaccatcattctcagcaaactatcacaaggacaaaaaaccaaacaccacatgttctgactcataggtgggaattgaacaatgagaacatatggacacaggaagggg

SEQ ID NO: 4439 - DNA, 212 bp, Homo sapiens; identical to SEQ ID NO: 2921

SEQ ID NO: 4440 - DNA, 522 bp, Homo sapiens
  unsure (122): n=A,T,C or G
  unsure (133): n=A,T,C or G
  unsure (164): n=A,T,C or G
  unsure (181): n=A,T,C or G
  unsure (186): n=A,T,C or G
  unsure (211): n=A,T,C or G
  unsure (401): n=A,T,C or G
  unsure (405): n=A,T,C or G
  unsure (451): n=A,T,C or G
  unsure (452): n=A,T,C or G
  unsure (454): n=A,T,C or G
aaaaataattatttttttaattgacagataacaattgtacatactcatggagtacatagtgatattttgatacctataatatatagtgatcagatcagggtaattggcatagccatcatctnaaacacttatnatttcttcgagttgggaacattcttgacttngggttattgaactttgnaaatnccatgtgattgacctaagttatgtnctatgtcaggtcctgatgattcaaggtcagaagtagtttgatgtcagggagtttaatgctgcccagcatgggtagaataaccttgttgcattacatgaccctatttccctgaccagagcagattgatcagggctggagttgggtcccaagctaagcttgtcatattttctctttcttgggaattgtgatngagnctaaaacagtttaattggtttgagataattacatgacctgaggcannanattgcaaactggtggcccatgggctgaagctggttcataaataagttgattctattttttttgccttt

SEQ ID NO: 4441 - DNA, 352 bp, Homo sapiens
  unsure (165): n=A,T,C or G
  unsure (284): n=A,T,C or G
aaaatattagcgaagctatcaaggggaaaaaaacacattttggcttaagtaaactacaaaaagccacaaatgctttgcaaactctgtcttaccttttatatgaaaataagcaaaatgtaatgtacatatttttatatttttatttaataagagatgcagacccanatttatttatttatttaattaaatatgttagccctccaactccacatttttttttaataggtatggtcctcttttaatggtctctgatcctttttaatgagtgccatacgccaatgatntgcctgcaggtttgtgagcattcttgggatgtcaggtgacctggtgtgttcctaacatttaccaatgg

SEQ ID NO: 4442 - DNA, 348 bp, Homo sapiens
ccttcagaagttaaacgtgatcacttgtgctgggacagccaatagaggagtctgagatgatcatttccaaggagttcttcacagaggaggtagctttggagctgggctttgaggttgggcagtatttgaaacagtagagacggagcaaagaacccctgggcagaggaaacagtaagtgcaaggcataaagtgaaggtggagggtgttaccgcggggtgcactggttgcattacctcctggtggggtcagtcattcgctttcttttcctcctcaggaccagggctctttgaagatgaagaatgcccacaagggaacacaggcagaagatcagataagccaaagtcacag

SEQ ID NO: 4443 - DNA, 505 bp, Homo sapiens
ccacgttcctggccgaggacccgaaggttaccctgaccatcttcgttgcccgcctctactacttctgggacccagattaccaggaggcgcttcgcagcctgtgtcagaaaagagacggtccgcgtgccaccatgaagatcatgaattatgacgaatttcagcactgttggagcaagttcgtgtacagccaaagagagctatttgagccttggaataatctgcctaaatattatatattactgcacatcatgctgggggagattctcagacactcgatggatccacccacattcactttcaactttaacaatgaaccttgggtcagaggacggcatgagacttacctgtgttatgaggtggagcgcatgcacaatgacacctgggtcctgctgaaccagcgcaggggctttctatgcaaccaggttccacataaacacggtttccttgaaggccgccatgcagagctgtgcttcctggacgtgattcccttttggaagctggacct

SEQ ID NO: 4444 - DNA, 449 bp, Homo sapiens
aaaacaaaagcaagttctttgttaggaattggtcaaaattcatctctttctttaagcccatcaactcccaggacggtttgagttactcagttacctaagcttgctattcatccaaatcattttctagagtcactgtataagggtctatgagtagctgtgtatgaataaatattacctgtctacctcaaaatacacatactgctgaagcattctgtacaaccgtgtgttatcacagtgcagttttaagtgtaacgttagaacttaggcattttcctgtgtggcggaataagaaaggattaaacagttacaagcctccaaattcaaataaaattaaatcacagttcagatgaaactgaatatcattgtaataatctcataatatacatttgtaactttgtagctatctttgaaatcacttgactttgcaatggtgctaagctgatagattt

SEQ ID NO: 4445 - DNA, 478 bp, Homo sapiens
  unsure (390): n=A,T,C or G
  unsure (391): n=A,T,C or G
  unsure (452): n=A,T,C or G
  unsure (453): n=A,T,C or G
cctgtgaggtgcagagtgcccagaactggactcaggatgcccagggccactctgcctctgccggcattctgccgtgtgccctcgggcgagtcactgcctctccctggccctcagtttccctatctcgaacatggaactcattcctgcctgtctcctttgcaggctcatagggaagacctgctgagggaccagccaagagggctgcaaaagtgagggcttgtcattaccagacggttcaccagcctctcttggtttccttccttggaagagaatgtctgatctaaatgtggagaaactgtagtctcaggacctagggatgttctggccctcacccctgccctgggatgtccacagatgcctccaccccccagaacctgtccttgcacactnncctgcactggagtccagtctcttctgctggcagaaagcaaatgtgacctgtgtcactacgnnactgtggcacacgccttgttcttgg

SEQ ID NO: 4446 - DNA, 375 bp, Homo sapiens
gtcaggacacagcatggacatgagggtccccgctcagctcctggggctcctgctgctctggctcccaggtgccaaatgtgacatccagatgacccaatctccttccaccctgtctgcatctgtcggagatacagttacaataagttgtcgggcctctcagaatatagatcggtggttggcctggcatcaacagaaaccaggcaaagcccctaatgtcctaatttatgcgacttccagtttagaagaaggggtctcattaagatttactggcagtggatctgggacacaattcaatttaaccatcaccagtctgcagcctgacgattcagcaacttattattgtcaacattattctgcatctcttcgcagttttgg

SEQ ID NO: 4447 - DNA, 407 bp, Homo sapiens
ctgcttcctgtctgtgacacctgggaagacacagtttgggcctacttccgggtgatggtggacagtctggtagaacaagagatccagacatcagtagtaactctggatgaaactgaagaactccctagagaatatctgggagcaaactggacgttagaaaaggtttttgaggaacttcaagctactgacaaaaagagagttctggaagagaatcaagaacattatcatatagttcaaaagtttcttatcctgggagacattgatggtttgatggatgagtttagcaaatggctttccaaaagcagaaacaatctacctggacacctgcttcgctttatgactcaccttattttgtttttctatactctgggactacagaccaaggaggaagtttctattgaagtttt

SEQ ID NO: 4448 - DNA, 481 bp, Homo sapiens
aaaataattactctcacacataattttttttatcatgtaaattctaaacaaacttctgaaggtataattacacaaattcttagcgatcacaaaagtagatgattgggctactgtgtcatttttctaactgtgttttgtcgataatatgcaaaatttaggaataatgtagaaaaatgatgtatttcaatacagcttacaaatgaaacttttttggcttcacaaagacatacttattatcataactgatacaattttcatactacagtgctcttttgctttataaatactcaagttattttgtgcgctgcttcaaattttacttttgtgcgtcgccttccatccccttagtacatcttatagtagctgtaagttgatcctgtgtttcttgaagctaaaacaaagaattaaaaaaaattacatttagaaatgacctaaatgtccatcagtagatgaatgaatcaacaaaatatatataaaatat

SEQ ID NO: 4449 - DNA, 501 bp, Homo sapiens
  unsure (29): n=A,T,C or G
  unsure (326): n=A,T,C or G
  unsure (347): n=A,T,C or G
  unsure (427): n=A,T,C or G
  unsure (429): n=A,T,C or G
  unsure (475): n=A,T,C or G
  unsure (476): n=A,T,C or G
tgcctcaaatcgtcgtagtgggaacgcanagcagcggaaagagctcagtgctagaaagcctggtggggagggacctgcttcccagaggtactggaattgtcacccggagacctctcattctgcaactggtccatgtttcacaagaagataaacggaaaacaacaggagaagaaaatggggtggaagcagaagaatggggtaaatttcttcacaccaaaaataagctttacacggattttgatgaaattcgacaagaaattgaaaatgaaacagaaagaatttcaggaaataataagggagtaagccctgaaccaattcatcttaanattttttcacccaacgttgtnaatttgacacttgtggatttgccaggaatgaccaaggtgcctgtaggtgatcaacctaaggatattgagcttcaaatcananagctcattcttcggttcatcagtaatcctaatttccattatcctcnnctgtcactgctgctaatacagatat

SEQ ID NO: 4450 - DNA, 302 bp, Homo sapiens
aaattctttatgcctcatcctctgagtgctgaaggcttgctgtaggctgtatgctgttaatgctaatcgtgataggggtttttgcctccaactgactcctacatattagcattaacagtgtatgatgcctgttactagcattcacatggaacaaattgctgccgtgggaggatgacaaagaagcatgagtcaccctgctggataaacttagacttcaggctttatcatttttcaatctgttaatcataatctggtcactgggatgttcaaccttaaactaagttttgaaagtaaggttattt

SEQ ID NO: 4451 - DNA, 581 bp, Homo sapiens
aaataccaggtactcattttcttgatttgaaagtttaacatgacttctaaggacatctcttcaaaaagaaagtaaacagggaatgaaggtggtgggaaaatcacttcacttcacccactatttcatgttgtaataagggccaccataaggatgccctcctcatagtgttcggttctgatcttcctcgagaacagtcacttggcgcactttaataatctggactgctccagatttgactttagatactccatggtatctagtctttatgatcagttgaatgatcagtgtttaagtctaaaaataatgctttcctgaaaatgtttatatttcattgctgtttccttattgcctgctagccaaatggaatttgggcaagcaactctttgaagacttttttaccctagaaatttacttttgtcctaaaaaccctaactgtaaataagcagtcgaagcaagttgccaccttgaagttgagggatacactttgcttcatcagtattaaaaaccatggtactcttattttgtcttttttaattcaaaacattttctaaatgtggtactttgaaccttggagtatttac

SEQ ID NO: 4452 - DNA, 467 bp, Homo sapiens
aaaaacatggagaggaatgattatcggacactgcgccaggggattatcgacatggtcttagccacagaaatgacaaagcactttgagcatgtcaacaaatttgtcaacagcatcaacaaacccttggcaacactagaagaaaatggggaaactgataaaaaccaggaagtgataaacactatgcttaggactccagagaaccggaccctaatcaaacgaatgctgattaaatgtgctgatgtgtccaatccctgccgacccctgcagtactgcatcgagtgggctgcacgcatttcggaagaatatttttctcagactgatgaagagaagcagcagggcttacctgtggtgatgccagtgtttgacagaaatacctgcagcatccccaaatcccaaatctctttcattgattacttcatcacagacatgtttgatgcttgggatgcctttgtagacctgcctgattc

SEQ ID NO: 4453 - DNA, 519 bp, Homo sapiens
ctgtgggcccccactctccacctgctctcctgctcaggttggggcagccaaagaccttctcttcctggggagagaggttagggagggaccattttttgattatttgagggtgtggttcagttgtaaacagtgtaaattttagaatttgtgttattgtgatggcaatgaccaactgcaaaatatttcccatttgccttgtaataacaagagcatgtactttacgcaattgaagtttttggaccctacttatttactttactttattaagaatagtaacatttgagcagagaagagttctaattttgcatcagagccaaaagtgaaaatgaaaggaactgacccatgaaggaacaggtgtgagctatttacttcattcctgcccatcctggttgatgttgagctcttgccctgcatcccactttcaaatgtggtggatgcctcacctaggaaaggccctcaccacgctggcttgctctgctcactaactgtacttacttctcttaatcccctatgaacact

SEQ ID NO: 4454 - DNA, 332 bp, Homo sapiens
aaatagaaaacagtatattgaaagtggtgggtttgatctttttatttagaaacccacaaaatcagaaacacagtacaaataaaacagaaatcaaactataagctgacttttagttcctaaaaagaaacatatttcaaaagcaatggaatctagaattcttataacatgaataacaaaatgtacagcaagcctatgtagttcaattaatatataaggaaaaggaaggtctttcttcatgatacaagcattataaagtttttactgtagtagtcaattaatggatatttccttgttaataaaattttgtgtcataatttacaaattagttcttt

SEQ ID NO: 4455 - DNA, 237 bp, Homo sapiens
ccaccgggggccgggatcggagtctcctctgctgggacgtgaggacacccaaaacccctgttttgatccactccttccctgcctgtcaccgtgactgggtcactggctgtgcctggaccaaagataacctactgatatcctgctccagtgatggctctgtggggctctgggacccagagtcaggacagcggcttggtcagttcctgggtcatcagagtgctgtgagcgctgtggcag

SEQ ID NO: 4456 - DNA, 451 bp, Homo sapiens
ccacacaggcaggcgccttccagtcttacaggtacatgtgaatatagggctctttcctcagctccatatgcaatagtcagcttaaactctagctctgactaatcctctaggagtaggtagtaacattttccactagtctcctgaggatggtttgatgtctctggagttgagtctatctcgagctagcaggttggcccctatgtaacatcttcactgtggaaagtgaagtccacaattccctgggaaaggatggaactgatttatgcagtccatgccccaccttttcttctacctccgccgcaactgaaatcccctttctgtggaattcactgcaaagctatgaagaaaacagaagcaaggacatctgattcctagggaggtctaatttttttaggctaaactactgcaattttctgtgtactgccatcagttatgaaaaagtttttttttt

SEQ ID NO: 4457 - DNA, 329 bp, Homo sapiens
  unsure (192): n=A,T,C or G
cctgaggtctgcggaaggtgggaggaggcagacaccctgcgtggcccatggtcggggcgtccacgccgaggccggcaacaaacgacagtatctcggattcctttttttttttttttaattttttatactttggtgtttcacttcatgctctgaatactgaataaccatgaatgactgaatagtttagtccanatttttacagaggatacatctatttttatcattatttggggtttgaaaaatttttttttacaccttctaatttctttatttctcaaagcagataattcttctgtgtgaaaatgttttctttttttaatttaaggttt

SEQ ID NO: 4458 - DNA, 517 bp, Homo sapiens
ccaagtgtctggatgaacgacagcatgcacaaaggaatgtgggggagagaagtcctgaccagtcggaacacacagatgggcacacctctgtccagagtgttattgagaagttgcaggaagaaaatcgactgttaaaacagaaggtgactcacgttgaagacctcaatgccaagtggcagcgctacaacgccagcagggacgaatacgtgagggggctccatgcgcagctcagggggctgcagatcccccacgagcccgagctgatgaggaaggagatctcccggctcaacagacagttggaagagaaaataaatgactgtgccgaagtgaagcaggagctggcggcctccaggacggcccgggatgctgcgttggagcgggtgcagatgctggaacagcagattctcgcttacaaggatgacttcatgtcagaaagggccgatcgggaacgggctcaaagtaggattcaagaactggaggaaaaggtcgcctctttgctgcaccaggtgtcctggag

SEQ ID NO: 4459 - DNA, 474 bp, Homo sapiens
aaaaatatttagattaaagccccctttaatgagtacaagaaaaactcttggcttgttagaagaaagtatattctttctagaatttggtgcaggaatatgtgttcatatccaggcaaacgggtgtgtttttatcttcagacaatgaaaccttctcctctggggctttgttgccaggaagattagaactaaatttattttttcatttctgtcatgaaatcattccagatacctcttttcttctttccaaacggttttcacatgtgtttgaaatatttgtacttcgaattgtcggattttccatgtcctcctttctcctttgtgcccagcctgagtcagcaccatcccgcattcagaacctcccagtgaaagggcagccttcattttgagaaggtggaaggtgttagggtttgggagacagctcatccaatctcccaagtctcatggtagatttgtgactgtgagagtttccggttt

SEQ ID NO: 4460 - DNA, 625 bp, Homo sapiens
aaatagcaacaattcacttgttcttttctattttatggacttatacatttcaaatatgaccatgttaacaaccaagtatgtacaatatttttaaggacaaaaataacaattatatacagtttgcaaagatcaaattctaaccatggacacctttcatctagtccaatgactgaagcctgtccaacgccagtaactcccagggactaaggccaaatgaagcctcaatgctgtatttacctttttcctttcacatgctttttcttaaagaaacatttacaatttacctgctttgaaactgtcaatagctatattaataatgttttgtgccacaaatcaaagtcctttcctactcaaaagctactgttaattgaaggcaatgttaccattgagatcaaattcagatgtctagatcccagatacctgggtatgaaatatgcaaatctgccaagagaaattagatatttttcttcttttcttttaatataacccactatataatagtgaactaaatatgtttgtttcatagaaacaacttacatttgccaatataaggcaaatggtctatgtacagatacatcaggactgcctaactgacagtgagtgttgctagccaggctccaagcta

SEQ ID NO: 4461 - DNA, 526 bp, Homo sapiens
  unsure (500): n=A,T,C or G
  unsure (515): n=A,T,C or G
ctgaggactcagagcaggagtaagggcacccctatcctccccatggctttgaaaagaagaaagaggggaaatttggagggatggtcaagttgatgattgaagagacaaagtagtgtaggaaaatctcaatgtttcttgcacagtcatttgttgaaaatgtgtcagcaagtacaagcccatcttaaactggcaatgagacatctgaaatagattatttaggccagggaggcagtattgcaaagaagaacatggctatcaacacttgtttgtctgactcagaggaataaaacatagtaaattttgccttagcgggccacccacattcattgggggaagaaacaattgaggtggggggaaaacagaacagatgaaccttcatggagtttcacaagagtccacatggttgtgtcccttattttcagaaaatgtgaaattggaaaatacgcacttgtgaaagctgaagatgtcacagaaatcttcagaggatttatttagatggncgtatcctccgctgncaactggatga

SEQ ID NO: 4462 - DNA, 392 bp, Homo sapiens
  unsure (212): n=A,T,C or G
  unsure (222): n=A,T,C or G
  unsure (259): n=A,T,C or G
aaattatctagaagttgccaaggtagctcagtcttgtgctgctcactttacagctttactctatgcagaaatctatgcagataagaaaagtatggatgatcaagagaaaagaagtcttgcatttgaagaaggaagccagagtacaactatttctagcttgagtgaaaaaagtaaagaagaaactggaataagtttacaggatcttctcttanaaatctacanaagtataggggagccagatagtttgtatggctgtggnggagggaagatgttacaacccattactagactacgaacatatgaacacgaagcaatgtggggcaaagccctagtaacatatgacctcgaaacagcaatcccctcatcaacacgccaggcaggaatcattcagg

SEQ ID NO: 4463 - DNA, 563 bp, Homo sapiens
aaacacatcctatatatcatgtcaatctggcaagaaatatgacttgctttttgctgagcttaattcagatatcagtaaaattaagtcataaaataatcatgtgtcatgtgactttggcaccctatagacatacttagttttaacttttcaaagtttggcctcctattagaaataatcatgtctcagatgagtaatgtctgtttccagggttcagaaaaggcaaactcatgaaatgccactgaaaagaactttcaacacagcatacttcatgtaaaagaaattgtttgtttgctttctttgtgtagatttctatttgtgttttatgtcatggaaatattccagaattaacagataatagtggtaaagtaatatgcagatagtctaaattcattttgagtttctaggtgtaagcagactaaatgttgcccagaatcagtgttgggttatcagtttatattaaatatactgagttgcccgttttgaaaatgcactttgaataatctcaaaaagatgtacaagttatacctgtaaaccacaaaagtgaagcctgaggcttctgttca

SEQ ID NO: 4464 - DNA, 174 bp, Homo sapiens
ctgcccctcctcccagcagctccagtgtccctgaggccgggggtccccccataaagaaacagaaggctgatgtgacactcagtgctctgaacgactccgatgccaacagtgacgtggtggatattgaagggctaggagaaactcctccagctaagaaactcaacttcgaccagg

SEQ ID NO: 4465 - DNA, 239 bp, Homo sapiens
cctcgccagcctcagtcaaatgtaacgttcctaggccaagccacgaattgcccaactgggtggtccggctgccctgctatctcacttgtttgtgtgcttattgtcaactctacctatgaggagtgagctcctaaaagcagagattcggccagcgcaggtagctcacacctgtaatcccagcactttgggaggatgaggcgggcggatcacctgagctcaggagttcaagaccagcctgg

SEQ ID NO: 4466 - DNA, 447 bp, Homo sapiens
ctggacaacccgtacatcgtgcggatgatcgggatatgcgaggccgagtcctggatgctggttatggagatggcagaacttggtcccctcaataagtatttgcagcagaacaggtattgtcaggtgcccccacacatctggaagctatcccctaagggacagggcccacccctggatgggccgagcagcctgatttccttgggaagccttcccaccctcctgtgccttcctttattggtccatactcagggaccttgacagagggacagggagacatagtctttggattcagctctgttagctctagttgttcagagaagaactcatttgacagttttgtcttttttttcttcctgtagtcattcagtcttggcctagtgatagactcagcctcagaatatcttgacatggaatctcctttctcactgggaagaacactttcttttt

SEQ ID NO: 4467 - DNA, 195 bp, Homo sapiens
  unsure (77): n=A,T,C or G
  unsure (104): n=A,T,C or G
  unsure (159): n=A,T,C or G
  unsure (166): n=A,T,C or G
  unsure (172): n=A,T,C or G
  unsure (177): n=A,T,C or G
  unsure (192): n=A,T,C or G
aaaagccgaggcacaggtatagctgggcacctggaagaagctctgccaaatggaatcctccttggcaggagtggtantgctaaggcgagcagagtgggctacangcaggtcctgcaggccctgggtagagctcatcctctgtctgtccattcctcccanaccccancgtggnggagnagacacaggcatagnaaa

SEQ ID NO: 4468 - DNA, 401 bp, Homo sapiens
aaagagttaaaagaaaagaagttaagaaaagaaaaaaacgtattttcttctgttcatttttatgagtacaggcaaagaataaaatatcccatgtacctctacaggatttagagttctggaatgctaaaaggcaacattttcctaacagccacaaactgaccattactgaccaatagagttataaggggaggtgtggctcagctcccaatataaagcaaaatcaacctttattaagtccgtatcagatgacctcctggtattcacataatataggcaacaggattttgaaatgacctacccctcattactattcactgatgctatgtataaaataagtcgactaactcttttctagatacacgttggttggaaacaaaaggttgtctgtatacaattttttt

SEQ ID NO: 4469 - DNA, 456 bp, Homo sapiens
ccaataaataggtcaaaataattcaaaagaattataaatgaaaaaaatataaattaaaaattaaccagaaacatacattttcaaattttggtgaatgtcataataaaggtcaacaaaggggaaagtgaggtaagttgtgtcacaactattatatataaaagaataatatgtaactactagaaaactattagcattataataaaatagtaactgtgttaaaactttaattcaaaaagttagtttcacagtcatttctactatgtaaaaatatacacaataaaaaacaaaaaactagcaagaaatttagacctaaagaagcttcagagatgcctcagaggtctcctcaattcccctagaaattaatctaatgcttttacaaacaaacagcacacacttttatttcagagattacatgaagggtgtgtgccagggacagtctggaaccggcctcctcac

SEQ ID NO: 4470 - DNA, 461 bp, Homo sapiens
ctgccccaggactgagtcaggccccgccttcactttctctttcttctcagtgctgcccttggagccctcgcagcccttcctcttcgagtcactcttcttgccctttgctctcctcccagaccgctctcgacacagatcctgttcaataagtttcatctgcaggtggaatatctgctcctggagtttgcagatggcgtgtttcgttctctcgcgccttgtcaccatgtagcacagatttctaaccctctctaggtcctgccgcagatgggtgaagagcttcaggcggcggtagaggacgtcctgctcctgctgggccaggttgtccacctcgtcggtcttgggggtcagcagcggctggttggcattggctttcctcttcagcttccagtactggtagatgaagtcgaccagtgcctcagccaggtccagccgctcagccacctcagccggctccaccagct

SEQ ID NO: 4471 - DNA, 316 bp, Homo sapiens
ccatggatccgactactctcgccaacagaacagatttaatgactttgatcaccgagagaggggcaggtttcctgagagttcagcagtacagtcttcatcttttgaaaggcgggatcgctttgttggtcaaagtgaggggaaaaaagcacgacctactgcacgaagggaagatccaagcttcgaaagatatcccaaaaatttcagtgactccagaagaaatgagcctccaccaccaagaaatgaacttagagaatcagacaggcgagaagtacgaggggagcgagacgaaaggagaacggtgattattcatgacagg

SEQ ID NO: 4472 - DNA, 402 bp, Homo sapiens
  unsure (31): n=A,T,C or G
  unsure (93): n=A,T,C or G
  unsure (197): n=A,T,C or G
  unsure (208): n=A,T,C or G
  unsure (239): n=A,T,C or G
  unsure (243): n=A,T,C or G
  unsure (297): n=A,T,C or G
  unsure (301): n=A,T,C or G
  unsure (312): n=A,T,C or G
  unsure (315): n=A,T,C or G
  unsure (330): n=A,T,C or G
  unsure (337): n=A,T,C or G
  unsure (345): n=A,T,C or G
  unsure (357): n=A,T,C or G
  unsure (384): n=A,T,C or G
  unsure (390): n=A,T,C or G
aaaaattgactttaatactttatgcaaatantgcctgtcccaaattctagcatgcacatggatctaccaacaaaaaaactaagttttcagtgngtgaacataaacttcaaattaaacctctgatgctttagcccatgtatcaattaccaacagattttcttcatcaatgtctgcagaccacattcatgatttctatnagacagaaatngagcagataaactatactgtatatgctgagnacanaatttgtgggaacataatgctgcaaatgaaagctacaaacactctgtaaatagnttanaaaaactagtnatngaaatcaccaaagtnccagctnataacggngttataagagtncactgttaactgaaaatgaaaaaaatnaatgtnttttttgagaca

SEQ ID NO: 4473 - DNA, 450 bp, Homo sapiens
  unsure (441): n=A,T,C or G
aaatttttcatattttttgaaaattaacatatatttattacagtgccaaatctcatgagtccctgtctcataatctaagaccaggctactctgaaagaggacagagttcactgcctaatccaacactggctgtagtgtaaatgcaacacaggtgatttttgccccagttccaaggctacctaactagctatgtgggccttagtcacccttaaaggaagatggttgcaactatgccagttagaacatttttctgctctgcttccacagtggcactcacaagaggaggacttgattttatagcttgtgtacaggagaatataaagttggcttcaaaggaggtaggataggtttggcatttttctcctcataatgtttcctaaagcatgaaaggatccttgatcagaagagtgctcagttctaatttctaaaatttgctggctnaatattttt

SEQ ID NO: 4474 - DNA, 502 bp, Homo sapiens
  unsure (118): n=A,T,C or G
  unsure (229): n=A,T,C or G
  unsure (262): n=A,T,C or G
  unsure (286): n=A,T,C or G
  unsure (321): n=A,T,C or G
  unsure (381): n=A,T,C or G
  unsure (383): n=A,T,C or G
  unsure (392): n=A,T,C or G
  unsure (427): n=A,T,C or G
  unsure (429): n=A,T,C or G
  unsure (461): n=A,T,C or G
  unsure (473): n=A,T,C or G
  unsure (486): n=A,T,C or G
  unsure (491): n=A,T,C or G
ctgtaaactgagaatgcagagctgaatagaacatgacatagctctgaaagccctgttgtgcctgaaaggatgaggcaggatcatgcatttgtttattgccaggcccctttcccctcanccatttcaattgccagaggaaggaatcagaggagctattctccctccatctttctccttcatcagtttctggttgatacctgagacaggtctaacatgagctaactttcanagtcagaaggtagcaaagaccatctctcattanacaaaagccaacctgccctagcantcccggtggtcacacctggaagccaagaataccanatgtctagttctcccactctaacaccttacatctgaaaaagaggggagagctgagcttcnanttgccccanatgacatatctggacagttgtgccttgagcatcanangaccttcctctccactctggctctctcttctntttctttctcanatccttggctggngggangccataaacac

SEQ ID NO: 4475 - DNA, 227 bp, Homo sapiens
  unsure (9): n=A,T,C or G
  unsure (20): n=A,T,C or G
  unsure (57): n=A,T,C or G
  unsure (72): n=A,T,C or G
  unsure (105): n=A,T,C or G
  unsure (118): n=A,T,C or G
  unsure (125): n=A,T,C or G
  unsure (144): n=A,T,C or G
  unsure (185): n=A,T,C or G
  unsure (188): n=A,T,C or G
  unsure (204): n=A,T,C or G
  unsure (219): n=A,T,C or G
  unsure (220): n=A,T,C or G
ttgcaaagnttctaacagcnacatagagtccatgtgatcagtagtggattcttgtcntgatgccagggtctnaccgcctaaagctggatcaaggcccttgctctncaaaattgccaancagttgncccgaaacttctccagcanctctaccttctgggtcaggtccttcagctctccctgagttncantcaacttctggtgcanctgcttgttgacggnntctaaca

SEQ ID NO: 4476 - DNA, 581 bp, Homo sapiens
ctgtctgctcctggcaccagcgtagcagctcctcctgggtgcctgccgacccggtggctggcatccctgtatctgtcttgtcgttgttcctctgcacaggctccttggctagcacatcatacaggtctcgtacctgattgggggtcactgcccggaggttcaggttggggtagcgggtggctgggtccagcccatactgggccacattgcgatgcatgttttctggggatgtctgtgacagaagctggtacaggctctcacgctcagccaacacctctagggactcagcgccctctgcccaccgcttcaccatccaggctgcatcaaaggctgccaggaagccccgtgccactccagtgcccaggggccagaagggctccaccaggcagtcccccaccagtcccagcagcaggcgggcgccatgcttctcttgcacacgagcagaactctctgcccgcatcatgctcgtgaagtcaaaggcagagacatcaggctgcccatgggcatcctgggcaaactctagtttcccgagcttgccatgggtggcaaagtcagcagtcttgatctcttgacctcatgac

SEQ ID NO: 4477 - DNA, 308 bp, Homo sapiens
aaatgattctttatttcaataaactttaacaaacaatatataatatttcttccttaaaaagctcattcaaagatcataggcagacttcttccccattgtattttagttggggagataaaggcaaaaagaggaaatgtaagctatcttacagtcattctgagaacctctggtttcatgctatactttcccagctaaaagttactaatttacgaagttcagatactgaaacttaaaaatcaagatccatatattagaatgtcctgctgtcacactggtggtggcccattgtgtcggagtctggtaaatgg

SEQ ID NO: 4478 - DNA, 481 bp, Homo sapiens
  unsure (252): n=A,T,C or G
  unsure (423): n=A,T,C or G
  unsure (442): n=A,T,C or G
  unsure (469): n=A,T,C or G
aaatcacagcttttacctatttgttaggctatagtgttttgtaaacttctgtttctattcacatcttctccacttgagagagacaccaaaatccagtcagtatctaatctggcttttgttaacttccctcaggagcagacattcatataggtgatactgtatttcagtcctttcttttgaccccagaagccctagactgagaagataaaatggtcaggttgttggggaaaaaaaaagtgccaggctctctanagaaaaatgtgaagagatgctccaggccaatgagaagaattagacaagaaatacacagatgtgccagacttctgagaagcacctgccggcaacagcttccttctttgagcttaggtgagcaggattctggggtttgggatttctagtgatggttatggaaagggtgactgngcctgggacaaagcgaggncccaaggggacagcctgaactccctgntcatagtagtgg

SEQ ID NO: 4479 - DNA, 338 bp, Homo sapiens
  unsure (27): n=A,T,C or G
  unsure (252): n=A,T,C or G
  unsure (273): n=A,T,C or G
  unsure (275): n=A,T,C or G
  unsure (284): n=A,T,C or G
ctgatgcctcactactagatgcagtgntgggaccttcctcttttggagctgtcccatgtacagtggacccaagctcaggaccttcgtggagctgcttctccaacctgagaaactcaagacccatcctcccgctgtcactttggacaatggaaatctacattttcttttcccttttttttttttttgagacagagtctcgctctgtcacccaggctggagtccagtggcacaatcttggctcactgcaacctntgcttcccgagttcaagcaantntcctgcctnagcctcctgagtagctgggattataggcatgcaccaccacacccagctattttt

SEQ ID NO: 4480 - DNA, 540 bp, Homo sapiens
aaaagttaggtgctctttgtatgcgaggattgggattgttaggggcctgtgttcgtgatgatcaccatcatggagtcatttcttgttgggaattgttagagggtaagatcagagataggtacttagttcaagaagactctctgaagctcccaaactgtagatatgtcctgtgtgcgaactggctggctttacagaagtcctgatggaagtgggtttattgttttttgactcgttaccaaccctctgcttactccttcccctcaaaaaagggaagctgacttctcaggttagccagcagctcactcatacttttttctctctctattccattggctgatctgctgacttggggctctgaatctggatactctccatcaccggttggctgctgtcaccatttccttcctcgttgatggcactactagtggtcaagcagaggatgcagatgtacaactcaccataccaccgggtgacagactgtgtacgggcagtgtggcaaaatgaaggggccggggccttttaccgcagctacaccaccca

SEQ ID NO: 4481 - DNA, 507 bp, Homo sapiens
  unsure (4): n=A,T,C or G
  unsure (24): n=A,T,C or G
  unsure (30): n=A,T,C or G
  unsure (34): n=A,T,C or G
  unsure (40): n=A,T,C or G
  unsure (53): n=A,T,C or G
  unsure (58): n=A,T,C or G
  unsure (62): n=A,T,C or G
  unsure (76): n=A,T,C or G
  unsure (78): n=A,T,C or G
  unsure (90): n=A,T,C or G
  unsure (93): n=A,T,C or G
  unsure (114): n=A,T,C or G
  unsure (134): n=A,T,C or G
  unsure (136): n=A,T,C or G
  unsure (153): n=A,T,C or G
  unsure (165): n=A,T,C or G
  unsure (176): n=A,T,C or G
  unsure (210): n=A,T,C or G
  unsure (212): n=A,T,C or G
  unsure (231): n=A,T,C or G
  unsure (236): n=A,T,C or G
  unsure (245): n=A,T,C or G
  unsure (279): n=A,T,C or G
  unsure (291): n=A,T,C or G
  unsure (322): n=A,T,C or G
  unsure (332): n=A,T,C or G
  unsure (449): n=A,T,C or G
  unsure (493): n=A,T,C or G
  unsure (504): n=A,T,C or G
tcanccatttataaagaaacaacntacaangaangctganctgaggaatgcanatgtntacngtaagaaggaacananaatgtaattcancantcctaaggcaaacaattaatnagaaaaatacatttactgtnantgaaaaatacaaatggnaatccatacttnatggaactacnggcttcttccatggggaaaatggacttaacattnanatgttgacaatttcggaangcagnttatattgncatctacaatctgaactgaaactcagaaatccangggatgcatggncaggaaataaaattcttcaacttattttttnttggagaatntaatgagattttataatgcaaactgtatgaagactgcttgatgacttgagcagtgttcagatcacagcatacatattcaaatgattttaatatttggaaagactgtcagagggttgngtccgtgtaaaaaaaaaaattggtaatatgaaacaaaaaaagcnaatgaagaganaaa

SEQ ID NO: 4482 - DNA, 242 bp, Homo sapiens
cctcaattcattgctaaacattttttaacaagtatctcacatttaacaaaaaaagatcagtcatatggcagcaaaatacaatgtcatatgaccaaaacatgaaagactgtgaaaatgaatctggaggtgacccaagcattgaattcaacaatccaggctgggtgcggtggctcacactgggaggctgaggtaggcagatcacctgaggtcaggagttcaagactagcctgggcaacattgtg

SEQ ID NO: 4483 - DNA, 253 bp, Homo sapiens
  unsure (58): n=A,T,C or G
ctgtacccattgcaggacattctcactggagatcagcttctttttgaatacaagccanaagtcattggtgaagccttgaatcagctagttcctcaaaaagcaaatcttgttttactgtctggtgctaatgagggaaaatgtgacctcaaggagaaatggtttggaactcaatatagtatagaagatattgaaaactcttgggctgaactgtggaatagtaatttcgaattaaatccagatcttcatcttccag

SEQ ID NO: 4484 - DNA, 445 bp, Homo sapiens
ctgccgccgtggaatccaaaatttcgggagctgtgaccctttcctcatgtaaaacgagtagtcttggacgatctgggcataggaaccaatcagaaacaatcgcttcagcaatcaagaccattgttcatcatgggggaacccatggatacctctgagcctctatctgcattaccattcactgggcagcagtcttttgagccaagtggcaaatttggacagtatccatcgatgcagatgaaccacatccaggcactggggaagtggaggacatagaacagctcaatcagtgtttgatccaacacttccatctcattaagacaagtttgatttttctttgctttttatttcatggaatacatgagaatctcttaactgttggagtttccaaggaggcatacctcgtgacttcagttaatggaaagaacaaaactaaaatgctgtatgg

SEQ ID NO: 4485 - DNA, 107 bp, Homo sapiens
  unsure (10): n=A,T,C or G
  unsure (24): n=A,T,C or G
  unsure (34): n=A,T,C or G
  unsure (35): n=A,T,C or G
  unsure (54): n=A,T,C or G
  unsure (65): n=A,T,C or G
  unsure (68): n=A,T,C or G
  unsure (77): n=A,T,C or G
  unsure (83): n=A,T,C or G
  unsure (96): n=A,T,C or G
  unsure (102): n=A,T,C or G
aaatcacagnttttacctatttgntaggctatanngttttgtaaacttctgttnctattcacatnttntccacttgngagagncaccaaaatccantcagtntctaa

SEQ ID NO: 4486 - DNA, 373 bp, Homo sapiens; identical to SEQ ID NO: 142

SEQ ID NO: 4487 - DNA, 214 bp, Homo sapiens
aaaaagtttatatgaatatccagtcaaaaccaacacggtattgcccttgaaatgttaactagacggatttccaaggagaccacaggactgtatactgtcttggaatgtcctcagaaggctctgtcattgatcaggtaacagtaaaaaccccagagtcctttctttcaaatggaaaagggaaagcagagggacagaagctattcaaacttcgtct

SEQ ID NO: 4488 - DNA, 548 bp, Homo sapiens
  unsure (28): n=A,T,C or G
  unsure (79): n=A,T,C or G
  unsure (81): n=A,T,C or G
  unsure (90): n=A,T,C or G
  unsure (97): n=A,T,C or G
  unsure (107): n=A,T,C or G
  unsure (118): n=A,T,C or G
  unsure (120): n=A,T,C or G
  unsure (159): n=A,T,C or G
  unsure (174): n=A,T,C or G
  unsure (182): n=A,T,C or G
  unsure (184): n=A,T,C or G
  unsure (198): n=A,T,C or G
  unsure (206): n=A,T,C or G
  unsure (238): n=A,T,C or G
  unsure (269): n=A,T,C or G
  unsure (314): n=A,T,C or G
  unsure (404): n=A,T,C or G
  unsure (502): n=A,T,C or G
ccatcaccatgtcacccacaccagcagngggaagtctgttcagccgtcccttgatccccttcacggagatgatatacangnttttggctnctgtgtngtcagcacanttgattacagntnctaccggaagacccaaggaaatccggaatttcgcaccanaggacccaccacgtnctcgcttngncatcttgaacgccngaaaaaanaaaaaaggaagtcgattcaaaggacactgggntatgaactttaacgccccgcccaccctcctnacgtggccggagcaaaaaccggcctcttccgcctctgggcgctgncttattacgtaataagtttacgacgtcgcttttagccctctctgcgaagtgggagttgaagtagaagcgcaagagataggaagtatcttntctacgagcttaagagtagttagggacatggaaacagtgatttgttaacttgctcacgacctcttttgaccacttaatagtgccaggcacttatctgnacactagagaataggaattaaaacacggtttgtgccgtgtgggggt

SEQ ID NO: 4489 - DNA, 567 bp, Homo sapiens
  unsure (548): n=A,T,C or G
gaggttttctcgctctagggagattcttcaagcaatcactatgtcaacagacacaggtgtttcccttccttcatatgaggaagatcagggatcaaaactcattcgaaaagctaaagaggcaccattcgtacccgttggaatagcgggttttgcagcaattgttgcatatggattatataaactgaagagcaggggaaatactaaaatgtccattcatctgatccacatgcgtgtggcagcccaaggctttgttgtaggagcaatgactgttggtatgggctattccatgtatcgggaattctgggcaaaacctaagccttagaagaagagatgctgtcttggtcttgttggaggagcttgctttagttagatgtcttattattaaagttacctattattgttggaaataaactaatttgtatgggtttagatggtaacatggcattttgaatattggcttcctttcttgcaggcttgatttgcttggtgaccgaattactagtgactagtttactaactaggtcattcaaggaagtcaagttaacttnacatgtcacctaaatgcac

SEQ ID NO: 4490 - DNA, 556 bp, Homo sapiens
aaacatctaaaatacactgaaaatgtgttcttttccaataacatggatgttcacaacagttggtgttacgttagagctaataattatactttagcacgttaacctcagaattctaaggctgagagtcaaacactgctaattcatagaaggcaatagcttgtaataatgaatcataaagctcttctactctttgtagttcagtagataaaaacatctgtctgtagtgaactattttatctgatgggaagaacacccgaggatccgccttcagtatagaatcgaagagaaactgcttcactagctcttttccactagtccgggagtcaccaatcatcagttcaaaatgcttccccactgcatttcgattcatgctcagcacctgatgctgcccatcctgggcaaaagttttatttaataaggcatacagcatggcttccatgatatgaaaatgtaacagtattggaaacagagatgagttctgaatggaaagtcctgttttttccagaacatagaaatctgctttaggcatctttgaaatgatcgaggaaatcttttt

SEQ ID NO: 4491 - DNA, 473 bp, Homo sapiens
  unsure (11): n=A,T,C or G
  unsure (86): n=A,T,C or G
  unsure (142): n=A,T,C or G
  unsure (149): n=A,T,C or G
  unsure (190): n=A,T,C or G
  unsure (271): n=A,T,C or G
  unsure (299): n=A,T,C or G
  unsure (362): n=A,T,C or G
  unsure (432): n=A,T,C or G
ccttgcctcanatccaaggtcactcggaagaggccatgtctaccctcaatgacactcatggaggaaatgctgagagaagcattcanatgcatgacacaaggtaagactgccaaaaatcttgttcttgctctcctcattttgntatttgntttatttttaggagttttgagagcaaaatgacaacacccanaaattcagtaaatgggactttcccggcagagccaatgaaaggccctattgctatgcaatctggtccaaaaccactcttcangaggatgtcttcactggtgggccccacncaaagcttcttcatgagggaatctaagactttgggggctgtccagattatgaatgggctcttncacattgccctggggggtcttctgatgatcccagcagggatctatgcacccatctgtgtgactgtgtggnaccctctctggggaggcattatgtatattatttccggatca

SEQ ID NO: 4492 - DNA, 415 bp, Homo sapiens
  unsure (367): n=A,T,C or G
  unsure (369): n=A,T,C or G
aaatgaatttgacactctacaagacagagatttctttctccagttaaacctcagaaggtaagtcagctagtacaaaaagtattctatatactagtatatcatacctcagactgcagagctcttgttctcttttaacttttcgattctctatgattttatttcttttggttctgatagttcattttgtagtacacgaagcttatttttcatttgtttcatttttgctgtaagttgttcacagggatttttttttcttttttttttttttttgacggagtcttgctctgttgcctaggctggagtgcagtggtgcgatctccactcactgcaagctccgcctcccgggctcacgccattcccccgcctnancctcccgagcagccgggaccacagtcacctgccaccacgcccggcc

SEQ ID NO: 4493 - DNA, 197 bp, Homo sapiens
aaaaatgtctatgaaaattgacactggaaaaaactgtttatctctaggtcttgttttgaaaggattgttgatgagtctacttgcttttcctagttaagacactagcaatggtttctacagtatttctctatatgttgttttcaggttttagaaagggggatgatcttttcaggtatcaaagtggtaaaagcagtatt

SEQ ID NO: 4494 - DNA, 413 bp, Homo sapiens
ctggaaacagatccatctctagacatgaaagaacaatcgacaagatcctctggacacagcagttctgagttatccccagatgcagtggaaaaggcagggatgtcttcaaatcagagcatctcttcacctgtgcttgatgctgtacccagaacaccctcgagagaaagaagtagttctgcatcttctcctgaaatgaaagatggtttacccagaactccatcaaggagaagcaggtctgggtcttctccaggacttagagatgggtctgggactccctcgaggcacagcctgtctgggtcctctcctggaatgaaagatatacctagaacgccatctagagggagaagcgaatgtgattcttccccagaaccgaaagctttgcctcagactcctaggccgaggagtcgttctcc

SEQ ID NO: 4495 - DNA, 544 bp, Homo sapiens
ctgaattccccaggatagattatgagatgctggaacattactgtaacgctggctttgcataaagatgggtcttgtcccattccttcaccagtaagctcttgtgggctgaacattgcaacaacagagctctcttcggttccaacgtgcgcgtaaatcctgcagacaggagcccaataagacattaggtcaactcagggcatttcgaaaacgctattttctgaacagacggctaagcaagaggcttgcagggcccatctcctcagagttatttatcctcacggagctcagtacaggtctgtgaaaaggtcctcatcataggaagggggacctacacggcccgccatcgccattttgtccttcacaaagccccactgctacttttaagcctcgaggccacgcacaagaccttatccgccagtcgccctggccaggcagctacaacacagaaggcatagtgcgtgctatgctatgttcgcacaatcgctcaaaagaaaataaaagaaaaagcttgtacaaaagagtaacagctataaagacacctcgg

SEQ ID NO: 4496 - DNA, 386 bp, Homo sapiens
ccttttttaagtgacctgtaactcatatcagtgaaaaagaacatgctataaaaagattccacaaagtgagagcattaagctcaaaggtcctgaggtaggtgtgtttgaggagctggtgtgtagctgctgtataagaagtcaacctccttattttcaggtacatttattattattttaaccccaagcagaattgcctagctgggtcctcacctttacacaatagtcataggatttgactgttatcaaaaagtaaatccactctcagaggccatagatttcctattactgaggttcttcaaaagaatatgtaatcaatttatatagtaattcctaaaaatgagattctaaaatatagtagcatgcagatgaagcatagctaatgcttt

SEQ ID NO: 4497 - DNA, 573 bp, Homo sapiens
  unsure (11): n=A,T,C or G
ccttgcctcanatccaaggtcactcggaagaggccatgtctaccctcaatgacactcatggaggaaatgctgagagaagcattcagatgcatgacacaaggtaagactgccaaaaatcttgttcttgctctcctcattttgttatttgttttatttttaggagttttgagagcaaaatgacaacacccagaaattcagtaaatgggactttcccggcagagccaatgaaaggccctattgctatgcaatctggtccaaaaccactcttcaggaggatgtcttcactggtgggccccacgcaaagcttcttcatgagggaatctaagactttgggggctgtccagattatgaatgggctcttccacattgccctggggggtcttctgatgatcccagcagggatctatgcacccatctgtgtgactgtgtggtaccctccctggggaggcattatgtatattatttccggatcactcctggcagcaacggagaaaaactccaggaagtgtttggtcaaaggaaaaatgataatgaattcattgagcctctttgctgccatttctggaatgattc

SEQ ID NO: 4498 - DNA, 311 bp, Homo sapiens
aaacattcctgggcacccactcaagagtgctctttttatcaccttctggaaatccgcaaagttgcaggggcctctggagtgtctcttctctagagagaattggtgggacccccctcagtgcagtggccccaactagtggagggagagaggacttaagtcagatggactcaacagaaatgggtttccagaagaataatgaaaagttgtgggtaggaaaatgaatcatttggactcttcaatgaaatggagtgagcccaggagagctcagccaacagaggcactctgggaacctgttagtaaagccaggctga

SEQ ID NO: 4499 - DNA, 437 bp, Homo sapiens
agaaaaaactattgggtactaggcttggtacctgggtgatgaaataatctgtacaacaaacccccatgacacaagtttagctatataacgaacgtgcatatgtaccccctaacctaaaaggaaagtttaaaaaggaaaaaacacctaggagaaaagaaaaatgataaattaacaaaggacaatgctcttagcaccgccatcattcaggaatttccaagggttttaggagctttgtgttaggaactgggggcagagaccaaatatatatttcttcttatgttacactaccccagataggaaaacagaaattactctagatatttcaaacaaaaaagggttgtatataggcaattagtgcttatcactggaggtgctagaggtggtggaggttgtggggatggggttgcaccactggctttcaggctactttaccacag

SEQ ID NO: 4500 - DNA, 564 bp, Homo sapiens
ccaccagagaaatgcgaatcaaaaccacagtgagataccatctcacaccagttagaatggcaatcattaaaaagtcaggaaacaacaggtgctggagaggatgtggagaaatgggaacactttgacactgttggtgggactgtaaactagttcaaccattgtggaagtcagtgtggcgattcctcagggatctagaactagaaataccatttgacccagccatcccattactgtgtatatacctaaaggattataaatcatgctgctataaagacacatgcacacgtatgtttattgcggtactattcacaatagcaaagtcttggaaccaacccaaatgtccaacaatgatagactggattaagaaaatgtggcacatatacaccatggaatactatgcagccataaaaaatgatgagttcatgtcctttgtagggacatggatgaaactggaaaccatcattctcagcaaactatcacaaggacaaaaaaccaaacaccacatgttctgactcataggtgggaattgaacaatgagaacatatggacacagggaaggggaac

SEQ ID NO: 4501 - DNA, 212 bp, Homo sapiens; identical to SEQ ID NO: 2921

SEQ ID NO: 4502 - DNA, 569 bp, Homo sapiens
  unsure (94): n=A,T,C or G
  unsure (112): n=A,T,C or G
  unsure (154): n=A,T,C or G
  unsure (159): n=A,T,C or G
  unsure (166): n=A,T,C or G
  unsure (246): n=A,T,C or G
  unsure (289): n=A,T,C or G
  unsure (447): n=A,T,C or G
  unsure (470): n=A,T,C or G
  unsure (477): n=A,T,C or G
ctgagaggcatctaccttcatggaaacccatttgtctgtgactgttccctgtactccttgctggtcttttggtatcgtaggcactttagctcantgatggattttaagaacnattacacctgtcgcctgtggtctgactccaggcactcgcgtnaggtncttctgntccaggatagctttatgaattgctctgacagcatcatcaatggttcctttcgtgcgcttggctttattcatgaggctcangtcggggaaagactgatggtccactgtgacagcaagacaggtnatgcaaatacggatttcatctgggtgggtccagataacagactgctagagccggataaagagatggaaaacttttacgtgtttcacaatggaagtctggttatagaaagccctcgttttgaggatgctggagtgtattcttgtatcgcaatgaataancaacgcctgttaaatgaaactgnggacgtnacaataaatgtgagcaatttcactgtaagcagatcccatgctcatgaggcatttaacacagcttttaccactcttgctgcttgcgtgacctc

SEQ ID NO: 4503 - DNA, 521 bp, Homo sapiens
aaaaataattatttttttaattgacagataacaattgtacatactcatggagtacatagtgatattttgatacctataatatatagtgatcagatcagggtaattggcatagccatcatctcaaacacttatcatttcttcgagttgggaacattcttgacttggggttattgaactttgaaaatcccatgtgattgacctaagttatgttctatgtcaggtcctgatgattcaaggtcagaagtagtttgatgtcagggagtttaatgctgcccagcatgggtagaataaccttgttgcattacatgaccctatttccctgaccagagcagattgatcagggctggagttgggtcccaagctaagcttgtcatattttctctttcttgggaattgtgatagagtctaaaacagtttaattggtttgagataattacatgacctgaggcagagattgcaaactggtggcccatgggctgaagctggttcataaataagttgattctattttttttgccttt

SEQ ID NO: 4504 - DNA, 553 bp, Homo sapiens
  unsure (107): n=A,T,C or G
  unsure (153): n=A,T,C or G
  unsure (184): n=A,T,C or G
  unsure (193): n=A,T,C or G
  unsure (325): n=A,T,C or G
  unsure (327): n=A,T,C or G
  unsure (473): n=A,T,C or G
ccacgttcctggccgaggacccgaaggttaccctgaccatcttcgttgcccgcctctactacttctgggacccagattaccaggaggcgcttcgcagcctgtgtcanaaaagagacggtccgcgtgccaccatgaagatcatgaattatgacnaatttcagcactgttggagcaagttcgtgtncagccaaanagagctatttgagccttggaataatctgcctaaatattatatattactgcacatcatgctgggggagattctcagacactcgatggatccacccacattcactttcaactttaacaatgaaccttgggtcanangacggcatgagacttacctgtgttatgaggtggagcgcatgcacaatgacacctgggtcctgctgaaccagcgcaggggctttctatgcaaccaggttccacataaacacggtttccttgaaggccgccatgcagagctgtgcttnctggacgtgattcccttttggaagctggacctggaccaggactacagggttacctgcttcacctcctggagcccctgctt

SEQ ID NO: 4505 - DNA, 449 bp, Homo sapiens; identical to SEQ ID NO: 4444

SEQ ID NO: 4506 - DNA, 375 bp, Homo sapiens; identical to SEQ ID NO: 4446

SEQ ID NO: 4507 - DNA, 470 bp, Homo sapiens
ccttttctcttcgtcacacaacagagaacaagcctcacagcccaaagactccagaaccaagaaggagccctctaggacagaaaaggggtatgctgtcttctagcacttcaggtgccatctctgacaaaggcgtcctgagatctcagaaagaggcagtgagttccagtcacggacccagtgaccctacggacagagcggaggtggagaaggactcggggcacggcagcacttccgtggattctgaggggttcagcatcccagacacgggcagtcactgcagcagcgagtatgcggccagctccccaggggacaggggctcgcaggaacatgtggactctcaggagaaagcgcctgaaactgacgactctttttcagatgtggactgccattcaaaccaggaagataccggatgtaaatttcgagttttgcctcagccaactaatctcgcaaccccaaacacaaagcgtttt

SEQ ID NO: 4508 - DNA, 213 bp, Homo sapiens
aaacatattcagaacagatgcttgaaatatgcacttagcactttggttccacatctgtctgggtaaaccatgaagaaaatgaagctgctgcctcaatcgacccagacagcagccataggcagataaagatttggtttcaccctggtggtggtaggcatcgtgtgtgactttttttcctctaatatcaattttacagtacggaaatagtatttt

SEQ ID NO: 4509 - DNA, 291 bp, Homo sapiens
  unsure (76): n=A,T,C or G
aaaaagtttctaatattaaagtcagaatattaatacaattaatattaatattaactacagaaaagacaaacagtanagaacagcaaaaaaataaaaaggatctccttttttcccagcccaaattctcctctctaaaagtgtccacaagaaggggtgtttattcttccaacacatttcacttttctgtaaatatacataaacttaaaaagaaaacctcatggagtcatcttgcacacactttcatgcagtgctctttgtagctaacagtgaagatttacctcgttctgctca

SEQ ID NO: 4510 - DNA, 564 bp, Homo sapiens
aaacttgatccaacctctttgcatcttacaaagttaaacagctaaaagaagtaaaataagaaggcaatgcttgtggaatgtacagtgcatattggcggcgcacgcctcattacgattcgcctgcttgcttctcctgttcaatcgtttctttggaaggcagtggatttttctcttgcgtctctgtcttcttcagtttcgacttatcgaatttctcgatctcagccatatcgggtttgtcagacatggttgcggaggaaaagctgcagggagcaagccaagagcgagcgtgaggaagagccacccgccccgctgtctctgggctgggaactgcacttctgccctccgacccgcagcctgaaaaaaacccttctcgccctcctactgctgccgttccgcgctcacgagcttcctctttctacagaaaaagaggcgacaccccccgcgcccctcctccccatatttcaaaacgctgtggaccaaagagggcggatgcctctcaaagccgaatcttgcagaataaaggaaattgaccactgcgaattgttaattacagcgtttacctgc

SEQ ID NO: 4511 - DNA, 214 bp, Homo sapiens
  unsure (18): n=A,T,C or G
  unsure (122): n=A,T,C or G
gctgggcggggagcgtcngaccagaagagaatcacgccaggaaagcgacccggaggatgatgatgttaaaaagccagcattgcagtcttcagttgtagctacctccaaagagcgcacacgtngagaccttatccaggatcaaaatatggatgaaaagggaaagcaaaggaaccggcgaatatttggcttgttgatgggtacccttcaaaaattt

SEQ ID NO: 4512 - DNA, 548 bp, Homo sapiens
  unsure (51): n=A,T,C or G
  unsure (63): n=A,T,C or G
  unsure (343): n=A,T,C or G
  unsure (397): n=A,T,C or G
aaaattttacatccagtttgagatcactttgagaataaaatacctgcctancagctcttttgnaaaatgttactataggaaaaagaaaccaagcatattattatactttctgattcctaacaaaaaacataaaaaacacatgtccagttctttaacattgagagacttgtttgtcacaggttaataggaggcactgctggtggaagaccctaaagaataatgcacaccacagccctcagccttgtaagtcgtaagagttactcaaatagcatgctttttgttgtgtgtgggtctgttgttaagagcaacagaacataagatttttctaatcatcaatattcanaatataatcaagaactcatatctaatgatgacaagactttccattgcacatcanatacatgatatttttagttttgtaccttcacacaaattctgaaggcaacatcatttataaaactcgtaggcaaatgtataacattttttaatagtaaaaactcatgataaatatctcccatgccaaagtattagcatatattacactctgg

SEQ ID NO: 4513 - DNA, 436 bp, Homo sapiens
  unsure (8): n=A,T,C or G
  unsure (9): n=A,T,C or G
  unsure (38): n=A,T,C or G
  unsure (50): n=A,T,C or G
  unsure (90): n=A,T,C or G
  unsure (147): n=A,T,C or G
  unsure (193): n=A,T,C or G
  unsure (204): n=A,T,C or G
  unsure (217): n=A,T,C or G
  unsure (343): n=A,T,C or G
  unsure (354): n=A,T,C or G
  unsure (408): n=A,T,C or G
  unsure (425): n=A,T,C or G
gcatgtcnngatctaagtaggagtgatgtttattcganagctgactttanatcttattcctttatatttttctaaagtcaaattattcanaatttgcagtgctttagttcatcacatgatattcttctgagatgtggtgacacttanattggcaattgctgcccccaaactgagggagcgaataataggaagncacttggagcnatcctggctcaanttcaagcgctggtcccatcactcatttttgacctctcattatttgaataaaggggtcttaattcatattcataagtgatgtgtactgccagatacacacctataatcagcactttggaaggctgangcaggaggatngtttgagcctaggaatttgagggtgcagtgagctatgattgtgccactaaattncagctttggtgacaganccgagacgctg

SEQ ID NO: 4514 - DNA, 354 bp, Homo sapiens
ccaaccaggggcagggcgtacttcagcacgaagtccttgatggccgagtcctgggtggagccctgcttcaaagagggaacaggtgagggggcccaccatctccccaccattgttcttgagtacaatgtttgagggactttgggggagtggcgactttgaagggatcagtcttaggaggcaaaacaccccagggctcgaccccactcaagcacagcccagtcattccctaccgtcttttggggctcctttccctccagtgaaccgtaggtgacttcttgggaaaaggcaaacaccttggccctttccttgggggtgtaggctcactaaccccacaaagagaccactcaaggtagg

SEQ ID NO: 4515 - DNA, 531 bp, Homo sapiens
  unsure (35): n=A,T,C or G
  unsure (57): n=A,T,C or G
  unsure (60): n=A,T,C or G
  unsure (74): n=A,T,C or G
  unsure (75): n=A,T,C or G
  unsure (76): n=A,T,C or G
  unsure (84): n=A,T,C or G
  unsure (86): n=A,T,C or G
  unsure (89): n=A,T,C or G
  unsure (106): n=A,T,C or G
  unsure (117): n=A,T,C or G
  unsure (142): n=A,T,C or G
  unsure (144): n=A,T,C or G
  unsure (151): n=A,T,C or G
  unsure (160): n=A,T,C or G
  unsure (191): n=A,T,C or G
  unsure (193): n=A,T,C or G
  unsure (211): n=A,T,C or G
  unsure (240): n=A,T,C or G
  unsure (269): n=A,T,C or G
  unsure (279): n=A,T,C or G
  unsure (284): n=A,T,C or G
  unsure (301): n=A,T,C or G
  unsure (310): n=A,T,C or G
  unsure (324): n=A,T,C or G
  unsure (334): n=A,T,C or G
  unsure (340): n=A,T,C or G
  unsure (348): n=A,T,C or G
  unsure (367): n=A,T,C or G
  unsure (368): n=A,T,C or G
  unsure (374): n=A,T,C or G
  unsure (394): n=A,T,C or G
  unsure (406): n=A,T,C or G
  unsure (407): n=A,T,C or G
  unsure (481): n=A,T,C or G
  unsure (515): n=A,T,C or G
aacgtgaaccactggacaggatatagctgttccancttagggagcccactcgggcanagngactggtcatattnnnaaaccgtntntgntgctgcacatcccatanctgcacctcancactgctggtgcccacagccaagtngntgccctntttgatccnggccacagaggatatatattccccaggctgntncatttgcaaaagctgcangatgtcaccagagcttgcactccacaggnacacactgttgtccagtgccacggccagnacattcccanaactncaatccacaaggttcangtaatagtnatttcggatttcangcgcatccangatacngtctggcngggaaggaatgtaacggcnngtcttncggctggagccaggagtggncttttggctgtnnagtactttcagtctgttctgataaccctctggcgcattttgtggttttccactgagccgaaggatcttggcttnctctacatcaaaaccgttcaggttcaaagcccangctttctgatgtccct

SEQ ID NO: 4516 - DNA, 439 bp, Homo sapiens
ggagaatgacaccctgaaggcactactgaaagccaatgtggagaagcccgtgaagctggaggtgttcaatatgaagaccatgagggtgcgcgaggtggaggtggtgcccagcaacatgtggggcggccagggcctactgggtgccagtgtgcgcttctgcagcttccgcagggccagtgagcaggtgtggcatgtgctggatgtggaaccatcttcacctgctgcccttgccggcctgcgcccctacacagactatgtggttggttcggaccagattctccaggaggtgaggaacccgcaatttgcccctccccagaccctctggatgtggtgtgaagagaagggtgctgtccatgagaagtgtctggttttgttgaggctttagccctggaagcagggtctgagtgatgcaaaatgaacctcaacaggtttggaaggg

SEQ ID NO: 4517 - DNA, 337 bp, Homo sapiens
  unsure (14): n=A,T,C or G
  unsure (41): n=A,T,C or G
  unsure (68): n=A,T,C or G
  unsure (84): n=A,T,C or G
  unsure (98): n=A,T,C or G
  unsure (139): n=A,T,C or G
  unsure (167): n=A,T,C or G
  unsure (179): n=A,T,C or G
  unsure (208): n=A,T,C or G
  unsure (210): n=A,T,C or G
  unsure (217): n=A,T,C or G
  unsure (230): n=A,T,C or G
  unsure (236): n=A,T,C or G
  unsure (237): n=A,T,C or G
  unsure (246): n=A,T,C or G
  unsure (261): n=A,T,C or G
  unsure (280): n=A,T,C or G
  unsure (306): n=A,T,C or G
  unsure (310): n=A,T,C or G
cctcactgagatgntctttgagtgaattcctgaaagaagtnaggaagtgagcccatgccattatctanaggaagagcatcccangcagtgggaactgnaagaacaaagctgtgaggctggagcatgactgcctgtgctngggaccacaaagaggctgtgtggaagcngatggggggcanaggttgtggtgagtgagagatgaggtcanangaaacantgtagagaaaggntgtgcnnagcatacanagccttgaaggtctntctaaggactttggctgantaaaatgggaagccactaggtgattntgangagaggaatgccatgatcttatacttt

SEQ ID NO: 4518 - DNA, 516 bp, Homo sapiens
ctgaggacaaacatgagatgagcatagtcagggacagatgtttgggagaaacaaaaggagggtaagtaggaagcgcagggcaaaggcaggcagagcgagtattgcagcagcctttgctgcgtgctgggaagtttctaacaatgcagggctcttggaaagcactgagattgcagcacttgttttgatagcgaggcaaggagtcacaaagtcaggcaaggagggtcatggaaagcggggtgacagagggagaagtccggggcggtggctctcctctaaagcctgtacctagtcctcatctctctccagcctctttacaatgttcatccatggaaagtgaagcccagagaagttaagtaacttgcttaaggtcacacagcaagttgacaaaaacaaacatacacaaaaaaaataaatcacggccaggcacggtggctcacgcctgtaatcccaacattttggaaggctgaggcaggaagatcaactgaggtcaggaggtggacaccagcatggacctcg

SEQ ID NO: 4519 - DNA, 510 bp, Homo sapiens
  unsure (28): n=A,T,C or G
  unsure (242): n=A,T,C or G
  unsure (344): n=A,T,C or G
  unsure (472): n=A,T,C or G
ctgaggacaaacatgagatgagcatagncagggacagatgtttgggagaaacaaaaggagggtaagtaggaagcgcagggcaaaggcaggcagagcgagtattgcagcagcctttgctgcgtgctgggaagtttctaacaatgcagggctcttggaaagcactgagattgcagcacttgttttgatagcgaggcaaggagtcacaaagtcaggcaaggagggtcatggaaagcggggtgacngagggagaagtccggggcggtggctctcctctaaagcctgtacctagtcctcatctctctccagcctctttacaatgttcatccatggaaagtgaagcccanagaagttaagtaacttgcttaaggtcacacagcaagttgacaaaaacaaacatacacaaaaaaaataaatcacggccaggcacggtggctcacgcctgtaatcccaacattttggaaggctgaggcangaagatcaactgaggtcaggaggtggacaccagcatgg

SEQ ID NO: 4520 - DNA, 301 bp, Homo sapiens
ttaaaactgtgtttgtggatcagagaaggctttatagcacagggggcattcagatgagtcttagaggaagagaagaaacatggcaagcagattacatctgagccgtttgaattgtgtttttctttcttcccatgtttattttctaagatctacctgaacttagagactcaagatatttttttaggaaacctcctacccatgtctgaggtagcaagtgcagcctcacgacagataccaggcaatccagagccacaaaacgtgattcctccaggctctgcctggcctgaccctgtcctgtcag

SEQ ID NO: 4521 - DNA, 317 bp, Homo sapiens
  unsure (4): n=A,T,C or G
  unsure (143): n=A,T,C or G
cagngccctccaccactcaccaggcaaacaaatgtggcttccaagaaggacaaccacccccgtttgctaagcccttcctaggaccaagctgtgggccctgggcttccctgatagtccaagttcaggttgttacttctgagcanaggcaactgaggctcagagaggccaagtggcttgcctgagatgatgtgactactgagcaatgaagctgggcctcatactaccctgcctaggactgcaggcccccccaccacaacgcttcctccccagcccctcaataccccactttggctgccagaggctatgagcagccccag

SEQ ID NO: 4522 - DNA, 430 bp, Homo sapiens
ccagtgaggtagggtttgcaatgagctccacccttcagccatgtcctgcaaccttccccgggcccatagtgagggtgccaccttactcccagcctccaggggctctgcctgctcctgccctgtcccccgcatcctatgaggcatgggcgtgggtgggcacagcatactgtgcgtgtgtgtgtccgtcacaccttgctcgggacggaaagattcccacacaggaataaggacccgtggccctcatgggggaaggacagaggcactacaggtcacctcatcccctctcctgcctccatggcacacgtcaccctccccaggccacttccaagtcactcagagttgtgggacagagtgaagctctctgcatggcgtttccttggctatggtttgcagaggctgcaaactccaatgagctacagtttgggggcag

SEQ ID NO: 4523 - DNA, 418 bp, Homo sapiens
  unsure (12): n=A,T,C or G
  unsure (42): n=A,T,C or G
  unsure (297): n=A,T,C or G
aaaatactttantattataaacatccgtgacctacataatancaataatgctttaactgtataaatgagactgtggaaattccattattggctctatttttaagggttacaatgaaattatgtacagtatataaagcttgtcaaactgaacatggtcttaggccattactactatttcattccaatttggattttaatacaattaacttacagatctgaaataaaagcactgcttaatggtttcagatgcattttggtactgaataagtttcaaggaatctttacagataataaatnataatgaagagaacctacgactaaagctgcttacatggataacaggaggaatgacgattgcaaatgttatgttattgacaattctatgaattaaaactcataaccacttctagatttcttt

SEQ ID NO: 4524 - DNA, 140 bp, Homo sapiens
  unsure (117): n=A,T,C or G
ccagtgcttccagaatgtaccatggactagcatcgggggcagggcctgcggtgtctccaggggcatcagctccaacttaggtacctgcagggaatggccctggttggcccggatganaaggccagtgctgggatccccca

SEQ ID NO: 4525 - DNA, 397 bp, Homo sapiens
ctggtgggtgacttgggcagtgtgttcctgctttcagtggttagcctttagcaaatctgctttagagtgagagtagagggcaggctgttgtattacagtgctcttgtttttgtaaaatttaattcactctactgttattttgtctccttgggtaaagtgttatttaatttttcttcattttttagtaatatataacagtcagtgagagaatttggttttcagagatgtcatccaaagcagattttacagttgtttcctggttataaattgtctcaacaattctcttttagtcatttagattgtttaatatgggaaaaccggggtgtagaacatgttgtaaaattaaattttatttacttttttcttatttccaggtccaagcatctcattttgaagg

SEQ ID NO: 4526 - DNA, 535 bp, Homo sapiens
  unsure (191): n=A,T,C or G
ctggctaattcagtcatgcaaactctgctctcacagttaaaacagttctatgagccaaaacctgatctgctgcctcctctgaaattagaagcttgtattctgacccaaggagataagatctctctacaagaaccactggattatctgctgtgttgtattcagcattgtttggcctggtataagaatacagncatacccttacagcagggagaggaggaagaggaggaggaagaggcattctacgaagacctagatgatatattggagtccattactaatagaatgattaagagtgagctggaagactttgaactggataaatcagcagatttttctcagagcaccagtattggcataaaaaataatatctgtgcttttcttgtgatgggagtttgtgaggttttaatagaatacaatttctccataagtagtttcagtaagaataggtttgaggacattctgagcttatttatgtgttacaaaaaactctctgacattcttaatgaaaaagcgggtaaagccaaaactaaaatgg

SEQ ID NO: 4527 - DNA, 203 bp, Homo sapiens
  unsure (38): n=A,T,C or G
  unsure (52): n=A,T,C or G
  unsure (74): n=A,T,C or G
  unsure (127): n=A,T,C or G
  unsure (180): n=A,T,C or G
  unsure (184): n=A,T,C or G
ctgctccacgtgaccacccaggccctcggccaggccgntgagcagatccagngctacgatcatgaagtccttgncgggagcctcatactgctcagggtgctgggtgtacatcatggcctgagccagngtcttctgcaccagggtgacacagcgctggtagacgggctcacagtaaggcangaanccactctgcagggcggtgg

SEQ ID NO: 4528 - DNA, 167 bp, Homo sapiens
aaatcagcagcaagcattaggacatgctattttggccccataagttaggtgtgtagcactacacattagacaccaagtcatcccaaccaatatttatccatatgaacagataaactgaacaaaaacatagttctgataaaacctgcattcacaacctaatgtagttt

SEQ ID NO: 4529 - DNA, 467 bp, Homo sapiens
ccaggctggtcttgaagtcctaacctcaggtggtccacccacctcggcctcccaaagtgctaggattacaggcatgagtcaccatacccggccggttatctgcagttttcaattctcagatttgctacatgaatatttttagcctacagaattcagattagctttgaggaaatgtggtgtgagagacacgtgtaaccagcagaaaatcagcttagactacccaccttagcgttttgttcttattcaaacaggcaaattcttagtaaataagaaagaagtaaagtttgatctcaagaaaatatgagggaaggctgaaaagggccctgggttcagaaagaagggttactaaaaaggagataagccgctggacaacagatctccattttgcagaatgctaagacattgcacttagtacctcctgtttcccatgggttctgatccagaaatgtgccctgggaactgagcag

SEQ ID NO: 4530 - DNA, 309 bp, Homo sapiens
aaaaagtatattaaagcctatgggatgcttttctgtcatattcccctaggtccagttgaacatgagaaaagtcagttttctgattagatttctgggtatggaagagagaaaatatagttttctgtaaagatgtaagtgaaagaatttagactggccttttaacataaactaggggtttccagtttcttggaatgggaggactccgtttgaatatctaattttgttatgcactctgctcttatttggttgtgattactaatagttgagaagtctgtttctgctgttccagtggttagaaaccactgtttt

SEQ ID NO: 4531 - DNA, 314 bp, Homo sapiens
  unsure (6): n=A,T,C or G
  unsure (18): n=A,T,C or G
  unsure (26): n=A,T,C or G
  unsure (28): n=A,T,C or G
  unsure (32): n=A,T,C or G
  unsure (56): n=A,T,C or G
  unsure (74): n=A,T,C or G
  unsure (108): n=A,T,C or G
  unsure (115): n=A,T,C or G
  unsure (118): n=A,T,C or G
  unsure (119): n=A,T,C or G
  unsure (130): n=A,T,C or G
  unsure (146): n=A,T,C or G
  unsure (194): n=A,T,C or G
  unsure (251): n=A,T,C or G
  unsure (263): n=A,T,C or G
  unsure (277): n=A,T,C or G
  unsure (279): n=A,T,C or G
  unsure (295): n=A,T,C or G
atgcanaacaaattatcntgtgactntnacantggatatttagaatgctgaacggnaaaattaaagtataaaanttaatgatcagaatgctgactgatttccataatncatttcnccnntggaaattaangaggaatcactgattncatttaatgaccatacaattcatgtaaatggctaacattatttagcanaatacacattcacctgacttgattagaaaaagttttccattaacttagcaacactgntgaagcagtctnacattatagcacanantggaggtgggaggacnggaagtacatatatcattt

SEQ ID NO: 4532 - DNA, 267 bp, Homo sapiens
  unsure (9): n=A,T,C or G
  unsure (11): n=A,T,C or G
  unsure (53): n=A,T,C or G
  unsure (63): n=A,T,C or G
  unsure (64): n=A,T,C or G
  unsure (96): n=A,T,C or G
  unsure (98): n=A,T,C or G
  unsure (107): n=A,T,C or G
  unsure (108): n=A,T,C or G
  unsure (118): n=A,T,C or G
  unsure (120): n=A,T,C or G
  unsure (128): n=A,T,C or G
  unsure (136): n=A,T,C or G
  unsure (138): n=A,T,C or G
  unsure (139): n=A,T,C or G
  unsure (146): n=A,T,C or G
  unsure (157): n=A,T,C or G
  unsure (163): n=A,T,C or G
  unsure (174): n=A,T,C or G
  unsure (189): n=A,T,C or G
  unsure (193): n=A,T,C or G
  unsure (197): n=A,T,C or G
  unsure (216): n=A,T,C or G
  unsure (217): n=A,T,C or G
  unsure (227): n=A,T,C or G
  unsure (245): n=A,T,C or G
tcctgtctnanggtgaggacctgaagggtgtgggtcccggggagggtgaggangccattgtanngagatttactgagatggtatcgggatgccccnancaccacgtnnggggattacntntgggtttntgggaacnannagctganttaggggaganaacccnaaagatctcantggggaaaggactangggngcanggtgtttcacagaaacaannaaggggcctngatttcacagaaatcatnaagagggctccttgtgggtaga

SEQ ID NO: 4533 - DNA, 79 bp, Homo sapiens
  unsure (11): n=A,T,C or G
  unsure (39): n=A,T,C or G
  unsure (41): n=A,T,C or G
  unsure (42): n=A,T,C or G
  unsure (61): n=A,T,C or G
  unsure (63): n=A,T,C or G
ctctgaatcanagagcagtgagacctaagggtccctgancnnagagggtccctcctgtctnanggtgaggacctgaagg

SEQ ID NO: 4534 - DNA, 397 bp, Homo sapiens
  unsure (254): n=A,T,C or G
  unsure (317): n=A,T,C or G
  unsure (333): n=A,T,C or G
  unsure (356): n=A,T,C or G
  unsure (366): n=A,T,C or G
  unsure (370): n=A,T,C or G
aaaaattttctttttttggcccatcggggcttcggatacctgcttttttttttttatttttccttgcccatcggggcctcggatacctgctttaatttttgtttttctggcccatcggggccgcggatacctgctttgatttttttttttcatcgcccatcggtgctttttatggatgaaaaaatgttggttttgtgggttgttgcactctctggaatatctacacttttttttgctgctgatcatttggtggngtgtgagtgtacctaccgctttggcagagaatgactctgcagttaagctaagggcgtgttcanattgtggaggaaaagnggccgccattttagacttgccgnataactcggnttanggctagtcgtttgtgctaagttaaact

SEQ ID NO: 4535 - DNA, 469 bp, Homo sapiens
  unsure (11): n=A,T,C or G
  unsure (12): n=A,T,C or G
  unsure (20): n=A,T,C or G
  unsure (21): n=A,T,C or G
  unsure (93): n=A,T,C or G
  unsure (143): n=A,T,C or G
  unsure (144): n=A,T,C or G
  unsure (169): n=A,T,C or G
  unsure (247): n=A,T,C or G
  unsure (322): n=A,T,C or G
  unsure (332): n=A,T,C or G
  unsure (364): n=A,T,C or G
  unsure (452): n=A,T,C or G
ccaacaagggnntctacggnnggtaaagataagagggtgagagagataaggctagattgtataaggcttgacagaccatagcaagataagcangaactgtgtccagttaaccatttatccctaacatctaacatagagttcanntagtaaaagccataaaccctttgantcttctggcaagataagtaattagcacagattattgtcactcactgcaactcagccttggagggagtacacaaatcanaaggaggtcaagtgtctgggaaattaaatgacagcacctggaagaacagatcattgttggggtaagaaatggaancccagtgtanaaaaggatagaatgccatggggttagaggtancagaggctgggacagaacttgtctgttctgccccctttcacccctcctgttctttgccttatgtccaacccatcacttgctggggtantcagcctagttgaacag

SEQ ID NO: 4536 - DNA, 372 bp, Homo sapiens
tggggtctgtgtatgctcacttccccatcaacgttgttatccaggagaatgggtctcttgttgaaatccgaaatttcttgggtgaaaaatatatccgcagggttcggatgagaccaggtgttgcttgttcagtatctcaagcccagaaagatgaattaatccttgaaggaaatgacattgagcttgtttcaaattcagcggctttgattcagcaagccacaacagttaaaaacaaggatatcaggaaatttttggatggtatctatgtctctgaaaaaggaactgttcagcaggctgatgaataagatctaagagttacctggctacagaaagaagatgccagatgacacttaagacctacttgtgatattt

SEQ ID NO: 4537 - DNA, 415 bp, Homo sapiens
ccagtaaaggttttgatgccttctctgtgccccccaagaaagagtgattgttcagagtgtgggaggttaccctgttctctgcacagtgttagcacaaaggcaggggtggagttttctggctctctgcccaccaaagtttcatctacaatggcagttgctgggggtggcggggcatattgcattcccatttgctggtggggcaagcaaagccaaacctgcctttgcagacatgtgccagcaaagaaatatcaggagttgccatggtgtcacgggaagctgcagtatggggaagaaatgtgggctggtgcagtcataggggctgccttgctggagctcttcatgagtcaggcatgtccctccagtgcagatgctctggtatgagcttccagggtacctgagactgccctgtaagcag

SEQ ID NO: 4538 - DNA, 133 bp, Homo sapiens
  unsure (119): n=A,T,C or G
ctggtgctgcggcgtgcatgtgcggcccgagagcgtggcttcgggtctaccagatgccttcaaggaaaaggccagaacctgcactgcacggcacagtcactgtgtgtggtgggacccantgtcggctgagagg

SEQ ID NO: 4539 - DNA, 576 bp, Homo sapiens
aaagaagaatcccagtttttacttttactggatggtgaaattggttgctcttgtattttatgaaaaaaaatgatttttttaaccttcatacatagaagcaaaaatactttaactgctgtaaaccttcaaaagttaatagaagtgagatcatactggtttgtttcttattttgattggagaaaaattaaattgctgcatttcgcagtgacccatttacatggcattctcagcttagactgcgtaagaagaaatatatgtggtgaaatgttggaaccatttctctcttggtctctgtttaatgttgaaagggtgagctaataggaggcactttcaacttcactccctcacgctaccccgtccccctccagactggcagtttcaaggatgcaaattgcattgcaaaatcaaactgactcatgaagcatttgggccagtgcactgtttacttccatctgtttgcagacacatttgtgcccggcgtttgggagccctttgtatcaatgttctgacaagggtccctataaccttaacctactcgaaaccggtttgggatggatatgatggggcttctgtgct

SEQ ID NO: 4540 - DNA, 337 bp, Homo sapiens
ctgcgttacccggaaccgccgggccgaacagcatgacgtccgctttggagaactacatcaaccgtatcctcaagctggccgccgcgggcttatcaggaactgttgccgttattacatcagatgggagaatgattgtgggaacactgaaaggttttgaccagaccattaatttgattttggatgaaagccatgaacgagtattcagctcttcacagggggtagaacaagtggtactaggattatacattgtaagaggtgacaacgttgcagtcattggagaaatcgatgaagaaacagattctgcgcttgatttggggaatattcgagcagaaccttt

SEQ ID NO: 4541 - DNA, 111 bp, Homo sapiens
tgctgctgccctccagccgtctgttgcttccctcccccgctcccatttttcagcttttcttgaaatctggcaagcgccagaaagggaaataacttccatccaccttaattt

SEQ ID NO: 4542 - DNA, 474 bp, Homo sapiens
  unsure (426): n=A,T,C or G
cctgagccggcggcagatggaggtgtgtgtgcgtcaccctgatgtggctgcctcagccatacagggcatccagatcgccatccacgaatgccaacaccaattcagggaccagcgctggaactgctcaagcctggagactcgcaacaagatcccctatgagagtcccatcttcagcagaggaaatatctgtacctgtcgcttgcctctacttaccctctgcttagtaaaccacatttaggatggggaacccatgaggaagaacccagaatcagcatgaggaggggttgaggactttgcctaatcgtgcagatggaggcagcctggacaggtaaaaagtctgcccttctgcagaagctcttcccggcgggggacaccaccagcctgtgtgtcatccctgctgcctctggaaaaccctctctgaatcanaggtgctgggtgtgtgtgtgcctgtgtgcagtggctcctgccagcagg

SEQ ID NO: 4543 - DNA, 251 bp, Homo sapiens
ccactcagcacatttcatggaggtcatgtcttttcactgatacttttttgatagtttttatataacaaaatccttattctatttataacttaagatgataaggcactataaattaatgacctaaaataatatatttgtctgttatcttttgctatttctacttcactttaatttttagctgtaaaattggtaaatggattcttacaactatctctttccatttcttactatttggttttcaaatttcattt

SEQ ID NO: 4544 - DNA, 602 bp, Homo sapiens
aaaattagggtggtggtgcacacctatggtcccagctacttgggtgtcttaggcgggagaatcacctgagcccaggagtttggggttgcaatgaactatgaccacaccactgcactccagcctaggcaacagagcaagaccctatctcttaaaatcagttcatgatggatattgtggcttcagatgtgaaagaaaagatacggggctaaaattctgtattttcagtgtattctggtaaccagctaatccaagcagtaatttttgaaatgtgaagtttagaatatattctaaataaaatacgtgcaacctccagtgggaacctcttattattggggaggtagtagaaaggcgctgggtgttctaaaataggctctcctggcccacggctgactgtcttccttgtgtctctgcagtggacgtgactctggacccagacacggcctaccccagcctgatcctctctgataatctgcggcaagtgcggtacagttacctccaacaggacctgcctgacaaccccgagaggttcaatctgtttccctgtgtcttgggctctccatgcttcatcgccgggagacattattgggaggtagaggtgggag

SEQ ID NO: 4545 - DNA, 399 bp, Homo sapiens
cctgaaaataggctattccatttggcaagtaagaggccattgctgatcttagagcaatttccacagaatgagaggcagaagcaagataatagtgactgagaaaaaaactattcagtactctcaggaagcttgctaaattgctaaaattttaatttgcacttattggataaaaatataattttcctaggcatctaaaaattatttttagtatttagtgcaggggaaagcatactgagaatactattttggacaaattttttgataagcactttgaccagttcatcaaaagccttaaaatattcatccgtggccgggcgcggtagctcacacctgtaatcccagcactttgggaggctgaggccgacggatcacaaggtcagaagttcgagaccagtctgg

SEQ ID NO: 4546 - DNA, 205 bp, Homo sapiens
  unsure (46): n=A,T,C or G
  unsure (47): n=A,T,C or G
  unsure (57): n=A,T,C or G
  unsure (67): n=A,T,C or G
  unsure (106): n=A,T,C or G
  unsure (109): n=A,T,C or G
aatattcccaaattgtgcttgctcatggcaaaatggatgcaaccanngttattccanaacatgcatntcaagcattcacctgttttcatgaatcctggatgctcancantgtttgaactatttaatagcttcacggcttttcgataattacctcttaagtactcaaaattgcttttaagaaagagagagggtgcggaatttccag

SEQ ID NO: 4547 - DNA, 295 bp, Homo sapiens; identical to SEQ ID NO: 342

SEQ ID NO: 4548 - DNA, 227 bp, Homo sapiens
attagatggagaggaggcagtttctaaatggcttgactttggtgaagtctcaactcaggaagctctgaaattaatccacccaacagagaacatcaccttccatgcagtctcttctgtggtgaacaactcgcgaaacaacactcctgagtgtctggctcctgtcgacttggtggtcaaaaaggagctcagggcaagtggcagtagccagaggatgttgcagtggttgg

SEQ ID NO: 4549 - DNA, 368 bp, Homo sapiens
ctgaatcatgaataacactatataatagagtataaggaacacaagcattagatgtgatccttgccccatacccttagattatgtcagactaaagctgacaattctgccaggctctgaacccctagtgcccccaacccaaatcttggaagcaaagaatatgccctgtcatacaactttgtacaagttgtagtaaaacaaagcttaagttttctcatctttctacagcaaatggtcagttatttaataaacactaaaatgctcctaagaatccattttgagtttgtttaccaaacacattgtgcaagaactgactacacaaaaagttcctttgaaatttggtccacaaattcacttaaggttggaaattt

SEQ ID NO: 4550 - DNA, 401 bp, Homo sapiens
aaactacagaacacccactggaactcatggagatgctggagactttgcaatgattgcatattttgtgttgaagccaagatgtttacagaaaggaagtttaaccatacagcaagtagacgaccttttagactcaattgccagcaataattctgctaaaagaaaagacctaataaaaaagagccttcttcaacttataactcagagttcagcacttgagcaaaagtggcttatacggatgatcataaaggatttaaatgttctttcacagaggactggagttaatattgacaggatgtttaacgtttttatcaatgtcttcataggacctgttcactgttcaaaaaatacacttaatggagatttggcatcagcaaccattcctgaagaaagcagacttatgg

SEQ ID NO: 4551 - DNA, 182 bp, Homo sapiens
ctggagatgttgggctgggaggccctgtggtcactcatactgcaggagagagaagaagggtacaggtgccagcttctccctgcccttaagcgaggtcagctccaccaggctcacgcactccaggacctcagcctgcaggcggcccagcagctcacaggcagcgttcatggttccaccagtgg

SEQ ID NO: 4552 - DNA, 606 bp, Homo sapiens
aaaaaccaaaagaaaattcagaacagttttgtaataggataaattaaaggtatgctaccacatataaaactttgctacagtcagttaagtattatacaacttttcaaactaaaggaaaacaaatcaaaatattaaaagaagatactgtctaatctaaaagtgtactggtttctacaagtgtcaaaaaaagatttgatgtagtgcaactgtctatacttgtggtgcctttgaaaaaagggtgggaaggaggggagagaagaaacttttcttgcttctggaagcaaaagacatattggaattagagaataaacagaccatgcagtgcgtcactccacgctgcagtcattggtgctcatctgccaaccaaacatttccttaagtctcactgtggcaatctccttaggattcaaacccagagttaaggctggtctgctaaaaacgggggcactattgtcattcaaccctttagatctctagatttcctaatgcccgaataaggccaaatacagaataattaattaagcatttctttttccaaaagcaaatcaagtcactctcctttcttgctaatttatactttttcttatggcaatgatttttttctag

SEQ ID NO: 4553 - DNA, 568 bp, Homo sapiens
cctggctaaaatctacccttgggccctgcactcctccccatggctatattgcaaatatcctatactttgcatgtgatcacacaaagagggtttctgttactggcacacaaaaagtttgcctgagatgattctcctccacttccatcagggtcttctggtcattgatttcaacttattctctcttaagaagcccattgagtccccataatctcttggtttctttcttttccaggaccaactgctcacagttcaaaccctcattttgcctctatttacttgtaccttgattggctgatgccctaacagacccaggttcttcagaaagccttcctagtccacctcagaccttggggatccccctttcccatgacccccgatggcacctgattacgtcactgggttccagttaccagaccacagccaaggtccaggatggctgcatcagagtcatccagagccggttaaaaatgacagcctcggctgggcacagtggctaatgcctgtaattccagtactttgggagggaaggtgggtggatcacgaggtcaagagatggaggccatcctgg

SEQ ID NO: 4554 - DNA, 517 bp, Homo sapiens
  unsure (489): n=A,T,C or G
ctgctacagaagctgatatattatggcgggccaaaagcagctttctaaagtgactcccaatgaagggagagtagattaagaggaaaataaccccagagggaagcaagcaagtttgacccccaaagcccccaaagttctaggagctccagactgtctctgttagatcccttctttcttaatcccagtcccccctccctcccagtcccgccagcccaagagggactgactgtagctgacaagcagggcaacagcagaatcagttcaaataagcaatcatgtacaaggcatcgacattcccacacccagcaatggcgcagatccaccccgaccccagcagttcgtaatcactgcctttaacttagcgcttaagtggcaggcactgggctaagcgctttacagacatcacagcttctgaaattcctcacaacaaccctatgaggtaggttctgatatttcagccccattttacagataagaagactgagttgntaacttttaactgagcagttaaaagaca

SEQ ID NO: 4555 - DNA, 399 bp, Homo sapiens
  unsure (26): n=A,T,C or G
  unsure (31): n=A,T,C or G
  unsure (56): n=A,T,C or G
  unsure (65): n=A,T,C or G
  unsure (68): n=A,T,C or G
  unsure (82): n=A,T,C or G
  unsure (83): n=A,T,C or G
  unsure (114): n=A,T,C or G
  unsure (121): n=A,T,C or G
  unsure (127): n=A,T,C or G
  unsure (157): n=A,T,C or G
  unsure (198): n=A,T,C or G
  unsure (208): n=A,T,C or G
  unsure (212): n=A,T,C or G
  unsure (215): n=A,T,C or G
  unsure (235): n=A,T,C or G
  unsure (272): n=A,T,C or G
  unsure (280): n=A,T,C or G
  unsure (302): n=A,T,C or G
  unsure (338): n=A,T,C or G
  unsure (378): n=A,T,C or G
  unsure (379): n=A,T,C or G
  unsure (380): n=A,T,C or G
ctgaaaataggctattccatttggcnagtangaggccattgctgatcttagagcantttccacanaangagaggcagaagcnngataatagtgactgagaaaaaaactattcantactctnaggaancttgctaaattgctaaaattttaatttgcncttattggataaaaatataattttcctaggcatctaaaaantatttttagnattnagngcaggggaaagcatactganaatactattttggacaaattttttgataagcactttnaccagttnatcaaaagccttaaaatattcntccgtggccgggcgcggtagctcacacctgtaatcncagcactttgggaggctgaggccgacggatcacaaggtcnnnaagttcgagaccagtctgg

SEQ ID NO: 4556 - DNA, 257 bp, Homo sapiens
ccaatagtactgcagtggtaaagataccaggcactcctggggcaggaggtcgtcttagccctgaaaacaatcaggtattgaccaagaagaaattacaggacttagtaagagaagtggatcctaatgagcagttggatgaagatgtggaggagatgctgctgcagattgctgatgattttatcgagagtgtggtgacagcagcctgtcagcttgcgcggcatcgcaagtctagcaccctggaggtgaaagatgtccag

SEQ ID NO: 4557 - DNA, 503 bp, Homo sapiens
ctgatgccccaggaggccggcctggcggaggagttcctgctcactgacaatagtgccatatggcaaacggtagaagaactggattacttagaagtggaggctgaggccaagatggagaacttgcgagctgcagtgccaggtcaacccctagctctgactgcccgtggtggccccaaggacacccagcccagctatcaccatggcaatggaccttacaacgacgtggacatccctggctgctggtttttcaagctgcctcacaaggatggtaatagctgtaatgtgggaagcccctttgccaaggacttcctgcccaagatggaggatggcaccctgcaggctggcccaggaagtgccagtgggccccgtgctctggaaatcaacaaaatgatttctttctggaggaacgcccataaacgtatcagctcccagatggtggtgtggctgcccaggtcagctctgccccgtgctgtgatcaggcaccccgactatgatgaggaagg

SEQ ID NO: 4558 - DNA, 347 bp, Homo sapiens
ccagtggaggggtgggggtatcgatcccgccgggggctggcttggttgctggtgccctgagcccttctctgcccgcctgggtgttgccttcactgatggaggtaggcgtccagccagatgtcaccagacttcttcagggacctgacgatgtccaccagcgcggtgaggaagggcttcacttcgtagctgaggccgtgcttggcacacagcgacttgaccagcggggccacccggctgtagttgtgtctcggcatcctggggaagaggtggtgctcgatctggaagttgaggtgcccgctgaaccagttggtgaaaagtgagggctccacgttgcaggtggctgccag

SEQ ID NO: 4559 - DNA, 392 bp, Homo sapiens
  unsure (72): n=A,T,C or G
  unsure (95): n=A,T,C or G
  unsure (142): n=A,T,C or G
  unsure (187): n=A,T,C or G
  unsure (217): n=A,T,C or G
  unsure (226): n=A,T,C or G
  unsure (248): n=A,T,C or G
  unsure (265): n=A,T,C or G
  unsure (278): n=A,T,C or G
  unsure (281): n=A,T,C or G
  unsure (286): n=A,T,C or G
  unsure (346): n=A,T,C or G
  unsure (372): n=A,T,C or G
cttttttttttttttttttttttttttagggaggaataagtttatttctcctccatccactcaaaatatatnttaacaccagtggcattatgganacagcatttggttagggagtgccaagcattctacagcatttgatggnggaaatagtcatgctttttatttctgctctctaggaatgtaaggngcacagcaggtcagggtactgctgtgtganacaaaaggnccaggtagaggcaattctccanatgcaggcagggcaggngctcactgggcanagngcttntcatacaccttcaggaactcgagcacgtcgtcgggggaccccaagatcaccggcgccctntggtgaatgtctgtgggaatgacgtntaacacggcctccttcccag

SEQ ID NO: 4560 - DNA, 455 bp, Homo sapiens; identical to SEQ ID NO: 4202

SEQ ID NO: 4561 - DNA, 344 bp, Homo sapiens
cctgggcaacatagcaagaccctcgtctctattaaaaatataaaaaatacaccagacgcggtggctcatgcctgtaatcccagcgctttggaaggctgaggcaggtggattgcttgagaccaggagtttgagaccagcctggtcaacacagagaaaccccatctatactaaaaatacaaaaatcagcctggtgcggtggcacacccattagtcctagctactcaagaggctgaagcataagaattgtgtgaacccaggaggcggagcttgcagtgagctgagattgtgccactgcactccagcctgggcaacagaccaagactctgtctcaaaaaaaaaaaaaa

SEQ ID NO: 4562 - DNA, 291 bp, Homo sapiens
ctggcgggggcgagcacctctgcctattcccgggtccccaagcccctcagccccatgcctgtctacacagcaggattgcttgagcattcaccggaagttatgggcctggggacccaggctgaaaccctgccctcctggtgcttccactctagacaagggggtcagtgacatggtgatgccagttggaggtgacctctgtcaggctgggagcagggcagacaggtgttggtgtaggtgggctccagggcaagaggcagcccccagtagagtgcacggggttttctagcccag

SEQ ID NO: 4563 - DNA, 518 bp, Homo sapiens
  unsure (395): n=A,T,C or G
  unsure (443): n=A,T,C or G
  unsure (461): n=A,T,C or G
  unsure (472): n=A,T,C or G
  unsure (504): n=A,T,C or G
  unsure (506): n=A,T,C or G
aaaagctcagagagtaagtgctggggaaagcagagctatcagaggaaatctctcatagaaacgaaaccaaaccaacagaaaatgaagaaggccacatctttaaggccacctctgcctctatcagatgagctgctggtctagatcaggggctggcaaacttttctgtaaaaggccagacagtaaaaatttccgattttgcaggccacatagtgtctgttgcaactattcaactctgccatagatcatgtgtaaaggaatgggtgtggctgttcaataaactatacagttgacccttgaacaatatgggtttgaactgcatggctgcacttatatatggatttttttcaaccatacaggttgaaaatacagtattggcagggggcgaaacctgcgtncatggagggctgatttatcacatacgtgggttctgtagggcccactgngggacttgagtatgcatngggtttttgtntactcaggcgttctggaactatcctccatgtntnccaaaggatggt

SEQ ID NO: 4564 - DNA, 289 bp, Homo sapiens
cctaaagggaactgtcttctgtcgagaagtaaaggaaacttcatgaaggatgtagaagcttagctgcctcagagaagagagaacctgaagatctgaggcaagctggacaggagaggtggatatttgttgatggaagaattcaagtttataatcaattcccacttagcacctactgtgtgctaggaacttgaatgtgtatgtttgacaagtcctgcttggcctgatgggtgggagaaggaacctgagcctggctgagatggctaggcggagggctttgaagtccaagcag

SEQ ID NO: 4565 - DNA, 572 bp, Homo sapiens
  unsure (48): n=A,T,C or G
  unsure (158): n=A,T,C or G
  unsure (231): n=A,T,C or G
  unsure (295): n=A,T,C or G
  unsure (314): n=A,T,C or G
  unsure (559): n=A,T,C or G
tttttttttttttttttttttttattgaacagttttattctgttttanaataaaaactttgctttaatattgtaaggggtactgcaggtatgccatgctgccagttattgctggggcacaaaacgccccagtcagtgattcggagggctgggaaaacncataaactcataatttcagagcaagtagaactagtatttacagttttctttcttgaaattggcccgggacatntccaacagtctacacatgtattgccatggtacttgctctgatgctctgaatgcctcggaactgngttcaatatcatgatttgngggtcctctaaaaggttttgttgttaacatgcaagcaaacagcactgaacaatattgtctaaactatggctgccaagtactggatcttcataatgaaaccaaattacaaaacactgccttgtagagctatacaaaagatataaaatgaaaataaaaaatgtcaaccagccttaaatattccaattctcctacagtgcagtttctatatctttatcactactgaatgttttaaggagaaagttaanaaaacaatcaaaa

SEQ ID NO: 4566 - DNA, 576 bp, Homo sapiens
aaatcaactaaagactcatgagatttatttggttacagtgaataacctggacaaaatgttgagaagagttgttaaaacaagtttacattaaatatactaacaattacgtttggttacatatttgtaagtgatggttatttagaaaaactgcatagaaatccaaaccttaaatattctgcaaatcaaatcattagcttttctcttctctaataaagtagggtgactagttcttggattaatctaactataacattaatgtagcacttgattatcttatggaataattctctatctcatctaagcctcacaacaaccttgtaaagtattatccccatatggaggaagaaacaggcttagaagtggaaaggtagattctctgcttgcacaaccgtattatgtggctaagctattgaacttgaacctagatttgggacttcatttcaaatatgaaattttttgattaaatctttttatcttgtatggaaaaaatatctcattagctgtcagatgttatttaccctgctaacttaaaaatatttcattaaaaaaattcagcttcatagcctttcagtttcc

SEQ ID NO: 4567 - DNA, 384 bp, Homo sapiens
ctgtctggtaaaccagtggcacttcactgccccagggtggctggctccctttctgaatttctgtctcaatgtgatataattgccaccattcaggatggctacccacatctggtatgaacaccatgacttctgtaagccaacggggcttcctcctcagaacagtgcccgtgcaatcttcctccctgtggccttgatcctgggaaaggagccccctcctccctcactcggaggagttcctgaggcagacgggccactggtgacgccaggtgtagcagtagaggaccttcgccgctgccgcaggaggaaatcgtgtgaagctccatccatggcgtagaatacattagccgaggctgggatagtcagctctcgctcccctggtagcag

SEQ ID NO: 4568 - DNA, 355 bp, Homo sapiens
aaactagtattaaaggtagtttaccaaagcattttttgttttcttaccttgaaaacacagaaccgttaattccttggtttaagcagttgctaagttttttaattttaggctcagaggcccataggaggttttaagatttatgtttagtccgataggtgaggtctttgatattttgaattttaactccttttatgatacatcacagtaacctcatttttgaagtctttctttgtactttaatgttctccctgttctaatagttgaagtatgagatgtaactattataaactgttgctgaaaacataaatgtctgtaacttacaaacatgataaataaattaaaaattccatccagg

SEQ ID NO: 4569 - DNA, 119 bp, Homo sapiens
ctgggagatatcgatgcggttgcacagcaggtccgagatgacgtcctgtgcgtgagccaccgcgccctcagggtctcggtcgatgagcaggcggcgcagtgaggcagtgaccaggttgg

SEQ ID NO: 4570 - DNA, 568 bp, Homo sapiens
cctagaagaggtcaaggttagaaaggttaagcatttgatcactacaggtacttgtagtacctagagaaggaacccatcctggggttggtggagttggtattgctactcgttttgatagttctcatttacagagaaagaaaaataagccaaagccagaaagcaatccaagccttacagttgtccaatacctcagggccagttggctagaattttcttttccctcagcccataatcacttagagttagccatacaacaaacagcctgacaatctgaccagcatttccattgatataaaatgtaagcattccttcattctgtagttaggaactccaacttcagccttatctccaacataatttcccaatttaacctatgtactgatatggacatttctttgtgaatatgccagattcaagaatgtatttttctaaggtcaatagagatacgacattttaagtcaggaaaaatcacctataaattagtaggaataactgtagaagcatcacaaaagataccccatgaatagatggcatggtgtgcatgctgacagccacggggtcatactct

SEQ ID NO: 4571 - DNA, 332 bp, Homo sapiens; identical to SEQ ID NO: 4096

SEQ ID NO: 4572 - DNA, 351 bp, Homo sapiens
aaattaataacttgaaattacccctgccccccaccccattacatctttttataaacagcaaacattttgctattttatacataggctagcaggcttgtttcaatatgaaagtgctaattcatttacagatttttataatcagttatgtagtgctacaataaatgtccaataatctacataggaacaatgatgaaaatgatgaagactgaataaggctatcagatgaccttatcttatttacatataaagaatagatacccaatggtgaggaagaaacagaaattggacaaatactcataggtgtaaaaattacatctacctttgagttttatactgtaaatgagacatttt

SEQ ID NO: 4573 - DNA, 511 bp, Homo sapiens
  unsure (71): n=A,T,C or G
  unsure (112): n=A,T,C or G
  unsure (119): n=A,T,C or G
  unsure (124): n=A,T,C or G
  unsure (139): n=A,T,C or G
  unsure (144): n=A,T,C or G
  unsure (196): n=A,T,C or G
  unsure (234): n=A,T,C or G
  unsure (244): n=A,T,C or G
  unsure (254): n=A,T,C or G
  unsure (260): n=A,T,C or G
  unsure (307): n=A,T,C or G
  unsure (322): n=A,T,C or G
  unsure (349): n=A,T,C or G
  unsure (379): n=A,T,C or G
  unsure (381): n=A,T,C or G
  unsure (387): n=A,T,C or G
  unsure (392): n=A,T,C or G
  unsure (404): n=A,T,C or G
  unsure (405): n=A,T,C or G
  unsure (437): n=A,T,C or G
  unsure (498): n=A,T,C or G
  unsure (499): n=A,T,C or G
cctgagtggcctgtttgccacccagaatggggatgttggttgctatggaaacatggatgagtttacccaanaggaactccgggctctggatagtgagggcagggccctcctnacacagnataanatccggtaatagctnatatntccctgctactgagcactgctggtgctactctttgagtgtgaagattctaangcttgccatgtaaacatacatgcaccgtggagaagttnccaaatttgnctttcctggnttagtnctggctgggctactcagtgtgtgaccctggcaaatttttcccccctntgaagcttgagtttncatctctacaatgtggggctggcctantgatccagctcttattaccatagacatctnanaagcancttantgctgaactcanngccccaggttgctgtctttctgggtgttctgngtgaatagcagcaccattacctggtggtaatccttagatatccctctccctgccttatcannagtcagtcccca

SEQ ID NO: 4574 - DNA, 530 bp, Homo sapiens
  unsure (326): n=A,T,C or G
aaattagaggttaataatgttgttttcttctctctcttttttttttttttttttttgagacagagtctagctttgtaccaggctgcagtgcagtagtgccatctcagctcactgcaacctctgcctcccgggttcaagcgattgtcctgcctcagcctcccgagtagctgggattacagccacatgccaccacacccagctaatgtttgtatttttagtagatacggggtttcatcatgttgcccaggatggtcttaatttcctgacctcgtgatccgcccatctcggcctcccaaaatgctgggattacaggcatgagccaccanaaccggacatgctttccttaaaagctaaatattttaggcttgtgtgccattaggctctgttacaactacttaattctgcttttgtaattctatagcacccattgataatacataaacaaatgagcatgaatgtgtctcagtaaaaatttgttcacataaacaggcagtccacccatgaagctatagcttgctgaccccttgttt

SEQ ID NO: 4575 - DNA, 607 bp, Homo sapiens
aaagttatgtttgagaaccctgacttccaagtagatgaagagagtgaagaatttaggcttctgaatccacttgtttcaaaaattagtgaaaaaaggaagaagaaactaagactcttagagcaacaagaacttcgtgaaaaagaagaggaggaagagccggaaggaaaaccaagtgatgcagaaagttcggagagttcagatgatgaaaaagcctgggttgaagaggtcaggaagcaacgcagactcctccagcaggaggaaaaagtgaagcggcaggaacgactcaaggaggaccagcagacagtcctaaagccccagttttatgagatcaaagcaggagaagaatttagaagcttcaaagattctgccacaaagcagaaactgatgaacaaaacccttgaagatcgtttgaaaattgaagcaaaaaatgggacattgagtgtatccgacaccaccgttggcagcaaacaattgacattcacgttaaagaggtctgaacagcagaagaagcaataggaggctgagaaactgcatcgacaagaaaggaaaagactccgtcgttcggccggacacctgaagtcaagacacaaaagaggacggtcgtttc

SEQ ID NO: 4576 - DNA, 234 bp, Homo sapiens
attttttaaaaagattattcaactaccaatcagtaatgtttttaaacagtacatttgctttgaacttggaaaatgtgttcagaaagaaaaatggaattgaatttcatttatacactaattccttggattttgcacagttacctaacggttttagtctggagttaaattcagatgcatggaatcctgaaggaaaatggtagctttttaatctttttgtgtgtgtgtgagtctttt

SEQ ID NO: 4577 - DNA, 582 bp, Homo sapiens; identical to SEQ ID NO: 643
  unsure (540): n=A,T,C or G

SEQ ID NO: 4578 - DNA, 291 bp, Homo sapiens
ccaatggtggcagagtctacatagaactatgcttcgtggtgttctggggaaaacctttcgacttgttggctatactattcaatatggctgtatagctcattgtgcttttgaatacgttggtggtgttgtcatggtgccaatgggtcatgtttggttagaaggtgacaatctacagaattctacagattccaggtgctatggacctattccatatggactaataagaggacgaatcttctttaagatttggcctctgagtgattttggatttttacgtgccagccctaatgg

SEQ ID NO: 4579 - DNA, 202 bp, Homo sapiens
aaacctcagcttaactgcagaattctaagccttctttttgatcaaactgagatctatggcaacccttctgctacccgggacttggaaggatagtgaatataaattaggctctggacccccaaggctggtgatgctactgtaacctctacagctctggattcaacctgagggcctgggatatgtgactttacataaaaatgat

SEQ ID NO: 4580 - DNA, 507 bp, Homo sapiens
  unsure (326): n=A,T,C or G
  unsure (376): n=A,T,C or G
  unsure (410): n=A,T,C or G
  unsure (447): n=A,T,C or G
  unsure (456): n=A,T,C or G
  unsure (460): n=A,T,C or G
  unsure (479): n=A,T,C or G
tgcgcctgtagttccagctattcaggaggctgaggcaggaggatctttgagcctaggatgctaaggttgcagtgagccaagatggcaccattgcactctagcctgggcagcagagcgagaccctgtctcaaaaaatacatttatttttttcattttcagttaacagtgtactcttatgacaccgttattagctggtactttggtgatttctattactagtttttctaagctatttacagagtgtttgtagctttcatttgcagcattatgttcccacaaattctgtactcagtatatacagtatagtttatctgctctatttctgncttatagaaatcatgaatgtggtctgcagacattgatgaagaaaatctgntggtaattgatacatgggctaaagcatcagaggnttaatttgaagtttatgttcacacactgaaaacttantttttttgntggnagatccatgtgcatgctanaatttgggacaggcactatttgcataaa

SEQ ID NO: 4581 - DNA, 511 bp, Homo sapiens
cctcttgattcctaggagtcaataagaaggctttggagtccaggcaggaagtcagggacttgaattcctccacacacttttcgggaggatgtggtgagcgattgtagaggagaaagcgctggtaaccctggcctgtctcattcagcatgattccacctgggcatgagctggaaaagagctcagtcttcatgtcagggcggccttcagttctgagatctgtgctcccttcagtcaggtggtagatccatttccggggcacacagagcccatctttcatgcggatggtagcacgaaggtggagctgcatcggggcagagccagcagccatattgaagacaatgttgtccacagggtcaaaagttgccaactcctccttggtgggagctgcccctgcgataaagtaccactggcccaagtggacctctgggaatgtttggggctgcggactttctcgtcgtgccccacaaaagtaaagcttggggacctggggggagccggaagtatcgcttcg

SEQ ID NO: 4582 - DNA, 131 bp, Homo sapiens
aaaaaccattttcctatgttaggagtgcaagaatagccagcatttccgattttgacatatgttcattttatgcatatttaagaaattatagctgcatatcccttctttcaaaaaatgttgctttttttttt

SEQ ID NO: 4583 - DNA, 365 bp, Homo sapiens
cctatttaagggttcccagcagaatgggccattgtccgcctctccagttgcatgactggagtttgatggccttttgttctttctgagctgtagctggagcttgcttgttggttcacaggaacaagcaaggttcatctaaactgtaggcaaaaacttaaaaacaactagtgagtttagaatttaatggcaaatgtatgataagttttgaaacacaatttctttctctctagtccccatttttggaaaaaacaaacaaaaaaacataaatcatgataggactgagttgtttgcaaaatagattgtagtcttacacttggtctgattatttgcataaagtgcaagaggaataattatttctacatagg

SEQ ID NO: 4584 - DNA, 595 bp, Homo sapiens
aaatttggtgatattattatattttatctgaatgaacagaatttgctgatttgacactgtgtttgagtgtgcattttttgttgaaaaatgacaattctggaatgccgtctccctttccagattattcagagctgggagagcttcccccacgatctcctttagaaccagtttgtgaagatgggccctttggccccccaccagaggaaaagaaaaggacatctcgtgagctccgagagctgtggcaaaaggctattcttcaacagatactgctgcttagaatggagaaggaaaatcagaagctccaagcctctgaaaatgatttgctgaacaagcgcctgaagctcgattatgaagaaattactccctgtcttaaagaagtaactacagtgtgggaaaagatgcttagcactccaggaagatcaaaaattaagtttgacatggaaaaaatgcactcggctgttgggcaaggtgtgccacgtcatcaccgaggtgaaatctggaaatttctagctgagcaattccaccttaaacaccagtttcccagcaaacagcagccaaaggatgtgccatacaaagaactcttaaagcagacctc

SEQ ID NO: 4585 - DNA, 342 bp, Homo sapiens
ggcacgatatcggctaactgcaacctctgcctcccgggttcaagtgattctcctgcctcagcctcccgagtagctggggttacagacaccacgcccaactagtttttgtatttttaggagaaacggggtttcaccatgttggctaggctggtcccgaactcctgacctcaggtgatccacccacctcagcctcccaagttgttgggattacaggcatgagccactgcgccctgcctatgatgacctttatattttcatatggattaaagataccgtccagagtgctttcatttcatcttgaatgctcgttttagcatttcttcttggacaggtctagaatac

SEQ ID NO: 4586 - DNA, 461 bp, Homo sapiens
  unsure (9): n=A,T,C or G
  unsure (21): n=A,T,C or G
  unsure (33): n=A,T,C or G
  unsure (50): n=A,T,C or G
  unsure (51): n=A,T,C or G
  unsure (110): n=A,T,C or G
  unsure (119): n=A,T,C or G
  unsure (134): n=A,T,C or G
  unsure (188): n=A,T,C or G
  unsure (209): n=A,T,C or G
  unsure (262): n=A,T,C or G
  unsure (265): n=A,T,C or G
  unsure (273): n=A,T,C or G
  unsure (434): n=A,T,C or G
  unsure (445): n=A,T,C or G
ctggagccntctgctcaccanaactcctacttnccggtggcaggagagcnngagagggacagacagatggcagggcatgtccaaaagaagagcatcagcacaaatgaatnctccccttncccacctccaggggngggggcctttggcacctcaatccccgataccctactccttcccacccacatctncttgcacccatctggaacctnggttgatgtgagccggcaacagagaagcaccgtggcgcggcgagggaatgcanacngcacccancggtggatggcggcagcggaggccgcggggaaacctgaccaggaagctgaggaccaaaccagcctctttttccgttcccggtttttttcctgaacccaacgcgtgccgtgccccgtttcccccaatatgtgttggggaggggtgtcctgaatggggtggtngattttttttnttaaaaaaattttttt

SEQ ID NO: 4587 - DNA, 498 bp, Homo sapiens
ggagcagcagatagaagggacagggttgcacttataacaccactatcctcccagccctggttttatcatcatcatcgagaaaaatacaattaatcagcagtgatcaaaggtaagtctaaacattccatttaactaacttaaatgtgacctggtgtgccgtgtcattctataaatgacataacagaataagactcactttctaattcacagcctctggttcaatttcaagtaagcaaatacattttgctttggttttgcttacaatattctgggaaatgcaggctataaataatcactcaactgttttgtgggtcaacagaatcactactactttcagtttcgttgatgccatttatatcatgagctcaagcacacgggcgcttcagaaggcactataaagtttagttttgatgtggtgtgatgttctgatctatcttgaaaggtaaagaaacccacaggattcagcgtcaagccaatccatgcccaggcacatcgcag

SEQ ID NO: 4588 - DNA, 456 bp, Homo sapiens
cctaaaaaagcggcctcggtgggaatgcatttctcttgctccacgtctattttagttgcatatctgtagtgatgacaaatgcctccagccttgtcctctgcaaggctgcactgggctgcatacaggctcctgtctcaggtgtctggtttcctccttgaaaggttggggcagcagagtcagccctgtctatctgggcaaggccctgacacttggaagcatgaaaagccatggttcaggtggagtgagcttccaatgcccttggaaggattttatttcagggccgtggggcttaaaagtcatcactgtacaatccactgggagcaaagatcaagataagatgtgatggatatcataaaagcggaacagaacatcccattgctcagagatgggagaacaactctgaatggagagggctcaggttatatacattcacccttttcatgggaaagtgtgagg

SEQ ID NO: 4589 - DNA, 534 bp, Homo sapiens; identical to SEQ ID NO: 343

SEQ ID NO: 4590 - DNA, 290 bp, Homo sapiens
  unsure (75): n=A,T,C or G
ctgcctgcctgggaggaggggctggcctggatctgtgacagccacccagcagcactgcagggccatggggctcanaaaatgcagaggcatcccccgccctgcccaggcataggattggctgaggcatcctgccttcagccgggtccacacgtgacacgtccacacgtgacaggcccacagacgacaggaccacacaacaggttcacacgtgacaggtccacacgtgactggtgcatgcatgacaggtccacacgtgacagtccacacgtgacaggtccacatgtgacagg

SEQ ID NO: 4591 - DNA, 243 bp, Homo sapiens
ccttcacttggttcatgtaggaacaccaagtccctttcaaagcaccacatcttcctctaatcaatatttcttggagtccctagggaatgtcttacatgcattcaaacaatcaccatttctggagatacactacagggtcaccataaactctgctacccttaggttccatcactatggaagctgagtttcaccagaaggcacttttgtcctccattacgaccagcaaagccagctaagccacag

SEQ ID NO: 4592 - DNA, 413 bp, Homo sapiens
ccacacggtactgctctcggcggactgaagcatttgtcctgcaacctgctgcttcagatggctcttagctacaataagaaatcctaagtccaaaggccaactttctcatacaactggtgcccttgcaggaagcagtgggaggtggggagggatgaggaccactgttgagtaaggacagcagaggtcccttgccatgcctcccttctgcccttgtccgggaacaacatggggagaagccagggatctcatgacatcctttagtctcaaactcgatcccaaggttgccacgacagccttgtccccaccatgcaagtcacctccccaacaagacacataaaaagccacgtctgctctccactaggctcccacaagaaaaacagaccaagatcccccatggggcgtgagtactgcag

SEQ ID NO: 4593 - DNA, 315 bp, Homo sapiens
ctggattagataggagggtctctttcagcttgcacctctgggaagccaacactgacgcccactgggagaggctgaacttggtccaggctaccacttcagcatcagcccatggtggaagcagacttccccaagcccaaagttcagccccctgccccacacccctctgcacacctgccacaatgacggaggtaaaaccaaagaacatccccagcgccatcttctgcagagcagagggaagcagcttgcaccgcagcagtaaagggtcgatcaagcggtccttcagagggaccagaatcagcaccaccacaacattgg

SEQ ID NO: 4594 - DNA, 466 bp, Homo sapiens
ccagtacagttcttcctggatggccgacacagatcctggggaaaggcaatcccggcactgctctgaaaccagagctcctcctccctccccgggcagggtggagctgagaagggctgctctagcgttgggactccacctccatacacctgatattttgatagggcaggtccctgctatgggccactgttctgggcagtatagtatgcttgacagcatccttggcatctatccaccagatcccagagcacccgctactagctgtgacaacatcctccaaacattgcaaaatttcccctgggaggcaagattgcctcagatgggagaatcacgctctagggaaatctgctggtatgagaaccccaactccccactccactgagcctccagatggcgagcaggctgcagctccagcacagacacgaagctccctccagccactgacggtccatggctggggttacccagg

SEQ ID NO: 4595 - DNA, 405 bp, Homo sapiens
aaagagacagacaatgacgcattttaatctacctttgtcttaatttacagcaggttttgtatgaatttttaaccttttaacaaactcccaaatctggttgatgcctttgacagtgatgaaaacgatttcaccacatctgaatccagagaaaccggcttttttttcttattgcgagcatgttaaaacgttgggaacatgtggggaattgtatattgcgctgaattaacttctcccgcctcttgtaatgctctggtgggttcttgtttgggaatgcgatattttgtggctggtttagctagagagtgaactctcaaaggtatcaaaactgtgcttccattattagtgcaagaaacagacaggctttaaggggtagatgacgtgaaattttgcaagtcttaattacag

SEQ ID NO: 4596 - DNA, 388 bp, Homo sapiens
ccaactccagctctatctggtcaatggtctcctgatactccttctcccgggttttgaacaggggctccgtatctttaatcactttctccaggctatcttcctgctgctggagtagaaagggaagcgggggaggccagccaaggagggatgggatgggacgcattccaaagggccaagtcagggagagagagagaggaagtctggttaaagaaactggagaaagaaaagcaaaaggataaaggaagaggggaggcgcaggtagaggatgacagccacatggggggacagagcaaggagaggagcgggggagtgggcgtcaggctggagaggcagagccagagggccctgaggccgggagcagaggttacctctccctgggcctctgcag

SEQ ID NO: 4597 - DNA, 106 bp, Homo sapiens
ccagagtcctgtccaaggcaatggcgtaggctgcgcctcagttcatccgagtccctccccagctcactggtccaggccaagggatgggagaggctttgagtctaga

SEQ ID NO: 4598 - DNA, 337 bp, Homo sapiens
ccaaaatattggaacacacagaaccaaaccaggtgtgttctacacctgcatgagtgaaggatttccacgtagacacctaggaagagcccgcatgccctagactcactccagaggaaggattgatttgcaaccagaaagggagctgaaaaccacggagctccatggctcttcattcaaaagggaaaataatgattccacgttgctttttagagttcaaatcaacatctttctggataaatctattttttaacaatctttttattatttgtaaaagatataaaaacaactcccatcagtagcaatacaaggttatacattttaaccagattttctcagg

SEQ ID NO: 4599 - DNA, 431 bp, Homo sapiens
aaaaagtgggataagaacacaaagaggttatatataagaatgtatttcgtagagttgtatgtgaaggcaaaaaaacccaaaaaacctgaaagtttcttcaatggaaaactggttaattacatctatttgggccttaaaatgatgtgctagatctgtatgtcagggaaagacattcatggtgtactattaaagttaaaaaaataggttataaagtagtatagagtgatctaagtctctctctctctctgcccccccccacacatatgtgcgtgcaaatgcgtagatgtctaaaaggtatgtgtgtgagtatgtctaacacatatatgtgagaagatatttgcaaggctgtacgctaaaattttaagcaagaatgatctttaggaggctgaatttcttgggattttatgcttctatttttggtttatattttt

SEQ ID NO: 4600 - DNA, 364 bp, Homo sapiens
ccagttggcagaggttcattcagtaagtcccgagcagggtgcgaaggacagtcatccttctgaagagcccgttaagtcattttccaaaacacagcgctgggcagaaccaggggaacccatctgtgttgtctgtggtcgttatggagagtatatctgtgataagacagatgaagatgtgtgtagtttggagtgtaaagcgaaacatcttctacaagttaaggaaaaggaagagaaatcaaaactcagcaatccacagaaggctgattctgagccagagtctccactgaatgcttcctatgtctacaaagagcacccctttattttgaaccttcaggaagaccagattgaaaatcttaaacagcag

SEQ ID NO: 4601 - DNA, 390 bp, Homo sapiens
  unsure (227): n=A,T,C or G
  unsure (272): n=A,T,C or G
  unsure (318): n=A,T,C or G
  unsure (336): n=A,T,C or G
  unsure (347): n=A,T,C or G
ccagaatataccagaatcatcttgcttcaggcatgtgcttcttgggtttctccgtgtgtcgctgtaccttgtaggtctctgcatgcatccactcagcttgtcctctgaccatacatttgaatcgcaccacacatcagagcatgctgaatcagtgcgtgttttgaatcatcactgcgagcacttgtgttcgagtcaacaggcaccacaatgtatgtgcaattctctanctctgggtgattgggggctactataggtatgtccctaaatgttgngtgtctacacgtattgggtttcgttccaagggtgtgtagtgtttangaaactgggactgcgcantgtttgtgtcngtgtgtggtgtgtggcatcagggcgtcactactttaatatata

SEQ ID NO: 4602 - DNA, 557 bp, Homo sapiens
ctggcagctcacattttacattagagagtggggtccccacattttacattacagagcggggtccctgagctgcaggaggagagcctgcagggctcttgggtagaattgcacttttgcaataagggaaacgggagcaatgtttcagcctcagtttctatttataatactgacacaaaaagaatattgctggatacatagcatggatctagatagagcaactccaggagttctcacggtgacagcccccctcactcacagacaccatgtgatactaatagggcttagacacaaagcactgaattcccaaagcattgaagagaaagacagctctcagtctgagtaaaaccgtattgagagaagaaaagaggttgaaagaatcttaaagacaaattcagattacatgtaacattggtcaaattgaccagaaaatattcttccaaagaagttcttctctaaacaccaaaagtgcacagctactctcagcatgagaaatacaagtattatgagaaagagggcttattctgagcagaatttccatctctgctgctctcccatct

SEQ ID NO: 4603 - DNA, 464 bp, Homo sapiens; identical to SEQ ID NO: 200
  unsure (261): n=A,T,C or G
  unsure (444): n=A,T,C or G
  unsure (455): n=A,T,C or G

SEQ ID NO: 4604 - DNA, 304 bp, Homo sapiens
ccaagtaagctgtgggcaggcaagcccttcggtcacctgttggctacacagacccctcccctcgtgtcagctcaggcagctcgaggcccccgaccaacacttgcaggggtccctgctagttagcgccccaccgccgtggagttcgtaccgcttccttagaacttctacagaagccaagctccctggagccctgttggcagctctagctttgcagtcgtgtaattggcccaagtcattgtttttctcgcctcactttccaccaagtgtctagagtcatgtgagcctcgtgtcatctccggggtgg

SEQ ID NO: 4605 - DNA, 525 bp, Homo sapiens
  unsure (471): n=A,T,C or G
ctgagttatgaagctggaattggttctagacgctgggtagatgcaaagcagcctaactcttcaagtaccgacatttctcacctctgattccggctctcctttgagaaggagaccttagcttccccgacttcaagtagaacagaagcccgtttccttccctcatcagtgaaaaaatctaatgtttcaaatgtaaattgttcatagaaaaggaacatagaatctgttttacagaagtaaatcgaccgtcaagagaagacttggcctctaatttatattgctttgcactttggtttgatattaagaaacagcattcttcttcagtgaaattttgggtgccaaacacctacccagaatgtccagggctttcattttcaaaagttagcattctccttttgaccgtccaagtcattatgaattctgacttgttgtattaggaacatgttggacagtggaaaattttctctggattgntttagtaatatttttgggattatacttcctttctgtaccaatttcttttaattt

SEQ ID NO: 4606 - DNA, 555 bp, Homo sapiens; identical to SEQ ID NO: 641

SEQ ID NO: 4607 - DNA, 350 bp, Homo sapiens
ctgcacagggaaggaagggaagacgggaagaggttagataggaaatacaagagtcaggagactggaagatgttgtgaaatttaagaacacatagagttggagtaaaagtgtaagaaaactagaagggtaagagaccggtcagaaagtaggctatttgaagttaacacttcagaggcagagtagttctgaatggtaacaagaaattgagtgtgcctttgagagtaggttaaaaaacaataggcaactttattgtagctacttctggaacagaagattgtcattaatagttttagaaaactaaaatatatagcatacttatttgtcaattaacaaagaaactatgtattttt

SEQ ID NO: 4608 - DNA, 505 bp, Homo sapiens
aaaacatgcaaatatagtaaccttacatgacattgttcacacagataaatccttgactttggtgtttgagtatctggataaagacctgaaacagtacatggatgactgtggaaacatcatgagtatgcacaacgtaaagctgtttctgtaccaaattctacgtggtttggcatattgccatagaagaaaggtattgcatcgagacttgaaaccacagaacctcctcattaatgagaaaggagaattaaagctagcagattttggactagcccgagccaagtcagttcccacaaagacctactcaaatgaagttgtcacactatggtaccggccacctgatgtgcttcttggttcctcggagtactcaacacagattgacatgtggggtgttggttgcattttctttgaaatggcttctggaagacctttatttccaggatcaaccgtggaagatgaactgcacttaattttccgactgctaggaactccatctcaggaaacttgg

SEQ ID NO: 4609 - DNA, 319 bp, Homo sapiens
aaaaaagcctctgggaattaggaactagaatgaaaatccaactttccagatcagcttcttaaatatcttgtatttcaataaacatacacttcatacacacagatagatttgatatacaagtacaaaaacctgacatgcacattgaagagaatttatcattcatgatgttaatatatacagaaattctaaggaaaattgcaatgttttaatataaactttctttttaatttcagagttgataattcaacactttcagccaaaatttggccaaagggggttaaaacctgatcttatgtctggaatcccaatgtgatcctcc

SEQ ID NO: 4610 - DNA, 373 bp, Homo sapiens; identical to SEQ ID NO: 202
  unsure (109): n=A,T,C or G
  unsure (113): n=A,T,C or G
  unsure (120): n=A,T,C or G
  unsure (123): n=A,T,C or G

SEQ ID NO: 4611 - DNA, 551 bp, Homo sapiens
  unsure (548): n=A,T,C or G
cctgctcctactatgtccttttccttctctcatatatttcagtcgtctggagttctcagaataaggaatccattatcaatgacctatcccatgaacattttttttgagaacctgtgtaagactatatagacatgaatatttgatgacctgacacctcaccgttcaaacctagatttgggttgtataaatatcaactcaaggctgtaagagcctcccatggtctaatgtttcaagagtaaagaagaatagacaaacacccatgttggaatcatctgttgcagaaaagaacacaaagatagttttattaatttagaacaaattttgagaactttacatagacagaaatcttctacctcctttttttctaattttggggaatgtcttccactagtggtcgctaaaaatgtagaaatatcatagggagtgcaaattacattgtctctttacctgccacaatctggcagcactcatcatgtagcaaatgcccaaataatagactacagattatagtgacttcaccctaggttaacattatttctaggtaaggnact

SEQ ID NO: 4612 - DNA, 430 bp, Homo sapiens
ccaccataaagttgttcagatgtctgtctccaatcccgaggatccagtggctgatgcatatcagagcgtgagagctggcgaagtgggagcggagcgccaggaaagcctcagggcttgtactcatcctcacgaaggcccgctttaagagatcagcaggcactttactttctcgttttctaaaagacgtgactgtttcagtacgattagcgcccttatacattagcatgtaagctccaacatcatgttttcctgacatttttgtcagccaatctttatattcacacggcggtgccctgggatcactcaggtaagccgccttctcctcttgggacatggtgttcaaaagaaggtccttcaaggtaacagtattttcaagccactcaattaatcctaacctggaggtcatgggcacaacgctataggtcctcag

SEQ ID NO: 4613 - DNA, 528 bp, Homo sapiens
aaaagatcagtacaagagctatattttttcctaagaaaaaatttcaacaggaatggggagtagccccgttttggggctgatctgtccagaatttggagtgaggaacaaatccattctcatctactttccacattttccctcttgtttgaggtcctgttccaaccttcatttctgaaactgttctagagcactttgtctttctcatagttcataacttaccccttcagtctagaattagaattacattatctgttttactactttactagactgtaagctcctagaagataaggactagggagttcatctctgtattccaccagaaggtacagtgactcataactagagtctttagatgaaacttactgagttgaataacttaatatatttctgttttcattcccaagggaggccatgtctggagatagaccttgaatttaataaattttaggcactataccatttcagtggagaaaattgttgggaaatttggggggatggatatataagggggagggaagtcactgg

SEQ ID NO: 4614 - DNA, 432 bp, Homo sapiens
aaaaaatataaacattttctttccattaggaagaaataactttagcctaacacatgaaacataaaagctacctaaatttcctataaatcacctagtgaatagctgtaatctacataataaaaagtaaaaaaaaaacttctcatgaactatgtattagaaatgggaaaacaacgtaggagcaggggtttttaggcactttcagtattctcaggtgttcttcgttctggcccttccagggtaattaggaaggcagaacaagacagatgagctcctgcctgctctgagacaagaagggtggggtctcattagctttgcaacaggaaacatcctgttttatggtagtggggtcaggaatgtaggaactggtatccattctgccaattccaccacccattcagtttgcttatccctacagaacagtgactgaggttc

SEQ ID NO: 4615 - DNA, 381 bp, Homo sapiens
ccaagcctcatcaataactgtatccaaaaggagacgctgcttggggtgtacccagagaaaacaccaagctttcctggcttcccggccctccctctccccattagtctttggggtgcatacataagtgttgtgtgaagtctcttggggtttagaagatcttgcactcattgatggagaagagcctccttctgtttcgtctcctggcctggttgacggcagttcggacggcgcactcaaacacctgctgtactccccgattgctaagggctgagcactccaggtagcccttggctctgacatcctgggccagtttcttcccttccatggcattgacgcaggaggccctgtggggccccatctcccgctggtcagtctgggtgg

SEQ ID NO: 4616 - DNA, 379 bp, Homo sapiens
ctggctgggccacccaacccgagggagggggcagtgttcttcccagtcgcagtctccagtgatgagcatcccctgttggggccttcggtggctctcctcagcggctaatgcagttctggacatccacaaagcctaggcgttgcctgcgtttccgctgctccgtcatctgctccttgagctcgttgagctgggcagtgaggtgggacaccagcttcatggtggagttgagcttgtcctggagaatccgaatctcattctgctccccctcgccctcattgctgacaagggacatggcccgcatccgggggaaccagtccaggttcttgttctgaaaaacatcaccagtgggttaagcaggcgtgggcccggcctagaaagg

SEQ ID NO: 4617 - DNA, 373 bp, Homo sapiens; identical to SEQ ID NO: 6

SEQ ID NO: 4618 - DNA, 405 bp, Homo sapiens
ggaagatggcggtggctggggcggtgtccggggagccgctggtgcactggtgcacccagcagttgcggaagactttcggcctggatgtcagcgaggagatcattcagtacgttttgtcaattgagagtgctgaagagatacgagaatatgttactgatctcctccagggaaatgaaggcaaaaaaggtcaattcatagaagaacttataaccaaatggcaaaagaatgatcaggagttgatttcggatcctttgcagcagtgcttcaaaaaagatgaaattttagatgggcagaaatcaggcgaccatctaaagcggggtaggaagaaagggagaaacagacaggaagttcctgcatttactgaacctggcacgactgcagaggttaaaacaccttttgatttgg

SEQ ID NO: 4619 - DNA, 373 bp, Homo sapiens; identical to SEQ ID NO: 6

SEQ ID NO: 4620 - DNA, 408 bp, Homo sapiens
aaattaaaattgtagaaatatctgagtagattggagagaggaaattaattatatagactgtagactattagttgacattgtattaggtaccacacatgacttctcttagtaattcaataatcttttgatggaagagttacagacctcattttatagatgaggaaataggcttagaatcaagtgacttgcccaagaatatacagaaagcaaataatgggacctgataattgaaaccttaatgtgcgtatactttaagagtttgtatattatactttttcacacactgtgatgagctttttctgttattttgaaataaaggtaacagtatatttactttttccctctttctaccctatagacccaagtcttggattgaggaacaggcaatgggatcattcctcagtgtgg

SEQ ID NO: 4621 - DNA, 303 bp, Homo sapiens
ccaggcgcggtggctcacgcctttaatcccagcactttgggaggctgaggcgggcagatcacgaggtcaggagatcaagaccatcctggctaacatggtgaaaccccacctctacaaaaaatgcaaaaaaaagtagttaatttgttactcagcaaatctctacggtgcctaccagactccagatctgggctgctggacacaggaacatcgttaagcaaatcccggccgtcgtggaactgacagcctggaggggacgcaagagacttgggcattcaacagataacttcagagtcccaactgcag

SEQ ID NO: 4622 - DNA, 248 bp, Homo sapiens
agaacaagtctataaaagtagaaatcacatacaaaaatacagattactctgacatgttggcaaaatagcttatggctggacttgagtttggaagttctgtatgtttgagggcatccgatgtcagagtccaaccggatcctaaccccagctcttgtcactaatctgtaaacaataatttcaagtagtatttagcactttttaactattaagaaattgaagcatcatcatttcctgtgcaacccaacttt

SEQ ID NO: 4623 - DNA, 463 bp, Homo sapiens
  unsure (6): n=A,T,C or G
  unsure (155): n=A,T,C or G
  unsure (157): n=A,T,C or G
tgaaanacagtatggaagttcctcagaagaattagaaatgctatatgattcaggattcccacttctggatattaaaaaaaaaaaaaatgaaaccaggatctggaagagatatttgcactccccatttcattaatgcagtattcataatagccaananatggaaacaacctaaatgcccattgatggttgaatgaatttagaaaatttagtatatacgtacaatggaatgttattcagccatagaaaaggaaggaaatactgtcagatgctgcagcttgaaccttgacaacattttgctaagtgaaataagccagccacagaaggacaaatactgcatgatttcaccaatatgaagtatctaacgtagtcaaacttatagaaacagtagaatggtggctgctgtggggagggggaattggggaactgctgttcaaaaggtatagagtttctgtcacgcgagttt

SEQ ID NO: 4624 - DNA, 452 bp, Homo sapiens
ctgaaaagttccagcatattttgcgagtactcaacaccaacatcgatgggcggcggaaaatagcctttgccatcactgccattaagggtgtgggccgaagatatgctcatgtggtgttgaggaaagcagacattgacctcaccaagagggcgggagaactcactgaggatgaggtggaacgtgtgatcaccattatgcagaatccacgccagtacaagatcccagaccggttcttgaacagacagaaggatgtaaaggatggaaaatacagccaggtcctagccaatggtctggacaacaagctccgtgaagacctggagcgactgaagaagattcgggcccatagagggctgcgtcacttctggggccttcgtgtccgaggccagcacaccaagaccactggccgccgtggccgcaccgtgggtgtgtccaagaagaaataagtctgtagg

SEQ ID NO: 4625 - DNA, 493 bp, Homo sapiens
ccatcagaggaatgcaaatcaaaaccaccatgacataccatctcacgacagttagaatggtgatcattaaaaagtcaagaaacaacaggtgctggagaggatgtggagaaactgaacacttttacactgttggtgggactgtaaactacttcaaccattgtgaaagacagtgtggcgattcctcaaggatctaaaactagaaataccatttgacccagccatcccattactgggtatatactcaaaggattataaatcatgctgctataaagacacatgcacacgtatgtttattgcagcactattcacaatagcaaagacttggaaccaacccaaatgtccaacaatgatagattggattaagaaaatgtggcacatatacaccatggaataataagcagccataaaaaaggatgagttcatgtcctttgtagggatatggatgaagctggaaaccatcattctcagcaaactatcgcaaggtcagaaaacc

SEQ ID NO: 4626 - DNA, 544 bp, Homo sapiens
  unsure (514): n=A,T,C or G
  unsure (534): n=A,T,C or G
ccttggatgaacttgcttcacttcaggtcacaatgcaacaagctcagaaacacacagagatgattactacactgaaaaaaatacggcgattcaaagttagtcaggtaatcatggaaaagtctacaatgttgtataacaagtttaagaacatgttcttggttggtgaaggagattccgtgatcacccaagtgctgaataaatctcttgctgaacaaagacagcatgaggaagcgaataaaaccaaagatcaagggaagaaagggccaaacaaaaagctagagaaggaacaaacagggtcaaagactctaaatggaggatctgatgctcaagatggtaatcagccacaacataacggggagagcaatgaagacagcaaagacaaccatgaagccagcacgaagaaaaagccatccagtgaagagagagagactgaaatatctctgaaggattctacactagataactaggttgacatacctggaatatagagaacacttgagaagtttgtaatggntttcatttgaaatagactgntgaaagtttt

SEQ ID NO: 4627 - DNA, 387 bp, Homo sapiens
ccttttttaagtgacctgtaactcatatcagtgaaaaagaacatgctataaaaagattccacaaagtgagagcattaagctcaaaggtcctgaggtaggtgtgtttgaggagctggtgtgtagctgctgtataagaagtcaacctccttattttcaggtacatttattattattttaaccccaagcagaattgcctagctgggtccctcacctttacacaatagtcataggatttgactgttatcaaaaagtaaatccactctcagagaccatagatttcctattactgaggttcttcaaaagaatatgtaatcaatttatatagtaattcctaaaaatgagattctaaaatatagtagcatgcagatgaagcatagctaatgcttt

SEQ ID NO: 4628 - DNA, 350 bp, Homo sapiens
aaaatgaacatctctgtgtgccacagttcctaggactggggcaaggacacagtgtcaagtcttgttttgaggatgagtctctgaagagacagaattcctgccagaatgcgcacagaacataagtcagccaagtgtgtcgtgccagggatactttgactttggtttgctgctgctgctgctagggatattgggagggttatcctttccaggttgtaggagagggttgtgggtaaaggtctgtcgtaaaggacccctggctgctagctccaactgattccgcatgcgttgttcacgctctcgcagaaattttctttttgtttcactggaaaggaaagatgatgctcagtttt

SEQ ID NO: 4629 - DNA, 446 bp, Homo sapiens
aaataaggtaagtgaaatatgggctcagaattaaataagattttcaagaaagttcttgtagctgtaaaataggagaatatgaatgtcaaaattttgactgtttctgtgccaaacagaaagtttcacaaatgctttccaaactgcaataaaaagaactttaataataccattaagtctacaaagttactgtcaagttgacagtattcaaatactacaatattttctaaatgtaaattttgtaacatcttgaatactttctaagcccacttttctgtcattacaaaaataaaattccaagaaatttctgctacattaatcttaagagatcaaaataacctatgtagttttctaggttaatgtaattcaagtaaagtggtactaaagaaaacacatcattttaataaaaaccaaacctgcttaagagacataacagagttaagcaaaag

SEQ ID NO: 4630 - DNA, 332 bp, Homo sapiens; identical to SEQ ID NO: 4096

SEQ ID NO: 4631 - DNA, 508 bp, Homo sapiens
ctgttgaaacagaagaagttgagcctgatgaagaagaatttcaggaagagtctttggtggatgactcattacttcaagatgatgatgaagaagaagaggacaatgaatctcgttcttggagaagatgatttgactgatcattgatctacatatgctagaactctatctgtgtttcattagtattatctaatgtacttttacatatttgtaaaaacaatttttggtaaaatgtgatgaagatggatttcacaaatagacaaaaaagaagaaaactaccttctgatcttgtattttgaaagattgatgtttgcattttacttcagtaaacaattgctaaagacatcacactagaaacatatgcaatgtttttattacatacttctactggacatcacagaattctttgggttctttgtaatttaatgaataggtctgaaaacttatgaccaatacttgttataacttagaggactttgttttattccaaataaggaatgaatttgcattt

SEQ ID NO: 4632 - DNA, 207 bp, Homo sapiens
ctcactacgcagtagtcagaattcaaaatgctcaagagaaagccatccaatgtttcagagaaggagaaacatcaaaaaccaaagcgaagcagcagttttgggaatttcgatcgttttcggaataattctttatcaaaaccagatgattcaactgaggcacatgaaggagatcccacaaatggaagtggagaacaaagtaaaacttca

SEQ ID NO: 4633 - DNA, 609 bp, Homo sapiens
  unsure (567): n=A,T,C or G
  unsure (601): n=A,T,C or G
aaagcaaaaaaaggatttattgaaatcatgtgacaatatatccctaacaccatgaagaagatgacaattatgatttccatagagtattttgcacttgcctaagcacaaaagcaaaaccagagcaaggcaaacaatatacaaacaaaacttgatcctatctaataactttcatgaaacaaccataaatgaattttgttttattaagtcaggcttcaggactactgaattgcattcactaaaatgctatttgaaattttacttactcgccacccaccccactactcttaattcatcgccctctccacaaaaggacaaaaggcaaaaaaggtagtaagcaaaatataaataataagaattcaaaaacagagatcaaagtaaatttttttttcagtctctgcgtctatgctcaaatcaatgttttctgagcatacagggaagcaaggaaaccaattctctagctcttgctctgcctcttattctcctccaccccccaatacatttctgaatattttttaatccatttatcactgagtacttgcatataactagaagcaccgactatattgntatcaactttggagcaattttcatggggaattgnacaaatga

SEQ ID NO: 4634 - DNA, 460 bp, Homo sapiens
  unsure (394): n=A,T,C or G
aaaaacactttatttaataaaagttaaacatacaaaactgaaataatacacatcctaaaaattaccttcttccattaataggaagacccttttctatgcatgtatttggcttaaactcaactcaggataactgtgatgatgttcacttacaccaacaaatgcagacaacctgatctaattaacaaaaattacaaacagctaaatgaacataatatacagggaaattatcgtcagattaatgcacaagaaatacaagaaatttttaatgatgaaatattcagtatccttgttcattaatttagccttgtgtttttacaaaaatagtatctacactgtatacagggctatacatcagctttttgttctcccatataaacatcacacatccatttancggcagtggtaccatgttttggatgtgtgatgtttatatgggagaacaaaacatggtaccactgcc

SEQ ID NO: 4635 - DNA, 607 bp, Homo sapiens
aaaaaagaaataacattcaaaacaacttatatattctgtttctgtctacttagcacattttcacatttctttccccccagaatataaggcatataatcatttataaaaccacattaatactagagtaaaatatagaactatagaaaaatatcactatgttggataatggggagaagtctgtgtaaaacaaccaagtctgagttatgaaatattctccaacagatataaatagatgtaaatataaatatttcttaacttcaggtttatttggtaacgaaataatggcttctaaaaaattgtcaagaagagacagatccaacctttaattggtgtgcaggcacattgcttatagtggacttattaaattccaaatagcagttaattgtataacttaaaactgcatcatagaagtatttaccaatttcttttcaaaacaagtgtgctcactcagatttcctttcataattttgatagcatccaattaatgaggttttgctgtgataatattccagaataaaaaacattcaatgtgtcaaacaaatactttgaaagaacagcttgattaatgtgtagaaaacaggtttactcctagcagctctctgctatg

SEQ ID NO: 4636 - DNA, 427 bp, Homo sapiens
aaaagcgtgagcttaaaatacaagactgccatattaaattttttgttgacattagtctcagtgaagactatgaaaatgctggctatagatgtcttttcccatttatctaaatatggactgctcaggaaacgagactttccattacaagtatttttaattaattgggccagcttttcaaacaaagatgccacattcaaaatagggtatattttcctatattacggtttgcccctttataaatccaagtagataggaagaaagaagacaaactttgcatctcagtatgaattattcaatttatttgaatgatttttctttacaaaacaaactcattcattagtcatgtttatctgcttaggagtttagggaacaatttggcaattttgtggttttcgagattatcgttttcttaaagtgccagtatttt

SEQ ID NO: 4637 - DNA, 476 bp, Homo sapiens
  unsure (199): n=A,T,C or G
  unsure (213): n=A,T,C or G
  unsure (215): n=A,T,C or G
  unsure (216): n=A,T,C or G
  unsure (234): n=A,T,C or G
  unsure (239): n=A,T,C or G
  unsure (242): n=A,T,C or G
  unsure (246): n=A,T,C or G
  unsure (250): n=A,T,C or G
  unsure (264): n=A,T,C or G
  unsure (268): n=A,T,C or G
  unsure (276): n=A,T,C or G
tttggaatccattagagaaaaatccttgtcaccagattcattacaattcaaatcgaagagttgtgaactgttatcccattgaaaagaccgagccttgtatgtatgttatggatacataaaatgcacgcaagccattatctctccatgggaagctaagttataaaaataggtgcttggtgtacaaaactttttatatcanaaggctttgcacantnntatatgagtgggtttacnggtanatnatgntatnttttacaactaatnttgnactctcanaatgtttgtcatatgcttcttgcaatgcatattttttaatctcaaacgtttcaataaaaccatttttcagatataaagagaattacttcaaattgagtaattcagaaaaactcaagatttaagttaaaaagtggtttggacttgggaacaggactttatacctcttttactgtaacaagtactcattaaaggaaattgaa

SEQ ID NO: 4638 - DNA, 274 bp, Homo sapiens
ccaggatatattggttttttatgttaactttggtgaccttttgtgtactttacatgaaacaccttatatattaagtactggggattcgttctatgttccttcaggtaactattataacatcaaaaatctccggaatgaggaaagtgttcttctttttactcagataaaaagatgaaagatcaaccaaccttaaatatatgtatgtatatatgtatatgtgaaaaacagtttgtatagttggaatatttgtctttgtaattacttgtgatgtttt

SEQ ID NO: 4639 - DNA, 332 bp, Homo sapiens; identical to SEQ ID NO: 4096

SEQ ID NO: 4640 - DNA, 567 bp, Homo sapiens
gcttcatacaaaagggtctacagaagagagacacctcctctatgggcgacctgcagtgctttatcggactagatatgatatcttatatcacactgactttgaaagtggttatagtgaaatattcctaatgccactctggacatcatatactgtttccaaacaggctgaggtttccagcgttcctgaccatctgaccagttgcgtccggcctgatgtccgtgtttctccgagtttcagtcagaactgtttggcctacaaaaatgataagcagatgtcctacggattcctctttcctccttatctgagctcttcaccagaggctaaatatgatgcattccttgtaaccaatatggttccaatgtatcctgctttcaaacgggtctggaattatttccaaagggtattggtgaagaaatatgcttcggaaagaaatggagttaacgtgataagtggaccaatcttcgactatgactatgatggcttacatgacacagaagacaaaataaaacagtacgtggaaggcagttccattcctgttccaactcactactacagcatcatcaccag

SEQ ID NO: 4641 - DNA, 475 bp, Homo sapiens
aaaatagtttaatgaaaaaataaatatagtgtatgaatgatctaagtatgagaaatagcaaggacaaaatagcaaatatttttgtaggggagaaggaatctgaatgtgtatggaatattaaggagaataagaaattaatttaacaggggctgtggcggggggtgggagaacatgaggaaaaatagctaatacatgctggacttaataccgaggtgatgtgttgataggtgcagcaaaccaccgaggcacacgtttccctatgtaacaaacctgcatatcctgcacatggatcctggaactgggtcagaggtatagggttaatttctcttgctgaggctcagatttctccttcatgcatgtttaatggtccacctaagttcaactggaggagcatctttcttctttgttaaccaaacatgcccaggtagagctgcttctcttttctatggtagctgctgagttctgactgtgtcag

SEQ ID NO: 4642 - DNA, 388 bp, Homo sapiens
aaaaaatgtggcgttaataacattcaagccaagagccaaatcaggaatgcaatcccattcacaattgccacaagaagactaaaatacctaaaaatacagctaaccaaggaaacaaaagatatatataatgagaattacaagatacccctgaaagaaataagagatgtcacaaacaaatggaaaaacattccatgctcatgaataggagcacagctttgtaaataaaggacatagggtgaggaagccgggttgttttaagaagcctgtgtcccctgtgaaaaggcccatggcatatcttgtagaattacaaggagttcattctgtagcaggatgagctgcagacaaaacttctcagacaccgagttggagaaggaagggcttttttcag

SEQ ID NO: 4643 - DNA, 451 bp, Homo sapiens; identical to SEQ ID NO: 3176

SEQ ID NO: 4644 - DNA, 367 bp, Homo sapiens
aaacctttgtgtgctggtttataaaataatgtgtgtaatccttgttgctttcctgataccagactgtttcccgtggttggttagaatatattttgttttgatgtttatattggcatgtttagatgtcaggtttagtcttctgaagatgaagttcagccattttgtatcaaacagcacaagcagtgtctgtcactttccatgcataaagtttagtgagatgttatatgtaagatctgatttgctagttcttccttgtagagttataaatggaaagattacactatctgattaatagtttcttcatactctgcatataatttgtggctgcagaatattgtaatttgttgcacactatgtaacaaaacaa

SEQ ID NO: 4645 - DNA, 367 bp, Homo sapiens
  unsure (245): n=A,T,C or G
  unsure (272): n=A,T,C or G
  unsure (311): n=A,T,C or G
  unsure (338): n=A,T,C or G
  unsure (354): n=A,T,C or G
aatctgaatgtgtatggaatattaaggagaataagaaattaatttaacaggggctgtggcggggggtgggagaacatgaggaaaaatagctaatacatgctggacttaataccgaggtgatgtgttgataggtgcagcaaaccaccgaggcacacgtttccctatgtaacaaacctgcatatcctgcacatggatcctggaactgggtcagaggtatagggttaatttctcttgctgaggctcanatttctccttcatgcatgtttaatggnccacctaagttcaactggaggagcatctttcttctttgntaaccaaacatgcccaggtagagctgnttctcttttctatggnagctgctgagttc

SEQ ID NO: 4646 - DNA, 475 bp, Homo sapiens
ccactagaggtctgtgtgccattgcccaggcagagtctctgcgttacaaactcctaggagggcttgctgtgcggagggcctgctatggtgtgctgcggttcatcatggagagtggggccaaaggctgcgaggttgtggtgtctgggaaactccgaggacagagggctaaatccatgaagtttgtggatggcctgatgatccacagcggagaccctgttaactactacgttgacactgctgtgcgccacgtgttgctcagacagggtgtgctgggcatcaaggtgaagatcatgctgccctgggacccaactggtaagattggccctaagaagcccctgcctgaccacgtgagcattgtggaacccaaagatgagatactgcccaccacccccatctcagaacagaagggtgggaagccagagccgcctgccatgccccagccagtccccacagcataacagggtctccttggcag

SEQ ID NO: 4647 - DNA, 474 bp, Homo sapiens; identical to SEQ ID NO: 205
  unsure (446): n=A,T,C or G
  unsure (463): n=A,T,C or G

SEQ ID NO: 4648 - DNA, 231 bp, Homo sapiens
ctggagacactttagaactctttccccatcctccaccatagtgcaaacttcacgcttctctgagcacctccaaggtatgcccttgaagtaaaacagaaaagggaagaaagggggctttttcttttccatttctgaccaaacagaggtctgaaatagcagtgtattatgaaattctcattccctgcaacagtcagccaccacttggaaaatggctatttttgccataaacta

SEQ ID NO: 4649 - DNA, 357 bp, Homo sapiens
ctggaaattgctgctagaggaggaggcttggctgaatgactgaattaatagtacatgtacagggcttacgaaagcactcaaatgtcaaaattttggcttgggagactctacccccatcctctccttttctaaggatctggatccatcaaccatttgtttccactaaaagaaaaccctggctcagaaagtctgcaagtgcagaggaatggaggatgagtaagtcacaccagcaggctggctcagatggggagaaccctgaggttgggtgaatgagtggaaacggaatgactccagtagctggctctactgcgcctttttctgcttgtggggaggctttgcattccagtagaagagcag

SEQ ID NO: 4650 - DNA, 189 bp, Homo sapiens
agaagaaggacgctggaaagtcggccaagaaagacaaagacccagtgaacaaatccgggggcaaggccaaaaagaagaagtggtccaaaggcaaagttcgggacaagctcaataacttagtcttgtttgacaaagctacctatgataaactctgtaaggaagttcccagctataaacttataaccccag

SEQ ID NO: 4651 - DNA, 320 bp, Homo sapiens
aaaatgcctttataataagctttgtttctttgtgaaactaattcagcaggctgaaggaaatggttcatgtgataatgtgggctggtatcctctagagtacctgggtacataaacagaaactcctgtaggtaaaaagtaatttgtgccattagtctttctatgtttctgcatccagatagagtgcagttcatgagggagggggcgggggactgaaggggaaagggcgttaaagtgatacatttttataccaaatgtgtttatttttttgtgcaagtaatccttaaaattgcaattgtattaggtgttaaaataaagttttt

SEQ ID NO: 4652 - DNA, 448 bp, Homo sapiens
ggatgtaggatttctttttagagtgattaaaatgttacaaaattgctggctgggtgcagtggcttatgcccataatcacagcacttcgggaggctgaagtgggaagatccaggagttgaagaccagcctgggcaacatagtgagaaaatgtctccctaaaaggaagaattaacctcatgtggtggtgtgcacctgtagttctagctacttgggaggctgaggcaggagaatcgcctgaacccaggaagcagatgttgtaccgagctgagatcatgccattacactccagcctgggcgacagaacgagacgccatcaataaataaataaataaagtaaagtaaaaaacctattaaattgaggctagagctggagatgtaattggtttttgagaaacattagtataaagcttgcccttgttgtgtggaagaagccattttgtactgcttt

SEQ ID NO: 4653 - DNA, 600 bp, Homo sapiens
  unsure (44): n=A,T,C or G
  unsure (53): n=A,T,C or G
  unsure (95): n=A,T,C or G
  unsure (267): n=A,T,C or G
  unsure (366): n=A,T,C or G
  unsure (388): n=A,T,C or G
  unsure (466): n=A,T,C or G
  unsure (490): n=A,T,C or G
  unsure (495): n=A,T,C or G
  unsure (506): n=A,T,C or G
  unsure (556): n=A,T,C or G
  unsure (594): n=A,T,C or G
ctttttttttttttttttttttttttttttacttggttgataanatgttgaanaaaccatggaattatacacagcactatacattattactatanaatgtctggtccctcccatcataaatatggtttaatgaaggtattgaaaaacttcacaatatcgagctgcaattcttttttctttttatacaaatacaagttaattagctctattaagttgcaattttatttttataaagctttgtaaagttatgaacatggaaaccctaanaatcacctaagctttttacataagtaaatttcaagttgacagtctgtccattttgaactatttataattaacaggacacttaacacagtaatatcttanacaaggaagagggcattaattntgcaggcaggtagcaatgaaaatgccaaacctgaacaatcagtcactatttccttatacagtttgagtaaaagaggtngactacagaaagaaaaaaaaaagngaatntaaaatgtatnttccccaaatacaactctacttcaataagtcttgaagattaccgatgacntcaacaaaaatgaatgaactcagggaatgagttctttntcccca

SEQ ID NO: 4654 - DNA, 286 bp, Homo sapiens
aaaaaattacacggagcaatttccagcttatctttttttataaaagtactgcctatatcaaacattttatatcacgttaattccattgaagagctgcctttttctgttaaggtactgattccaattgatgggatacatgcccttaatacagaaagtttccattatttattcaaatatcaaaattaagattattgagaagtttattgctttatggctgggcaagatgctactagcacattttaggtaaataatattctttattaaaaactatgaggtcattctgttt

SEQ ID NO: 4655 - DNA, 297 bp, Homo sapiens
aaatgactgtgctgcccctttcacatcaaagaactactgacaacgaaggccgcgcctgcctttcccatctgtctatctatctggctggcagggaaggaaagaacttgcatgttggtgaaggaagaagtggggtggaagaagtggggtgggacgacagtgaaatctagagtaaaaccaagctggcccaaggtgtcctgcaggctgtaatgcagtttaatcagagtgccattttttttttgttcaaatgattttaattattggaatgcacaatttttttaatatgcaaataaaaagttt

SEQ ID NO: 4656 - DNA, 332 bp, Homo sapiens
  unsure (28): n=A,T,C or G
aaatagaaaacagtatattgaaagtggngggtttgatctttttatttagaaacccacaaaatcagaaacacagtacaaataaaacagaagtcaaactataagttgacttttagttcctaaaaagaaacatatttcaaaagcaatggaatctagaattcttataacatgaataacaaaatgtacagcaagcctatgtagttcaattaatatataaggaaaaggaaggtctttcttcatgatacaagcattataaagtttttactgtagtagtcaattaatggatatttccttgttaataaaattttgtgtcataatttacaaattagttcttt

SEQ ID NO: 4657 - DNA, 464 bp, Homo sapiens
  unsure (84): n=A,T,C or G
  unsure (93): n=A,T,C or G
  unsure (103): n=A,T,C or G
  unsure (116): n=A,T,C or G
  unsure (285): n=A,T,C or G
  unsure (394): n=A,T,C or G
  unsure (401): n=A,T,C or G
ctttttttttttttttttttttttttacaaaacagtatattttattttacaatagcaaccaactccccagtttgtttcaattgngacatctanatggcttaanattactttctggnggtcacccatgctgaacaatatttttcaatcttccaaacagcaaagactcaaaagagattctgcatttcacatcagttcacaagttcaagagtcttccatttatcttagcttttggaataaattatctttgaggtagaaggacaatgacgaagccacttaattccttgngtctgcataaaagcagatttattcatcacaacttcatttatgtgaataaagcagatgatgataaaatgttctcttattcttgtttaatcagtagtggtagtgatgccanaaactgngaaaggaaggcttttagttactttcttctttccattttccaataatccattccccatccccag

SEQ ID NO: 4658 - DNA, 505 bp, Homo sapiens; identical to SEQ ID NO: 645
  unsure (47): n=A,T,C or G

SEQ ID NO: 4659 - DNA, 387 bp, Homo sapiens
ccatttccaagtaacacccactgcatgcccatcaataaaagagaaccataacaaaatagaaaatttaccatatggctatgattttaagaaaaaaaaaatgcggacacgagcacatgagcaaagtccaatattaaagtaacattccttcttacgggctatgattaggaatctgattagataccagaataaaaatacaaatgctgaactatttaggtcaaagaacctctatagaagcatctgtcttcaaaggcattccagtttgagactcaattttagaataaggcataacaaatatgttaacaaaagacatacacaaagtgatgaaagagggattctataattccccacatactctgaacctaataaaacaaatctagattttttttt

SEQ ID NO: 4660 - DNA, 450 bp, Homo sapiens
ctgtcttgaggaggaagatgaagactgtgaatgaaggacagcagacttgcttctaggaaaataatatatgtaagttgggatgcctcttgcagccagatgtttccgaataagtcgctcagtaccataccagttaaaacctttcgtggcatgtccaatacgtggaagatgagcacttgctttcttcttttttgctgctaaaatatcttcttcaggccctcttctagggctgccatcttaatgccagacaggacattggaacgatcacgatgctgagccacaatcaaggccaacaaatcttgccctttgtttcttgattctttatcatcaacaggaaataaaaggacacctcccaaactcaggtctttcattttcccagccagctcatatattttttttggctcagcggatcgcttttccagagctgtaaataaaccacctctgccccagtgg

SEQ ID NO: 4661 - DNA, 238 bp, Homo sapiens
aaaatatgtttattttgtatgttttacaatgaatacttcagcaaagaaaataattataatttcaaaatgcaatccctggatttgataaatatcctttataatcgattacactaatcaatatctagaaatatacatagacaaagttagctaatgaataaaataagtaaaatgactacataaactcaatttcagggatgagggatcatgcatgatcagttaagtcactctgccacttttt

SEQ ID NO: 4662 - DNA, 196 bp, Homo sapiens
ccaggtgaaggctggggggagtgtggtgatggagtccagcaggggaactctggacaggcttgactcaagccagcttcaggaactcctgcagcgtgttttgttccacagcctccacgaagagctcatagtccccacagtactggtccccgttgacaatctggggtggggtggccttggggttgcctgccaaggctcg

SEQ ID NO: 4663 - DNA, 251 bp, Homo sapiens; identical to SEQ ID NO: 4543

SEQ ID NO: 4664 - DNA, 338 bp, Homo sapiens
aaaagaacttccccatcagcttctgcaaggttatttttacatagtctcatgcttatttgtatggggaagttctttttcctggaaaagatttaactaagcacaaaactaaaatccagagcagggataagggaagaatgcaggtgttcttagtggaagtatcagcatcagggaatctttctcttaaacactggaactggtagagttgaagaacttctttttctcaatacttccatcattctttgtatccattcatcagggaggaaagtttctttgaaaatagttattcagttataagtaatacaggattattttgattatatacttgttgtttaatgttt

SEQ ID NO: 4665 - DNA, 293 bp, Homo sapiens
aaaagacatacacaaatctagtacatcaataaccggggatttttcttttttgctatactattttcacaaccacgggtgtgcttgctaggcaatataaccatcacagaagcaaacgttaggcagaatactggtaagaaaaaacaaagcaagaaaagagctaccagatatacagacaggcttggttccacattcactactgcattttcaagcgccaagtattaactgcacatttttgttcagctagaaaggagggatttttttttttgtttttttctttttttttggtttgtttt

SEQ ID NO: 4666 - DNA, 468 bp, Homo sapiens
ccagataattttgcatctgcttggatgattgtagactgagatgtgagtggaggataaagtattagacttttgctgagtaactgccaaccaagaagtatttatcggacacttactaggtgcctaggattgtatcagagggaatatgaaatgtgtccctgccctacctagttttaacgacagaatatctattaaaggctacttagctgaagggtaagggtgacaggtctaggggaagctttgggaggtggtgtgctgtgacagaaaaagtggcagagtagggacgagagacctgcattctagccctgtttctgtcacttgctctgtacacttagacaacagcttgacctcttgagctttagtttcctcctctgcataatgagagggttagactactgaattgtatgggaaaaaaatacaaattcctgggtcctaggccatgcctgctgaatccgactgttcaggaagagg

SEQ ID NO: 4667 - DNA, 408 bp, Homo sapiens
ctgtgcaagaaaaattaaatgaaatagtagatcagataaaaactagaagagaagaagaaaagaaacaaaaagaaaaagaagcagaagaagctgaaaagcaattattccatggtactccagttacaattgagaatttcttaaattggaaagccaagtttgatgcagaactcttggaaattaaaaagaaaaggatgaaagaagaagaacaagcaggaaaaaataaattaagtgggaaacaactatttgaaacagatcataatcttgacacatctgatatccagttcttggaggatgttggaaacaacgtggaggtagatgagtctttgttccaagaaatggatgacttggagctggaggatgatgaagatgatccagactataatcctgctgacccagagagtgactcag

SEQ ID NO: 4668 - DNA, 557 bp, Homo sapiens
ccaagtggggtgagggagacccacgctggatcgtggaggagcgggcggacgccaccaacgtcaacaactggcactggacggagagagatgcttcaaattggtccacggataagctgaaaacactgttcctggcagtgcaggttcaaaatgaagaaggcaagtgtgaggtgacggaagtgagtaagcttgatggagaggcatccattaacaatcgcaaagggaaacttatcttcttttatgaatggagcgtcaaactaaactggacaggtacttctaagtcaggagtacaatacaaaggacatgtggagatccccaatttgtctgatgaaaacagcgtggatgaagtggagattagtgtgagccttgccaaagatgagcctgacacaaatctcgtggccttaatgaaggaagaaggggtgaaacttctaagagaagcaatgggaatttacatcagcaccctcaaaacagagttcacccagggcatgatcttacctacaatgaatggagagtcagtagacccagtggggcagccagcactgaaaactgaggagcgcaag

SEQ ID NO: 4669 - DNA, 247 bp, Homo sapiens
cctcttccatgtcctggagttgaatgagttcaaagattggcaataaaggaaaaaagaaagcattacgggtatgacgggaacaagctttggagtttatcgaacagtcacaccaagtttctctagcacacggacacccttttcttggtactcttgtcgggtcatccaaaagttgtctttgtctttcatgatatccgctagaactgcaccacccaggaataccatgtgctttctgcggggtgggtcttca

SEQ ID NO: 4670 - DNA, 228 bp, Homo sapiens; identical to SEQ ID NO: 3993

SEQ ID NO: 4671 - DNA, 473 bp, Homo sapiens
ccaatgaagatactccacagttgtatgtggcctgtggtaggggaccccgatcatctctgagagtcctaagacatggacttgaggtgtcagaaatggctgtttctgagctacctggtaaccccaacgctgtctggacagtgcgtcgacacattgaagatgagtttgatgcctacatcattgtgtctttcgtgaatgccaccctagtgttgtccattggagaaactgtagaagaagtgactgactctgggttcctggggaccaccccgaccttgtcctgctccttattaggagatgatgccttggtgcaggtctatccagatggcattcggcacatacgagcagacaagagagtcaatgagtggaagacccctggaaagaaaacaattgtgaagtgtgcagtgaaccagcgacaagtggtgattgccctgacaggaggagagctggtctatttcgagatggatccttcaggacag

SEQ ID NO: 4672 - DNA, 317 bp, Homo sapiens
ctaagcttgttgtggtcacctattatgtgccagataccatgctgggtgctagagctaccaaagggggaaaagtattctcatagaacaaaaaatttcagaaaggtgcatattaaagtgctttgtaaactaaagcatgatacaaatgtcaatgggctacatatttatgaatgaatgaatggatgaatgaatattaagtgcctcttacataccagctattttgggtactgtaaaatacaagattaattctcctatgtaataagaggaaagtttatcctctatactattcagatgtaaggaatgatatattgcttaatttt

SEQ ID NO: 4673 - DNA, 453 bp, Homo sapiens
ggaaaataggagtggttggctgggtgaagaataccagcaaaggcaccgtgacaggccaagtgcaggggccagaagacaaagtcaattccatgaagtcctggctgagcaaggttggaagccctagttctcgcattgaccgcacaaacttttctaatgaaaaaaccatctctaagcttgaatactctaattttagtattagatactaatagaagagaaaaattgtaacacactgaacaatagatactgtatgttcttaagactatgtatactagaataatagtagcagagtagggtgaaaaggaactttctgttctgaaagctaagcgactgtacgtgctactaaaaatgtctgacactgaaataattttactcaactatgttttcaacaagcaaaaatatagtattctaagattaaaatgtcattacaaaatatttagtgtgaacatttaattt

SEQ ID NO: 4674 - DNA, 606 bp, Homo sapiens
aaaaatataaagatgcagtatcatttctgatataaagttacttaaaaaaatccaaggtcttagggaattcacaaatcataactagaagtaacttttattaatttaatgtacacataattaccaaattttaatacattaaaaatgtgtaaatgcccacagactgtacaaaaattaacaccccattttgttaaaagttcccaaccacctcccaccataaatatacaaaaacctatttttagatatgtcaaaattgcatgcatgaatattttctaaagcttgaattttgctcttcactggataatgttatctatagctgtttctgtaacagactacataaacattgatatattatttaccatgcctttgaaactgtgcaggactttcataaacatggggaacaaaataaatagagtaaaaactgcaacagttttgtttagatgcaagtgcaattgggaaagctttcgaatttcaggattataaaactactataaaagtatttattctgttgttggcttagccacttgtattcaagcattatttgcagcattgctttacagcagttggtgctagaagatacaaaacatatagttaccactatttatactt

SEQ ID NO: 4675 - DNA, 171 bp, Homo sapiens
aaatgattttttttttcaaatagaaaaactaaagaactgaactatcacaggaatttttcttcactgcagaagctgagatgttccagtaggagaagtaggagatatcttcacttgattggaaaataaacaccgtaactcaaggctctgctgagtacataaaaaatctggtga

SEQ ID NO: 4676 - DNA, 590 bp, Homo sapiens
ctaactgcaacggagagactcaagatgattccctttttacccatgttttctctactattgctgcttattgttaaccctataaacgccaacaatcattatgacaagatcttggctcatagtcgtatcaggggtcgggaccaaggcccaaatgtctgtgcccttcaacagattttgggcaccaaaaagaaatacttcagcacttgtaagaactggtataaaaagtccatctgtggacagaaaacgactgtgttatatgaatgttgccctggttatatgagaatggaaggaatgaaaggctgcccagcagttttgcccattgaccatgtttatggcactctgggcatcgtgggagccaccacaacgcagcgctattctgacgcctcaaaactgagggaggagatcgagggaaagggatccttcacttactttgcaccgagtaatgaggcttgggacaacttggattctgatatccgtagaggtttggagagcaacgtgaatgttgaattactgaatgctttacatagtcacatgattaataagagaatgttgaccaaggacttaaaaaatggcatgattattccttcaatgta

SEQ ID NO: 4677 - DNA, 525 bp, Homo sapiens
  unsure (58): n=A,T,C or G
  unsure (126): n=A,T,C or G
  unsure (283): n=A,T,C or G
  unsure (426): n=A,T,C or G
  unsure (510): n=A,T,C or G
gaaagacagcgcaactttgaatgctttcttacttgttttgtgacccaatttatgtggnagattgttatttcattaggatttagtaaaatttttttttctgattctaaacttattgtgaaaattganctgtacagatattcttttgatttcaattgggaacatttggaagaacaacagtcttacttgcctgtacaatatagagacatatgaatagtcataacagttttcaacttgttcttgtttctgttaaactatattcctagaaacatagtttgaacaactnggtctttgttaggcttgtcaaattgccttcatggaaaaataatctacaaaagtatggtttaattgattgtcttacatgataattttccctggtaacaacttagtaagtgatatatcttttttcctaaattgcttaaatactgngaaattgctctgacaaattggaagtgtaccattggcatatttgtcttcctttttatgcatgatggtaaaataaaagcatgttgntctgctaaaaaaaaa

SEQ ID NO: 4678 - DNA, 262 bp, Homo sapiens
aagcgatgctgccaggttcagactggttactacttaaaggtgaagaactctctctctctattggagtcagatggctgcccgggaccacgtcaggaatattttcttcagtagtcaccacttctgttatactagaaagttcttctgtatgttccacttttcctggattgtcttcggtatgcatgcctggaactgttgctggagacaacggctcttcacagaccacctccttttctaaggaaaatggctggtatgacgtgatgag

SEQ ID NO: 4679 - DNA, 601 bp, Homo sapiens
  unsure (587): n=A,T,C or G
  unsure (590): n=A,T,C or G
aaagtgcaatttattgaaaggtttaagcaaatcaggataaaggatctttctaataaatgactaacattaaagagatgctatattgatatatttagataaatctttcaaaaatcataattgatttctatagatgccaaatttacttctgttgtaacaatgacctgcccccctcaaaccccaaacttaattgctgaggattaagaagatcctctaattggcaagagctttttctgatgttaatatttttgtctgtttcaatacatctaactaaaaagaactatgggtctagagtagttgctttagcagccctgagttctataaccacaatggtattcctgttagaacttaagagaatgttgtgaacgttccccattctatttgaggagaaaacaaagaactcagttgctttctgatttagcaaagtaactatgctttgggctatagtgttaatgtctaagataaaggtagcaaaaattggagttatctaagaatcagaaaatgcttcagagaaatgaactgtaagaggaatgtttctaggagctgtctgatggggtagaagggattgcaacacaaaggccatttactgntgngattgaatatt

SEQ ID NO: 4680 - DNA, 361 bp, Homo sapiens
aaaagtctttatttcctctgaaaacttactggtaaagtatacaatttatgaataatcatatattcatgctttttgaaatatatctgaataaaagacaaattattcaatatcaatagcagtaaataacttatttgcaagaaaattattacaattcctactgtaaagaatcaccaaccactatttagcaattaaatttcaacacattttttttggaactctttaggactttagacaaaggccaccaaggctgacaatccaggtaactatggcagtgacagaagtcaatcattaatactgccattattttagacaaagggctgacaatctcagaaactagttctagaaattatcatcaatgtgg

SEQ ID NO: 4681 - DNA, 598 bp, Homo sapiens
  unsure (160): n=A,T,C or G
  unsure (190): n=A,T,C or G
  unsure (231): n=A,T,C or G
  unsure (264): n=A,T,C or G
  unsure (301): n=A,T,C or G
  unsure (307): n=A,T,C or G
  unsure (321): n=A,T,C or G
  unsure (343): n=A,T,C or G
  unsure (348): n=A,T,C or G
  unsure (353): n=A,T,C or G
  unsure (412): n=A,T,C or G
  unsure (445): n=A,T,C or G
  unsure (476): n=A,T,C or G
  unsure (490): n=A,T,C or G
  unsure (502): n=A,T,C or G
  unsure (511): n=A,T,C or G
  unsure (516): n=A,T,C or G
  unsure (523): n=A,T,C or G
  unsure (527): n=A,T,C or G
  unsure (541): n=A,T,C or G
  unsure (546): n=A,T,C or G
  unsure (591): n=A,T,C or G
caagctttttttttttttttttttttttttttgcgattgtaaaattttattactgggctgtttacatgatactttctttcttattaaatataacctgacaatctttattaaatgaaaatatttttgtatcatcaacaacaacaaaagaactaggatgaanaatttcccacattcttaatatttatagggnttctctccagtatacattctcatgtgtgctcaaaaggctgngtgaaggctttcccaaatgtcttacatttatanactttcaccccactctgactcctttcatatattcacnctctanaggacagttggaanattttcccacttttattttttnttganacagngtctcattctgtcgcacaggctggaatgcagtggcgtgatctcagctcactgcaacctntgtctccaggttcaagtgattctcctgccttancctcctgagtagctgggattagaggcatgcnctaccatgcctggntcattttttggnaatttttantaganatggggntacnccatgttgaccacnctggnctcgaatttctgacctcaaatgatctgcccgccttgcaccttggnctccaaa

SEQ ID NO: 4682 - DNA, 391 bp, Homo sapiens
ctgctgttagtgtagcaacctcgcttttcatctgtttagcaatggaggaatgaatagcaccacacagtcctcgatctgaggacacaccaataaggaggtgtttcttcttgtcttcaggccccttgatatcagctttttcatacagagctaaagatcccaatccatatattcgagctggtttcagctctctctcagctcgggcatattttgctgccgctaccattttcatagacttggtaattttctggatgtttttgatggactttagtctcctggtgatatctttcaaagttgccatatttcgaacttgaatccattgcggctgcaaggtccaggccgacagcccaacgacacccgcgcgagagaacatggtagccacagccctgctgaa

SEQ ID NO: 4683 - DNA, 577 bp, Homo sapiens
  unsure (546): n=A,T,C or G
  unsure (549): n=A,T,C or G
  unsure (552): n=A,T,C or G
ctctagtcccagctacctgggaggctgaggcaggagaattgcttgaacccaggaggcagaggttgcagtgagccaagatcatgctactgcactacagcctggcaacaaagcgagactctgtctaaaatatatatatatatatattgtttactactcaccacagatctgcaggagttcactgatctctaggatctgccttaactccaacttacatgttttggtcactattacaaactgtcatcccagaatgatgctgcagaggctagggctaggacacagaccagtgtttccatgtgggaattccctcccagtatttcttaggaaatgtatgttttttgaatccataatccctagaaaaatcagttgaggaaatgagaagtattgtaattattctgtgaatagtaacacttaccattatggagacatcactagtttgaaagaatccaacttcatcaaatattaacgtaccgagttgaaggctacaagaactgagacaggagcatagcagagagaaacggtcaccatctcattagccctatttttggntgntgngatgccattacatctgtatatctgg

SEQ ID NO: 4684 - DNA, 252 bp, Homo sapiens
ctgactccctagggccttcagacgtgtatgcaaatgagtgatggataaggatgagtcttggagttgcgggcagcctggagactcgtggacttaccgcctggaggcaggcccgggaaggctgctgtttactcatcgggcagccacgtgctctctggaggaagtgatagtttctgaaaccgctcagatgttttggggaaagttggagaagccgtggccttgcgagaggtggttacaccagaacctggacattgg

SEQ ID NO: 4685 - DNA, 552 bp, Homo sapiens
ccaaggaatggcccaagaggaaggtgcttcaggacctggtacctgatgatcgaaagttaaaatatactcgtccagggctccctaccttcagccaggaagtactacataaatggaagacagatatcaagaaatatcatcgtattcagtgtcctaaccagggctgtgaggctgtctacagcagtgtatctggccttaaagctcacctgggctcttgtacattgggaaactttgtggctggaaaatacaaatgtcttctatgtcagaaagaatttgtgtcagagagtggtgtcaagtatcacatcaactccgtccatgctgagaaaatttcaaacacatgaaagtagagaaaatagcataatgaacccagtatgctgtcagccatcctcagcaatcatcagtgactggttcgttgtaaacccaacaacaaccaaaagctttgaaaagctgatgaagataaagcagcggcagcaagaagaagaaaagcggaggcagcagcacaggagcagaaggtctctaagaaggcggcagcagcctggcattgagcttcccgag

SEQ ID NO: 4686 - DNA, 281 bp, Homo sapiens
  unsure (262): n=A,T,C or G
ctctattggactaccgtgaggatggtgtgaccccatatatgattttctttaaggatggtttagaaatggaaaaatgttaacaaatgtggcaattattttggatctatcacctgtcatcataactggcttctgcttgtcatccacacaacaccaggacttaagacaaatgggactgatgtcatcttgagctcttcatttattttgactgtgatttatttggagtggaggcattattttaagaaaaacatgtcatgtaggttgnctaaaaataaaatgcattt

SEQ ID NO: 4687 - DNA, 292 bp, Homo sapiens
aaaaaaacaatatttgcttctataacaaaaggaaacaaatctaagaatcattcctgtactacagaagggttaaggcaaaggtagccttttgggccttttaatgaacatgacccctatagaaaagtcaaggaaaaaaaaacccttgtataaattattttatttattattgtaattagatcttcacaaagttgtcttttcactgtgttttgtcaacgtgaaattaaattgtagttataagcaaaagttggttgcctagggaacaattgtatattcagtttaacagaaataaaag

SEQ ID NO: 4688 - DNA, 308 bp, Homo sapiens
ccatttaccagactccgacacaatgggccaccaccagtgtgacagcaggacatcctaatatatggatcttgatttttaagtttcagtatctgaacttcgtaaattagtaacttttagctgggaaagtatagcatgaaaccagaggttctcagaatgactgtaagatagcttacatttcctctttttgcctttatctccccaactaaaatacaatggggaagaagtctgcctatgatctttgaatgagctttttaaggaagaaatattatatattgtttgttaaagtttattgaaataaagaatcattt

SEQ ID NO: 4689 - DNA, 237 bp, Homo sapiens; identical to SEQ ID NO: 206

SEQ ID NO: 4690 - DNA, 328 bp, Homo sapiens
ccaagtggtggccgatgtgctctgcgagttcctggaggtggctgtgcatctcatcctctacgtgcgcgaggtctaccccgtgggcatcttccagaaacgcaagaagtacaacgtgccggtccagatgtcctgccacccggagctgaatcagtatatccaggacacactgcactgcgtcaagccactcctggagaagaatgatgtggagaaagtggtggtggtgattttggataaagagcaccgcccagtggagaaattcgtctttgagatcacccagcctccactgctgtccatcagctcagactcgctgttgtctcatgtggagcag

SEQ ID NO: 4691 - DNA, 407 bp, Homo sapiens
aaaaatgttcattaagctccaatgattgtttgctgctatccttatctacagtcatgctgagtaaagctatagctaaatggaagttaaattgtattcacgaggtgttaatgtttacatcttattatctgcagtctctcagagaaagcaaaagtaactacaaatagcgctatgccagaaactggtttcttgaccaacaatgtcgcttcagcatgcaatgaactggttcattctaaagtggtcacggctgttgatgacaagaggctttgtatttttatatggcacatcttttggtccatgtgaaaacaagttttttgaatgttaactattttctgacactttggagttactgttgctcttcccatttccattaggtcgatatatggttcatggcaatactgtacaagttt

SEQ ID NO: 4692 - DNA, 124 bp, Homo sapiens
gacttgttcaagaataactgatatgccttcactcagaagaaaagaaatgaatgtgaaagaaagccaagcatcacttgcacttaaatcattaccacggaagatatattagcttcaactttagttt

SEQ ID NO: 4693 - DNA, 381 bp, Homo sapiens
aaaataatcattgatttgtgtgatgtctacatcttttaacttctggttctgttataaagagtacatgtcacggttcataggcagtaacatttcagagaactgacatgaacaagtagtgaaaattgggcattaaatataaaaataacagttcttcataaacagaaggaaaataaggaaatagaaataccgacgagaaaggagagtccttgaaagagacccaaggaaaccctgaattcatacccacgtcaaatatgcacatatcctgagatgatgccactttgatgaatgtgcattagtctgatttatcatgtaccttaagagagccagatggggtatgtttttgtgctgtgatatggtatttatacaggtacaaatataagg

SEQ ID NO: 4694 - DNA, 342 bp, Homo sapiens
ctgctgatacccaggcagtagctgatgctgtcacctaccagctcggtttccacagcattgaactgaatgagcctccactggtccacacagcagccagcctctttaaggagatgtgttaccgataccgggaagacctgatggcgggaatcatcatcgcaggctgggaccctcaagaaggagggcaggtgtactcagtgcctatggggggtatgatggtaaggcagtcctttgccattggaggctccgggagctcctacatctatggctatgttgatgctacctaccgggaaggcatgaccaaggaagagtgtctgcaattcactgccaatgctctcgctttgg

SEQ ID NO: 4695 - DNA, 544 bp, Homo sapiens
  unsure (460): n=A,T,C or G
  unsure (506): n=A,T,C or G
aaaagattgtagatgacattggaatctaatttccgtatttgggtgctttcctagtattgtaagaatatgcttaattaatgagtcgcaatgaataatctgtttgtcttgatttgctttctgaaaggtgatgagggttttgggaaatggactttgttcaggcttttgccctttgtggctgtgacatattaagatgttggcagtaaaattgagagccaccagaagatgttaactgtgtatatgggcgctgccagataggaaatccaaatgagtagactatagtgttattgttagctactatggggtgagacgtagacagataaccatatgtaaggcagctccctaaatgctgaaacaaagaaccgtctcttgacttactcctgatgtctcatggtacatggtagctgccccaaaagcttgcaattaattgaaacttctcatttgttaggtggcaggtaggtangttttgaacttggtagtgatattcagacgaggagcaagattccacntggcagttctgtgatgcttaagtaaatgatgtgatcat

SEQ ID NO: 4696 - DNA, 208 bp, Homo sapiens
ctggatcacccttggaaaccaactggatgggatccacctactagacccagatgtggttgcacggttcaagcaaaggtacccagatggtatcatctctaaacctaagaatttatagaagcacttccttacagagctaagaatccatagccatggctctgtaagctaaacctgaagagtgatatttgtacaatagctttcttctttattt

SEQ ID NO: 4697 - DNA, 249 bp, Homo sapiens
aaaaaaaaccgaaacttaagaactgaacaaggattacaaccacattccaataaagaaaattttccttcaacaaagcatattgttttgtttatatacaatatgtgaccaccaagagttttaatttagttgtaccaaaggcaaaacattatacttaaaattaaattacagatgcatgaagaataaaagtttaatgtatcaaagataatttgttatttaatgcactcaatgtcagtatttggggcaattttt

SEQ ID NO: 4698 - DNA, 159 bp, Homo sapiens
gtgtgagcagtttatttattcaaaagtctttgtctgctgaagtcagcatacccctgctgaactgagtgctccaatgtggcaactaggagtgggtgctcgtgctggagaggtcatttcgtattatttcatttactgctgtggcagcagggccgggggtgg

SEQ ID NO: 4699 - DNA, 372 bp, Homo sapiens
cctgtggctgacctctgaccccagccctctttcttcagccctccctttactccaaccctctcctgcctgctttcctgagatgtcctggtcttccttggtgccagaagagggcactaccacaggaccctctcaagcttctcaggcaacagcttgaggtccctgaggggagtggcaagccctaatgcaactcaccctcatcctggtgcttaggtggcagagggtgggcagcaggggacagggatgggatggcaaaaccaccaactgcccttggtggcaggtgggtggagatgggatgcgtgccaacctcagatgccaactcaggtcatcaaggccaaggaccagtggcgaaagtgagtcttggggtaccttagg

SEQ ID NO: 4700 - DNA, 511 bp, Homo sapiens
aaaagaagcagaggtcaccatctccgagttcattctcatgtaactgaatgaaaacaatgagctgaaaataattctaagtttttttattgtttgacaggttcaacgttacagggtctgacaagtgtgtttttctgaaaaacacagaggtcagcagcatggaatgtgagaagaatttatactggatatgtaacaaaccttacaaataataaggaaacgtgttcacttattgactattatagaatggaactcaaggaaatctgtgtcagtggatgctgctctgtggtccgaagtcttccatagagactttgtgaaaaaaaattttatagtgtcttgggaattttcttccaaacagaactatggaaaaaaaggaagaaattccaggaaaatctgcactgtgggcttttattgccatgagctagaagcatcacaggatgaccaataaccatgcccaagaatgagaagaatgactatgcaacctttggatgcactttacattatttctggattcaaa

SEQ ID NO: 4701 - DNA, 543 bp, Homo sapiens
  unsure (514): n=A,T,C or G
ctgccgtggtggctaaagatagaagccctgggcaatggatcatctgtgtggaaggagacagtgcatttgggttttctggcatggaggtagaaaccatctgcaggtacaacttgccaatcatactgttggtagtgaataacaatggaatttaccaaggttttgatacagatacttggaaagaaatgttaaaatttcaagatgctactgcagtggtccctccaatgtgtttgctgccaaattcacattatgagcaagtcatgactgcatttggaggcaaagggtattttgtacaaacaccagaagaactccaaaaatccctgaggcagagcctagcagacacaactaaaccttctcttatcaacatcatgattgagccacaagccacacggaaggcccaggattttcattggctgacccgctctaatatgtaaataaagacgccagttggtggtcttgagttttctctttcttgcaagatgaaattttattttccacagcaaaattactctactgntaaaattgtgcaaaataaaataaacattt

SEQ ID NO: 4702 - DNA, 554 bp, Homo sapiens
ctgtatttttttgcattcattcattttccattctgcaacctccatcacattagcagagtaaccagtaagttgttttctattttctaaagtatttttttctatcactatatgtatcacttctgagtcttacaggtatagagctgagtttagagagttgctaaaattcacctattggaccaaactaaggttggtacttggctgtttgttccccatctgagcctaagtctccagctcagacacatctctttatgggcacaactgggaacaacaaaatggcaacagttctacagctcataatataaccagtctgaagggttcccctactcacagaccccttcatttactgggagttaagcctcactgctaaataatatattttgaaactggaaaactgggcatgctgccttccacaatacaccactatactcatgattgcaggagggtggcttggggactaggggcaatgacacgggaaggatacaatcattgcccttacttatctttgatcttcttcccatcctcacactgaataatcacttgttcctaccttccct

SEQ ID NO: 4703 - DNA, 289 bp, Homo sapiens
  unsure (11): n=A,T,C or G
ctgggcaggcngtgggtctgcatcccaggagagggacccgaaactgggagacttggagattttatcagggctgtggaggacctgcctttcttctcctccagagatagatgactcattatccagcaacacagaggtcagcaccgacctcaccagcagcaggctcacaggagtggcaggggcattgggagagtgggaggcagcacagggtcagctctttcacgaaaacagagaaacggggcagctctagagtgggagtaggggcacagagaacaggaaggaaaggcggccg

SEQ ID NO: 4704 - DNA, 228 bp, Homo sapiens
  unsure (183): n=A,T,C or G
  unsure (199): n=A,T,C or G
  unsure (221): n=A,T,C or G
cgaggtaaaaaaaaaggggggtgctttgatgttagggctcttggtaggggtaaaaggagggcaatttctagatcaaataataagaaggtaatagctactaagaagaattttatggagaaagggacgcgggcgggggatatagggtcgaagccgcactcgtaaggggtggatttttctatgtanccgttgagttgtggtngtcaaaatgtaataattattantagtaag

SEQ ID NO: 4705 - DNA, 445 bp, Homo sapiens
cgacaccgtaactatccgcactagaaagttcatgaccaaccgactacttcagaggaaacaaatggtcattgatgtccttcaccccgggaagacgacagtgcctaagacagaaattcgggaaaaactagccaaaatgtacaagaccacaccggatgtcatctttgtatttggattcagaactcattttggtggtggcaagacaactggctttggcatgatttatgattccctggattatgcaaagaaaaatgaacccaaacatagacttgcaagacatggcctgtatgagaagaaaaagacctcaagaaagcaacgaaaggaacgcaagaacagaatgaagaaagtcagggggactgcaaaggccaatgttggtgccggcaaaaagtgagctggagattggatcacagccgaaggagtaaaggtgctgcaatgatgttagctgtgg

SEQ ID NO: 4706 - DNA, 348 bp, Homo sapiens
aaacatggttagttgctagtacaaggaatcgtttattggtaacatcttggtggctggctagctagtttctacagaacataatttgcctctatagaaggctattcttagatcatgtctcaatggaaacactcttctttcttagccttacttgaatcttgcctataataaagtagagcaacacacattgaaagcttctgatcaacggtcctgaaattttcatcttgaatgtctttgtattaaactgaattttcttttaagctaacaaagatcataattttccatgattagccgtgtaactcctgcaatgaatgtttatgtgattgaagcaaatgtgaatcgtattatttt

SEQ ID NO: 4707 - DNA, 465 bp, Homo sapiens
ccaaaccaatgagaattaaggaaggctcttccaggccagtttggtcagatgatgactggttgaagaagttttctgggaagacgcttgaagagaataaagaggaagaagggtcagagcctcccaaagcagagacccaggagggagagcccattgctaaaaaggcccgctcaaatcctcaggtgtacatggacatcaagattgggaacaagccggctggccgcatccagatgctcctgcgttctgatgtcgtgcccatgacagcagagaatttccgctgcctgtgcactcatgaaaagggctttggctttaagggaagcagcttccaccgcatcatcccccagttcatgtgccagggcggtgatttcacaaaccacaatggcactgggggcaagtccatctatgggaagaagttcgatgatgaaaactttatcctcaagcatacgggaccaggtctactatccatgg

SEQ ID NO: 4708 - DNA, 367 bp, Homo sapiens; identical to SEQ ID NO: 3183

SEQ ID NO: 4709 - DNA, 501 bp, Homo sapiens
aaaatacataaaattttctaaaacgtaaaatggaaaggtttaatacacaggaaaaacactgcacaccttaactaaacaaactagaaagaaaatatatttatatacagaactaagatgagtccattcattatttttacaaatattcacatagatggtttagagataagtagttaagtgtgtctcattaattaatggatgctttctagcctctgtcttcattaattttatttcctattcaacaaaaaataatgctttcaggatatattacatatagagcaatatcatttttatcagtaatttgtctgaaaaagagaaaaacttaaaagcagaaccctacaaagcaaagcaaactacaaagcaaagagtaatcacagtgtttgcaaaatagaaatgtgtgactttaactttatagcaggctgcctaattaatccagacagtagagaaagcagactgaggcaggaagtaagaggtgggactaaactgttaagaagataataattt

SEQ ID NO: 4710 - DNA, 468 bp, Homo sapiens
aaactcttcagtttacagagaaggatgctgaggacctagatgagaagttacctgcaaaaggcaaaagggttacttagtgtcagaaccaaggcaatgacttctctctcccagatctcctagctactggtcctgggccattttttttttaaataatcccaactttctttaaaagacaagcatttcagtaagctagttattttcatgggttgctcatccatttttttcagtgatctaaaaatgtagggagatggctactactgaagttgtctgtctacttgggataatagcaaattaattgaagacaatgggaaagtaagttataaaaaatactgggaaatctgtttctcttctgagcaagcattcagggcaggtataaacatcaaacatagtgacattgtcaaaacctcttccatttgaacattgattaattcatcaaataaatggtatagtaaaaaaaaaaaaaaaaaa

SEQ ID NO: 4711 - DNA, 417 bp, Homo sapiens; identical to SEQ ID NO: 3179

SEQ ID NO: 4712 - DNA, 437 bp, Homo sapiens
  unsure (415): n=A,T,C or G
aaaactcattaataagataccaaattcaagagattatagttacattgtaaaacgtaatcttcttttaataaaagctaataatgactgatgaattacaaatgcacttatttattggtgattacaaacaatacttaagaacttaagcagcttgagtagtagtttaagctagacagagcaaagaaaattcttgtttaatatatatatatttttaattccagtaatattttcttaaattcctgttaaaaatataatcaatattaaagtcagcaaaatgcctttgactgacgcctggattattttaccacttaacctggttacacagtgatttttttttttttctgtcagatgtaactgacaaccagtttagtctttctttaagataaatgaagtgataactcacattgcagcatcttgnggaaaatattcaaactacattt

SEQ ID NO: 4713 - DNA, 303 bp, Homo sapiens; identical to SEQ ID NO: 3177

SEQ ID NO: 4714 - DNA, 451 bp, Homo sapiens; identical to SEQ ID NO: 3176

SEQ ID NO: 4715 - DNA, 525 bp, Homo sapiens
  unsure (419): n=A,T,C or G
  unsure (471): n=A,T,C or G
  unsure (477): n=A,T,C or G
ctggtggcttcctgatttccgcccacagaaggtatgttcacactgagagagctctcccgccaaggggaggaatcacctgctttaatacatgttgttctcttctgtgctagtgtggtcatccactctgtataaacttatgtgcaacattaagacaaaaaaagggagttgagttgataagatgacttgggaggctctcatagttgtaataactatggaagacagaagaacatgctatcatctttatttttagcactcatatctggacctattactaaaaaagcttcttcattccttccaaccactagattataatggctaaaaagtcttttccttaaatctgatgggtgtaaaaataaaaagtaacagcatttctctagggctctgtttttattttgttttgttcttcctttatagacacnacaaaaacaaggattaactttccaaatactcatggtgcacaagaaggttatntatgcncagtatttctaatttattcaaattcaatttgaatttggtctgaagcta

SEQ ID NO: 4716 - DNA, 507 bp, Homo sapiens
ctgagcacgagtatagcagcattaactttaatctcattggctacattaatgaactttcctaatcctctcaatgccatgcagattttgtggatcaatattattatggatggacccccagctcagagccttggagtagaaccagtggataaagatgtcattcgtaaacctcctcgcaactggaaagacagcattttgactaaaaacttgatacttaaaatacttgtttcatcaataatcattgtttgtgggactttgtttgtcttctggcgtgagctacgagacaatgtgattacacctcgagacacaacaatgaccttcacatgctttgtgttttttgacatgttcaatgcactaagttccagatcccagaccaagtctgtgtttgagattggactctgcagtaatagaatgttttgctatgcagttcttggatccatcatgggacaattactagttatttactttcctccgcttcagaaggtttttcagactgagagcctaagcata

SEQ ID NO: 4717 - DNA, 403 bp, Homo sapiens
  unsure (208): n=A,T,C or G
  unsure (220): n=A,T,C or G
attttaattaatcttttgttttttttttttttttttttagactcaagatatcaatgaaatatgcatatcttatttggagtgtatgattttatagcctccatcttttagttcagttttaagaaaaacagactaaatgatccctgtaatgtttgaatatgttactagctggagttccagaaaatattctggcatgcctttgaactttganagctcatttcgngggtgctctgatttaatgtcaactatgcaaaagccaagtaaatgcaagcactgaatacacaaaggccaaataaatacaagacaggacagaaaataaaatacatgcttaccagtaagaatgataagccttctccaaagaaagggaaaaattccctcatccaagcctcaaggtccaaacctcgca

SEQ ID NO: 4718 - DNA, 372 bp, Homo sapiens
  unsure (25): n=A,T,C or G
  unsure (57): n=A,T,C or G
  unsure (84): n=A,T,C or G
  unsure (91): n=A,T,C or G
  unsure (154): n=A,T,C or G
  unsure (169): n=A,T,C or G
  unsure (248): n=A,T,C or G
  unsure (272): n=A,T,C or G
  unsure (284): n=A,T,C or G
  unsure (334): n=A,T,C or G
  unsure (352): n=A,T,C or G
  unsure (361): n=A,T,C or G
ttttttttttttttttttttttttngggttaaatacaggcttttttttttaatctgnaattgatttacatttgattttaaaaanacactgnttacatcaggtcaccacaaagcagatttacatacaaccttcaattgcggaaaaacaaagtttntttttgatccaaacncaaagaaaaacttctttgggtttttttttaatgatcttttccttgatcataaaaaaagtaaaaaatgcagtacttttanaaggtaaagctagtaagtttacanaagtgcaaaacnccaaaacacttgaagcaaaaacttttttttttttttttaaaaaaaaggtntgacttcttgttttctgntcttggcanaaattttaatt

SEQ ID NO: 4719 - DNA, 292 bp, Homo sapiens
  unsure (240): n=A,T,C or G
  unsure (258): n=A,T,C or G
aagcactttacagtctttgtggcagcagaatatacttgtccatggttcatatcaatgctaaaattccggcagggaaaaaaatgatatgttaagcacccaaatcttcacatggagggggagggggtgggaaaagaaggaaaaaaagggaaaaacaaccaaaataatttaagtaaatgacagattggaaaacagggtttataaaaattattctcttgagtttataaattgttaaactcaatntatagctatgttaaactncgtaagaaccactatactgaaaacaccatttaag

SEQ ID NO: 4720 - DNA, 379 bp, Homo sapiens
ctgatggtcatctttgtttacaagccattacaggtttgaacaaattcaaaattgcctattattaagcctccgcaggagctactgggcataagcaaacctaagattttataacccagcaattatcctatagaaaatagtccagattattatattctgccacacctttattcatacttgactccaaaaagttctcaattattcacagggataatctagaaaataaatattagttttgctttcaaagacattactggaatgagcaggaacctgcatctttgttatattaattaacttattatttagttttcctgtctgcttagaaattggctgtttaggttgaaaaatgatttaagaagcataaactataacacaacaattt

SEQ ID NO: 4721 - DNA, 458 bp, Homo sapiens
gttagtattgactttgtctaaaagaggcttgacttcaactgggataaaaatgtcagtgaattttgttaaagtagtaaaaatgcagttgacttagtaggaacataaaattatttcctaataagataatattgcactcctaccaaataaacaggattttagtaatatctgagggattgttgatggtgagttagactgtatttggcatagaatttggaaatgtaacttgaatgtaaatatgctgcaaaatgttgaatgtatacatagaaagactttttctgtcgacgccaaatgcccgttgtaaatgaaccttaaatattacattcctcctttgcacaataatatttctttataacacttatgattttttcccccaggacaacaaactgcccttaagagtcatttccttgttatcacaggtgtcaatatttttctgtattttgtttataattttatttttt

SEQ ID NO: 4722 - DNA, 428 bp, Homo sapiens
  unsure (349): n=A,T,C or G
  unsure (360): n=A,T,C or G
  unsure (373): n=A,T,C or G
  unsure (377): n=A,T,C or G
aaatgtttttgaaaattgcaattcctacaaataaatgtcatagtgcaaataaatgtcaggatttagagaaggagcctaaactgaatttgtgttatttcagtaaaagttatggagttatgggtctagacgtgttaataagttagacagaactttggcactttagaacaaatgcatgagtggtatttcagttcctaagttacataaaaagtgtgaaagaacactgtgaggtcccagcaacgccagactatattaaggtaagtagaaagtgtttttatagggcttcaatacccaggtggtgacagagcagaagaaccggttttttttttttttttttactactaagcttttncaaaagaagtntctgttttattgnatanaacaagtacagcattttactacatagtatacaagtttttaatgagcattta

SEQ ID NO: 4723 - DNA, 262 bp, Homo sapiens
aaatgctttaatgaaagttatgaatgggatttaacatgggaactatgcatatgcaatatcatatttttcatatcaatgaaaaattccataaaaatagctatattaaatttcatatgtaaatatttaacaaatatgtttgtattcttctatttttatacaatgaatattaatacatattgcatttatttattttaatgacatttatttaagttcaattgtacaaaacctaatttgttgtcaaaagtatcaagcaataaatttt

SEQ ID NO: 4724 - DNA, 625 bp, Homo sapiens
  unsure (580): n=A,T,C or G
ctgagttacaaggactaaaagtgaaaagcattctaaaagtccatgaacactgttgttcacacccttcttcagaacacactaaacttgtctgacacatttctcttcatacatagcaagcaacagcacccaataaaagcctgagaagaaatgctgctgtgtaaatactgcaactattcctgaaaaaagaattatgggatatatactccaaagctgcccattcccataatttgtattgcataggtcacataatcacacacatatatatacacatgtgtgtatatatatgcacatgcaagaatatattaagacgacaatgaagtctagtcacagagcaatttacaggctcaatatatttttttacactttgcttgaaagaaaatttcaatattttacagtctttcagtaggcattatatacactgcactttatgaaatctaaaaggtattgaaataaatttttccaacattttggtaacaaaacaaacaacgtttctccaaatacttgtgctatctacatgatgtttgctctgataatcactaatcacaaaaaactgactcaatggaataattagaaaaattgnctaacaccatgcatgggtttcaatcatttttaatatcctatccta

SEQ ID NO: 4725 - DNA, 428 bp, Homo sapiens; identical to SEQ ID NO: 351
  unsure (55): n=A,T,C or G
  unsure (57): n=A,T,C or G
  unsure (83): n=A,T,C or G
  unsure (85): n=A,T,C or G
  unsure (97): n=A,T,C or G
  unsure (122): n=A,T,C or G
  unsure (130): n=A,T,C or G
  unsure (151): n=A,T,C or G
  unsure (154): n=A,T,C or G
  unsure (158): n=A,T,C or G
  unsure (167): n=A,T,C or G
  unsure (183): n=A,T,C or G
  unsure (190): n=A,T,C or G
  unsure (208): n=A,T,C or G
  unsure (229): n=A,T,C or G
  unsure (245): n=A,T,C or G
  unsure (249): n=A,T,C or G
  unsure (257): n=A,T,C or G
  unsure (274): n=A,T,C or G
  unsure (291): n=A,T,C or G
  unsure (297): n=A,T,C or G
  unsure (303): n=A,T,C or G
  unsure (327): n=A,T,C or G
  unsure (349): n=A,T,C or G
  unsure (381): n=A,T,C or G
  unsure (385): n=A,T,C or G
  unsure (389): n=A,T,C or G
  unsure (391): n=A,T,C or G
  unsure (403): n=A,T,C or G
  unsure (409): n=A,T,C or G
  unsure (412): n=A,T,C or G
  unsure (418): n=A,T,C or G

SEQ ID NO: 4726 - DNA, 582 bp, Homo sapiens
  unsure (453): n=A,T,C or G
  unsure (527): n=A,T,C or G
  unsure (539): n=A,T,C or G
  unsure (541): n=A,T,C or G
  unsure (554): n=A,T,C or G
ctggttctagtcaattctgaaccaccaccccccgccccccgcaaaaagtaaaagtcaaaccaaacttcctcaagctgcatgcttttcacaaaatccagaaagcatttaagaattgaactaggggctggaagaagtgaaagggaagcatctaaaaatgaaaggtgagtaaccagatagcaaaagaaaagggaaagccatccaaatttgaaagctgttgatagaaattgagattcttgctgtcttttgtgcctctacaagctactactcattccagaattcctgggtcttccaagaggattcttaaggtaccagagatttgctagggaaccaaaagtgcttgagaatctgcctgagggcttgcatagctttcacattaaaaaaagaaaaagctagcagatttactcctttttaggggatcatatcaagaaagttagtctggttggaaaccaaganaatggctgatgtctctttcttggaatatgtgaaataaatttagcagtttaactaaatacaaatatatgcattgngtaatccactcnanaattaaacagacnaaaggtatgcttgctttggaatgatttt

SEQ ID NO: 4727 - DNA, 424 bp, Homo sapiens
  unsure (12): n=A,T,C or G
  unsure (14): n=A,T,C or G
  unsure (19): n=A,T,C or G
  unsure (37): n=A,T,C or G
  unsure (74): n=A,T,C or G
  unsure (94): n=A,T,C or G
  unsure (318): n=A,T,C or G
  unsure (322): n=A,T,C or G
  unsure (356): n=A,T,C or G
  unsure (377): n=A,T,C or G
  unsure (418): n=A,T,C or G
attatccaggcntnaggcnacatctgtctagtgttgncttcatcaagaacagactatatactaattcccactanaagctgtccatgccatacanaagatctattaaaaatgttttaaatggaaaatgtactctagaccacaggactaatgtaaattaatatacagtcattcattatttgttgaagttgatagaatttttgaagtgtaaacttgtgtctgaatgttttatttgttctttagctgaagttttgcaatttttatgtcaaaattcaattgctattaaacaagttgagatccagttataaattaaccttgttnttantagatgacatttatttcaataaaagttgcaaatngggcttaatcttaaaattggnggtcatttcaatggttgacatatttggctatttattaaccncctctt

SEQ ID NO: 4728 - DNA, 265 bp, Homo sapiens
ctcaaattaccctccaaaagcaagtagccaaagccgttgccaaaccccacccataaatcaatgggccctttatttatgacgactttatttattctaatatgattttatagtatttatatatattgggtcgtctgcttcccttgtatttttcttcctttttttgtaatattgaaaacgacgatataattattataagtagactataatatatttagtaatatatattattaccttaaaagtctatttttgtgttttgggcattttt

SEQ ID NO: 4729 - DNA, 410 bp, Homo sapiens
  unsure (25): n=A,T,C or G
  unsure (52): n=A,T,C or G
  unsure (88): n=A,T,C or G
  unsure (131): n=A,T,C or G
  unsure (180): n=A,T,C or G
  unsure (213): n=A,T,C or G
  unsure (266): n=A,T,C or G
  unsure (301): n=A,T,C or G
  unsure (316): n=A,T,C or G
  unsure (353): n=A,T,C or G
  unsure (396): n=A,T,C or G
gtcctactgtgcctggctccagttnttttttttttttttttttttttttganacagggtctcattatgtcacccaggctggagtgtantgcaatcacagctcactgcagcctcgacctcctgggctcaagngatcctcccaccttagcttcctgagtagctgggatttcagcccactttntgctgaaagaactgccagcaggtaggaccccanaggcccccaaatgaaagcttgaatttcccctactggctctgcgttttgctganatctgtaggaaaggatgcttcacaaactgaggtanataatgctatgctgncgttggtatacatcatgaatttttatgtaaattgctntgcaaagcaaattgatatgtttgataaatttatgtttttaggnaaataaaaactttt

SEQ ID NO: 4730 - DNA, 539 bp, Homo sapiens
  unsure (456): n=A,T,C or G
  unsure (467): n=A,T,C or G
  unsure (478): n=A,T,C or G
  unsure (482): n=A,T,C or G
  unsure (490): n=A,T,C or G
  unsure (492): n=A,T,C or G
  unsure (505): n=A,T,C or G
  unsure (508): n=A,T,C or G
  unsure (512): n=A,T,C or G
gtgggtgttttctaaatattaataggggggcttgattcaacaaagccacagacttaacgttgaaattttcttcaggaattttctagtaacccaggtctaaagtagctacagaaaggggaatattatgtgtgattatttttcttcttatgctatatccccaagtttttcagactcatttaagtaaaggctagagtgagtaaggaatagagccaaatgaggtaggtgtctgagccatgaagtataaatactgaaagatgtcacttttattcaggaaatagggggagattcaagtcatatagattcctactcgaaaatcttgacacctgactttccaggatgcacattttcatacgtagaccagtttcctcttggtttcttcagttaagtcaaaacaacacgttcctctttccccatatattcatatatttttgctcgttagtgtatttcttgagctgntttcatgttgnttatttcctgnctgngaaatggngntttttttttttgntgntggntttttttttttttttttaacttgggac

SEQ ID NO: 4731 - DNA, 398 bp, Homo sapiens
cgcctgggcaacgacttccacacgaacaagcgcgtgtgcgaggagatcgccattatccccagcaaaaagctccgcaacaagatagcaggttatgtcacgcatctgatgaagcgaattcagagaggcccagtaagaggtatctccatcaagctgcaggaggaggagagagaaaggagagacaattatgttcctgaggtctcagccttggatcaggagattattgaagtagatcctgacactaaggaaatgctgaagcttttggacttcggcagtctgtccaaccttcaggtcactcagcctacagttgggatgaatttcaaaacgcctcggggacctgtttgaattttttctgtagtgctgtattattttcaataaatctgggacaacaaaaaaaaaaa

SEQ ID NO: 4732 - DNA, 627 bp, Homo sapiens
ccatgacatcacgccgtagtggagttggcctggcagtggtcaatggacagctcatggcagtaggaggttttgatggcacaacatacttgaagaccatagaagtttttgatcctgatgccaatacatggaggttatatggcgggatgaattaccgtcggctagggggtggcgtaggagttattaaaatgacacattgtgaatcccatatttggtgaacacagagaagacagtcttgtatatattcctctgtattctggggagctttgaccttggagctttgtacagcttgagaaaacattagaacaaattttattatttgccggtgcctcaacaaatggaaatacaatccaatgaaagtacttcacctgcaagatgcacaataattttcaactctgtgcagaagaatatttatttttggttttaatttatcatggttttttgttgttttcgttttgaacttatccttcctcccacaaaaaaagaaaagaagaaaaaattccaagcagcaaaacttactttgtttgtaaggtattcatttaggtttgaaaatactatttaataagggcagaagggctatatatgatttggctattatttctagacactccatccacatgattccactaa

SEQ ID NO: 4733 - DNA, 410 bp, Homo sapiens
aaaaactatttgtaatgtaattttaatgcattttttacaggcccagtaatggttaaatacgtcagcttactgaataattttaactatttattcttctaaggatacagcttgtctctggattttccagtcttaattttatattttattaatctattttaatgcttgcttttcccatttatagacgttgtagcagtaattgcaagaagttcttgagctgaattcctgttgtgacaacttcctataattacagtagataactttttcttttagtcgtatataacttttctataacttgtgatggacaagagatatgcttatccaataaaataagcttaaatattagatgctcttgggtcaaaatgtccttttaccaaattgacctttttatgagttctttgggtaaatacttt

SEQ ID NO: 4734 - DNA, 516 bp, Homo sapiens
aaagaaggtagataaatttattgccacttgaaaactaaatataactcagatgagtcagacaaaaaaaatcattgacattaaaattattattatttgaccaggtttgtcttttgaagatttctctcacaggcacttctgcaacaaatttgtataatttaatataaatattttgtgattattcttaaaggccaagcaatgggcatttatgatggctaatcataaatacacaataatatatattacatagtatatattaattgacaggttgcattttttctttgagcttatacacttttggaaaaagtctaccttttataaatatcaagttggatattcttgtctgttgcatttgctaaataagagtcaatagttaagaatctgtttcttttatatatgtcggattgtatccatttggaatacagaatcccctgcataaaactagcatgttttgctgaagtacttgttaacttgactctaaaatattttttattttcctaatatatagcatttattttt

SEQ ID NO: 4735 - DNA, 483 bp, Homo sapiens
aaagatattttcttgaattatttagaacatggtaagcctggtattttttaatcaaacaaaatatttatgaaatgggttttctcttaattctggattcatcatggctttctaataccaattgtaatatttacaatattcaccaaaacttagaattttgcaaatgctggaattctgccagtgtttctttgctaagccttgcatgcaaaatttgaaattttaacattggcacccaaaacctacatggaatgtatgtctggagtatttcaaactttacattgaaacataatttccttggaaaacaaaccataagcctgaggaggtttttatcaactggaatgctttatattagtttgtttttcactgtacattcctcattttacattcatttaacctgccgattatttaatttttttattgtaaagtagtttttagcatttgcttttatttttttactttgatgccttttcaaattggcatgtcttt

SEQ ID NO: 4736 - DNA, 376 bp, Homo sapiens
  unsure (91): n=A,T,C or G
  unsure (95): n=A,T,C or G
  unsure (144): n=A,T,C or G
  unsure (192): n=A,T,C or G
  unsure (194): n=A,T,C or G
  unsure (210): n=A,T,C or G
  unsure (216): n=A,T,C or G
  unsure (318): n=A,T,C or G
  unsure (328): n=A,T,C or G
  unsure (332): n=A,T,C or G
  unsure (334): n=A,T,C or G
  unsure (359): n=A,T,C or G
cttttttttttttttttttttttttttttctttttttttacaaacctcaaggttgttttatttaaaccaaataatctgagcaagacatatntacnttaaaaacaaatgaacacattaaaatttcactattttacaattaaattntagcaacatatacaaatactgagtgactacagtacatgccgaggtaananaagtacattctggganaatatnactgacgctcaaaccatttttatttccaatatgtatttcaatacatgtttgtttccacttttcccagtgccacacacacacacacacaaaaacaaaacaaancaaaaaaaancagncncaagttggattacattggaattggngccacagttaacttttt

SEQ ID NO: 4737 - DNA, 222 bp, Homo sapiens
  unsure (79): n=A,T,C or G
  unsure (90): n=A,T,C or G
  unsure (203): n=A,T,C or G
acagaaataaattaaactcttcatcaacaaagacctgtttttgtgactgccttgagttttatcagaattattggcctantaatccttcanaaacaccgtaattctaaataaacctcttcccatacacctttcccccataagatgtgtcttcaacactataaagcatttgtattgtgatttgattaagtatatatttggttgtncccaatgaagagcaaattt

SEQ ID NO: 4738 - DNA, 542 bp, Homo sapiens
aaaaaacaataaaatagtaattggggaaaaaacccttcactctattggtgtctttgtctggaaaactttcccagaatcactaaaattccaggtcaacaggtagtacctgaattattcaagtatactgtaatttgcttccaaatctgttagctgaagagagaaactaaaattttatccaagttaattcagtgcaaatcaaagcttcaagttgaaaatctgagagaaaaaataacgttcgaactgcaggaaatgcttctggaactgaaaaattaaaaaatcacattatgaagaaatctttgcaagtgttcttggtatatgaaatgctgagttaagaaatgggacccttttaagttgcagtgagggttctattatgaagactatttgcaatgtgggcaaaagggaaacagagagggaagagctgaaggttgtatttgtggaaggaaattcaagttaagcaaaaactgcttttattcaattctagaaaaatttggtgagatatatcatacattaggggataaaacagattatggagataaatttac

SEQ ID NO: 4739 - DNA, 417 bp, Homo sapiens
ccattacatcctctttttaatttacataatacagatacttgagaaagttgttgtggtgttgtatgccaagaaaattctttttattggtgcctatattgtaacaattatttttaatgcattgtattttgaagtaacggttcagttaaatttttcacctgctgtgtaactgaaacacaattacagtctataatcatctgtagaagtctggagataattttgcaactcatgttatgggttaaatgaatatttttgtaaaagtaaaagcaacaaatttataaattgattatttgaaactttacaacacaattgcatcccaaatacaaattgtattgcttattcattatagctattcgtcctgtaatctgtttctaggtgaagcatactccagtgttttaggggttttgaaaataaatattt

SEQ ID NO: 4740 - DNA, 355 bp, Homo sapiens
  unsure (11): n=A,T,C or G
  unsure (223): n=A,T,C or G
  unsure (224): n=A,T,C or G
  unsure (242): n=A,T,C or G
  unsure (245): n=A,T,C or G
  unsure (298): n=A,T,C or G
aaaaaaaagtncgagtctgttgcactaggctgtacatgactaaagttgacagatgctatgctagatttataatcactagttctggtacttgtgtctttgtatgatcaaagcatgcaataagcaatacaaaataccaagccttatacttaaaagaagtttaacatattggttaatatactggttaatatactggttaaacatattgaatgtatataagtggcannactagatttttaaggaantgnacattataatattggagctcagtactgcatgaagagacttcattaaaactaanaaaacatttatttggggagaaattttaggcatttaagaacttgtatttttctatttt

SEQ ID NO: 4741 - DNA, 342 bp, Homo sapiens
ccacttgtgtgggtcctcacaagcaaagagagcactaaacttgacattgggagtccaccactccaactttgctttctgaaggttttggtgtacattgagccccagaaggaaaggagagtatctgtgagtgggggcctcccttgaccccagtacgaagtctatgccctgaatccccagagtagcccttcctggtgcccaactggcctggggacaaacagcgtccactacatctaggactgccggctaagtggacacacttcttgacctcctaccaggaactttggtaaaagctagctttggggaaggggttgggtgtaaatatgagagggtggagggagacca

SEQ ID NO: 4742 - DNA, 236 bp, Homo sapiens; identical to SEQ ID NO: 3153

SEQ ID NO: 4743 - DNA, 303 bp, Homo sapiens
aaaaacaggacttgtcactttatataaaagaatagtatgctctatttcctgaatggatgtggaaatgaaagctagcgcacctgcactttgaattcttgcttcttttttattactgttatgattttgctttttacagatgttggacgattttttcttctgattgttgaattcataatcatggtctcatttcctttgcttctttggaatatttctttcaacacattcctttattttattatacattgtgtcctttttttagctattgctgctgttgttttttattctatttacaggatgattttt

SEQ ID NO: 4744 - DNA, 596 bp, Homo sapiens
  unsure (382): n=A,T,C or G
  unsure (526): n=A,T,C or G
  unsure (568): n=A,T,C or G
aaaaaataagtatacttgctagtactatcttcactcttttttttttcagaagccaatgttctctaaatctgcagcttcattccacagctttacagaatcataatctcttgaatatatttccaatgttattaaaaaataaaaaatcatacaagatatatttagcacattaaaacttaagaggttacagtataactgtccagacctccaggtaccactgaatacttttccagtacaaagaggccaatatgttagaataattaattctctgtatttacttttattaaaaagaggtttttggtagtaagaacaaataatctctcatttgttgcctgaaatcctaaaataggatcattggtttctaggcttgctacttgctgcttancaacctgtcctacttgcctgccttcctttctgttgtaaagtacagtggacatgggagcaggctgacgatagatgaatactcgacgaaggcactcacaaagggctgcatacgagtaatttggagcacaggcaaaaaattttttgnctctctttgatgcttggacatagcctaaagcattgaaaggtngcgatgtgctcccacatatcatcttgtt

SEQ ID NO: 4745 - DNA, 228 bp, Homo sapiens; identical to SEQ ID NO: 3151

SEQ ID NO: 4746 - DNA, 328 bp, Homo sapiens; identical to SEQ ID NO: 2874

SEQ ID NO: 4747 - DNA, 491 bp, Homo sapiens
aaaatagctttaaatgcattcttcacaagtaattcagcatatatttttatatcatgtttacttatgcttaagaattaaagcaagtatatttattactctgatggaaatatgggaaatctctcattcatgcaatatacagggataatattcaagcgaagggaaaattcccgctttttatttttgtaaatgtatccatatataatcatcgacatgacagatgaggaaacccatgaagtttcccactagtcagatatacattttcacttcatcagaagcacctgatatctacagctaatttataattagatactgtttcaatgaaaccaaaatgagccctacaagttcctataaacaaaagcttccaatgtactaggacagtcagtaattaatgcatcattcagaggattatggctgttccttaagaagtgcaagttcaaacctgtcaacaccagaggtaatcattttatattaatttatacgtaataccattt

SEQ ID NO: 4748 - DNA, 196 bp, Homo sapiens
  unsure (184): n=A,T,C or G
aaaatggttgaaaagaattcaaagaataataatattttgggacatgttaaaattatgtgaaattcaaatttcagcatccataaataaagttttattgaaacacagccaaaaaaaaaaaaaaaaaaaaaaaaaaaaaaaaaaaaaaaaaaaaaaaaaaaaaaaaaaaaaaaaaaaaaaaaaaacnaaaaaaaaaaag

SEQ ID NO: 4749 - DNA, 594 bp, Homo sapiens
  unsure (483): n=A,T,C or G
  unsure (536): n=A,T,C or G
  unsure (584): n=A,T,C or G
ctgctgacagttctttggtggaaaagtaagttgcgtacttacccaagctgcccaaatgattatcaagccaagtttgtttttcaaaaataggttttaagatacaccaaagaaactatacaatacaaaaatttaacaatgaagttaaagtatatagcaaaagccaaatatgacaacacacatgtataatgtagaaaagaatcctttcagtcctagaaaactaaaatggggagaacttactgaagggtaacatacataaaatgagtactaatagcaaggaataatcctaaacattttcccaataaactgactaagcctcaaaaggacagcttaggaaaatgattaacatgcagtttttcttttttcctagccaattcagttctacttagataaatctggttgccaatcaatacatatataaattaatttttttctgctcaattactaccattttttctttttcaccttttccccaattttctctancaacacttttcctttggtttgatcagttgaactcaaaaggtttggtacctaanatgagtatcaactgttattgcaatagcacttgggaaatgcaatcctanaaaggcgaat

SEQ ID NO: 4750 - DNA, 625 bp, Homo sapiens
  unsure (621): n=A,T,C or G
ctggggagatggtgtttgtatatgaaaatgcaaaagaaggagctcggaatataagaacgtcagaacgagtgacactaatagtggataacactagatttgttgtagacccatccatttttactgcacagccaaatacaatgttgggcaggatgtttggatctggccgagaacataactttacacgacccaatgagaaaggagagtatgaggtggcagagggaattggttccactgtgtttcgagcgattctggattactataaaacaggaataatccgttgtcctgatggcatatctattcctgaactgagagaagcatgtgactatctttgtatctcttttgaatatagcactattaaatgtagagatctcagtgccctaatgcatgagttatcaaatgatggtgctcgtagacaatttgaattttatctggaagaaatgatcctccctctcatggtagctagtgcccagagtggggaacgggaatgtcatatagtggtgcttacagatgatgatgtggttgattgggatgaagaatatccaccacagatgggagaagaatattcacaaattatttatagcacaaaattatatagatttttcaagtatattgaaaacaganatgt

SEQ ID NO: 4751 - DNA, 414 bp, Homo sapiens; identical to SEQ ID NO: 3146

SEQ ID NO: 4752 - DNA, 373 bp, Homo sapiens
aaagtttatttcctttgtggatacaacattatttttacaaaaatgcaaattgggaggaaaaactaaggctagagaatatatcttctacttcttggcaaagcatgtttactattggtcaatgttattatttgactctatattgccaaagggataatcggggagaaggtcataggaattttcatccttctttaatagcagacattaaagatgtctcctattataaggagttatgtgaggtcagctaaaactaattatttgaggtcatacaaatgactcaaaattcttagagaaaccatgggtttggagaggaatcctcatatatatttcagaagaggagaaaaaataagatagaaataagatcttgtattttttt

SEQ ID NO: 4753 - DNA, 368 bp, Homo sapiens
aaaagatttacatgttcatatacaatttataaagttaaaaattctctgtacaaaatcttacatgtacagagtttatataagccccattcttatggctgtatcaccacacagatttgcttaaaactataatactacaaacactcgggttcttcatattcaatcttggcacccatatagcaatacactattctgaaatgtaaattacaaaggaaataaaatgtaatcatgcagacattttttaatataagaaaatgcgataaaatatactacaccagatcaacatttatcaattccatagatactgagttttcaacttactgcactgttttcatataagtacatgcaaaactagcagattatggattttt

SEQ ID NO: 4754 - DNA, 356 bp, Homo sapiens
ctggtgttcagcctctcaacagcaaaccatgagactacataactatcaggttttcacttcactttcttctcttctgtctaaataatcacaatgcctttaggcttataaaaagcatctaatcattacagtgtcttatcctttttaatgttctttccttttattaaactgtggcaagactgaatgtttaggaaaggtagcaatgttttggaggtaattttatttttgtataaatttatgattagaatattaagtcattgattgttaaagtaattatctaaatagaagatgttggattacaaaagaaaatgggagttaacatgattgcatgtcaaaatgtgggaaattgctggagttgg

SEQ ID NO: 4755 - DNA, 548 bp, Homo sapiens
  unsure (324): n=A,T,C or G
  unsure (409): n=A,T,C or G
  unsure (496): n=A,T,C or G
aaatggaaagttactattataaggttaatttgcagtcctcttctaaatagaaaaccatatccttggctactaacatctggagactgtgagctccttcccattccccttcctggtactgtggagtcagattggcatgaaaccactaacttcattctagaatcattgtagccataagttgtgtgctttttattaatcatgccaaacataatgtaactgggcagagaatggtcctaaccaaggtacctatgaaaagcgctagctatcatgtgtagtagatgcatcattttggctcttcttacatttgtaaaaatgtacagattaggncatcttaattcatattagtgacacggaacagcacctccactatttgtatgttcaaataagctttcagactaatagcttttttggngtctaaaatgtaagcaaaaaattcctgctgaaacattccagtcctttcatttagtataaaagaaatactgaacaagccagtgggatngaattgaaagaactaatcatgaggactctgtcctgacacaggtcctcaaagc

SEQ ID NO: 4756 - DNA, 385 bp, Homo sapiens; identical to SEQ ID NO: 3139

SEQ ID NO: 4757 - DNA, 547 bp, Homo sapiens
  unsure (521): n=A,T,C or G
gtcgatttgggaggaaaggtgtggctataaactttgttactgaagaagacaagaggattcttcgtgacattgagactttctacaatactacagtggaggagatgcccatgaatgtggctgaccttatttaattcctgggatgagagttttggatgcagtgctcgctgttgctgaataggcgatcacaacgtgcattgtgcttctttctttgggaatatttgaatcttgtctcaatgctcataacggatcagaaatacagattttgatagcaaagcgacgttagtcgtgagctcttgtgaggaaagtcattggctttatcctctttagagttagactgttggggtgggtataaaagatggggtctgtaaaatctttctttcttagaaatttatttcctagttctgtagaaatggttgtattagatgttctctatcatttaataatatacttgtggactaaaagatataagtgctgtataaaatcagccaattatgttaaactagcatatctgcctttattgngtttgtcattagcctgagtagaaagg

SEQ ID NO: 4758 - DNA, 268 bp, Homo sapiens; identical to SEQ ID NO: 3137

SEQ ID NO: 4759 - DNA, 283 bp, Homo sapiens
aaaccaatccaatatacagacctttgaaagtaaaagatcaactgcacagatattttttaactaaagaatgtgtcagtaaatctatgtaaatatccaaattgacacaaattttctaaagagttaaaattattaaatttcaaattattattttatatacttttgatcaaaatataatatttgcttcaccataagttgaagatattaagaaaacataatctaaggtttattacaaaaaataatggcctctgatagatatacagagaataatatattcttaaatttt

SEQ ID NO: 4760 - DNA, 592 bp, Homo sapiens
  unsure (526): n=A,T,C or G
aaaaatccatgttcaacccaaacccactccccaaccctaactataggagatgaccctttaggaagctgaaaaggtttttataaagtcacaaaatgcatctcaatgcaagtttatataatatcaaaattatctcactgattttaatgtgtaagttatataatttatttcacccaccttgtattattctagaaaataagtcagcttttatatttaacaaatatgtgcaaaaatcataaacatagcttatagaaatataaacagatatctaattacaaagtttccgatctacttcgctaaaaggcccaagtcccctttttcttttatttataactttattttaagcagtctctccctgtcaaacttacctgtatgttttcgagaatgagtgataagagaactagagacagcaaatgccttcccacaggtatcacatacataaggcttttctccagtatacctacggacatgataggtcagtgtgctggcttgagcaaatctctgtccacacctatcacagacatatggnttctctccactatgcttccttgcatgaatcttgagattgctagaagttgcaaactgtaagttgcat

SEQ ID NO: 4761 - DNA, 139 bp, Homo sapiens
  unsure (126): n=A,T,C or G
  unsure (128): n=A,T,C or G
aaaactcttctaactgccatagcaccagcctccacaaaatacttcagacacatatcatcaattccaccagtggttagaataacattggcaccagctttttttttttttttttttttttttttttcngnggaaatttttt

SEQ ID NO: 4762 - DNA, 181 bp, Homo sapiens; identical to SEQ ID NO: 3134

SEQ ID NO: 4763 - DNA, 408 bp, Homo sapiens
  unsure (283): n=A,T,C or G
ctttcccagaattagttgtatagggttggcccaagagatgtaagaaaaatctcgcattgctccctaagcaccctgggccttattaaagagcaacttctatttccagtcgggggagtaacactaaagctacaagaaatatgtaataatgataggtaataatgtgttccaaagctttttcaaactagaataaggaggcaaatagaagaatgagatactgatgtccacagttcattggcagaatctaaccccttctgttatcttttttaatactatttttgtttanatagaagtttcaaagaagataaaaatgcttgaagagcctgagagtaaaaagattatgctgcaaagctatgatataaactgctcttgcagtccaaagggatacctgattaaagaagtttcttattt

SEQ ID NO: 4764 - DNA, 330 bp, Homo sapiens
  unsure (35): n=A,T,C or G
  unsure (44): n=A,T,C or G
  unsure (63): n=A,T,C or G
  unsure (134): n=A,T,C or G
  unsure (138): n=A,T,C or G
  unsure (178): n=A,T,C or G
  unsure (231): n=A,T,C or G
  unsure (241): n=A,T,C or G
  unsure (281): n=A,T,C or G
  unsure (307): n=A,T,C or G
  unsure (317): n=A,T,C or G
ttttttttttttttttttttttttttttacaagcnccaaactanaaccaaatttatttatcanaattattgagttggatgaaacagaaaataagccaacagaacacttaaaaatacaagtttattttctccatnttgntaagtctaattatgatttatttcaaaatcatgaaaagcanagcctagcataccaaatgctaggtcaaatttgctctggaaacttactttctanattatttttnggacttacttaaaaaataattaatttccattaatatagcnctaatagcctccaaattatactgcanaattcctatntgtaacctttttt

SEQ ID NO: 4765 - DNA, 336 bp, Homo sapiens
  unsure (11): n=A,T,C or G
ctgctatctancaagaaaaccaaggtcccttaatatagtctaaatataatgtgtggcttattatagagaaatctttagcaacgtaagtttaaccagtaagtgtcacaactgatcaacagtacttaaaaggaaacaaacaaaaatcacactagccacaaatttccaccatatacacatgaaattaattttaatctgttttgactccttgacactaactgatcattaatgaaatatgatatggaaagatcacagagtagaaaacaagcaaagattagtttatacaacagtgactatatacatcagagggaaaacatgctagctaatgcaacattaagg

SEQ ID NO: 4766 - DNA, 524 bp, Homo sapiens
  unsure (505): n=A,T,C or G
aaatttgaggtggtcttaagaataacaaatgaacagaattccaaatttttgaaataggtgaactgctgcagttacgggtatacatttaggaaaactgtatagctcttacaagaccagcaatgtaactttattttgtacatttttgaattgaaaatataaacaataattaaaaaataaaaagaaaatacagcataataaaaaacatacgcttctcaattaaatgtactggatacatataaattttaagggaagaagcaaaaaaggaaaatgattgatatttaagtgcagactgactacctagacaaaaaaaaaaagacttaaaaaaatatcataaaacctctagttcttctatgactaatatccatatggttggagtatcgtcactatggaagtgattttgttatgtttgcatatgttacactttactggtaatttacatgatggcttttaaggccctgggagacatggtttttggaaacaagattggataaaaatcactgctaanacgcaatacaccttatttt

SEQ ID NO: 4767 - DNA, 238 bp, Homo sapiens
gctgttttaagttagaaaactgaatagcaacactgaatactgtagaaatgcactttgctcagtaatacttgagttgttgcaatatttgattatccatttggttgttacagaaaaattcttaactgtaattgatggttgttgccgtaatagtatattgcctgtatttctacctctagtaatgggctttatgtgctagattttaatatccttgagcctgggcaagtgcacaagtcttttt

SEQ ID NO: 4768 - DNA, 431 bp, Homo sapiens
ttaaatgctatgtgttaatatttcacttgcttgtattagaaaggcaaaatgtaagactttggtatgtgtgacatatgctttatttggctttattttacaagcacagtatctgcaaaaaacaaagtaaccttttttcatacctgccagttttgaatttatatatgttattgaacaaatagtaatagaggattcgctgttgaaacaagttgtccaagcaatgttatattcatttttatacttattgggaaagtgtgagttaatattggacacattttatcctgatccacagtggagttttagtaattatattttgttgatttcttcattttgttttctggtataaaagtagagataatgtgtagtcacttctgatttagtgaaaccaattgtaataattgtggaaatgttttgtctttaagtgtaaatatttt

SEQ ID NO: 4769 - DNA, 623 bp, Homo sapiens
cggagagactcaagatgattccctttttacccatgttttctctactattgctgcttattgttaaccctataaacgccaacaatcattatgacaagatcttggctcatagtcgtatcaggggtcgggaccaaggcccaaatgtctgtgcccttcaacagattttgggcaccaaaaagaaatacttcagcacttgtaagaactggtataaaaagtccatctgtggacagaaaacgactgtgttatatgaatgttgccctggttatatgagaatggaaggaatgaaaggctgcccagcagttttgcccattgaccatgtttatggcactctgggcatcgtgggagccaccacaacgcagcgctattctgacgcctcaaaactgagggaggagatcgagggaaagggatccttcacttactttgcaccgagtaatgaggcttgggacaacttggattctgatatccgtagaggtttggagagcaacgtgaatgttgaattactgaatgctttacatagtcacatgattaataagagaatgttgaccaaggacttaaaaaatggcatgattattccttcaatgtataacaatttggggcttttcattaaccattatcctaatggggtt

SEQ ID NO: 4770 - DNA, 410 bp, Homo sapiens
aaagtatttacccaaagaactcataaaaaggtcaatttggtaaaaggacattttgacccaagagcatctaatatttaagcttattttattggataagcatatctcttgtccatcacaagttatagaaaagttatatacgactaaaagaaaaagttatctactgtaattataggaagttgtcacaacaggaattcagctcaagaacttcttgcaattactgctacaacgtctataaatgggaaaagcaagcattaaaatagattaataaaatataaaattaagactggaaaatccagagacaagctgtatccttagaagaataaatagttaaaattattcagtaagctgacgtatttaaccattactgggcctgtaaaaaatgcattaaaattacattacaaatagttttt

SEQ ID NO: 4771 - DNA, 481 bp, Homo sapiens
ctgtagaaagagcgagagagatggttaaaatgccattaaggaaagctccttgtttagaatctttaagatagagctatatgtaaccatcactattcagccatttttgacctacaaaaatggtcacttcatatggtccaacacatttggtgagaatccttaagaagtggagggcttttcctttgggcaataatttagaggtgatcccaaacctagaaatctaataatatatctagattcttctctcacctcttctacttctactctttctactttgaaagattttcaaagtagaacacctgtcacagaacggatgtaagttaattttcatagaggagtccctctatttcatagaggaatttgtgtatatacccaacttttaataaatgaggccacagttaatcatttatatttctggaatgacttgctacttctctaattctcattcgtccttactagggagtgtgtcctaacaatttggttt

SEQ ID NO: 4772 - DNA, 596 bp, Homo sapiens
  unsure (583): n=A,T,C or G
aaaggttttgtatgtgtgtatgtatgtgtaaatagcaataaaagaaagattcaaaagtttgctaagttttttctttttaagccctttaagtaatgatataactagaaactacgtttcatctcaaaggaaaaaccacaggtgatatattctcatgcttcaggttaaaaacctctcttaaaaggctaggtttgcgaaagccttcctaaaattatgcttctgttgttactatcaatttgatattcagccagaaaaattaaaaataattattaatcccaaagcatactttcaaaatttctactaagaattatattaaatcaaaccaaactacaattttagagagatcaaactgagtaggagagagcatggtatgaaaatttactctccctttcatctaagccacacactataggtctcaataactatacaattactcttgtaattgactgatttctttacacctaaggatcattataacctgccatattagtttaatttaacataaaatcgtaatacagaaatttggtcacagtaggggatatctagatttcttctgcattgaaaagaatggtttccatttatctgngtttacaaaaaat

SEQ ID NO: 4773 - DNA, 386 bp, Homo sapiens
cgggaacagcaagcacaattctgtactttggttataccatgataatggttttgatcttctttctttttacaggaacaattggcttctttgcatgcttttggtttgttaccaaaatatacagtgtggtgaaggttgactgaagaagtccagtgtgtccagttaaaacagaaataaattaaactcttcatcaacaaagacctgtttttgtgactgccttgagttttatcagaattattggcctagtaatccttcagaaacaccgtaattctaaataaacctcttcccatacacctttcccccataagatgtgtcttcaacactataaagcatttgtattgtgatttgattaagtatatatttggttgttctcaatgaagagcaaattt

SEQ ID NO: 4774 - DNA, 497 bp, Homo sapiens
gtcaccttcgtgaataccaagacctgctcaatgttaagatggcccttgacattgagattgccacctacaggaagctgctggaaggcgaggagagcaggatttctctgcctcttccaaacttttcctccctgaacctgagggaaactaatctggattcactccctctggttgatacccactcaaaaaggacacttctgattaagacggttgaaactagagatggacaggttatcaacgaaacttctcagcatcacgatgaccttgaataaaaattgcacacactcagtgcagcaatatattaccagcaagaataaaaaagaaatccatatcttaaagaaacagctttcaagtgcctttctgcagtttttcaggagcgcaagatagatttggaataggaataagctctagttcttaacaaccgacactcctacaagatttagaaaaaagtttacaacataatctagtttacagaaaaatcttgtgctagaatacttttt

SEQ ID NO: 4775 - DNA, 539 bp, Homo sapiens
aaaatactggcactttaagaaaacgataatctcgaaaaccacaaaattgccaaattgttccctaaactcctaagcagataaacatgactaatgaatgagtttgttttgtaaagaaaaatcattcaaataaattgaataattcatactgagatgcaaagtttgtcttctttcttcctatctacttggatttataaaggggcaaaccgtaatataggaaaatataccctattttgaatgtggcatctttgtttgaaaagctggcccaattaattaaaaatacttgtaatggaaagtctcgtttcctgagcagtccatatttagataaatgggaaaagacatctatagccagcattttcatagtcttcactgagactaatgtcaacaaaaaatttaatgtggcagtcttgtattttaagctcacgcttttggggatacattctcaggtcttctttaatgtgggaactgcaaaatataactgccattacatggtaatgggagttaaagaatagagtcctcatgtaaaggttagaacatacttt

SEQ ID NO: 4776 - DNA, 544 bp, Homo sapiens
  unsure (513): n=A,T,C or G
ccagaggtagccggagtgtgtcacagcccctcagatgcctttccttccacctttttttattttttaagaatcccaaataactcactgaagtgtctcaaaggcgaacaagttttaccaaaatgaatcctttttcagttaacagatcaaatggatgagttctgagcctctcaagttcctttccccagttagagtggggaactgggcaagtgttaactgtgggactcactgcagcgtcctatcctaaaggcacgagaagacggaaatgcaacctgcggagctgggcttggttcccaggtcacagtttggcccccgctacaggatgctgccctgctcagagagagatttaatagggagctgaaggaatcgttagggggccagggagatgtgactgaggctggctttccacgtgaatgagacggggtcggtggagggtttggtgctacagccagtcagaagatttgcaaatgcgaacacattcctgtgtgaggcatgttaccctttgtcagttattgngaatatgtgtattttaagcaataagattcag

SEQ ID NO: 4777 - DNA, 585 bp, Homo sapiens; identical to SEQ ID NO: 207

SEQ ID NO: 4778 - DNA, 253 bp, Homo sapiens
ctgaagcccgaggcagggttggtgtgatgccaaggcaaagtggtgaggagaaaacaggaaacgggctttctctgaattggtaaatgggaaagaagtgagcaacttaagattgtcacaattaatcacaagtgtacaggattagactgggtttatatttaactcttgcttcataggtgtaccatttaaagagtgttatttaatgctaagtttaactgctttaataaagtttatttttaaatatcttaaaaaaaaa

SEQ ID NO: 4779 - DNA, 144 bp, Homo sapiens
aaatatcggccaccactttcatgaggctgaatgggattcagcaattaggagcgttgcagggaagtgtggcagggcagaggtgggacaaattgcagatccctgtggggtcccttggttaggtgacaattagtctataaaacacag

SEQ ID NO: 4780 - DNA, 173 bp, Homo sapiens
ctgtggaggggacactgtctttgaggcatcactggttccacaaaaggtaggggaaggtcttgagggaccaccccatgccctcattaatcaaccagaagcttggcccggagcagcagcggggattccagtagctgtgggcatacaggatgctagggcggccacaacccaggcag

SEQ ID NO: 4781 - DNA, 534 bp, Homo sapiens
  unsure (211): n=A,T,C or G
  unsure (311): n=A,T,C or G
  unsure (402): n=A,T,C or G
  unsure (406): n=A,T,C or G
  unsure (480): n=A,T,C or G
  unsure (482): n=A,T,C or G
  unsure (503): n=A,T,C or G
  unsure (505): n=A,T,C or G
  unsure (507): n=A,T,C or G
  unsure (522): n=A,T,C or G
  unsure (525): n=A,T,C or G
aaaacaaatacaagttattgattcactcttctcaacttgacagtctacctgtggtataactgtcaggtaaaaacatacatctttacaacttggtggtcccaagttaaaaaaaaaaaaaaaaaccaacaacaaaaaaaaaaacaccatttcacagacaggaaataaacaacatgaaaacagctcaagaaatacactaacgagcaaaaatatntgaatatatggggaaagaggaacgtgttgttttgacttaactgaagaaaccaagaggaaactggtctacgtatgaaaatgtgcatcctggaaagtcaggngtcaagattttcgagtagggatctatatgacttgaatctccccctatttcctgaataaaagtgacatctttcagtatttatacttcatggntcanacacctacctcatttggctctattccttactcactctagcctttacttaaatgagtctgaaaaacttggggatntngcataagaagaaaaataatcncncntaatattcccctttntgnagctacttt

SEQ ID NO: 4782 - DNA, 463 bp, Homo sapiens
ccacggtgttccttatgttataaatgtcactctgcccgatgaaaagcaaaactacgtacatcgaattggcagagtaggaagagctgaaaggatgggtctggcaatttccctggtggcaacagaaaaagaaaaggtttggtaccatgtatgtagcagccgtggaaaagggtgttataacacaagactcaaggaagatggaggctgtaccatatggtacaacgagatgcagttactatctgagatagaagaacacctgaactgtaccatttctcaggttgagccggatataaaggtaccagtggatgaatttgatgggaaagttacctacggtcagaaaagggctgctggtggtggaagctataaaggccatgtggatattttggcacctactgttcaagagttggctgcccttgaaaaggaggcgcagacatctttcctgcatcttggctaccttcctaaccag

SEQ ID NO: 4783 - DNA, 106 bp, Homo sapiens
ctgtttgtgtatggggactgtgacggaaacagcaataattacctgaccaaggaggagtgcctcaagaaatgtgccactgtcacagagaatgccacgggtgacctgg

SEQ ID NO: 4784 - DNA, 386 bp, Homo sapiens
cagtgcctcagttgctgatcagtgtgttttttgtgtccaattcttttatcaccaaaaaagagaagaaatattgcagtgaatgaagattcctctgcattttagcactgctttttcaactgtagttggcttttgaatgaggatgacaatggaagagatgaagaatgaagctgagaccacatccatggtttctatgcccctctatgcagtcatgtatcctgtgtttaatgagctagaacgagtaaatctgtctgcagcccagacactgagagccgctttcatcaaggctgaaaaagaaaatccaggtctcacacaagacatcattatgaaaattttagagaaaaaaagcgtggaagttaacttcacggagtcccttcttcgtatggcag

SEQ ID NO: 4785 - DNA, 213 bp, Homo sapiens
ctgtacatatgtggataagctgattaatggttttgcaactgtaatagtagctgtatcgttctaatgcagacattggatttggtgactgtctcattgtgccatgaggtaaatgtaatgtttcaggcattctgcttgcaaaaaaatctatcatgtgcttttctagatgtctctggttctatagtgcaaatgcttttattagccaataggaatttt

SEQ ID NO: 4786 - DNA, 393 bp, Homo sapiens
  unsure (110): n=A,T,C or G
  unsure (133): n=A,T,C or G
  unsure (202): n=A,T,C or G
  unsure (220): n=A,T,C or G
  unsure (224): n=A,T,C or G
  unsure (230): n=A,T,C or G
  unsure (240): n=A,T,C or G
cctgtccctgcagacatgagagacagcaggtctcatgggggtgacaagcttttttttttttttcttaaagaattttcaaaatcaaattccagaatgattttacggagatntcccaggaaaattaaggcttctnttaaacactaaaaaggcatgtaattgcttgttagcaaaatggatatgacacatctctgatacttttttnattattggttgggctgancagncaaaanacctggtcgncgtcttgactttggcaaatgagccggagccccttgggcaggtcacacaacctgtcccagcgagggacaccgagtggcccttcatgtacatccatggtgtgctggcttaaaatgtaattaatcttgtaaatatactcctagtaatttaagattt

SEQ ID NO: 4787 - DNA, 244 bp, Homo sapiens
  unsure (10): n=A,T,C or G
aaacacaaantagatatagatgctaatggtggctaatctggtatgtttcttatagcaaactgttgttcatgcaacacttgtgctcaaaggggaaggcacaggatttcctacaatgagccaccttataaagagttctttttgtacaaattaatttatgtcacatttaatttagtgtgcataacctcaaaactgaggtactattccaatttataaaaaccacttgcataacttttatgcaagtttt

SEQ ID NO: 4788 - DNA, 358 bp, Homo sapiens
agaagagtcaagggcacgagcatcggccatgcctttcttggacatccagaaaaggttcggccttaacatagatcgatggttgacaatccagagtggtgaacagccctacaagatggctggtcgatgccatgcttttgaaaaagaatggatagaatgtgcacatggaatcggttatactcggacagagaaagagtgcaagatagaatatgatgatttcgtagagtgtttgcttcggcagaaaacgatgagacgtgcaggtaccatcaggaagcagcgggataagctgataaaggaaggaaagtacacccctccacctcaccacattggcaagggggagcctcggccctgaacagagcag

SEQ ID NO: 4789 - DNA, 452 bp, Homo sapiens
cctatctggttggcctttttgaagacaccaacctgtgtgctatccatgccaaacgtgtaacaattatgccaaaagacatccagctagcacgccgcatacgtggagaacgtgcttaagaatccactatgatgggaaacattccattctcaaaaaaaaaaaaaaatttctcttcttcctgttattggtagttctgaacgttagatattttttttccatggggtcaaaaggtacctaagtatatgattgcgagtggaaaaataggggacagaaatcaggtattggcagtttttccattttcatttgtgtgtgaatttttaatataaatgcggagacgtaaagcattaatgcaagttaaaatgtttcagtgaacaagtttcagcggttcaactttataataattataaataaacctgttaaatttttctggacaatgccagcatttggattttttt

SEQ ID NO: 4790 - DNA, 548 bp, Homo sapiens
  unsure (458): n=A,T,C or G
  unsure (488): n=A,T,C or G
  unsure (493): n=A,T,C or G
  unsure (510): n=A,T,C or G
ctggtagtgtttcggatcttcagggaatagggcctttcattgggggcgtcgaaagaaccattttgccccttctgatgatagtgctgtcccctgaggtggtcttcctggggtgtctccatcctctcttcaccaccctccaataactgtgaagaaggaatcagagcgcatcacggtccactgcaagcactccaactcgacaccaatgtttccattttgttttcagaagatccagcctcaacttatgtttgtaaaacaagacgtgatgcttttgtgtgtgtgtgacctctgggggaggaaagatctatgaaaattcccaaggctacatcttcggaatatatcaggactacatctcatgattctatcataagtatcccaatttccaccctatattagggagagagagtcactgttgatgacagtgatatgctgtgtgtgaatcttgctggattatattttgngtctatgtatacatgtatagataggactgntctgnattaaatgttctcttgntttcttcagataccaactcacccactgaatgattccta

SEQ ID NO: 4791 - DNA, 237 bp, Homo sapiens
  unsure (18): n=A,T,C or G
ccttcccatcagcacagntcgtgaggtggctttactgaggcgactggaggcttttgagcatcccaatgttgtccggctgatggacgtctgtgccacatcccgaactgaccgggagatcaaggtaaccctggtgtttgagcatgtagaccaggacctaaggacatatctggacaaggcacccccaccaggcttgccagccgaaacgatcaaggatctgatgcgccagtttctaagagg

SEQ ID NO: 4792 - DNA, 224 bp, Homo sapiens
aaaatgaatcaattttattccaattcttcaaaatttatacgtaatatgttgtttccaaaatgtaagtcaccctttatataatagttttattatttcatctttctttgatagttttttttttcatcttttctttatggttcttcagtagaagccagaatcttgagttgcccagttaggagcctctgacctgctattctgattaagtttcttctcaatattcatgg

SEQ ID NO: 4793 - DNA, 623 bp, Homo sapiens
  unsure (514): n=A,T,C or G
  unsure (530): n=A,T,C or G
  unsure (553): n=A,T,C or G
  unsure (591): n=A,T,C or G
  unsure (599): n=A,T,C or G
aaactagtaatagaattttctgaagaatatccaaataaaccaccaactgttaggtttttatccaaaatgtttcatccaaatgtgtatgctgatggtagcatatgtttagatatccttcagaatcgatggagtccaacatatgatgtatcttctatcttaacatcaattcagtctctgctggatgaaccgaatcctaacagtccagccaatagccaggcagcacagctttatcaggaaagcaaacgagaatatgagaaaagagtttcggccattgttgaacaaagctggaatgattcataatagacaactggtctgttaatctttttcatcattgttgtgtataatttacctctcattagaaaggctaacaaattttaagtgccacaggttttaaggattctgcagaaaaaaaagaaaaaagtccttcagtttagaacctacaaaagcttgtgtatcttgattaatgtactttttattgcatggtgtgaactaagttattgctgcataaatttgnaatatatcctgtttgnatttttttccaagtgtataatgntggtgtggagttttcatgacagaatatacacattttgnaaatctgnacttttttcaaatattgaatgcct

SEQ ID NO: 4794 - DNA, 201 bp, Homo sapiens
aaagaacttgcatgttggtgaaggaagaagtggggtggaagaagtggggtgggacgacagtgaaatctagagtaaaaccaagctggcccaaggtgtcctgcaggctgtaatgcagtttaatcagagtgccatttttttttttgttcaaatgattttaattattggaatgcacaatttttttaatatgcaaataaaaagttt

SEQ ID NO: 4795 - DNA, 507 bp, Homo sapiens
tgagaatggaaggaatgaaaggctgcccagcagttttgcccattgaccatgtttatggcactctgggcatcgtgggagccaccacaacgcagcgctattctgacgcctcaaaactgagggaggagatcgagggaaagggatccttcacttactttgcaccgagtaatgaggcttgggacaacttggattctgatatccgtagaggtttggagagcaacgtgaatgttgaattactgaatgctttacatagtcacatgattaataagagaatgttgaccaaggacttaaaaaatggcatgattattccttcaatgtataacaatttggggcttttcattaaccattatcctaatggggttgtcactgttaattgtgctcgaatcatccatgggaaccagattgcaacaaatggtgttgtccatgtcattgaccgtgtgcttacacaaattggtacctcaattcaagacttcattgaagcagaagatgacctttcatcttttagagcag

SEQ ID NO: 4796 - DNA, 509 bp, Homo sapiens
ctgcatcttgtccacgggagagaagtagtgcatgccaatcaccttctcaggtcttttgctgacagcagcgatttcactgattgggagagcagatgtgttactggcaaagatacagtgatctggaatcaccgcttctacttcctttagcactctgtgtttaagactaaggtcctcaaacacagcttcaatcaccatgtcggccttttcaaaaccttggtaatcaagctgcccagtcaagttgctgaagatggaatccctttcaaatgatgttagagctttcttcttcactttgtcattcaatcctttgaacacttgttgctgtcctcggtctagcgcagtgagggtggcatctttaagtatagtctttagccccttatccacggagacttgggcgatgcctgctcccatcagccctgcaccaagaatagccagatgcttaacatccttctgtggagctccaaatttattcttcttgcacaggacctgaccatggtagagtcccatcaagg

SEQ ID NO: 4797 - DNA, 374 bp, Homo sapiens
ttttaacaagaagcagtttattacacaaaacgaaacctgagataatagaaaataacacttgcagtaataaaggaagcagccttgcactccacctccacactccagagtataattaaaagactcctatcagacatttctatcaccaataatgccaacctctgtatacagcagcaggctgggccccaaatcagaagattcatgttgcttgctttctctatagggaaagtgaagctttcggtaagtatcatgtggctattcctggttctactttcccttgtggaaatgtaatacctggtttacactgctcttttgtgagtacgtatatggtgataggaataaaggagaaagtctggaaagcaccaagcacaaagcag

SEQ ID NO: 4798 - DNA, 251 bp, Homo sapiens
  unsure (82): n=A,T,C or G
ccatcttacctgcttatgtctcctacacaaagctaaatattctagcagtgatgtaatgaaaaattacatcttactgttgatntatgtatgctctggtacacagatgtcattttgttgtcacagcactacagtgaaatacacaaaaaatgaaattcatataatgacttaaatgtattatatgttagaattgacaacataaactacttttgctttgaaatgatgtatgcttcagtaaaatcatattcaaattt

SEQ ID NO: 4799 - DNA, 354 bp, Homo sapiens
  unsure (79): n=A,T,C or G
  unsure (118): n=A,T,C or G
  unsure (159): n=A,T,C or G
  unsure (163): n=A,T,C or G
  unsure (165): n=A,T,C or G
  unsure (208): n=A,T,C or G
  unsure (212): n=A,T,C or G
  unsure (219): n=A,T,C or G
  unsure (228): n=A,T,C or G
  unsure (246): n=A,T,C or G
  unsure (284): n=A,T,C or G
  unsure (337): n=A,T,C or G
  unsure (347): n=A,T,C or G
gtacaagctttttttttttttttttttttttttttttctttttaggattgaataacaaggctttaatggctcaattttnttatgattatacaaacatataaatcttgaaaaggtaacnccatttagtaaaatccataaaaataacagttttgccacagngcananaaaagttcattcagtttgattccccatgccctcgacaagcagntttntgattanagctggaanacacaggctgggtacagnggcgaccccgtagtcccagctactggggaggctgaggnggaaggatcacttgagcccaggagtttccgaacagtctgggcaacataccaanaccctgtctnttttttt

SEQ ID NO: 4800 - DNA, 529 bp, Homo sapiens
ctggaagaactgagagatgacctggagctctactataaacttcttaaaacagccatggtcgaactcatcaacaaggattatgcagattttgtcaatctttcaacaaacttggttggcatggacaaagccctcaaccagctttctgtgcctttgggacaattacgagaagaggttctgagccttagatcgtctgtcagtgaaggaattcgggcagttgatgaacgaatgtctaaacaagaggacattaggaaaaaaagatgtgtgtattgaggcttatacaagttattcggtcagttgagaaaattgaaaaaatcttaaactctcaaagttctaaagaaacctctgcactagaagcaagcagcccccttttgactggacaaattttggagagaattgccacagaatttaatcagttacagtttcatgctgttcaaagcaaaggcatgcctcttttggacaaagtaagaccgcgtatagctggcattacagccatgttacagcagtcactggaaggtctcctattagaagg

SEQ ID NO: 4801 - DNA, 368 bp, Homo sapiens
gtctgtgtatgctcacttccccatcaacgttgttatccaggagaatgggtctcttgttgaaatccgaaatttcttgggtgaaaaatacatccgcagggttcggatgagaccaggtgttgcttgttcagtatctcaagcccagaaagatgaattaatccttgaaggaaatgacattgagcttgtttcaaattcagcggctttgattcagcaagccacaacagttaaaaacaaggatatcaggaaatttttggatggtatctatgtctctgaaaaaggaactgttcagcaggctgatgaataagatctaagagttacctggctacagaaagaagatgccagatgacacttaagacctacttgtgatattt

SEQ ID NO: 4802 - DNA, 388 bp, Homo sapiens
aaacaaatgtagactttattttgtactgtacaaagtgctaatgtcagtagatccattaaaatatagaatatttaagaaagatcattaataaaagtaatggtcattcaatttaatgttacagtttacagcgttttactgctagtgttttaagtcagcatgagcagtatcaaagtacttatgtagctagtttctaaaactttacagaaaacccagtacaattccaagtgcttatagccaatataagcatatttcatattagaaatagttatccatatgttaacaagaaactatggtcctcaaatatgccaattttagagtctaataactactgatagtaactatgtaaatattttggaataaacagttatttatgcaagccacacttcag

SEQ ID NO: 4803 - DNA, 334 bp, Homo sapiens
  unsure (80): n=A,T,C or G
  unsure (108): n=A,T,C or G
  unsure (124): n=A,T,C or G
  unsure (129): n=A,T,C or G
  unsure (182): n=A,T,C or G
  unsure (185): n=A,T,C or G
  unsure (198): n=A,T,C or G
  unsure (203): n=A,T,C or G
  unsure (216): n=A,T,C or G
  unsure (219): n=A,T,C or G
  unsure (231): n=A,T,C or G
  unsure (240): n=A,T,C or G
  unsure (244): n=A,T,C or G
  unsure (253): n=A,T,C or G
  unsure (261): n=A,T,C or G
  unsure (267): n=A,T,C or G
  unsure (269): n=A,T,C or G
  unsure (274): n=A,T,C or G
  unsure (290): n=A,T,C or G
  unsure (297): n=A,T,C or G
  unsure (300): n=A,T,C or G
  unsure (314): n=A,T,C or G
caagcttttttttttttttttttttttttttttttctattcggttcagtctaatcctttttgtagtcactcataggccanacttagggctaggatgatgattaataanagggatgacataactnttagnggcaggttagttgtttgtagggctcatggtaggggtaaaaggagggcaatttntanatcaaataataanaaggngatagctactaanaanaattttatgganaaagggacncggncgggggatntagggtcnaagccncnctcgnaaggggtggatttttntatgtanccnttgagttgtggtantcaaaatgtaataattatta

SEQ ID NO: 4804 - DNA, 449 bp, Homo sapiens
aaaccaaagcctcagattttcatacaaacgacacgaccaaacttctaaagtattggtattacatcttaaaattgtcccgtatccttaaaaaaaaaaaaagtgtacactcacgtgccttacaggatattaaaccaaaaagctagaattaacaaacatgccaaatgttttcactttgaatcgtagacacagctcctatatttgagttttacagaaaggcatgtttctcaacatgcatccgaagttttcaatgtatttgtggtataagagcaacatttaacataagtgaaactgcattaacctaaatacgcttactgcttaggtacactcctacaacataactaacttgaggaaagctaaaaattgttttaacagttatggtcaatactgaactttgttattatgtcctagatgaatgtttcagtgttcaaaattactgagcttgaagtttt

SEQ ID NO: 4805 - DNA, 532 bp, Homo sapiens
aaacttgatttgagtttcagtgtctctgaattgaacatcccacgttggaagaagatacatttgggggctccaggactacagtagaaaagtatagagcaagcaggaaaatcttctagtaaaacttacatgcaggacaacaaaatgatgaaagatatccaaataccagataatccaccaggaaggcttttgtttaggaatttgtttcaagaggaacaagggatgagggagaaaaatccgttttatccatcagagtcagtgctataaaattgcctattaaggtaaaagaaaaatgtggagactattttactatacagagagcattaattcagatgacttagaaaagtgataccagcccaagaacagggatctaggtgagcccattgtaagtatcattgaaaacaaaacatgcccgtcaacatgtcacagaaaacgaacgaaggacaacaagaagtggatgagaatattttgttgaccttcatgggtttacagcctctgtctctaaacaaagtatggaaacaagtagagcttttat

SEQ ID NO: 4806 - DNA, 416 bp, Homo sapiens
  unsure (308): n=A,T,C or G
  unsure (333): n=A,T,C or G
  unsure (367): n=A,T,C or G
  unsure (392): n=A,T,C or G
  unsure (400): n=A,T,C or G
atccactgtccatacccttggattggttgaagagcctttggtcatactgaacttcattggaagtccgaggattaggaacaccgagagcaataacttcactgatatcccgattttcatttctctgaagtttcgacctcttatcaggagctgccctggaaagattccggtcatgctgtctctcttttcgcctgtcatgccggatttcatccctctcacgtgcctccccatcctctttttccacatgagttttgatcccagctcttctttccctggctttctgggccatttctctaagtttctcttcatgnttttccttttctttctgagccattnttctctctacttgggcacgcatttccacagcttnacgagccttccgatcagcaatgtanagggcttntgccaatttggcgaaa

SEQ ID NO: 4807 - DNA, 483 bp, Homo sapiens
  unsure (439): n=A,T,C or G
aaattctctggatgagcaagaaggggttaaaagtggaatgtatgttgtaatagaagttaaagttgcaactcaagaaggaaaagaaataacctgtcgaagttatctgatgacaaattacgaaagtgttcccccatccccacagtataaaaagattatttgcatgggtgcaaaagaaaatggtttgccgctggagtatcaagagaagttaaaagcaatagaaccaaatgactatacaggaaaggtctcagaagaaattgaagacatcatcaaaaagggggaaacacaaactctttagaacataacagaatatatctaagggtattctatgtgctaatataaaatatttttaacacttgagaacagggatctgggggatctccacgtttgatccattttcagcagtgctctgaaggagtatcttacttgggtgattccttgnttttagactataaaaagaaactgggataaggagttagacaattt

SEQ ID NO: 4808 - DNA, 507 bp, Homo sapiens
ccttcaacatgattgatcagaacagagatggtttcatcgacaaggaagatttgcatgatatgcttgcttcattggggaagaatccaactgatgagtatctagatgccatgatgaatgaggctccaggccccatcaatttcaccatgttcctcaccatgtttggtgagaagttaaatggcacagatcctgaagatgtcatcagaaatgcctttgcttgctttgatgaagaagcaactggcaccatacaggaagattacttgagagagctgctgacaaccatgggggatcggtttacagatgaggaagtggatgagctgtacagagaagcacctattgataaaaaggggaatttcaattacatcgagttcacacgcatcctgaaacatggagccaaagacaaagatgactgaaataacttcaaattccagccaaacgttccttgttgccactttgggtattctgagattttctcttgcatgcccttagctttacagcttttgcatttcc

SEQ ID NO: 4809 - DNA, 445 bp, Homo sapiens
aaagcttcttttgtgttagatactgtattagagatctgcatttatcatgagttcctttttttttttaactttatttttgggaaagtaacacatgaagtagttcagtcatgtcaggtttgtctggggtggaatggaacagtcaggtagttgaaagttttttttagagatgaaaagcttgtgaactcctgtaaaacatgctgtatttgaaatacatctgttaaaacttaaaaactaaagtgtgattttttttgttgttgttaagtttattgaagtttattcccttaatcagtgaaggacaacccttatttattacctagagcagttgtataattcgctgttagaaattttggtattgggacagtggataagcaggttatcacatagcatagaattcttaaaagatacatgtggggaaaagtagtctcaaataaaagctaatttcttt

SEQ ID NO: 4810 - DNA, 443 bp, Homo sapiens; identical to SEQ ID NO: 563

SEQ ID NO: 4811 - DNA, 563 bp, Homo sapiens; identical to SEQ ID NO: 352

SEQ ID NO: 4812 - DNA, 359 bp, Homo sapiens
cgtggagaacgtgcttaagaatccactatgatgggaaacatttcattctcaaaaaaaaaaaaaaaaaaaatttctcttcttcctgttattggtagttctgaacgttagatattttttttccatggggtcaaaaggtacctaagtatatgattgcgagtggaaaaataggggacagaaatcaggtattggcagtttttccattttcatttgtgtgtgaatttttaatataaatgcggagacgtaaagcattaatgcaagttaaaatgtttcagtgaacaagtttcagcggttcaactttataataattataaataaacctgttaaatttttctggacaatgccagcatttggattttttt

SEQ ID NO: 4813 - DNA, 434 bp, Homo sapiens
aaatctcactggcaatattcaaagttttcattgtgtcttaacaaaggtgtggtagacactcttgagctggacttagattttattcttccttgcagagtagtgttagaatagatggcctacagaaaaaaaaggttctgggatctacatggcagggagggctgcactgacattgatgcctgggggaccttttgcctcgaggctgagctggaaaatcttgaaaatattttttttttcctgtggcacattcaggttgaatacaagaactatttttgtgactagtttttgatgacctaagggaactgaccattgtaatttttgtaccagtgaaccaggagatttagtgcttttatattcatttccttgcatttaagaaaatatgaaagcttaaggaattatgtgagcttaaaactagtcaagcagtttagaaccaaagg

SEQ ID NO: 4814 - DNA, 629 bp, Homo sapiens
  unsure (601): n=A,T,C or G
ccatattactgaccctctacagagagggcaaaggaactgccagtatggtattgcaggataaaggcaggtggttacccacattacctgcaaggctttgatctttcttctgccatttccacattggacatctctgctgaggagagaaaatgaaccactcttttcctttgtataatgttgttttattcttcagacagaagagaggagttatacagctctgcagacatcccattcctgtatggggactgtgtttgcctcttagaggttcccaggccactagaggagataaagggaaacagattgttataacttgatataatgatactataatagatgtaactacaaggagctccagaagcaagagagagggaggaacttggacttctctgcatctttagttggagtccaaaggcttttcaatgaaattctactgcccagggtacattgatgctgaaaccccattcaaatctcctgttatattctagaacagggaattgatttgggagagcatcaggaaggtggatgatctgcccagtcacactgttagtaaattgtagagccaggacctgaactctaatatagtcatgtgttacttaatgacggngacatgttctgagaaatgcttacacaaa

SEQ ID NO: 4815 - DNA, 269 bp, Homo sapiens
ccttcatgccccgaggactagcagacaaacaaggacctgaggaatgtgatgcagttgctcttttaagtctcatcaactcctgcgatcacttcgtggttgatcgaaagaaagtcacagaagtaattaaatgtcgtaatgagatcatgcactcttcagagatgaaagtatcttctacgtggcttcgagattttcagatgaagatccaaaattttctgaatgaattcaagaacatcccagagattgtggcagtatactccagaatagaacag

SEQ ID NO: 4816 - DNA, 348 bp, Homo sapiens
ccttgggtctaactgtgctttagtaaagtctgaattgtccaataattttctcatttcataaacacccttatctctttatatatagctatatgcctttatgtgtatatatacatgacttttttttttccttctcaaaaataaaatagccatccccatagagggaggttctcagcagcattcacagcggttgcagcaggagccatgccttctattaatgttagagacatgcaggacgaaggaaaatgactctccacctgctccctttaatatacagcagggagagagtttctaaagggagggaagtgataaggctgagcatgagatggctaaccagggtttttgtggttt

SEQ ID NO: 4817 - DNA, 327 bp, Homo sapiens
  unsure (29): n=A,T,C or G
  unsure (76): n=A,T,C or G
  unsure (100): n=A,T,C or G
  unsure (101): n=A,T,C or G
  unsure (214): n=A,T,C or G
  unsure (216): n=A,T,C or G
  unsure (284): n=A,T,C or G
  unsure (300): n=A,T,C or G
  unsure (304): n=A,T,C or G
caacagtcttacttgcctgtacaatatanagacatatgaatagtcataacagttttcaacttgttcttgtttctgntaaactatattcctagaaacatanntttgaacaacttggtctttgttaggcttgtcaaattgccttcatggaaaaataatctacaaaagtatggtttaattgattgtcttacatgataattttccctggtaacaactnantaagtgatatatcttttttcctaaattgcttaaatactgtgaaattgctctgacaaattggaagtgtnccattggcatatttgncttnctttttatgcatgatggtaaaat

SEQ ID NO: 4818 - DNA, 552 bp, Homo sapiens
ccattggtagatgtttgattgacttaacaagagagggacaaattttcaatttgtgaaactccaaagcagaaagtattggtgcttgctaccttgtgaattcttccttagacatgcagagaaaatgtatgcaagagaccaaaaagatggctccaagctatgtcatgttacctgtaataaaatcttttcttctagattctttctatgttggcagataatctccccttatagcttccactcacttattcttgcattcagagtcacaatgatcatcttacccatgtggtttttgagaaagaaagatcaattctttgtttgcagtaggtaatcttagagatggagatgattgtagaattattcctagatgagtgtcaatttatttaattccattgtcatataaggagtcaaattgtttcttatcatttgttcattgaagaacagagacctgtctggaaaatcgatctctacaaattcaattaaataatgatccccaaatgctgaaaaagtgaaatacagcaattcaacagataatagagcaatgtttagtatattcag

SEQ ID NO: 4819 - DNA, 393 bp, Homo sapiens
  unsure (43): n=A,T,C or G
  unsure (98): n=A,T,C or G
  unsure (114): n=A,T,C or G
  unsure (131): n=A,T,C or G
  unsure (135): n=A,T,C or G
  unsure (164): n=A,T,C or G
  unsure (169): n=A,T,C or G
  unsure (185): n=A,T,C or G
  unsure (223): n=A,T,C or G
  unsure (250): n=A,T,C or G
  unsure (265): n=A,T,C or G
  unsure (279): n=A,T,C or G
  unsure (294): n=A,T,C or G
  unsure (298): n=A,T,C or G
  unsure (301): n=A,T,C or G
  unsure (309): n=A,T,C or G
  unsure (311): n=A,T,C or G
  unsure (326): n=A,T,C or G
  unsure (350): n=A,T,C or G
  unsure (361): n=A,T,C or G
  unsure (383): n=A,T,C or G
aaaataattactctcacacataattttttttatcatgtaaatnctaaacaaacttctgaaggtataattacacaaattcttagcgatcacaaaagtanatgattgggctaatgngtcatttttctaactgngttntgtcgataatatgcaaaatttaggaatantgtanaaaaatgatgtatttnaatacagcttacaaatgaaacttttttggcttcacaangacatacttattatcataactgatacnattttcatactacantgctcttttgcttnataaatactcaagtnattntgngcgctgcntnaaattttacttttgngcgtcgccttccatccccttagtncatcttatagnagctgtaagttgatcctgtgtntcttgaagct

SEQ ID NO: 4820 - DNA, 254 bp, Homo sapiens
  unsure (156): n=A,T,C or G
  unsure (164): n=A,T,C or G
  unsure (166): n=A,T,C or G
  unsure (187): n=A,T,C or G
  unsure (190): n=A,T,C or G
  unsure (210): n=A,T,C or G
  unsure (221): n=A,T,C or G
  unsure (232): n=A,T,C or G
  unsure (242): n=A,T,C or G
  unsure (245): n=A,T,C or G
tttttttttttttttttttttgtttaactttattactgttgcaccatttatacaattacatataatttcaatgcatccattgtacatttttttgttttttttttgtttttttttttccattttccaatgagtggtgtgttggtgtctgtgacacanaatggaananaaactggaactgcaatgaacncanactttttttttttttttttnatttccactgnccaataaacanaactacaggngcncccaaccac

SEQ ID NO: 4821 - DNA, 236 bp, Homo sapiens
ctgatggtttggaaatgagagaactacagtggtgaagagaccaggaggcagctctcagtgaaaccaacattgcggatgcccttcgtgagccttctcagtcccagcaggaagcccacaacactggcctccccagcctgcctgctgacaacacctaggcttactttatctaaaatcagagtgtaccaggtctgtagcagaaaataatcaactaaatgtcagggacctatgagtcattt

SEQ ID NO: 4822 - DNA, 294 bp, Homo sapiens
ctgctcgaacactgagcttgtgtaaaagttgaaccatgaggccacaaaagcggtcaaaggttctgggaattcgggtctggggattcacttcaatcagaacattcttctgtgtatggatataaacctgtagcaagccagctcggttcaggggactatccatcagcatcagcaaactctggtgggtgatatctggccgcgcttccccagggtcccgtccattcttcaacaatatagacttgtgcttgtcacagttgagtagctcatatgtcttccctaccttgactgtctccagac

SEQ ID NO: 4823 - DNA, 222 bp, Homo sapiens
  unsure (37): n=A,T,C or G
  unsure (191): n=A,T,C or G
gtacaagcttttttttttttttttttttttttttggngattttagcttattttattaatagcttatttccttacaaatatttccccacacgtttatttagtcgcaggcttcatgcatacaaaatgcacactgctatgatcatcgtaaccatcagcaagcaggcattgtcatcagcgcttctttatttctgnggtttctcagtctcttttattttctttcttt

SEQ ID NO: 4824 - DNA, 592 bp, Homo sapiens
  unsure (574): n=A,T,C or G
cctcagaatttcatacaaacaccaagaccaaaatcctaagtattggtattgcgtctcaaatttttcccattaacttaaaaaaaaaaagcttaaacttacgtgccttacaggttattaaatgaaactagaattaacaaacatgccaaaatgtttcacttttaatagtagacacagctcctatattgttttacaaaaaaataaaagcatgtctttcaacatgcatccaaaacagtgttcaatttaacgtggcaaagggcaacatttaacataattcaactgcttttacctaaatacgcttactgcttaagtacatcctataactaacttgagaaaagctggaacttaagtttaacagttatagtttactcagcttcactgttacatcctagatgagtattgtattcaaaaatactgggccttaagtcttcataacaatcctgatttccacttagagtaagcataaatcacaagcttgtattgcagaaactgttaaactgaagttttcttaaagaaaaaaaaaaaaaaaaaaggttgaccaagagtcagtgatcaggatcgatcaattacattcccnatccaccactcatactgg

SEQ ID NO: 4825 - DNA, 542 bp, Homo sapiens
  unsure (488): n=A,T,C or G
  unsure (508): n=A,T,C or G
ctggaggtgaacaaccgcatcatcgaggagacgctcgcgctcaagttcgagaacgcggccgccggaaacaaaccggaagcagtagaagtaacatttgcagatttcgatggggtcctctatcatatttcaaatcctaatggagacaaaacaaaagtgatggtcagtatttctttgaaattctacaaggaacttcaggcacatggtgctgatgagttattaaagagggtgtacgggagtttcttggtaaatccagaatcaggatacaatgtctctttgctatatgaccttgaaaatcttccggcatccaaggattccattgtgcatcaagctggcatgttgaagcgaaattgttttgcctctgtctttgaaaaatacttccaattccaagaagagggcaaggaaggagagaacagggcagttatccattatagggatgatgagaccatgtatgttgagtctaaaaaggacagagtcacagtagtcttcancacagtgtttaaggatgacnacgatgtggtcattggaaaggtgttcatgcagga

SEQ ID NO: 4826 - DNA, 447 bp, Homo sapiens
  unsure (172): n=A,T,C or G
  unsure (233): n=A,T,C or G
  unsure (293): n=A,T,C or G
  unsure (305): n=A,T,C or G
  unsure (315): n=A,T,C or G
  unsure (349): n=A,T,C or G
  unsure (371): n=A,T,C or G
  unsure (377): n=A,T,C or G
  unsure (384): n=A,T,C or G
  unsure (417): n=A,T,C or G
gtacaagctttttttttttttttttttttttttatctggaaggttctcaggtctttatttgctctctcacattccaggaattgacttatttaattaatccatcaacctctcatagcaaatatttgagaaaacaaatgtatattcagattcttattttcagtagggaagtaanaagttgcagctcagtgcacataaagttgagacagagatggagacatccagccccacctttntggaacaagaaagatgactggggaggaaacacaggtcagcatgggaacaggggtcacagnggacacgggggngggctgtctntccacctcctcacattaggctaacagggacgcanacacattcaggtgcctttgcanaaaganatgccanaggctcttgaagtcacaaaggggaggagtgaanaaatcctgcatctcagtccctcacaagaca

SEQ ID NO: 4827 - DNA, 417 bp, Homo sapiens
ccattacatcctctttttaatttacataatacagatacttgagaaagttgttgtggtgttgtatgccaagaaaattctttttattggtgcctatattgtaacaattatttttaatgcattgtattttgaagtaacggttcagttaaatttttcacctgctgtgtaactgaaacacaattacagtttataatcatctgtagaagtctggagataattttgcaactcatgttatgggttaaatgaatatttttgtaaaagtaaaagcaacaaatttataaattgattatttgaaactttacaacacaattgcatcccaaatacaaattgtattgcttattcattatagctattcgtcctgtaatctgtttctaggtgaagcatactccagtgttttaggggttttgaaaataaatattt

SEQ ID NO: 4828 - DNA, 332 bp, Homo sapiens
ctgcgtggagtgacgggaggagggaatcactgtgtgtgcgagagtgcttcagactcaatttccaaaataattttcacccctctaagcatgtaaatatacaaagatggatccttcatagaaattaaagaatcaatttgagctcatttcgaatacagaacaagtatggcacagatggaagtcctgccacgtttcctttaatgatgctgactcttgtatcacacaggccagcatgaagtttcttactcagactttacaggcattttccgtaattcaatcagtcctgctcccagcacaacacaggaggtgattcgagaataatcgtgagaatcagg

SEQ ID NO: 4829 - DNA, 304 bp, Homo sapiens
aaaaaagcaatttggaaggtaatttgataggctttccaacttaaccaaattttttattgtaattcttggatagtatttttgtctttttcaattcatttgtctttttcagtatagtttttgttaaggcaaatgtcttcccttaatatccaaatattgctaataaacggtagaagatgctttggaaattaaaattatctcgctgttggttagacttaacactgttaatcttcagccaaatatcacatatggatcaaattattttcttttttgttgtttaccctatcctcaacaacatttttagttt

SEQ ID NO: 4830 - DNA, 442 bp, Homo sapiens
  unsure (246): n=A,T,C or G
aaataattatcaggatatagaaacaaatatccattcagataaaacattactgcttaaaagtggctaagaaatattttgcatgtaataaatatatttcatgtttaggttaacaggcaccatcttgagagcagtttgtttttttttttagctaataaataaattacattcaagaaaacaaggtgtttatatctgagtatatcattaaatgtttttcttcatatagcacccaaacttcaaactgtctanaaagtatctcctaaaatataactcataccttaagtaataaaaataaaggccaagaaaaaaaatcaatttaagacaaaatttacagtttatattcttaattccccattcaataaaatatcgattgccaatttaataaaagtaaatgaactgtatatatgcaatctgttagcactgaaaatctgaaatatatattttt

SEQ ID NO: 4831 - DNA, 265 bp, Homo sapiens
  unsure (8): n=A,T,C or G
aaatttanatgttcaaaagtagttgtgaaatttgagaatttgtaagactaattatggtaacttagcttagtattcaatataatgcattgtttggtttcttttaccaaattaagtgtctagttcttgctaaaatcaagtcattgcattgtgttctaattacaagtatgttgtatttgagatttgcttagattgttgtactgctgccatttttattggtgtttgattattggaatggtgccatattgtcactccttctacttgcttt

SEQ ID NO: 4832 - DNA, 522 bp, Homo sapiens
cgacgaaggagtaggtggtgggatctcaccgtgggtccgattagccttttctctgccttgcttgcttgagcttcagcggaattcgaaatggctggcggtaaggctggaaaggactccggaaaggccaagacaaaggcggtttcccgctcgcagagagccggcttgcagttcccagtgggccgtattcatcgacacctaaaatctaggacgaccagtcatggacgtgtgggcgcgactgccgctgtgtacagcgcagccatcctggagtacctcaccgcagaggtacttgaactggcaggaaatgcatcaaaagacttaaaggtaaagcgtattacccctcgtcacttgcaacttgctattcgtggagatgaagaattggattctctcatcaaggctacaattgctggtggtggtgtcattccacacatccacaaatctctgattgggaagaaaggacaacagaagactgtctaaaggatgcctggattccttgttatctcaggactctaaatactctaacag

SEQ ID NO: 4833 - DNA, 429 bp, Homo sapiens
aaaatatttacacttaaagacaaaacatttccacaattattacaattggtttcactaaatcagaagtgactacacattatctctacttttataccagaaaacaaaatgaagaaatcaacaaaatataattactaaaactccactgtggatcaggataaaatgtgtccaatattaactcacactttcccaataagtataaaaatgaatataacattgcttggacaacttgtttcaacagcgaatcgtctattactatttgttcaataacatatataaattcaaaactggcaggtatgaaaaaaggttactttgttttttgcagatactgtacttgtaaaataaagccaaataaagcatatgtcacacataccaaagtcttacattttgcctttctaatacaagcaagtgaaatattaacacatagcattt

SEQ ID NO: 4834 - DNA, 490 bp, Homo sapiens
ctgacaaaaagtgtcagagccagaggccaacctctgctagatgaagcagcagcacatgactccatttctatctgataaggagacagagaagaggcatctcgaacagatgaaaaaccaaaggctggtgtcctaaaaaaaacagattggcttcaaagaaaacactaaggaagacccacagagctgtattaattttagtaaaaataatcatatgccaacaggggaattgaaccactttctaaatcatagtatgaactcatctcttcagatacttggtaagtggtcaaagcttgtttttataattactttcactgtcttgggcaaaaagtctttcttatctttggtccttaggtgtggtatcagtttcttccatttttttatgtgttacaaaacaatctttttttacttgacatcaacaaccaaggtgcagtataaacacgaagttgctgatattgttgcttttatacacataaaataccaacatctcccatac

SEQ ID NO: 4835 - DNA, 254 bp, Homo sapiens
aaaatatcttttataggttttatataaaaatgtctgagtatgattttgtgtgaaagttctgataccagttgtaatagagtcaaatttatgtgagcaataaagaagaaattggcagatattggaaaaatattttgtgaaaagctgtatttattataaatactagggccatgacatagtaccattggggttaagtcattttcccaatctatttataatttaatgatatgttagtgcctctgttatatgtcaagttt

SEQ ID NO: 4836 - DNA, 407 bp, Homo sapiens
gatctgtgttaatctgagtaacttattgcctagcctataaataaattccaaaatatccaattcatttcttcttgaaatggtgcttgttttgttttctttccattacacaattagactcctacagtttaaaacaaactttaaaccactatcttgcactgctaacttttttctacctttgtaaatagaaacatttctgcataaaagtcatacatatgaagcaagggctgaatcataatcacaaggcttaattttgataaacgaatccagtgacctaaggattttctgcaaaatttgactgggagttgtgataggtggtatttttgtttattttcttcctcttactccttaggataaaggtaagttgacttgaacaactttctttgcactgggaaaataagcaaatgttt

SEQ ID NO: 4837 - DNA, 404 bp, Homo sapiens
ctgtccgaggagctagtagggcaaactgctccctgagctgggccgatcttttgacatccttctccgagaaacaatattctttttcagttattacaaagaactgctgttgtgatgactagttatttgcttgagcagttccatattacataatcctgtgccacaaaacaccctgtacactagtggctgggatattattcatttccactaggcagctatctcactgttgaaatttatatccaaaagaatatttaattttggcttatttttcttataaaatagggaactcgtcttatcatttttaagtcctcacctcagtgtggtacttcaaactacttcaaattattactataattaaatgcttcattttatataataattaataaaaaaggtggcatatgcttttt

SEQ ID NO: 4838 - DNA, 517 bp, Homo sapiens
aaacctaacccatgttagctgcaactccactacagtcttgatcacttagctcaggaaacaaacacccagcaacaaccctcgtatctcattaataccaatctgtggccctcactgactcagtggtactttttataaaaatatctgaagaagtggcaaacggttacaacggatgtcaggtcgaagcaattccaaaagctgagaaaacgcttcatccgctgcttgtcttctccccctattgctacagttctgccaccaaagggggaaaattacgtgaatatgattgttgtgaccaagccttggcaaaagtcaataaataacagaacctgtcaagggcagagcaattttatgggcaacctcttctagttgcaaatgtgggggttgggaaaagtgggagagaggcatgtgtgcaagaaagagataagggtccttttgggaagggtttggtgacccagccccagctcaatgccagcagactaggacccgctaaaacccattattcagacggaaaggggagaag

SEQ ID NO: 4839 - DNA, 277 bp, Homo sapiens
aaatacttaatttgaacagctctaagatattgtcacttaggtcatctaaaagcttttagagatttgaacataagttcatttcctattaatcaaagacattccgtaagttggcaaaagaaattgggagagagaaatagaaggcttgatattctggacagcattaaggttgataggttgatgataaaaacttaaaaccaggacctccattctgtcatgactgacaccatggtagtctgtcagcttgaccagtggagagtcattcatttagcacaagcag

SEQ ID NO: 4840 - DNA, 489 bp, Homo sapiens
aaatgacttcagctaacttaccccaagagaaaaatctggcattgatctcttggttagcattattaccaatatcaactagcactattaaaatcaaagttgaaatggtacattcatttgccaaaaaaaaaaaaagaaaaaaaaggcttaaaggcaaagaaggtgaatcaacgtgcaaattagcatctggcccaattgcaaaattcatttcctggatgtgagggattgaaccatgcacacttgcaagcaagatgaagggcaaacagatgacatcaaatcaaaattaaccccacaaagaatccagaagacctcagatggtaaaggacagaggtctacgtctactgctgttagtgctcaggtatccatcctgttttccctaatctcccgattctgatccaagagtctttgagacctatgtcctaggccatcctttcatctagaaatggaaaccatggctgtggcaccaggcatggtcaaccctgcagtgattca

SEQ ID NO: 4841 - DNA, 499 bp, Homo sapiens
ctgatcttaacaaaattcgtagcagtggaaccttgaaatgcatgtggctagatttatgctaaaatgattctcagttagcattttagtaacacttcaaaggtttttttttgtttgttttctagacttaataaaagcttaggattaattagaagaagcaatctagttaaatttcccatttgtattttattttcttgaatacttttttcatagttatttgtttaaaaagatttaaaaatcattgcactttggtcagaaaaataataaatatatcttataaatgtttgattcccttccttgctatttttattcagtagatttttgtttggcatcatgttgaagcaccgaaagataaatgatttttaaaaggctatagagtccaaaggaatattcttttacaccaattcttcctttaaaaatctctgaggaatttgttttcgccttacttttttttcttctgtcacaatgctaagtggtatccgaggttcttaatatgagattt

SEQ ID NO: 4842 - DNA, 514 bp, Homo sapiens
aaaagcagagaaggcatccatagactatttccttgcttacaagctcagtgaacatactgaattcacttataaaaagaattttctcaattttagttgcttttcaaaaaattcttattccttttatttgtaattctttgacattgttgctgcttcacagttttggtaattggacagtttggtctttattatgatattaacatttttacctgtcctgaaacaaggaaatacaatcaaagaaacagaagattggtggaccttgaaccacattatgatatcagatgacccagagtcatggttactaagttgcttaaatttttagtaacaaagatgtattagaaagtgacaggtcaattcaataatggtttttttggatacatttaattatataatccccttaagttgtgcttagtcagcagtatttaatctgttgtctattatatatctaactggtctgttatgtttattatatatttatatattgcttattcatatcttattggagtaactcattttt

SEQ ID NO: 4843 - DNA, 345 bp, Homo sapiens
  unsure (8): n=A,T,C or G
  unsure (60): n=A,T,C or G
aaatattntggtcatattttataataaaatattttggcaaaaataaaatataaggtttantttattttctattaatggtagatctggagagtattttacatttctaaatagtatctacttaatttgactgctttcacatttgtttctgaaaacactgctattcgcttttcagaattttgagattaaaagcacctaaaaataagataaaataaaatttaagtaaaatatttgtttgatgctcgaaagttgacaaattcacaaacttactttaagtgtcttacatgatatatgccaccacagaaactttattgcctgctaagacttatttgactaaatctaatcttt

SEQ ID NO: 4844 - DNA, 251 bp, Homo sapiens; identical to SEQ ID NO: 4543

SEQ ID NO: 4845 - DNA, 621 bp, Homo sapiens
  unsure (557): n=A,T,C or G
  unsure (559): n=A,T,C or G
  unsure (613): n=A,T,C or G
ctcaggcagaacacaaatagaaatttaatgatgtgctcaactccaccagaaattacctcgagtcagcattgacgatattggaggagctgccgtgctgctgatacggggtgtgctttatgctgctctttgcggtttgttgatcccctcctcccccactctcaatacctagagagtgaaacccgtacaatgagataaagactaaaaagagaaatcccttcctatatacagtgtgctacatttacaaaaaatttctccttaagaaaacagaatattcaaaaacagcacttttccaggaagttagtgaggaagataaggcacacatttatttataaatggatgttgctcctttgtatttttagcttccctatttgcttaaaagtacaggctccctaagagaggatggagagggagagactgaattgttagtaggtctaaacatcaaagaaaacatttttattagttacttatggaaaatcatctattacaatgataaccttcaagtgacttccattatggctggacaggcggtgagctcagtggattgcagtggtgtgctngntgattttgcacagtgagctctgcggaaggggtcaggctcaactgctgatgtgtntcacacgt

SEQ ID NO: 4846 - DNA, 501 bp, Homo sapiens; identical to SEQ ID NO: 4709

SEQ ID NO: 4847 - DNA, 437 bp, Homo sapiens
  unsure (367): n=A,T,C or G
  unsure (403): n=A,T,C or G
  unsure (433): n=A,T,C or G
aaaatacataaaattttctaaaacgtaaaatggaaaggtttaatacacaggaaaaacactgcacaccttaactaaacaaactagaaagaaaatatatttatatacagaactaagatgagtccattcattatttttacaaatattcacatagatggtttagagataagtagttaagtgtgtctcattaattaatggatgctttctagcctctgtcttcattaattttatttcctattcaacaaaaaataatgctttcaggatatattacatatagagcaatatcatttttatcagtaatttgtctgaaaaagagaaaaacttaaaagcagaaccctacaaagcaaagcaaactacaaagcaaagagtnatcacagtgtttgcaaaatagaaatgtgtgactttnactttatagcaggctgcctaattaatccanacag

SEQ ID NO: 4848 - DNA, 270 bp, Homo sapiens
  unsure (38): n=A,T,C or G
  unsure (45): n=A,T,C or G
  unsure (96): n=A,T,C or G
  unsure (118): n=A,T,C or G
  unsure (120): n=A,T,C or G
  unsure (197): n=A,T,C or G
  unsure (247): n=A,T,C or G
  unsure (251): n=A,T,C or G
ttgacaaatgtataaccatctccacaaaggcaatgtanaaaattntcatcaccccttaaagtccttttacacttttttttgagactgcctcagtantaaccactgctaaatttatcananaactgcacacctggattgtattttgacagaacttccttccaacccaattgcttttaataatttttttatgataaatntttacccaaaatgttatagaatttatttacaaagaaatttcgtaagttgnattnctcctactggtgtggtatt

SEQ ID NO: 4849 - DNA, 592 bp, Homo sapiens
ctggcctgtcatataaaacatactgtcattgagcttaagctccgcttgttctgaggtttcacctccatgtgtttcattggtgcaaaagtggatctcttagttggtcacttaattctttctttttcagaaagatagtatgttcactggtatatttggtcactcttagaaccttccttcacattgttttttatgggacccatgaatggttagcctttcttttctattgtagaaggaaataaataggagtaaaaagaccattgtagtaaataagttcaaggggaacttgggaccagaaaccactgttatgtacaaaaaaatggcaaattcaataaactcaaatttaaaataatttttaaattaacagttatgataaattttatattttatacaaatagattgcttagaatggttctcaagaattataagagaaatgaactcacagtacaaaaattttataattactatacttgtgttttgtttgggggctgggaaatgtatttttacattgtagccaatcattttatatttgtcaatttaaatcttatgggtcttttttttttatctctcttgatgtcagattttatagtctttt

SEQ ID NO: 4850 - DNA, 379 bp, Homo sapiens
aaaaaaaatccttctaatctgctatgcttgaatgccacgcggtacaaaggaaaaagtatcatggaaatattatgcaaattcccagatttgaagacaaaaatactctaattctaaccagagcaagcttttttattttttatacaggggaatattttattcaaggtaaaattctaaataaaatataattgttttttatcttttctacagcaaatttataattttaagattccttttcttgtttatcagcagttgttattacatccttgtggcacattttttttttttaattttgtaaaggtgaaaaaagcttttatgagctcatgtagcaatcagattttcctgtggattgataataaatgaatatgatatatagttaaaa

SEQ ID NO: 4851 - DNA, 501 bp, Homo sapiens
  unsure (133): n=A,T,C or G
aaaatacataaaattttctaaaacgtaaaatggaaaggtttaatacacaggaaaaacactgcacaccttaactaaacaaactagaaagaaaatatatttatatacagaactaagatgagtccattcattattnttacaaatattcacatagatggtttagagataagtagttaagtgtgtctcattaattaatggatgctttctagcctctgtcttcattaattttatttcctattcaacaaaaaataatgctttcaggatatattacatatagagcaatatcatttttatcagtaatttgtctgaaaaagaggaaaacttaaaagcagaaccctacaaagcaaagcaaactacaaagcaaagagtaatcacagtgtttgcaaaatagaaatgtgtgactttaactttatagcaggctgcctaattaatccagacagtagagaaagcagactgaggcaggaagtaagaggtgggactaaactgttaagaagataataattt

SEQ ID NO: 4852 - DNA, 421 bp, Homo sapiens
  unsure (352): n=A,T,C or G
aaattctttaattaaggcattggtcccaacggtgcacatagattaagggattttgcttccttctgaactagatcatttgttagaggcttcagaaaaagaaaattagcttgaaatctagtctgggaaattgggggcagggaatgaaaaagttggtctcttgtttctccacgatacacaggcttcccatctaaagtcatgcttaactaaaagggaaaaaaatgaaccaagcaaaagtatatagagtagccgtgacatttgcattattttctagactttacatttgcctgcaacaggtataacatgaaactccagagggaatttggattgataggaatgttcacataaacaccancagtggctaactgttacacaacattcaaagtattcgagagaactgcctggagacagagagcgagggtcc

SEQ ID NO: 4853 - DNA, 501 bp, Homo sapiens
  unsure (373): n=A,T,C or G
cggagagactcaagatgattccctttttacccatgttttctctactattgctgcttattgttaaccctataaacgccaacaatcattatgacaagatcttggctcatagtcgtatcaggggtcgggaccaaggcccaaatgtctgtgcccttcaacagattttgggcaccaaaaagaaatacttcagcacttgtaagaactggtataaaaagtccatctgtggacagaaaacgactgtgttatatgaatgttgccctggttatatgagaatggaaggaatgaaaggctgcccagcagttttgcccattgaccatgtttatggcactctgggcatcgtgggagccaccacaacgcagcgctattctgacgcctnaaaactgagggaggagatcgagggaaagggatccttcacttactttgcaccgagtaatgaggcttgggacaacttggattctgatatccgtagaggtttggagagcaacgtgaatgttgaattactga

SEQ ID NO: 4854 - DNA, 477 bp, Homo sapiens
ccatctgcttagtagagctttttgcatgtatcttctaagaattttatctgttttgtactttagaaatgtcagttgctgcattcctaaactgtttatttgcactatgagcctatagactatcagttccctttgggcggattgttgtttaacttgtaaatgaaaaaattctcttaaaccacagcactattgagtgaaacattgaactcatatctgtaagaaataaagagaagatatattagttttttaattggtattttaatttttatatatgcaggaaagaatagaagtgattgaatattgttaattataccaccgtgtgttagaaaagtaagaagcagtcaattttcacatcaaagacagcatctaagaagttttgttctgtcctggaattattttagtagtgtttcagtaatgttgactgtattttccaacttgttcaaattattaccagtgaatctttgtcagcagttccctttt

SEQ ID NO: 4855 - DNA, 476 bp, Homo sapiens
ccacagaagttgctgctgacgctctgggtgaagaatggaagggttatgtggtccgaatcagtggtgggaacgacaaacaaggtttccccatgaagcagggtgtcttgacccatggccgtgtccgcctgctactgagtaaggggcattcctgttacagaccaaggagaactggagaaagaaagagaaaatcagttcgtggttgcattgtggatgcaaatctgagcgttctcaacttggttattgtaaaaaaaggagagaaggatattcctggactgactgatactacagtgcctcgccgcctgggccccaaaagagctagtagaatccgcaaacttttcaatctctctaaagaagatgatgtccgtcagtatgttgtaagaaagcccttaaataaagaaggtaagaaacctaggaccaaagcacccaagattcagcgtcttgttactccacgtgtcctgcagcacaaacggcggcgt

SEQ ID NO: 4856 - DNA, 432 bp, Homo sapiens
ctgttcccagctaaaggaattcagactctaaggattctaggagccgaaaagcaaagggtcgctggacgaagatgcagacactttgcctcaggtgacttgaatgggactgctgatgcctgtggtccccaagggacggaaaccacaaggaacagttctcctgactctgtcttattcctcctttatccgtagaacctaacgtagaggctggcatgttgcagctactcagtaaattacgtgagtgaattaatgaatgaccgcggctcattcattggaggttggtctccaacttgtctctcaacacccaggagacctacagggaaagctccccagggacttaaagccccaagaagagatggtttatccctggctgaaaacatgagccaatgcctgagagtcacctgtgtgtgaagtcggctcctgtcagggaatcag

SEQ ID NO: 4857 - DNA, 369 bp, Homo sapiens
aaaaatattaaattcaagttacatggaaattttatgcataaaaatcatattgtataatcagaatgaatcttcagtggtcatttctgaaaaacaaatactaactttagttaaaaagttaaacttttacttctctttttcaaagtattttcaaaacttcactattcaaattaaataggatattttaataatttacttcaaagatattatataattctgatcccaagagatcttcttgtggtgtttataaataaatctactaacagaaaagagtaagaaaagccaatctaggaaagaaaatcgttgaattaagtgagagtcaaagtgctaattcaatctatggggttttttcctccccatcatttcttttca

SEQ ID NO: 4858 - DNA, 379 bp, Homo sapiens
aaattgttgtgttatagtttatgcttcttaaatcatttttcaacctaaacagccaatttctaagcagacaggaaaactaaataataagttaattaatataacaaagatgcaggttcctgctcattccagtaatgtctttgaaagcaaaactaatatttattttctagattatccctgtgaataattgagaactttttggagtcaagtatgaataaaggtgtggcagaatataataatctggactattttctataggataattgctgggttataaaatcttaggtttgcttatgcccagtagctcctgcggaggcttaataataggcaattttgaatttgttcaaacctgtaatggcttgtaaacaaagatgaccatcac

SEQ ID NO: 4859 - DNA, 374 bp, Homo sapiens
ctggtggagaattaatgggttatattatgggtaaagcagaaggctcagtagctagggaagaatggcacgggcacgtcacagctctgtctgttgccccagaatttcgacgccttggtttggctgctaaacttatggagttactagaggagatttcagaaagaaagggtggattttttgtggatctctttgtaagagtatctaaccaagttgcagttaacatgtacaagcagttgggctacagtgtatataggacggtcatagagtactattcggccagcaacggggagcctgatgaggacgcttatgatatgaggaaagcactttccagggatactgagaagaaatccatcataccattacctcatcctgtgagg

SEQ ID NO: 4860 - DNA, 125 bp, Homo sapiens
gctttatgatattttatttgatattattcagtaatacaggttttgtggcaaatatgcatttctaaaagtgcataatgaaacattttatttttctagctcttgaatttgtcatagaaataagccat

SEQ ID NO: 4861 - DNA, 484 bp, Homo sapiens
  unsure (473): n=A,T,C or G
ccaatataattattaagtgactttggtgtgttcatgggaaactgatgtaattaaatattctgttatattaagagcgtgttcttattactgacattttgtaatcaagaaaagtgatatagaaaatatgtaggagactgttaaaattggtgattatggtaatatggtcatgtgaatcaatttttgatttataaagtactcacacaagttgtttcaaagatgatatttctgtgaacagagaggccatgggaagatttgaaaattattaaagaaaaattcctacagattttcaatgcagagaccataatcaaaaagtaaactttctttagtagtatgttcaatacatcatttaattttttaagttatcctgaagaaggaaaggtccttaattattatagtctaaacaaatttatagattactgtttgaagtaaataatacgagtgaatatttttcaaatgtgataaaatagcacaangtggctggtga

SEQ ID NO: 4862 - DNA, 235 bp, Homo sapiens
  unsure (8): n=A,T,C or G
  unsure (12): n=A,T,C or G
  unsure (15): n=A,T,C or G
  unsure (77): n=A,T,C or G
  unsure (80): n=A,T,C or G
  unsure (109): n=A,T,C or G
  unsure (116): n=A,T,C or G
  unsure (134): n=A,T,C or G
  unsure (146): n=A,T,C or G
  unsure (162): n=A,T,C or G
  unsure (178): n=A,T,C or G
  unsure (186): n=A,T,C or G
  unsure (189): n=A,T,C or G
  unsure (213): n=A,T,C or G
tcaaaggnattntgntgactttaatattgattatatttttaacaggaatttaagaaaatattactggaattaaaaanatntatatattaaacaagaattttctttgctntgtctancttaaactactactcaanctgcttaagttnttaagtattgtttgtnatcaccaataaataantgcatttntanttcatcagtcattattagcttttnttaaaagaagattacgttttac

SEQ ID NO: 4863 - DNA, 417 bp, Homo sapiens
  unsure (8): n=A,T,C or G
aaatattnattttcaaaacccctaaaacactggagtatgcttcacctagaaacagattacaggacgaatagctataatgaataagcaatacaatttgtatttgggatgcaattgtgttgtaaagtttcaaataatcaatttataaatttgttgcttttacttttacaaaaatattcatttaacccataacatgagttgcaaaattatctccagacttctacagatgattataaactgtaattgtgtttcagttacacagcaggtgaaaaatttaactgaaccgttacttcaaaatacaatgcattaaaaataattgttacaatataggcaccaataaaaagaattttcttggcatacaacaccacaacaactttctcaagtatctgtattatgtaaattaaaaagaggatgtaatgg

SEQ ID NO: 4864 - DNA, 238 bp, Homo sapiens; identical to SEQ ID NO: 4661

SEQ ID NO: 4865 - DNA, 145 bp, Homo sapiens
tttgatgccatttctaagacctacagctacctgacccccgacctctggaaggagactgtattcaccaagtctccctatcaggagttcactgaccacctcgtcaagacccacaccagagtctccgtgcagcggactcaggctccag

SEQ ID NO: 4866 - DNA, 250 bp, Homo sapiens
ccaggagagtgacaccatggagggtacaattgccagctcccccgtgtctgtgcagcattgtctgggttgaatgacactctcaaattgttcctgggatcgggctgaggccaggcctctcctggaaccacctctctgcttggtctgaccccttggcctatccagttttcctggttccctcacaggtttctccagaaagtactccctcagtaaagcatttgcacgaaaaaaaaaaaaaaaaaaaaaaaaaaag

SEQ ID NO: 4867 - DNA, 423 bp, Homo sapiens
aaaacactctgatctgaggccaatggcatcaaaatacaaattgctgaagtgggagaggaagtgaagggctgtttgttagggggactacagtggagattctggtgagtgtgggtgggctcgccagtgaccccaatattttctttgtgtaacaaccagagtaagcattaggatgcccaggctgccctctactggcagtttctgggaaggaccacaacagcagcacccaacctgcaacccacaacagccgagacaggagagagagaagaaagcaagagagagagaggagaggaagagagagaggagaggaagagatagaggaggggaagagatagaggacaggaagagagagaggaggggaagagagacaggaagggaagggagaggagaggaagagagagaggagaggaagagagaggaggggag

SEQ ID NO: 4868 - DNA, 529 bp, Homo sapiens
ccaatcaataagggactttcctctctgccattaagagcaacgatgctgaccacatactctgtgcctggagtgaggttggtgagggtgatggaattccgagagtggggcacccgatcttctcgaggtctcccactgaagtgctcgggatgatggcggatcctgtagccagtgatggtggctcgaggagcaatccagtgcacagtaaaagagttggcagtaatatcagaaaagtcaatgccagttggggaatcaagacctgttttctgtcttcctctaagaggtgtgctctcatgttgttcgtagacactggagacactcactacatattctgtaccaggcaggagatttgttaagaccactgcattgtctgaaggagaaattgacaactctgcaacatcttcctcatttttcacaggtgagtaacgcaccaggaagttggttaaatcaatggatgggggtggagcccaggtgacacgcatggtgtctggaccaatgttggtgaatcgcaggtcagtgggaggaggaacag

SEQ ID NO: 4869 - DNA, 282 bp, Homo sapiens
ctgcgtccaaatttacttgacaaagctataaacacaaggccctttctgaagtcctgctgattgagtttccccttccttttgtcggtggagaggaatgtaaaggctaagcgggtgtactcggactgtgtgcctctgggcttgctggcggtggcacttaaaggaactcattcattctctggatggggcaacactcctcacccgggatcccccaagggctttcccacacggagaccttcccgaacacagagacatctgatcttggcttgcccaagctggcccagg

SEQ ID NO: 4870 - DNA, 427 bp, Homo sapiens
ctgggggagggagcagacagtgagtgggaactggctggcccggggctccttcttgctcactcaccagtcttgctcttcacctctaagccaatgttgaccccttcatctataaagtccacaactctccggaagtcatcctcacggaactgtcgagaagttaaggctggggccccaagccgcaggccgcccggtgtgatggcacttcggtctccaggacaggtgttcttgttggcagtgatggatacaagctctagcacccgctcagcccgagctccatccaggcccttgggccgcaggtccaccagcaccaggtggttgtcagtaccacctgataccagtgagtagcctcgctctagcagggcatctgccatggcccgagcattcttcagaacctgcagggagtactcccggaacatgggggtgcagg

SEQ ID NO: 4871 - DNA, 524 bp, Homo sapiens; identical to SEQ ID NO: 209

SEQ ID NO: 4872 - DNA, 552 bp, Homo sapiens
ccaagaaaaaggctgaggaagaagctgaggctaagcccaagttcctctctaaagcagaacgagaggctgaagctctaaagcgacggcagcaggaggtggaagagcggcagaggatgcttgaagaagagaggaagaaaaggaaacagttccaagacttgggcaggaagatgttgggtttgttattctaccctgtgtagcccctagatggaagaggaaagagtgggatgagatacagtgtctcttaggagagatagaaacctgttcactctggagtttggaaaggggaaggatggtgggagtttatgagaaaacatttttctgttagatctccatttaccccatatcataagtctacccctttttttcttcatttggggttcctcgtctggattccctccattccctctcctcttttcttccatgagctcttctgcagctttgctttctttggtctgcagaagatcctcaggaacgggaacgtcgggaacgcagggagaggatggaacgggagaccaatggaaatgaggatgaggaagggcggcagaagatccg

SEQ ID NO: 4873 - DNA, 132 bp, Homo sapiens
ctgcccttccatgtcgtcacaggcataccgggcgtggacccactgcttggtgcccttgccgaagtagtagcacttccgttggaaattgatccacttttcagggcacgtgttgcacacaaagccgctggacac

SEQ ID NO: 4874 - DNA, 436 bp, Homo sapiens; identical to SEQ ID NO: 208

SEQ ID NO: 4875 - DNA, 452 bp, Homo sapiens
ccattaaaagttatttacaacagtgggagaaaaaaagacaagaagttgtttcacattacagacctccccccaccccaaagcctaatacttgcttaccaagtcaaaaaagagacacagttgattcacaggctggaggtttgaacttgagtaagacatttataaaaacctagacggggcagtgtcctccccagcccaggtgccactaggcacagcacaagagactaaaaacaacaggggaaggctggacactcaaggtttgggagtataagcaccccacttctggctcagggatttggggagtagggtaaacaaaacctacttggaaaagaattggggaagaaaaccaacaactgccttatgcaggggtggggacagggaaggaggtagggccagggacaggagcatttcacatcactaacctaacttgggaagctgtaagggaccatcttcaa

SEQ ID NO: 4876 - DNA, 396 bp, Homo sapiens
ctgcgctgcacagcctgggcagcaggctgagtatgggctcctcactcccacctcctggccttcaaggccctacttgttgccccagacagccatctttgagaacacaggtcttgggaggaagcggctggacttcatgtaggcagagatcttctccaagccctcaaagcgggagatgaagtccttcagatttgggaaggcgtccaagcacttgggctcaaatatacggtggaggtcaaggacatcatagacgagaaaatctacaaaagtgatcttgtttcctgcaaaccatggccgcttccccagaaactctgagtagagctttagcttttcagggagttcctccaagtactttggcttcagtttctcaaattctggattgtagcagatcatgcccag

SEQ ID NO: 4877 - DNA, 484 bp, Homo sapiens
ctgccagagtagtggctttaatgaccttagaaagggtacatcattctacaacatcctgcccctccccatcactctcctattctttcagaagagtgttggaatccacgacctcttctgtaggtactggaaggggcccgaagaattcccgcatatatccagaaaagccagaagtttggggacccattcttaaacttcctagaatgtccccttaggaatgagcatcggcacttggaggtgaaactcttgaagggtttttatttagaaatcagattgtcagcatgtggtggcatcttcttaaacttagataacgggtccagagttgcctggctagttagtgtcaggttcattagactagatgcatctctcctgacttgccagagtctctaggtgtggttgtacattctgaatgcactgttttgagtattcagcacctgttgtgcatgtgtctctgcagcaagcgatccccctccaagaccatcccagg

SEQ ID NO: 4878 - DNA, 636 bp, Homo sapiens
  unsure (603): n=A,T,C or G
attttagctgtgcaaagggaggtagtgtgggaaaagtgtttccattctgggaaaagcccaaaccgaatacggtcagcagtcaactccagggtttgggcttgattcctgttgaataatagttttgagcattctttgtggttaaataaattcttaaatctgcctagttttgatgaattcttttgtgaaacttgaaagagaatagacagtatgacatatagaattaatacaaaacagtttaacaaccatttaactgcagtgtaagaaaattggactgtaatcatatcgctactggcatctgttatctagtatgcatttctggtgtgtatctgaaaggaagacattttctaccctagatccaattgcatttatttatcaataagtgccattaaattgaaattatattacattttacactttctcaatgaatgaacaaattagtctgtagaatctagccacctgtttagcctagtcatgtgccttgaacatatatgtgtcccataatctggctcatggtacctgttcttctatccaaacctttcaattcatgctacctgattcatttatttgacatagatcttaggcccacttgaactcttttcttgnttatctagcatagcacaaacgtttttccagtct

SEQ ID NO: 4879 - DNA, 323 bp, Homo sapiens
cgagaaaattgaaatcattgctacactgaagaatggagttcaaacatgtctaaacccagattcagcagatgtgaaggaactgattaaaaagtgggagaaacaggtcagccaaaagaaaaagcaaaagaatgggaaaaaacatcaaaaaaagaaagttctgaaagttcgaaaatctcaacgttctcgtcaaaagaagactacataagagaccacttcaccaataagtattctgtgttaaaaatgttctattttaattataccgctatcattccaaaggaggatggcatataatacaaaggcttattaatttgactagaaaattt

SEQ ID NO: 4880 - DNA, 264 bp, Homo sapiens
ctgtgggcccggagggcctcggcgaagctgagatagaagaagccatcctcggacatcacgtctcccagaagctgcacggccggccggctcaggttcccctccccgagaagatattccaagagcgtgtgcctttcaaacttcttcatcgcctttctgcagcccagtgccttgaggtctttgagggcctggttgagagccatctggtagatgccttcgggcgagtggcccttttcctggggacgcaaggcgtagcccagcttctcg

SEQ ID NO: 4881 - DNA, 384 bp, Homo sapiens
  unsure (253): n=A,T,C or G
  unsure (260): n=A,T,C or G
  unsure (270): n=A,T,C or G
  unsure (300): n=A,T,C or G
gtctgtgtgcctgtgacaaggaggtggccttctgcctgaagcgcaacctggacacctaccagaagcgactgcgtttctactggcggccccactgccgggggcagacccctgggtgctagaagcccacaccctctaccctgttcctcagcatggagctctggcatccccacctcagtatctaacctgaaccagcctggcttttcaaacactccggggggaggtagtcccagcctcccccggaaccctctaccantgccttntgaccttctnaagctttccgaatcctcccagttgaggcantagctgtgtcctctgagggtggatgggaatcttgggagaagcccaagcaagggagccctcagaggtggtgtttggaccaaagca

SEQ ID NO: 4882 - DNA, 340 bp, Homo sapiens; identical to SEQ ID NO: 354
  unsure (45): n=A,T,C or G
  unsure (63): n=A,T,C or G
  unsure (64): n=A,T,C or G
  unsure (67): n=A,T,C or G

SEQ ID NO: 4883 - DNA, 606 bp, Homo sapiens
ctggtcatcttgtcatgtgaagaccatcttcctacagagtctaggctggccgtcgttgaagtcctcaccagtactacaccacttttcctcaccaacccccatcctattcttgagttgcaggatacacttgctctctggaagtgtgtccttacccttctgcagagtgaggagcaagctgttagagatgcagccacggaaaccgtgacaactgccatgtcacaagaaaatacctgccagtcaacagagtttgccttctgccaggtggatgcctccatcgctctggccctggccctggccgtcctgtgtgatctgctccagcagtgggaccagttggcccctggactgcccatcctgctgggatggctgttgggagagagtgatgacctcgtggcctgtgtggagagcatgcatcaggtggaagaagactacctgtttgaaaaagcagaagtcaacttttgggccgagaccctgatctttgtgaaatacctctgcaagcacctcttctgtctcctctcaaagtccggctggcgtcccccaagccctgagatgctctgtcaccttcaaaggatggtgtcagagcagtgccacctcctgtctcagttcttc

SEQ ID NO: 4884 - DNA, 579 bp, Homo sapiens; identical to SEQ ID NO: 210
  unsure (511): n=A,T,C or G

SEQ ID NO: 4885 - DNA, 285 bp, Homo sapiens
ctgttaatcgagtagcgctttgaagaaatgtaatggcttttcttaagtctccttctgacactttaacaagataagctattccctcatcactaattttgacattttccttcttggcaatgtctagtaatcgctgctgttgaattttatctgacagaggcttgaagcggaattttgaacatctagaggtcaggggttcaattattcgactgacatagttacagataagacagaatcgggtggctttcgactccttctccatggtacgtcttaaagctgcctgagcag

SEQ ID NO: 4886 - DNA, 345 bp, Homo sapiens
ctgctgaaaacttccttgaagaagaaattattcaagagcaagaaaatgaacctgagcccctatccttgagctcagacatctccttaaataagtcacagttagatgactgcccaagggactctggttgctatatctcatcaggaaattcagataatggcaaagaggatctggagtctgaaaatctgtctgacatggtacataagattattatcacagagccaagtgactgaacacgcattcccaactatatatctacagatgcattccattttaactcttcttgagctaaaacgtcaaataggagaggaagataagataaatatttgtaaataaaacctaaagttt

SEQ ID NO: 4887 - DNA, 86 bp, Homo sapiens
aaatgctttccctgagtattctatgaagtctggggatcttcgaatgctattaatcttagacagtaaattttataaagaaattcttt

SEQ ID NO: 4888 - DNA, 355 bp, Homo sapiens
ccacctcaagatgaaaacagataactccctaaatgttaactggctctactcccctaatattaaacataaaaaccacatgggaaatatagaaattcaaatagaagtaacataaacctgtcataaatcgtaaacaaaaaactatttgtgggacagcatggatgacaaatggtctactgtgtaaattttagaatgaggcagacaaaagttggaaggccggttaattttcccctccttctcctgcttcagcttcgtctccttgggtatccgatgtccacaatgtcaagttgtctctcagtaattgcattattagcgtgctgtctttgtatgactcttcacttaatgtatcaagttcagc

SEQ ID NO: 4889 - DNA, 86 bp, Homo sapiens
aaagaatttctttataaaatttactgtctaagattaatagcattcgaagatccccagacttcatagaatactcagggaaagcattt

SEQ ID NO: 4890 - DNA, 568 bp, Homo sapiens
  unsure (562): n=A,T,C or G
ccatgagtgacaggtggcctcttggtgggagaggtggggcagggggaaggcagctcccactagaccagggcagtatttaggggaaggaggcagattggagcagttggctgccaacacctggcctcactcagggagaggggccttgggcctggaagatatctgggtgaggtacccacaccatctgctgcaacctctgtgtatccattatgggctcacgccattcacaggcatgaattgagcacctagtatgtgggaaaacaggggaaacagagatggcacagacatggtctccatccttcgggggctccagtctagttgggggagatcagagaagttccatttgccactctaggccaagctaggtaagcggcagagccatgaagcattgtgggagcttggaggagggagtgagcccttgcagtcagggagaaggagtcagcctggggagacttccagaaagtagccctttgaccctgaggaggtggggatcagtcgtgatgaaagtaatagccattcagtagccccttgtaattcaccctgagccaatgcctggaggcagganaaagta

SEQ ID NO: 4891 - DNA, 198 bp, Homo sapiens
cctcggcctcgggcagcgtcagcatcgaggagatcgacctggagggcaagtttgtgcagctcaagaacaactcggacaaggatcagtctctggggaactggagaatcaagaggcaggtcttggagggggaggagatcgcctacaagttcacgcccaagtacatcctgcgcgccggccagatggtcacggtgtgggcag

SEQ ID NO: 4892 - DNA, 545 bp, Homo sapiens
  unsure (496): n=A,T,C or G
  unsure (530): n=A,T,C or G
  unsure (542): n=A,T,C or G
cctctggccggagctgcctggtcccagagtggctgcaccacttccagggtttattccctggtgccaccagccttcctgtgggccccttagcaatgtcttaggaaaggagatcaacattttcaaattagatgtttcaactgtgctcttgttttgtcttgaaagtggcaccagaggcgcttctgcctgtgcagcgggtgctgctggtaacagtggctgcttctctctctctctctcttttttgggggctcatttttgctgttttgattcccgggcttaccaggtgagaagtgagggaggaagaaggcagtgtcccttttgctagagctgacagctttgttcgcgtgggcagagccttccacagtgaatgtgtctggacctcatgttgttgaggctgtcacagtcctgagtgtggacttggcaggtgcctgttgaatctgagctgcaggttccttatctgtcacacctgtgcctcctcagaggacagtttttttgttgngtttttttttttttttggtagatgcatgacttgngtgtgatgaganaat

SEQ ID NO: 4893 - DNA, 556 bp, Homo sapiens; identical to SEQ ID NO: 211

SEQ ID NO: 4894 - DNA, 272 bp, Homo sapiens
aaatcttttctcccgtgtccctcttcttcaagcaactgaattatctgtataaaatggaaacatatctggttcccatttcaaacgatagtacagataccaaagaggagactgccagaaaaggagagtacaaagtgacctcttagagaggcccaggcacttgctgaaaatttaggggaagggtatgagatttctaaatgattgataatcacacaggtgacaactacaacacaaaaaaaccattgacaggaaaaatgaacatagttctccttttt

SEQ ID NO: 4895 - DNA, 310 bp, Homo sapiens
ctgtgacttatcatggagttgataacaagaagaataaagggcagctcactaagagccctctggcacaaatggaagaagaaagaagggagcaagtagctaaaattaagaagatggagatggagatggagcaggtgtttgagatgaaggtcaaagaaaaagttcaaaaactgaaggactctgaagctgagtctgcagatgtggatcctgactcctgagagaagtagctcaccgtgacgaagctgcgtttgcttttatcgatttgcaaatcaaagaagggggacatattgggagaaggccccccaaaatctgg

SEQ ID NO: 4896 - DNA, 601 bp, Homo sapiens
  unsure (550): n=A,T,C or G
  unsure (576): n=A,T,C or G
ccatcagcacgagggcactgaccagcacggcatacaaggtggccttccctagcaagatctcatagaggatggtggcagacaggaccccttgctggtaagactctgttgacaagaacagagcatgtaggcacctgtgcacaggtggctctggcctccctcacgcccctgtgtccgtggattctccatgccctggttcgagagcagagacggcgaaagatagagagaaaaaggagagactcacttaccggaggtgaagccacagtctgaaagaaaacaggggaagaaaaatggatgagagaatgctgctttgtaaggacattgagccttacatcacagactcacaggccacaaacacatgcatatcagatagtacaaagttagcctcctttgatagccctggttctgtctccctcatgctgctccagtgccagcgaagtggtcactatgatcttaggaaaccaggaccccagaagagaatgggatgcacaccactcagatgctgagctgtatggctggtcctcagggagacttgaaggcttagctctaaggngtcaggatctgaaggaagaatgagcntgaggtgctccattcagcctctatg

SEQ ID NO: 4897 - DNA, 526 bp, Homo sapiens
  unsure (424): n=A,T,C or G
ccaacatggggaaaccccatctctactaaaaatacaaaaattagccgggcgtggtggagcacctgcagtcctagctactcaggaggctgaggctggagaatcgcttgagcccggaaggtggaggtgcagtgagccaagatggcgccactgcactccagcctgggcaacaaccacaactgaaaaaaaaatctactgaggccagagtgagttggggcggggagcatggagagggggtcaggcttagccccaacaactcagaatttcacttccttgtacggccctcactttctccacctggccccggggcaggtctgagggtctgaagtctgttgatctgaaggtcctaggcaaatccagtcacttgggagccggagatatttaacatcacggcccggtcccctttcccaggggactcatttcctancactctctccactgtccttgccccacccctgggggaaaaaatgtatttttcttttgtgaatacttcctgaaacttgcgggcatagaaaccacaaactgctca

SEQ ID NO: 4898 - DNA, 561 bp, Homo sapiens; identical to SEQ ID NO: 356

SEQ ID NO: 4899 - DNA, 635 bp, Homo sapiens
  unsure (555): n=A,T,C or G
  unsure (569): n=A,T,C or G
  unsure (580): n=A,T,C or G
  unsure (621): n=A,T,C or G
ccacaactgtgaagttagaaaagccctgtcaaagcaagagatggctagtgcttcatccagccaaagaggtcgaagtggttctggaaactttggtggtggtcgtggaggtggtttcggtgggaatgacaacttcggtcgtggaggaaacttcagtggtcgtggtggctttggtggcagccgtggtggtggtggatatggtggcagtggggatggctataatggatttggtaatgatggaagcaattttggaggtggtggaagctacaatgattttgggaattacaacaatcagtcttcaaattttggacccatgaagggaggaaattttggaggcagaagctctggcccctatggcggtggaggccaatactttgcaaaaccacgaaaccaaggtggctatggcggttccagcagcagcagtagctatggcagtggcagaagattttaattaggaaacaaagcttagcaggagaggagagccagagaagtgacagggaagctacaggttacaacagatttgtgaactcagccaagcacagtggtggcagggcctanctgctacaaagaanacatgttttanacaaatactcatgtgtatgggcaaaaaactcgaggactgtntttgtgactaattg

SEQ ID NO: 4900 - DNA, 353 bp, Homo sapiens; identical to SEQ ID NO: 212

SEQ ID NO: 4901 - DNA, 305 bp, Homo sapiens
acaacaccgggaatattgccagagttaacctgaccaccaacacgattgctgtgactcaaactctccctaatgctgcctataataaccgcttttcatatgctaatgttgcttggcaagatattgactttgctgtggatgagaatggattgtgggttatttattcaactgaagccagcactggtaacatggtgattagtaaactcaatgacaccacacttcaggtgctaaacacttggtataccaagcagtataaaccatctgcttctaacgccttcatggtatgtgaggttctgtatgccacccgt

SEQ ID NO: 4902 - DNA, 602 bp, Homo sapiens
  unsure (524): n=A,T,C or G
  unsure (540): n=A,T,C or G
  unsure (579): n=A,T,C or G
ctgtatctgtcatttggtgccactaacttaggccagattaaacagaaagcaacctctgccacaaagcatctccctaggaagagatcacaacataaactaaagcactaactctcaagatcctgttgtcacgatgattcagttcatatattatctctgacttttctgagatgatctaataagttctaagcaaaaataaatatttaatctttgattaaataacattattacttagtctagggtgactgggttacgtaggatggcttgaaagagataagccttggtggacatcttaaaaatttaactgaagtaaagagcaactggtttagttcccttcccctggagtgttgtggtgttgagaagacaaaactttgggaacaatcacagaggggctagatagacaatgcaaaattgctgctggagagactgagtgagtagatgttaaataactaagtgcgtgctggatgaataatgttctggatccaagaaagacatacacaggtaaaaaatgaattcatgccttttgngttgttcaaaacttgnactttatttttctcaaatatttttacttatgctttttgncattatccacagtgttttttttt

SEQ ID NO: 4903 - DNA, 566 bp, Homo sapiens
aaaaaaagaaaatacaaccatgggaaagaaatcttaaatgaaaaacgcatctcattgtaggcatttttgcctcatattttactgggccatgtttgtttcctggtactcatgtatttttttttccagatctctttccccaagttgctattgtaagagtattctgctgcgtgtggatgcagttatacacattaaagcagatctggagtctgaagtagctataaagcagctataaaacagaaatacatgcatagctgcagaaaccatgataggtagaggacttttcttttggttttgttttgttttgttttgttttgtttttggttttacagagaagagatttttattacaaagaaaaaaattccagtgaattgtgcagaaatgctggtttttacaccatcctaaagaaaaactttacaagggtgttttggagtagaaaaaaggttataaagttggaatcttaaattgtaaaattaaccattgagtgtcaaagttctaaaagcagaactcattttgtgcaatgaacataaggaaagactactgtataggttttttttttttctcctttt

SEQ ID NO: 4904 - DNA, 304 bp, Homo sapiens
aaaaacaagttccccagagaagctggcacttcctttgccctccaaaaaggacctgaaaagtcccaatccaaactttagaaaattagttatgagatgcaataaatgatgatcaaagcagtcagagggagaaggatgaatgtgtcttccatttagctagagactgtagcatagcctctttaggtgttggtggatcagtaaaaacgactgaagtaccagaagtgcttggaaggataggggtacaaagtaatgaccataataccttgtctaaatcagtagcagggcttcatggctaggaaactttttt

SEQ ID NO: 4905 - DNA, 592 bp, Homo sapiens
  unsure (387): n=A,T,C or G
aaaagcaaaaatgcaattctgtagatgaaaacagttatctcagagggtcaaccacacaatgtcatacagagacgctggtcttaagccatttttttccatattcatataatttcaaaacatgagaagtatcctacttgctgagaagtgccaaatgaccctaatattcaagatatcttagaaatgctatcctttagttaacatacccttaaattttgtaacattgattttaccctggatttagtccatacacgtcaatgtacagacttatcaaagtacaatgctggaacaactagtgtttgtatttttggaatctagaaaataaaaacaatatagccatgatttcaaataggtgagtttccttatataacatttattcatatttattgnataagcatcatgattttttcttccaattaagttttagtgacttcctaaagacatttttaacaacattcctcaaaaataaacttacttagttttcagttttagttactagtgcctgcctataaaaggaccttaaatgatttaaccctaaagccagattcattcctatatatacccagtcagttgtctgcaaagaagtcctaagact

SEQ ID NO: 4906 - DNA, 440 bp, Homo sapiens
  unsure (300): n=A,T,C or G
  unsure (351): n=A,T,C or G
  unsure (362): n=A,T,C or G
ctgccgctcatccaccatcagtgactttgtgctgttatcattcatgtgcaccttgacgacgagcttcttaaccttggcctccttcagtttttccagcgccagcttaattttatcagccttggcttgggcttcttcctcttcctgagagagaggttcaggaggtggtggtggcagtggaaggtctaacacaggatcggctggtggaggtggtaagtcatcctcatattggctgataccagtggcagcaacatttgttccataaccaagagaggctgcaccactgaaaattgatgcttgtanagatgctgaatgatgttgattctgcaaggactctttctgtgcctggattgncctctgctcancctcacttatgtctgctaccagatctgccatgagagcatctaaatcttggtcttccagtgcatttaaggactcattta

SEQ ID NO: 4907 - DNA, 282 bp, Homo sapiens
ctggtgctgcttgcaggaagggcagtaccaggggttttccttctccagggtctccacagtggtgaagagctcaatgcactcctgcagccgcacgggagccttcttcatcacgtacccgacgcagtcatgcttcacgtagccctcagcctctacctcgtcatagtaacgcttcttcatctctggctcccagtcgatagcaatgtacggctgggcatggacttcttcaggggaggttgtgcggtcgctggtcccattggagttcaccgtctgcagggtgaacag

SEQ ID NO: 4908 - DNA, 300 bp, Homo sapiens
gctgtgtgaacgtgtatgtacctaggatatgttaaatatatagctggcaccttagttgcatgaccacatggaacatgtgtctatctgcttttgcctacgtgacaacacaaatttgggagggtgagacactgcacagaagacagcagcaagtgtgctggcctctctgacatatgctaacccccaaatactctgaatttggagtctgactgtgcccaagtgggtccaagtggctgtgacatctacgtatggctccacacctccaatgctgcctgggagccagggtgagagtctgggtccagg

SEQ ID NO: 4909 - DNA, 549 bp, Homo sapiens
ctgtgaacatctgttctttcttcctcttctgtctactgcatgcaggcccggaagctgagcgttagtcaaaggtacaggaagggaaaagagaagagggcaaggcccatcccccaagaaaggaagggctctgatgcagagggagcaggagctgaggtggagacggccactgcctctctcaccctctgttccatccctctgctcaagaaaaccaggcttagcagagtgagacagacgctttttattggtctggctggcgtgcctagtggaaagctcaggcagagcttcctatcttgccctggctcccatcttccctctcctgggagttcatcacacatcccgagagggaagagtgtcctgggcagaggtggcaggcaaagccgggtaaaaactccagggctgggaagcaaatggggctcagggtgatgcagaaaatgtgatgttgccaggccatccaaataaagcatccatcggggcagaggagaagctgtttccctgcagacactcctctgcccccaccaggaatgggaggggcaggaggaagagcttccc

SEQ ID NO: 4910 - DNA, 513 bp, Homo sapiens; identical to SEQ ID NO: 213

SEQ ID NO: 4911 - DNA, 468 bp, Homo sapiens
ctggctgtgatttttgctacaggccacagtcaggagcacatgatagtagcattggcacaggccacggtggaccgtttttcagtgtacagttccagcaaaacctggtattctccctgaggaatagtaaattcaggattattgacaggcccagcatagtaaatctgctctcctttccttcttccacagaaagaaaacttgggcagagccgcctcacagatgggataggagaaattcaaaacagatgagccttgagacatgagagctaggtcaagaaaaagctctttgatgtcctctctcagaataattccaaatctaatgttgatatttgattttaattgcttggaacacttttcaacagaaaagccaaaatcttgtaatggatcgcaactctggtagagcacttccaagccgctgtcgctacagaccacgtgtgtgggccaggctttcccaccgccgcctccactgcag

SEQ ID NO: 4912 - DNA, 575 bp, Homo sapiens
ccatggagacagggccgttttcttccctgggagtttgctcagaaccaggcactgctggggaccatggatggggaggaggggcacagggcccagtgcagatgaaggttgcacaaacaccccaaactgagagcccggcctcctggcaggcgagtaagcgagcaggcgcctcgacagcacagcctgtgctttcccctcagatcaatctgctactcccttttccttaggagggagaggagcaggcagataagcctggtgtccaccaccctctctgccccacctgtagaggaagggctcaagggacaggagagcagagagggagtgtgacgctggcctcagagcccgtgcagggtcgaggagaggctctcctcggtggggagtcaggggaagatcggtttcctgttgaatctgggctgggtgtgtcttagctgatcttctgtatcagcttctcgtcagacaggcagtagaggctgttgatggacaagtctgagatgaagtgctcgcaggcttttcgagtgatctgcttgcatcctcgaaggtcgatcaaggtgacgttggcaatgcgccgtaggtagatc

SEQ ID NO: 4913 - DNA, 555 bp, Homo sapiens
ctggctgggcccaagagctccatctgtttccccaaagtacaggcagcttctaggccattgagtggggcatgatattggatgcttggctcaggaaacaaccccagccaacccaaggggcagtgggacatgttggcctcaggttagaaattattgctcaaagcagaaacagttgtgtcctagagagggtctgttaaaccctctttccatgtgtatctctatgtagcaattgatgggccctgcggtcaggatccctggtttctccagctccatgaatgcctccctgtgaggccctggacagtttctccctcttcttctcctggcttcagtttccccgtatgtacattgagacagtaagactggatgattctcaggttccctctggctttccattctggcatcccagagtggaggctctgggagggcagaaccctgttcctgcctcagtttccccacctgtgggtctgcgtatagggctgggtatggaggtactgagtaatggagtgctgcgtgaacatcccagtctccctgtggatagctgtgctgtgagatccaact

SEQ ID NO: 4914 - DNA, 490 bp, Homo sapiens
ctgcaactcggggacatacaggtgcactctgcaggacccggatgggcagagaaacctaagtggcaaggtgatcttgagagtgacaggatgccctgcatagcgtaaagaagagacttttaagaaatacagagcggagattgtcctgctgctggctctggttattttctacttaacactcatcattttcacttgtaagtttgcacggctacagagtatcttcccagatttttctaaagctggcatggaacgagcttttctcccagttacctccccaaataagcatttagggctagtgactcctcacaagacagaactggtatgagcaggatttctgcaggttcttcttcctgaagctgaggctcaggggtgtgcctgtcagttacactggaggagagaagaatgagcctacgctgaagatggcatcctgtgaagtccttcacctcactgaaaacatctggaaggggatcccaccccattttctgtgggcagg

SEQ ID NO: 4915 - DNA, 418 bp, Homo sapiens
ctgagtttttatccaattgaaatagtaatttaagtcactgccttccatcagttcttttccccaagctgctaacttggcaataattcttgctgccatatgaacagtgaagggatcctggcgattcaacattggcagaaagtagggccacgcagtgttcttgctacatcttgcatagtcaaagaaaatgctaacacgctgatgattttcctgcagcatatcatccaccatagttagtatatactgaacggtctgttctttgcagatatgagtcatcagatttataaatgttttagcacactggctgccttcagtttgaagcatctcttgcttctcttcagggcttcgtttcatttcaaacctctgaataaactcacaatcttcagcagaaatcatctgtccctgaagataggattgccag

SEQ ID NO: 4916 - DNA, 202 bp, Homo sapiens; identical to SEQ ID NO: 358
  unsure (45): n=A,T,C or G
  unsure (133): n=A,T,C or G

SEQ ID NO: 4917 - DNA, 538 bp, Homo sapiens
  unsure (77): n=A,T,C or G
ctgtacacatgaaaattgaattgtttcaaaaggagcaatgatagcaagagaaagttcttggcattttaagaaaagtncatatacatagcaagaaatgaaagtaaatcaaaatacatagctttgtacatgttagaaatatccaatgtgccaccaacacaacaaccgccctattaaaaagtcctcaggtctggagacatctgtatttttctttgtataactacattcgcattacccaaccacatatctctcccatggtctgttacccattaggaagcttttaaccagaatttttggcaatatgcttttcttcaaataaaacaagccttcaaataaatcattatgtctgacaactgaattgggtaaagtctttctgaaatatgtgtaatctttagaaaattcttcttttttccttcataaatcagcagtgctccatcttcaaataaatcatgatcagtcacaatcttaactcatgtgctcatatgttctcttcatccaacattttgttgataccatcacatagtttttgtaagtggggttt

SEQ ID NO: 4918 - DNA, 322 bp, Homo sapiens
  unsure (296): n=A,T,C or G
ctggaaacgctgagtattcgaggaaataacattcggtattttattctaccagacagtttacctctggatacactacttgtggatgttgaacctaaggtgaaatctaagaaaagggaagctgttgcaggaagaggcagaggaagaggaagaggaagaggacgtggccgtggcagaggaagagggggtcctaggcgataatgtctctcaagatttcaaagtcatatgagatttgggatattttttgtacaggttgtgtttgtttatgtcagtttttaataaacataaatgtggggcanaaaaaaaaaaaaaaaaaaaaaaaaaa

SEQ ID NO: 4919 - DNA, 520 bp, Homo sapiens
aaaagatagagccacatggacagaaagatcaatattgccctttatagtggctgctgcggttgtagctccgagactatattggagggggtgaggaaggacaagggggccagcaggtgggggacagcggcagacccctcccccaccccgatgctttggtccaaacaccacctctgagggctcccttgcttgggcttctcccaagattcccatccaccctcagaggacacagctactgcctcaactgggaggattcggaaagcttcagaaggtcagaaggcattggtagagggttccgggggaggctgggactacctccccccggagtgtttgaaaagccaggctggttcaggttagatactgaggtggggatgccagagctccatgctgaggaacagggtagagggtgtgggcttctagcacccaggggtctgcccccggcagtggggccgccagtagaaacgcagtcgcttctggtaggtgtccaggttgcgcttcaggcagaaggccacctccttgtcac

SEQ ID NO: 4920 - DNA, 284 bp, Homo sapiens
ccaggaatcgcttaatcctgaaagtcttgtgagaagacatggcgagcagcggagtcaagaacacaccacgatggcggagaaaggagacattggagaagaaccaagctgggtctataaggaattgcacatgagatggcacacatatttatgctgtctgaaggtcacgatcatgttaccatatcaagctgaaaatgtcaccactatctggagatttcgacgtgttttcctctctgaatctgttatgaacacgttggttggctggattcagtaataaatatgtaagg

SEQ ID NO: 4921 - DNA, 453 bp, Homo sapiens
ctgccatgttgagaggtgccttgtggagaggctcatgtggcgaggaactgagactggcttctatccaacaaccagtgaggaactaaggccctaaagtcctatagtccacaaggaactaaatcctaccaacaactacatgagtgagcctggaatctgattttccccagtggggacttaaggtacctacaacctggctgttatgggctaaactgcatcctgcccaaatttatatgtttgagtcttaactcccagcacttcagaacatggttttgtttggagacatagtcattaaagaggtaatgaagttaaaatgaggtcattaggatgagtcctaatccaataggactggtgttcttatatgaagaggaaatttgaacacagacacatatacaggaaagaccatgcgaagaagacacagagaggaaacggccatctacaatccaaggagagagg

SEQ ID NO: 4922 - DNA, 343 bp, Homo sapiens
ccacttgtgtgggtcctcacaagcaaagagagcactaaacttgacattgggggtccaccactccaactttgctttctgaaggttttggtgtacattgagccccagaaggaaaggagagtatctgtgagtgggggcctcccttgaccccagtacgaagtctatgccctgaatccccagagtagcccttcctggtgcccaactggcctggggacaaacagcgtccactacatctaggactgccggctaagtggacacacttcttgacctcctaccaggaactttggtaaaagctagctttggggaaggggttgggtgtaaatatgagagggtggagggagaccag

SEQ ID NO: 4923 - DNA, 538 bp, Homo sapiens; identical to SEQ ID NO: 214

SEQ ID NO: 4924 - DNA, 562 bp, Homo sapiens
  unsure (25): n=A,T,C or G
ccatgagtgacaggtggcctcttgntgggagaggtggggcagggggaaggcagctcccactagaccagggcagtatttaggggaaggaggcagattggagcagttggctgccaacacctggcctcactcagggagaggggccttgggcctggatgatatctgggtgaggtacccacaccatctgctgcaacctctgtgtatccattatgggctcacgccattcacaggcatgaattgagcacctagtatgtgggaaaacaggggaaacagagatggcacagacatggtctccatccttcgggggctccagtctagttgggggagatcagagaagttccatttgccactctaggccaagctaggtaagcggcagagccatgaagcattgtgggagcttggaggagggagtgagcccttgcagtcagggagaaggagtcagcctggggagacttccagaaagtagtcctttgaccctgaggaggtggggatcagtcgtgatgaaagtaatagccattcagtagccccttgtaattcaccctgagccaatgcctggaggcaggag

SEQ ID NO: 4925 - DNA, 639 bp, Homo sapiens
  unsure (612): n=A,T,C or G
  unsure (617): n=A,T,C or G
  unsure (624): n=A,T,C or G
  unsure (627): n=A,T,C or G
aaagatttagtgcttaacattttcccaagtgtgggaacattatttttagattgagtaggtaccttgtagcagtgtgctttgcattttctgatgtattacatgactgtttcttttgtaaagagaatcaactaggtatttaagactgataattttacaatttatatgcttcacatagcatgtcaacttttgactaagaattttgttttacttttttaacatgtgttaaacagagaaagggtccatgaaggaaagtgtatgagttgcatttgtaaaaatgagactttttcagtggaactctaaaccttgtgatgactactaacaaatgtaaaattatgagtgattaagaaaacattgctttgtggttatcactttaagttttgacacctagattatagtcttagtaatagcatccactggaaaaggtgaaaatgttttattcagcatttaacttacatttgtactttagagtatttttgtataaaatccatagatttattttacatttagagtatttacactatgataaagttgtaaataattttctaagacagtttttatatagtctacagttgtcctgatttcttattgaatttgttagactagttctcttgncttgngatctgngtncaattttagtca

SEQ ID NO: 4926 - DNA, 526 bp, Homo sapiens
  unsure (476): n=A,T,C or G
ccaggtgtgggctcaagagccttactctttccatctcagtttaggggcgcagccagctcctcttcccaatagggctctttctgctttccctctccttggccctagatttgtaatccatgaaaaagcacaaggtcctggctccttgcggtcacattctggttctctgcgttttgtggactctgctctcactgttcacccagcactagcagtaccagatggttctgtggagtcctggggaatggagagagcacagtctgactccctgccaagtagccaggagttgacttgcccatggtccgctggctttcccaccacttcctacaggatgggatctaagagactcaagagctgggtttctttcagcactctgtactgtcccaaatagcaaacaaatcactttgtagccagatttctgaatggaaatgagaaattgaattctccatggacttttaggtttatgggggagttttagctgngtttcttggttttatttcagccaaacatgtctgcttttgatttttttttt

SEQ ID NO: 4927 - DNA, 236 bp, Homo sapiens
ctgggccgctaagtaagggcctccaaagacttccatacccaaaccctggagcctgtgagggtgacctgatgcagcaaagaaggactctgcagacgggagtgagttaagggtcttgcgaggtcattctggacttggggtgggccttaaattcaatgaccagggttcttataaagagagcggccacaggaagacggaggagagactggaagatgcagccgcagcaagggacacggtgg

SEQ ID NO: 4928 - DNA, 463 bp, Homo sapiens; identical to SEQ ID NO: 359
  unsure (6): n=A,T,C or G
  unsure (43): n=A,T,C or G
  unsure (45): n=A,T,C or G
  unsure (47): n=A,T,C or G
  unsure (108): n=A,T,C or G
  unsure (110): n=A,T,C or G
  unsure (420): n=A,T,C or G
  unsure (448): n=A,T,C or G

SEQ ID NO: 4929 - DNA, 596 bp, Homo sapiens
  unsure (591): n=A,T,C or G
ccacactgcacctccttcgctgtcaagtgggtcccccacgaagatactgcacggagagcagtgccaagcctgtggatcaggaatatcaacagcccccagagagtggtgctggctgagggtctgagagcaggacaggaaaacccacctatggaataggtgcctatccctgtgaagatgaacctctggcccttccaggatggaaggagtgcaatgtagtcaactcctcacttagggtctggttggtcacctaaagaaatagagccctaccagggaagatcattgggttcaaatgctgatgagtaggacatttagaggtggcagtgtctggatctaccttggtaggagggagtcagtactgttggacccataggtagcctcatccctgccactgtgtttgctccatttatgtacccatcctacccggcctgggctgacccatggggaaggctggctaatttcagtgcttctgcttggttgttcagggccatttcaggtttgggtgttttctggggatgttaacatgggattcaggctcaactcacaagaaacttttccatctcatgatggatgctgttgggcatgtccaatgtntgact

SEQ ID NO: 4930 - DNA, 139 bp, Homo sapiens
gtgctagggaaggcgggaaccttgggttgagtaatgctcgtctgtgtgttttagtttcatcacctgttatctgtgtttgctgaggagagtggaacagaaggggtggagttttgtataaataaagtttctttgtctcttt

SEQ ID NO: 4931 - DNA, 578 bp, Homo sapiens
aaattttctttttgtttcactggaaaggaaagatgatgctcagttttgccggacccaggatgaagaggttggagatgggaccacatcagtaattattcttgcaggggaaatgctgtctgtagctgagcacttcctggagcagcagatgcacccaacagtggtgatcagtgcttaccgcaaggcattggatgatatgatcagcaccctaaagaaaataagtatcccagtcgacatcagtgacagtgatatgatgctgaacatcatcaacagctctattactaccaaagccatcagtcggtggtcatctttggcttgcaacattgccctggatgctgtcaagatggtacagtttggggagaatggtcggaaagagattgacataaaaaaatatgcaagagtggaaaagatacctggaggcatcattgaagactcctgtgtcttgcgtggagtcatgattaacaaggatgtgacccatccacgtatgcggcgctatatcaagaaccctcgcattgtgctgctggattcttctctggaatacaagaaaggagaaagccagactgacattgagattacacgag

SEQ ID NO: 4932 - DNA, 483 bp, Homo sapiens
  unsure (462): n=A,T,C or G
cctacagacttatttcttcttggacacacccacggtgcggccacggcggccagtggtcttggtgtgctggcctcggacacgaaggccccagaagtgacgcagccctctatgggcccgaatcttcttcagtcgctccaggtcttcacggagcttgttgtccagaccattggctaggacctggctgtattttccatcctttacatccttctgtctgttcaagaaccagtctgggatcttgtactggcgtggattctgcataatggtgatcacacgttccacctcatcctcagtgagttctcccgccctcttggtgaggtcaatgtctgctttcctcaacaccacatgagcatatcttcggcccacacccttaatggcagtgatggcaaaggctattttccgccgcccatcgatgttggtgttgagtactcgcaaaatatgctggaacttttcagggatcactanagacatggctgcagcacaagc

SEQ ID NO: 4933 - DNA, 557 bp, Homo sapiens
cgtgactaagatggaggcgtttttggggtcgcggtccggactttgggcggggggtccggccccaggacagttttaccgcattccgtccactcccgattccttcatggatccggcgtctgcactttacagaggtccaatcacgcggacccagaaccccatggtgaccgggacctcagtcctcggcgttaagttcgagggcggagtggtgattgccgcagacatgctgggatcctacggctccttggctcgtttccgcaacatctctcgcattatgcgagtcaacaacagtaccatgctgggtgcctctggcgactacgctgatttccagtatttgaagcaagttctcggccagatggtgattgatgaggagcttctgggagatggacacagctatagtcctagagctattcattcatggctgaccagggccatgtacagccggcgctcgaagatgaaccctttgtggaacaccatggtcatcggaggctatgctgatggagagagcttcctcggttatgtggacatgcttggtgtagcctatgaagccccttcgctgg

SEQ ID NO: 4934 - DNA, 588 bp, Homo sapiens; identical to SEQ ID NO: 215

SEQ ID NO: 4935 - DNA, 392 bp, Homo sapiens
ctgcgctgcacagcctgggcagcaggctgagtatgggctcctcactcccacctcctggccttcaaggccctacttgttgccccagacagccatctttgagaacacaggtcttgggaggaagcggctggacttcatgtaggcagagatcttctccaagccctcaaagcgggagatgaagtccttcagatttgggaaggcgtccaagcagttgggctcaaatatacggtggaggtcaaggacatcatagacgagaaaatctacaaaagtgatcttgtttcctgcaaaccatggccgcttccccagaaactctgagtagagctttagcttttcagggagttcctccaagtactttggcttcagtttctcaaattctggattgtagcagatcatgc

SEQ ID NO: 4936 - DNA, 587 bp, Homo sapiens
aaagatttagtgcttaacattttcccaagtgtgggaacattatttttagattgagtaggtaccttgtagcagtgtgctttgcattttctgatgtattacatgactgtttcttttgtaaagagaatcaactaggtatttaagactgataattttacaatttatatgcttcacatagcatgtcaacttttgactaagaattttgttttacttttttaacatgtgttaaacagagaaagggtccatgaaggaaagtgtatgagttgcatttgtaaaaatgagactttttcagtggaactctaaaccttgtgatgactactaacaaatgtaaaattatgagtgattaagaaaacattgctttgtggttatcactttaagttttgacacctagattatagtcttagtaatagcatccactggaaaaggtgaaaatgttttattcagcatttaacttacatttgtactttagagtatttttgtataaaatccatagatttattttacatttagagtatttacactatgataaagttgtaaataattttctaagacagtttttatatagtctacagttgtcctgatttcttatt

SEQ ID NO: 4937 - DNA, 551 bp, Homo sapiens
  unsure (524): n=A,T,C or G
  unsure (525): n=A,T,C or G
ccaagggaaggtctatcctcttatcaaccgaagacgatttcaacaaatggacgtacttgagggcttgaatgtcttggtgacaatatctggcaaaaaggataagttacgtgtctactatttgtcctggttaagaaataaaatacttcacaatgatccagaagttgagaagaagcagggatggacaaccgtaggggatttggaaggatgtgtacattataaagttgtaaaatatgaaagaatcaaatttctggtgattgctttgaagagttctgtggaagtctatgcgtgggcaccaaagccatatcacaaatttatggcctttaagtcatttggagaattggtacataagccattactggtggatctcactgttgaggaaggccagaggttgaaagtgatctatggatcctgtgctggattccatgctgttgatgtggattcaggatcagtctatgacatttatctaccaacacatatccagcgtagcatcaaaccccatgcaatcatcatcctccccaatacannatggaatggagctttctggtgtgcta

SEQ ID NO: 4938 - DNA, 490 bp, Homo sapiens
aaatgaaatgcaatataaaatactaatacacttttcttccaaaagtggaaatgcttaagtaccctatactagaaaaaaaaaaattaggctgtttattcaattccacaatgtataatacagcagttttatgtcccttattgctgacagcttcgataaaaactattaacaagtagttccaagcacagaaatagatgtacagtatgagcacgatttttctttatattaatttttaatgtcctatcatgtggattaaatgcataaagggcaaataaaaatgaggaatcttccctaagtaatcaaaacatatgtcttattgagaagaaaattttagaagctgattaaaatccttcagcactagctttgcaattaattctggagaaataccttgacacatcttatagtatttgagtttccttataactttaccttccttcaaacagaagctacctatgtgcaaataaactggttgttctgtcaggacttctaaaag

SEQ ID NO: 4939 - DNA, 92 bp, Homo sapiens
cggccgcagaagcgagatgacgaagggaacgtcatcgtttggaaagcgtcgcaataagacgcacacgttgtgccgccgctgtggctctaagg

SEQ ID NO: 4940 - DNA, 567 bp, Homo sapiens
ctgagagccatccccacactcctcagatgcctccatcaacaccaagcagcagtttcttaaccacgttgaaaccaagactgaagactgaacctgaagaagtttccatagaagacagtgcccagagtgacctcaaagaagtgatggtgctgaacgcaacagaatcatttgtatatgagcccaaagagcagaagaaaatgtttcatgccacagtggcaactgagaatgaagtcttccgagtgaaggtttttaatattgacctaaaggagaagttcaccccaaagaagatcattgccatagcaaattatgtttgccgcaatgggttcctggaggtatatcctttcacacttgtggctgatgtgaatgctgaccgaaacatggagatcccaaaaggattgattagaagtgccagcgtaactcctaaaatcaatcagctttgctcacaaactaaaggaagttttgtgaatggggtgtttgaggtacataagaaaaatgtaaggggtgaattcacttattatgaaatacaagataatacagggaagatggaagtggtggtgcatggacgactga

SEQ ID NO: 4941 - DNA, 387 bp, Homo sapiens
  unsure (255): n=A,T,C or G
  unsure (277): n=A,T,C or G
ctgtcagggggtcagcgacaggcagtggcgttggcccgagcattgatccggaaaccgtgtgtacttatcctggatgatgccaccagtgccctggatgcaaacagccagttacaggtggagcagctcctgtacgaaagccctgagcggtactcccgctcagtgcttctcatcacccagcacctcagcctggtggagcaggctgaccacatcctctttctggaaggaggcgctatccgggaggggggaacccaccancagctcatggagaaaaaggggngctactgggccatggtgcaggctcctgcagatgctccagaatgaaagccttctcagacctgcgcactccatctccctcccttttcttctctctgtggtggagaaccacag

SEQ ID NO: 4942 - DNA, 297 bp, Homo sapiens
cctggttccatcctgggcactacagttgacatcagcgccatattcaaggaggtgtcgcacaatgttgagccagcccctagcacaagcttcatgcagggcgcagtaacctgcgttgtcccgatgatttacatcacaaatcttgttctctaagcagtacaggaccacttcctcatagccaagcctggctgcccgctgcagaagggtctcgccagcgttcttattgacaataagtctccgtgcttccggcggcatagggcgagactgggtggtctcctgaggggaacttgagcatggtag

SEQ ID NO: 4943 - DNA, 401 bp, Homo sapiens
  unsure (393): n=A,T,C or G
aaatcgtttgttttgaaaagtatatccttgaaaagtattttgatatagatgggaagattttcatagactggcatctatttttccacctactgtttaatgaagtaaactgttgaatgatgtaaactgttaaatgaagtaaacagttaaaactgatgacataaaagacaagcaaagcgaaggaaacatgttataaaagataagtattacagcattcttaagtatggtactttataaaatgaaaaccgggatgctgtcttctgagatatcaacatatttataaggagcacatgctatgtgacatacttcaggatgccaagaattttaattaaaactcaacttctataaagtgaatataaagctaataagaggaatatttttccacctctggcctanaccaccag

SEQ ID NO: 4944 - DNA, 497 bp, Homo sapiens
ccacaggagcagaggcagacctgggatgccccagtttctcttcagggatggatagtgacctgtcttcattttgcacaggtaagagagtagttagctaacctatgggaattatactgtggggccttgtgagctgcttctaagaggctaacctggaaactaagctcagaggcaaggtaataaagcacttcagggcttgctccccaagtgggcctgatttagcaggtggtcctgcgggcgtccaggtcagcaccttcctgtagggcactggggctagggtcacagcccctaactcataaagcaatcaaagaaccattagaaagggctcattaagccttttggacacaggaccccagagaggaaaaagtgacttgcccaaggtcgtaagcaggctactggcatggcaagagcccagcttcctgacggagcgcaacatttctccactgcactgtgctagcagctcagcagggcctctaacctgtgatgtcacactcaagagg

SEQ ID NO: 4945 - DNA, 580 bp, Homo sapiens; identical to SEQ ID NO: 216

SEQ ID NO: 4946 - DNA, 478 bp, Homo sapiens; identical to SEQ ID NO: 647

SEQ ID NO: 4947 - DNA, 461 bp, Homo sapiens
cctactatgtgccaaggaggggtaaggcagctagctctcacagacacaccccacagtgaaaatcacacacacacacacacaccccggcatctgtgctcactcacaggcagactgctcactttcttgcacctttcttgccatcacctcggccacacccacattcctccaataggcttgggaaccagcatggaagggtcaagtgtcatagaagaaaccccctagcctaccctactcccagacttcatgccagaggtttaactccacttcccttctgtttgcctgcctagatgctctccccttctccatccacaagcggtcagggcgacaggtaggcagactcctgagaaccagaagtccagaggctttgggtgtgtggagtgattccagtgccttcagattccttcaggctcctgggggtcccctctgccagccaccctatgttcagatcgtccatctgatgg

SEQ ID NO: 4948 - DNA, 479 bp, Homo sapiens
ctgtgagggtgtgactactgatgatgcttcaaaggaagaggaagcagcaatattttaggactgggtaccagcagagaaggcagggaggagggagcgggggatcaggctggagggcgcgagttcaccatgaggctgaggaacgattctctctcgtggggtccaagactagcccaggaaacagggagtcgcagggggactggagaggagacctgggccagcgggaggcagtgttctccagagggtcagatgcgtctctgattcaggccagaatacaggtcccgctggcctttccggatgggctcatagtctgggttgggaacaggtggtggcctctccttgttttgtcccctttgcctgccgccagcacccgctcctcgtgtcacaggcttggccttggcctttctattcttgctccagtagtaaaccagcagcagcaagcccccagtgatgcagatgtccactatgacaattgtggacct

SEQ ID NO: 4949 - DNA, 634 bp, Homo sapiens
  unsure (621): n=A,T,C or G
  unsure (624): n=A,T,C or G
aaacaaaatatttaatgtctatacagtaaaattattcaaacttcaaaccagtattgaaagcagttggaaaccagctaatagtttcttaatctcagatttcgagatgaatgtaaactgcattcttttgaaatgtgcaagtgtttgattcatgccatttgataaacttctgccttgtagtcattgtttgatgggaccaacttgtaaagtatgagccttaaataaatctccatgctgaaaaatgtgttctaatgcaacacaaaaacatgaagtgactgcccagaggtagagttagtgtttaggtggaaagggagatgacagctttccaaagaaggacctaaaacacaccaagattgccttctacaggaattgctgggcaggtctccgactaaaggtcttatgatgaaaaggaagaaacaagcccccaacacaaggctctgatactactggtaaatgtaggagagaattaagaatctgttaattaaaatccaaacagagcttatttcagtagtcaagttacctgacatgataattatttctgcaggataattgatgttttatgttcttttttggactttatcttcttgcaaaaatttctacaaaaattggtttcttcatccttgnggngcttattcat

SEQ ID NO: 4950 - DNA, 306 bp, Homo sapiens; identical to SEQ ID NO: 484

SEQ ID NO: 4951 - DNA, 428 bp, Homo sapiens
ctgcatcgcggcccacgacaagagggggaggtacgggaccctgttcacgatggaccgggtgctgacccccccaatggggactgtcatggatgtcctgaagggagacaatcgctttagcatgctggtagctgccatccagtctgcaggactgacggagaccctcaaccgggaaggagtctacacagtctttgctcccacaaatgaagccttccgagccctgccaccaagagaacggagcagactcttgggagatgccaaggaacttgccaacatcctgaaataccacattggtgatgaaatcctggttagcggaggcatcggggccctggtgcggctaaagtctctccaaggtgacaagctggaagtcagcttgaaaaacaatgtggtgagtgtcaacaaggagcctgttgccgagcctgacatcatgg

SEQ ID NO: 4952 - DNA, 280 bp, Homo sapiens
  unsure (97): n=A,T,C or G
ctgtgctattggtcatagagctgcttatgtcctcttccagtttgtcaatgatcatagcaaaggctttgaagatggcattagtgggtccagccaaagngataattctctcaggacaattcccttctgagatgttgatacgtgcaccactctcctcgcgcatcttcttaactgattctcctttctttccgatgatactgccaacttcctttccatgcataagtagccggatggtgagagtgacatttaatccaccttcaatcacaccggtgtccatgtcgag

SEQ ID NO: 4953 - DNA, 349 bp, Homo sapiens
  unsure (34): n=A,T,C or G
  unsure (65): n=A,T,C or G
  unsure (67): n=A,T,C or G
  unsure (77): n=A,T,C or G
  unsure (166): n=A,T,C or G
  unsure (256): n=A,T,C or G
  unsure (306): n=A,T,C or G
gacctcgtgatccacccaccttccctcccaaagnactggaattacaggcattagccactgtgccnanccgaggctgncatttttaaccggctctggatgactctgatgcagccatcctggaccttggctgtggtctggtaactggaacccaatgacgtaatcaggngccatcgggggtcatgggaaagggggatccccaaggtctgaggtggactaggaaggctttctgaagaacctgggtctgttagggcatcanccaatcaaggtacaagtaaatagaggcaaaatgagggtttgaactgtgancagttggtcctggaaaagaaagaaaccaagagattatggggac

SEQ ID NO: 4954 - DNA, 426 bp, Homo sapiens; identical to SEQ ID NO: 218
  unsure (8): n=A,T,C or G

SEQ ID NO: 4955 - DNA, 253 bp, Homo sapiens; identical to SEQ ID NO: 362
  unsure (203): n=A,T,C or G

SEQ ID NO: 4956 - DNA, 291 bp, Homo sapiens
aaaggagcatctcagttacgtgtggcggacaaaaaaaaaggagcagactgtgacagaccattcccatcggccaagtggtcgaacccgacatccaagacccagcgagcagccaagctcagcgcaacctccgggcttctcgctctgactccaaaagggtgagtacgtcgccctcgcgcacggggccttttacattgcggatgatggatcggctcgtgtcgtccatgaattccacgcgcacctgcgtgcactgtccctgagaaccggtcctgcccaggaccttggtgaccctgg

SEQ ID NO: 4957 - DNA, 278 bp, Homo sapiens
  unsure (140): n=A,T,C or G
  unsure (153): n=A,T,C or G
cctctagctgtgctgctcaagagactggatcagggtagctacaagtggccgggccttgcctttgggattctacctgttcctaatttggtgtggggtgcggggtccctggccccttttccacactcctcctccgacagcanctccctgggcagnggcctggtctcaccgtgtgcagccttgtggtttatgcttaaatgtacattttcctgctggtaaaaggagaaactgagaggtgtcctgcagaccggctgaccactccttttggagacggcaggagg

SEQ ID NO: 4958 - DNA, 566 bp, Homo sapiens
agagaggggtatgatggctaagaagcccccaaaaccagcccctcgcaggatcttccaggaaaggttaaagattactgctctacctttgtactttgaaggttttttattaatcaagcggtcaggataccgggagtatgagcattactggacagagttgagaggaactactcttttcttttataccgacaaaaagagtataatatatgttgacaaattagacatagtagacctcacatgccttactgagcagaattcaactgaaaagaactgtgcgaaattcacccttgttttgccgaaagaggaagtacaactgaagacagagaacacagaaagtggggaagaatggagaggcttcattcttacggtaacagagctgtcagttccccaaaatgtgtcactcctacctgggcaagtaattaaactgcatgaagtcctagagagagaaaagaaaaggaggattgagacagagcagagtacgtccgtggaaaaagagaaggaaccaactgaagattatgtggatgtactgaaccctatgccagcatgtttttatacagtgtcccggaaag

SEQ ID NO: 4959 - DNA, 498 bp, Homo sapiens
cctcaggggggcccacagcccccaaagctgagagtggtcgaagcggaggtgggggactcatggaagagatgaacgccatgctggcccggagaaggaaagccacgcaagttggggagaaaacccccaaggatgaatctgccaatcaggaggagccagaggccagagtcccggcccagagtgaatctgtgcggagaccctgggagaagaacagcacaaccttgccaaggatgaagtcgtcttcttcggtgaccacttccgagacccaaccctgcacgcccagctccagtgattactcggacctacagagggtgaaacaggagcttctggaagaggtgaagaaggaattgcagaaagtgaaagaggaaatcattgaagccttcgtccaggagctgaggaagcggggttctccctgaccacagggacccagaagacccgcttctcctttccgcacacccggcctgtcaccctgctttccctgcctctacttgacttggaatt

SEQ ID NO: 4960 - DNA, 189 bp, Homo sapiens
  unsure (85): n=A,T,C or G
  unsure (113): n=A,T,C or G
  unsure (153): n=A,T,C or G
tttttttttttttttttacactcaggttctaattttaatagggaaggaaaaagttacagctcagtgcaccatgaagttgaggcanagatggagacacctcagccccacctctntggaacaggaaagatgattggggagggagcacaggtcagncgtgggaagagggtcatggtggacatgggggtgggg

SEQ ID NO: 4961 - DNA, 396 bp, Homo sapiens; identical to SEQ ID NO: 217
  unsure (248): n=A,T,C or G
  unsure (252): n=A,T,C or G

SEQ ID NO: 4962 - DNA, 145 bp, Homo sapiens
ctgcttcagcctgcccaacataccaagatggcaaccagacgataagaaactaccagagccggagccccagcccctttccctgccatccctgcaaaatgcctcgtctttggatgccaccagctcttcaaaggactccaggtcccag

SEQ ID NO: 4963 - DNA, 275 bp, Homo sapiens
ccttgggaagggggccaagaaaaaaagaacggccactctcctttctgtccttcccttgtgtggaggacagtgattgaaacaggggagttaaaaagccaggaagaaaagaaatcaattgcacatctctagttcgcaagcgtcaaagtcacaacaagtctatacacaacaactctctatctgtagatatgaaattccatcatgatagcacagcgcctgcttgcccctaaatgttcctttcttctgctaatcatgtcagttactatggatgggctgtg

SEQ ID NO: 4964 - DNA, 193 bp, Homo sapiens
aaaatgttagatttagaaaaatggcataataaccaacgtggagaagctgcttcaaatcaaggagacgggaggccagcttcattccatgggaggccagcttcattccagtaggttccgtttcacctggatgaaatggaagattttcttggaatgtataaattggcttagcaggaggcagaaaaccctttcacag

SEQ ID NO: 4965 - DNA, 394 bp, Homo sapiens
  unsure (272): n=A,T,C or G
  unsure (281): n=A,T,C or G
  unsure (298): n=A,T,C or G
ctgccagtagacccccggtcaccctgaggctggtggtccctgctagtcagtgtggctctctcattggaaaaggtggatgcaagatcaaggaaatacgaggagtacaggggctcaggtccaggtggcaggggatatgctacccaactcaactgagcgggccatcactattgctggcattccacaatccatcattgagtgtgtcaaacagatctgcgtggtcatgttggagtcccccccgaagggcgtgaccatcccgtaccggcccaagccgnccagctctncggtcatctttgcaggnggtcaggacaggtacagcacaggcagcgacagtgcgagctttccccacaccaccccgtccatgtgcctcaaccctgacctggagggaccacctcta

SEQ ID NO: 4966 - DNA, 166 bp, Homo sapiens
ccgggcaggtccttaggtgctacagctaaagtcatcaccgaccctgatatcctgaaaacctgtgtaccagacctaagtgacaagagactggaagtggttgggctggagggtgcaattgagatgggccaaatctataccaagctcaagaatgctggacgtcggctgg

SEQ ID NO: 4967 - DNA, 475 bp, Homo sapiens
ccagaggggcagggcacgctaggctggactaggagttaagagtactgtctaaccagtctggcttcttccttcttccagcagccagccctcccctcccattaaagttttactcccacatcctaaaagctcctaacttgaactttgtctaaatagtctctgagactgcatgtgaatttaatgttttttgaaaaagccttcttttttgtttggactatgtagcaatttgattctgccactcccttcactgtggcattcccctcccacccccgctctggcctagacaataagttaatgctagacaccacaaaaaagggcagacatggcagtgcagttttaatatacatatatgtagaatatatatgtacacacagttagcacggtcagggtggggaggggcatcttggggtaggcaggaggctggggtcactcactgtactgtagtgatgtggctaggaggtgttcacaagcccagggg

SEQ ID NO: 4968 - DNA, 519 bp, Homo sapiens
tggagtcgttgctgttgctgtttgtgagcctgtggcgcggcttctgtgggccggaaccttaaagatagccgcaatggctgaaaatggtgataatgaaaagatggctgccctggaggccaaaatctgtcatcaaattgagtattattttggcgacttcaatttgccacgggacaagtttctaaaggaacagataaaactggatgaaggctgggtacctttggagataatgataaaattcaacaggttgaaccgtctaacaacagactttaatgtaattgtggaagcattgagcaaatccaaggcagaactcatggaaatcagtgaagataaaactaaaatcagaaggtctccaagcaaacccctacctgaagtgactgatgagtataaaaatgatgtaaaaaacagatctgtttatattaaaggcttcccaactgatgcaactcttgatgacataaaagaatggttagaagataaaggtcaagtactaaatattcagatgagaagaacattgcataaagc

SEQ ID NO: 4969 - DNA, 226 bp, Homo sapiens
ccaagcagccagccactgcgatctaggagtgaattaccttcagtccttctgccccaccaccccataagctcccacccaggaggacaggggacctgccaaggacccagcgaggcagacaggatctgaatcaagctttgctcctccaggttctcagaaactcccaaaccctcttaatgcattcctcacagccctacctagcctgggaaaacgaaagacttgaggcgag

SEQ ID NO: 4970 - DNA, 571 bp, Homo sapiens; identical to SEQ ID NO: 363
  unsure (544): n=A,T,C or G
  unsure (548): n=A,T,C or G

SEQ ID NO: 4971 - DNA, 447 bp, Homo sapiens
  unsure (367): n=A,T,C or G
  unsure (373): n=A,T,C or G
  unsure (410): n=A,T,C or G
ccatcaacacaagggcgctgaccagcacagcatacagggtggccttccctagcaggatctcatagaggatggtggcagacaggaccccttgctggtaggacactgttggcacggaggaaggacaggtgggtacctgtgcacaggtagctctggtctctcccaccctccaccctccagtgtctgtgagttcttcatgccttggttctaggtcaagaaccatgagagagggagaggaaaaggaagggcttacttacccgaggtaaagccacagtctgaaagaaagcagggagaggaaaataaatgagagaccttattttcataggcaattaaaagtaaagtcagatttgcagttggcacagactcccangcccanaccagcttcctctgacagcccagcacctcctttcttntgccatgcagatgtcagccacattgtccttgcaatcc

SEQ ID NO: 4972 - DNA, 293 bp, Homo sapiens
  unsure (63): n=A,T,C or G
  unsure (111): n=A,T,C or G
  unsure (196): n=A,T,C or G
aaatgttctcaccacaaaatgataagcgtgtgaggtgatggatatgccacttaccttgttttnatcatcccacaatatagacaggcattgtcactttgcattgtaccccangaatcttcacatttgcttttttgtcaattaaaaatagagacacaaaaggagagaggggagagcaatagactcttcacggaaccgngggcttctgcctccgggtaaaataaactgcaaaaaggattcccaggaaaccgttccctctttcagcccttggttacaggaagccggatttgggaaat

SEQ ID NO: 4973 - DNA, 414 bp, Homo sapiens
ctgttggctgaccagaataaactccctgctgagttcaagctttgaatggaatggatgcaaatgatgttgtttccattagagcaggtgctcacagcattctgattggcctgagcagaccgaggctatggctgttgggacaagcttagcatcctggacatcttgtcaaagaacctcactcacccctctggcctctacagccctcagaggagagaaaaccaattctccaacaaacaggtctctccaacatggtggtgctggcaggcttaggtttagaaaatcctgactgttaaaggcgtttgaatacatcacattcctatgcaaatgtttttaatctccagtttaatgtagtttatttttcctatatgtaaagtatttttatacggcttgtatcatgatagtttagcaataaaacag

SEQ ID NO: 4974 - DNA, 282 bp, Homo sapiens
cgacggctccttcttcctctacagcaagctcaccgtggacaagagcaggtggcagcaggggaacgtcttctcatgctccgtgatgcatgaggctctgcacaaccactacacgcagaagagcctctccctgtccccgggtaaatgagtgcgacggccggcaagcccccgctccccgggctctcgcggtcgcacgaggatgcttggcacgtaccccgtctacatacttcccaggcacccagcatggaaataaagcacccaccactgccctgggaaaaaaaaaaa

SEQ ID NO: 4975 - DNA, 377 bp, Homo sapiens
  unsure (88): n=A,T,C or G
ctgaaatgtctgcttaatggtgacgatggtgctattagcaggtgggtgagccagttcccaaggtacacgttcactatcaagagctaancacacctgctaacaactcagtctcctacaaacctgatgtttctccagcaaaacaaattaaaattaaacctaatggtacttctggctgaggctccagaggtccccaggagggagggtgtttgcgtggagggggccttggttccacagaatggtggcttatggacgcttttaagacactaaagaaacccacatggtaaaaggctgggtgcggtggctcacgcctgtgatcccagcactctgagaggctgaggcgggcggatcacaaagtcaggagttcgagaccagcctgg

SEQ ID NO: 4976 - DNA, 420 bp, Homo sapiens; identical to SEQ ID NO: 364

SEQ ID NO: 4977 - DNA, 212 bp, Homo sapiens
ccaggctgcactgtggctagctcaatgtttgttgcattcagcttctcctccattacttgtttgaggatgatgagtgaagacttgatggcttctttcaaagtcatagacttgtggtaaacttcttgcaaggagctctgggcaccctctgaagcagagccaattgctcgagcatcacactgtacaaaggtcccagatgggtccatatgaaacag

SEQ ID NO: 4978 - DNA, 274 bp, Homo sapiens
cctggctgagcaggcagagcaccctgggaccccagggcagaaggacccccgccctccagtccccaagacccaggcccgtctccactcatacacgccacctacatgtgacgtcagccctgaaaaggtaacaggaaagttcagaacaaaaacaaaaccccaaaagtaaaaaggctacgtgtagcagagtaataccggaaacgttatatacacaggcggtgatggccccctcggaagtgtccgggtcacttagggggcactgcagaggtccctgtgg

SEQ ID NO: 4979 - DNA, 460 bp, Homo sapiens
  unsure (164): n=A,T,C or G
  unsure (272): n=A,T,C or G
aaatttcatagattttcatgtgtcataaaatattgatcttttcttgatttctccccaaccacataaaaatgtaaaaagtacattagtttgcatccacactaaaacaggcagtgagtcaaatatggcctgtgggccatactttgccaacccttggcctacagtanaaaaaaaacccctcagaattccttatgggctttgtgttattttgtcacgtggagccaccttaggctggggaagtagaaagcacagggcttttgggcattaggtcctangttccagttctggccctaccatctaccagccgggtagccttggacataaaattcaaactctctgggctttactaccatcatctataaaatggggcaataacacctagatcacagagttgtcatggcaattaagtgagctaatgtatatagagctcgtggcaccagtatctggcatacagtaggcactc

SEQ ID NO: 4980 - DNA, 398 bp, Homo sapiens
  unsure (239): n=A,T,C or G
  unsure (263): n=A,T,C or G
aaaaacaaaatcttaaattactaggagtatatttacaagattaattacattttaagccagcacaccatggatgtacatgaagggccactcagtgtccctcgctgggacaggttgtgtgacctgcccaaggggctccggctcatttgccaaagtcaagacgacgaccaggtcttctgactgctcagcccaaccaataatgaaaaaagtatcagagatgtgtcatatccattttgctaacnagcaattacatgcctttttagtgnttaagagaagccttaattttcctgggatatctccgtaaaatcattctggaatttgattttgaaaattctttaagaaaaaaaaaaaagcttgtcacccccatgagacctgctgtctctcatgtctgcagggacagg

SEQ ID NO: 4981 - DNA, 302 bp, Homo sapiens
aaataaccttactttcaaaacttagtttaaggttgaacatcccagtgaccagattatgattaacagattgaaaaatgataaagcctgaagtctaagtttatccagcagggtgactcatgcttctttgtcatcctcccacggcagcaatttgttccatgtgaatgctagtaacaggcatcatacactgttaatgctaatatgtaggagtcagttggaggcaaaaacccctatcacgattagcattaacagcatacagcctacagcaagccttcagcactcagaggatgaggcataaagaattt

SEQ ID NO: 4982 - DNA, 171 bp, Homo sapiens
aaatacagtcatttcgtaatgaggagtgggcaggctcagggctgcactccctactcctcaccctcatctatagtggtagagatagggacagggtggaaagaagagaactgactagcaacggcctgactctgtgtgtgtgtgtgtgtgtgtgtgtgtgtgtgtgtgtgtgtg

SEQ ID NO: 4983 - DNA, 286 bp, Homo sapiens; identical to SEQ ID NO: 220
  unsure (218): n=A,T,C or G

SEQ ID NO: 4984 - DNA, 475 bp, Homo sapiens
aaaagaaattcagaaactaagcggttggagaggggcattggaaatagagggggatgctatgagatgggggttgggagcagagaagaaactgcaggagggcaaagtgtaactagcaatataccttctgtgatgctccagaaacacatgtctgctaagattaacttgattggagtttcttatgaaacaggctgatcatcaagatttttaactcaggtttcagtgaaaaaattggaaacttttacaagaaagatttgagaagtagaaggcaggcagcaaattttccagatattatgcttgcatttcaaattcctgtttcaggcttttcaagtaggcatgcacattcccaaagccatgatatttggctaaatacacaaggaccccagtcgcacaccgtccatctcgctgccggcagaaactgcagttgcagattcctcgacaaggcgggcaatgccagttcggatccagcagagcatcc

SEQ ID NO: 4985 - DNA, 536 bp, Homo sapiens; identical to SEQ ID NO: 221
  unsure (424): n=A,T,C or G
  unsure (527): n=A,T,C or G

SEQ ID NO: 4986 - DNA, 221 bp, Homo sapiens
cttttcttacttaaacttcacaccagaaccttctgacattttctcctgcattgtgactcacgaaattgaccgctacacagcaattgcctattgggtaccccggaacgcactgccctcagatctgctggagaatgtgctgtgtggcgtggcctttggcctgggtgtgctgggcatcatcgtgggcattgttctcatcatctacttccggaagccttgctcag

SEQ ID NO: 4987 - DNA, 582 bp, Homo sapiens
  unsure (482): n=A,T,C or G
  unsure (488): n=A,T,C or G
  unsure (503): n=A,T,C or G
  unsure (572): n=A,T,C or G
  unsure (581): n=A,T,C or G
aaatatttattttcaaaacccctaaaacactggagtatgcttcacctagaaacagattacaggacgaatagctataatgaataagcaatacaatttgtatttgggatgcaattgtgttgtaaagtttcaaataatcaatttataaatttgttgcttttacttttacaaaaatattcatttaacccataacatgagttgcaaaattatctccagacttctacagatgattataaactgtaattgtgtttcagttacacagcaggcgaaaaatttaactgaaccgttacttcaaaatacaatgcattaaaaataattgttacaatataggcaccaataaaaagaattttcttggcatacaacaccacaacaactttctcaagtatctgtattatgtaaattaaaaagaggatgtaatggacctcggccgcgaccacgctaagggctgatgaatcccctaatgattttggtaaaaatcattaagntaaggnggatacacatcttgncatatgatcaaatggtttcgcgaaaaatcaattaatcagacaacaagatgtgcgaactcgatattttanacgactctnt

SEQ ID NO: 4988 - DNA, 414 bp, Homo sapiens
  unsure (375): n=A,T,C or G
ctgaggaggccaagtacaagttgtgcaaagtgagaaagatctttgtgggcacaaaaggaatccctcatctggtgactcatgatgcccgcaccatccgctaccccgatcccctcatcaaggtgaatgataccattcagattgatttggagactggcaagattactgatttcatcaagttcgacactggtaacctgtgtatggtgactggaggtgctaacctaggaagaattggtgtgatcaccaacagagagaggcaccctggatcttttgacgtggttcacgtgaaagatgccaatggcaacagctttgccactcgactttccaacatttttgttattggcaagggcaacaaaccatggatttctcttccccgangaaagggtatccgcctcaccattgctgaagagagagaca

SEQ ID NO: 4989 - DNA, 374 bp, Homo sapiens; identical to SEQ ID NO: 365
  unsure (203): n=A,T,C or G
  unsure (234): n=A,T,C or G
  unsure (242): n=A,T,C or G
  unsure (266): n=A,T,C or G
  unsure (309): n=A,T,C or G
  unsure (313): n=A,T,C or G
  unsure (368): n=A,T,C or G
  unsure (369): n=A,T,C or G

SEQ ID NO: 4990 - DNA, 431 bp, Homo sapiens; identical to SEQ ID NO: 219
  unsure (140): n=A,T,C or G
  unsure (162): n=A,T,C or G
  unsure (423): n=A,T,C or G

SEQ ID NO: 4991 - DNA, 530 bp, Homo sapiens
ctgaagggctgcaggaaatattttatgttctgctaattttactctttcagaaagagttgcgacagtatcacccctcttcacgggaacagcttcttgcaaaataatctgtccagcatccacatcttcagctacaaagtgtacagtgcacccagtaactgtgactccggtttccagggcttgctcatgggcatttgaacccttaaaagaagggagcaaggatgggtggatattgagcatttttccattccacttttggacaaaggggccagaaagaattctcatgaatcctgcaagacagactatgtctatggagaactcttcaaggactaggtcaattgcactgtcaaattctacacgatttttatacagtttatgattaattactctagtgggaataccagctctttccgctttatctaacccagctactgcggctttgttggagataacaatatcaatttgtgcagagctatttggttcccgagtactgtctataagtgcttgcaggttcgatcctgttccagatatta

SEQ ID NO: 4992 - DNA, 565 bp, Homo sapiens; identical to SEQ ID NO: 222
  unsure (507): n=A,T,C or G
  unsure (519): n=A,T,C or G

SEQ ID NO: 4993 - DNA, 529 bp, Homo sapiens; identical to SEQ ID NO: 223

SEQ ID NO: 4994 - DNA, 379 bp, Homo sapiens
  unsure (351): n=A,T,C or G
aaattagccaggcatggtagttggaggctgagacaacagggtcatttgaacccaggagttcaaggcttcagtgagctatgattgcaccactacattccagcctgggtaacagagtgagaccccgtctcaaaacaaacaaacaaaagtaacaactaaacaaaagagaataaagtacttgctcaggaggatagagaagggctaggggagagggcagaaaaggtttgtacaacttagagggcatgaacagcagcagcaccttgtttttttgaccaaacaagaaaaggcccccagagctcacgcacagctatcatcagggccggtgccatggcctggctcctcgggtgacacttncccatctgacacatggcacgagggctca

SEQ ID NO: 4995 - DNA, 266 bp, Homo sapiens
  unsure (103): n=A,T,C or G
  unsure (143): n=A,T,C or G
cggtgtgattgaaggtggattaaatgtcactctcaccatccggctacttatgcatggaaaggaagttggcagtatcatcggaaagaaaggagaatcagttaanaagatgcgcgaggagagtggtgcacgtatcaacatctcanaagggaattgtcctgagagaattatcactttggctggacccactaatgccatcttcaaagcctttgctatgatcattgacaaactggaagaggacataagcagctctatgaccaatagcacag

SEQ ID NO: 4996 - DNA, 274 bp, Homo sapiens
aaaagagaagggttgaaaaagattgtgtgtgtgtgtgtgtgtgtgtttaattggcccagggttacttaaataaatcataaccattttgccacattctgtaactgtttagttaaggtcaaattaagtttaccctatggattttgtttcatcttttgtttcgtgtatatactgtttgcctttttcataaaaatcttggatttgttatatattgttcctgttatttttgacatctttgctattgtaaataaattactattttgttttaagtgaaaaa

SEQ ID NO: 4997 - DNA, 486 bp, Homo sapiens
  unsure (181): n=A,T,C or G
aaaaacaaaacaaaacgatccttttgattgtgtggtgcagacgcaggactgaagccacaggcttttggggtgctgtgagcccagggctttgctcagctcacagctagcgcggcgggcagagcaacccttcggcccaagccatcctcgcagcttgcacagaagcttcctgaacctaaggganccgttcccagctctccttaaattcccagtccccaccctgggcctctctccctaacgatcttgtcgctttgggagcccctgaagtgaaccctgaaatactccctccgtcaactctgggctcagacctttgcccttctctgtgtcacaaggaaatttcggtcaagagggtgggaacaggtggtttcagaccgtgcagcaaagccactgccaggtaagttttaaggcaaattttatctcttcttattcagtctgagccggacctaaccttctcaccaccgagcaatcctgcctatgctggacatgcat

SEQ ID NO: 4998 - DNA, 233 bp, Homo sapiens
cctccttccttcagtgcctgctgaaccatcttagggtcactcacaccctctgtaattttaagatgtatgtggtggccggcgggaagaccagccccgacagcacctcctgagaaagtcagccaagggcctaccctgatgccagagtccttgagctgtcagttcccacagttgctcctttgtttgctcttctcagcctcggccagatttacagtccaggcagcaaaatctcaagg

SEQ ID NO: 4999 - DNA, 392 bp, Homo sapiens
  unsure (208): n=A,T,C or G
  unsure (230): n=A,T,C or G
  unsure (238): n=A,T,C or G
  unsure (257): n=A,T,C or G
  unsure (288): n=A,T,C or G
  unsure (304): n=A,T,C or G
  unsure (359): n=A,T,C or G
  unsure (368): n=A,T,C or G
  unsure (370): n=A,T,C or G
aaaagtttttctatgatgatgcattaacaatacaaaaatattttgaacactacaataatctttttctcaagacttcttgcagtgttacactagaatatgtgatctttggattctgagaaaccagtggctaaagtaggaactaaaggctttttttgaggggtgtgtgaatacatggacagccctttttttttttttttttttttttganatgcagtctccctgttacccanactggagngcaatagcgccatctcggntcactggaacctccgcctcccgggttcaagngattcttccgcctcancctcccgagtagctgggattacatgcgcgcaccaccacgtccggctaatttttgnatttttagnanatacagggtttcaccatgttgg

SEQ ID NO: 5000 - DNA, 337 bp, Homo sapiens
  unsure (21): n=A,T,C or G
  unsure (129): n=A,T,C or G
  unsure (238): n=A,T,C or G
  unsure (243): n=A,T,C or G
  unsure (269): n=A,T,C or G
  unsure (317): n=A,T,C or G
ttttttttttttttttccaanaaggggacaaatgtgggaggccatcactgccccattttattgatgcaggctggacaggaggactcaccacctgagctggggatactcaggtcctggggtgctgagganatggggctgcatctggagagggtgctgttggggtgtactctcatctggagagggtgctgttggggtgtactctcatctggagagggtgctgttggggtgtactctcatntgganagggtgctgttgggggcactcccatntggaaagggtgctgttggggtgtactcctgggaaggcaggggccatanaggagcgggagatgtgtcaa

SEQ ID NO: 5001 - DNA, 496 bp, Homo sapiens
  unsure (208): n=A,T,C or G
  unsure (440): n=A,T,C or G
  unsure (477): n=A,T,C or G
aaatccttacatgatttttgaaaccttattaactgaaaatattgcttgctgataaaacttgctcaaatgctattgctgaatgtacaagtcactgattatgccaatacaacaaagataaccacatgtttgaggattgcaatgtgccagacattcactgaaaaaaaaaaaaacacacaactaaacaaaatccacacaacaaacatctganaatctggacacttcacatcagtgttttgaagtgtttcattaatatcttaagacaagtgtatcaaaaccttggcatgatttaatttcaagtcgccaattttgtttttactaacatcagaaagttatggctacactgccaacgccgggtctgcttaatttgacttaagagtttaatatgacttaaacattaaaagctcacactaccccgaaatatataatttcacgcatacggngacattcaacattcaagtgccagtgtttttgtactgncttttggtcaagtttcttt

SEQ ID NO: 5002 - DNA, 297 bp, Homo sapiens; identical to SEQ ID NO: 224
  unsure (207): n=A,T,C or G
  unsure (220): n=A,T,C or G
  unsure (224): n=A,T,C or G
  unsure (230): n=A,T,C or G
  unsure (235): n=A,T,C or G
  unsure (257): n=A,T,C or G
  unsure (288): n=A,T,C or G

SEQ ID NO: 5003 - DNA, 88 bp, Homo sapiens
  unsure (46): n=A,T,C or G
  unsure (49): n=A,T,C or G
  unsure (59): n=A,T,C or G
ctgaggtggtcttgcttgtcatcgtcggtgaagaaggacttgttgnggnacgtgcctcncgccagcatgcccttgggagcctcctcaa

SEQ ID NO: 5004 - DNA, 327 bp, Homo sapiens
  unsure (287): n=A,T,C or G
aaaaacattttttttaatgttggtaacttttgcttcctctacctgaacaaagagatgaataattccatgggccagtatgccagtttgaattctcagtctcctagcatcttgtgagttgcatattaagattactggaatggttaagtcatggttctgagaaagaagctgtacgttttctttatgtttttatgaccaaagcagtttcttgtcaatacacggggttcagtatgacacagaatcatggacttaacccgtcatgttctggtttgagatttagtgacaaatanaggtgggaagcttataatctaattttaggaggaccaaatt

SEQ ID NO: 5005 - DNA, 526 bp, Homo sapiens
  unsure (413): n=A,T,C or G
ccaacatggtgaagccccatctctactaaaaatacaaaatttagctgggcgcagtggtgggcacctgcaatcccagctactgaggcgggagaatcgcttgaacctgggaggcggattgcactgagccaagattgcaccaagattgcaccactgcactccagcctgggtgacagaccgagactccgtctcaaaaaaaaaaaatcttgtttccgtagagtgcctcggggaacctagtttgggaaatgctcatttagggacctgtcgtaatgtgtgcaggggtcctctcacagaagtgtcctaattaaccacacacacttctgctgctggagctctgagcacaggcagaatgacactaaaatattcagcattgaaaggacacaagaagggaaccatttgcagtttcaaaatactgnttcacgccaggctgcatgttgccttacgaacgctgggcaccttggcgtctctcatccaaactcttccaaaactcccacttattctttgctcccttgatggaaaagcagtgatg

SEQ ID NO: 5006 - DNA, 421 bp, Homo sapiens
  unsure (388): n=A,T,C or G
ccaagacagctcgtttctggagagtatgagggtgtgttttcttattgtgaaaggaactaccttctcttagagggtaggaagaatgtggtgtgtgtgtgttctcataaagcaactggacattataggtgcccaggtcatctataaaaacgatccttgggctgtgtaaaaatgaagtggcttttcagtatcctctttcacacttgctgcttcgggagactatgcaatgatgggaaggtgattgcccctttatttcattcagtgccatggtccctgttgttgtagtaatttatttgtttagttcattttttttttcttaacagtcaaggggaagagtgattcctcacactgctttcaagctggactgagccagtctcattctgggaaaganatgctgtgtccagaactcagcagctccatctat

SEQ ID NO: 5007 - DNA, 217 bp, Homo sapiens
  unsure (152): n=A,T,C or G
ctgcggggtctggatccgagtctgccctctccgttacctaatctcggacctcagggcccggccctcacgcctgaacaagaaaacatactgcataccacccagacagactgctataacaatctagctgcttgtctccttcagatggagcccgngaactacgaacgagtgagagaatatagtcagaaagtcctggaacgacagcctgataatgccaagg

SEQ ID NO: 5008 - DNA, 165 bp, Homo sapiens
  unsure (99): n=A,T,C or G
  unsure (145): n=A,T,C or G
ttaagtttgatttttttttcttttttcctttcttaaaaaaaaaaaaaggaagtaaataaattaaattgccaacaatgtggctgagatagccatgatcangccattcttaaaaaaaagaggggggggggcagtaggtggagtttgngaaatataaacaaacaatgg

SEQ ID NO: 5009 - DNA, 490 bp, Homo sapiens
  unsure (385): n=A,T,C or G
  unsure (396): n=A,T,C or G
  unsure (433): n=A,T,C or G
  unsure (434): n=A,T,C or G
  unsure (443): n=A,T,C or G
  unsure (480): n=A,T,C or G
aatttcatacaaacaccaagaccaaaatcctaagtattggtattgcgtctcaaatttttcccattaacttaaaaaaaaaaaaagcttaaacttacgtgccttacaggttattaaatgaaactagaattaacaaacatgccaaaatgtttcacttttaatagtagacacagctcctatattgttttacaaaaaaataaaagcatgtctttcaacatgcatccaaaacagtgttcaatttaacgtggcaaagggcaacatttaacataattcaactgcttttacctaaatacgcttactgcttaagtacatcctataactaacttgagaaaagctggaacttaagtttaacagttatagtttactcagcttcactgttacatcctanatgagtattgnattcaaaaatactgggccttaagtcttcataacaatnnctgatttcnacttagagtaagcataaatcacaagcttgtattgcanaaactgttaa

SEQ ID NO: 5010 - DNA, 258 bp, Homo sapiens
  unsure (9): n=A,T,C or G
  unsure (10): n=A,T,C or G
  unsure (235): n=A,T,C or G
ctggggacnngtgcttgctgaaacccaggagctgaacagtgaggaggctgtccaccttgcttggctcactgggaccaggaaagcctgtctttggttaggctcgtgtacttctgcaggaaaaaaaaaaaaggatgtgtcattggtcatgatatttgaaaaggggaggaggccgaagttgttcccatttatccagtattggaaaatatttgacccccttggctgaattcttttgcanaactactgtgtgtctgttcacta

SEQ ID NO: 5011 - DNA, 402 bp, Homo sapiens; identical to SEQ ID NO: 370
  unsure (12): n=A,T,C or G
  unsure (124): n=A,T,C or G
  unsure (139): n=A,T,C or G
  unsure (243): n=A,T,C or G
  unsure (379): n=A,T,C or G
  unsure (399): n=A,T,C or G

SEQ ID NO: 5012 - DNA, 389 bp, Homo sapiens
ctgtctgtactagacaaggttaccaagtgcggaattggttaatactaacagagagatttgctccattctctttggaataacaggacatgctgtatagatacaggcagtaggtttgctctgtacccatgtgtacagcctacccatgcagggactgggattcgaggacttccaggcgcatagggtaggaccaaatgatagggtaggagcatgtgttctttagggccttgtaaggctgtttccttttgcatctggaactgactatataattgtcttcaatgaagactaattcaattttgcatatagaggagccaaagagagatttcagctctgtatttgtggtatcagtttggaaaaaaaaatctgatactccatttgattattgtaaatat

SEQ ID NO: 5013 - DNA, 514 bp, Homo sapiens
ccagacagtgagcggtttggacgccaactggttagagcacatgagcgaccacttccggaaaggaggcatgctggtgaacgcagtcttctaccttggaatagtgaatgattccttacatggcttgacagatggagtattcatctttgaagctgtttccacagaagatagcaaaaccatacagggctatgatgctattgtggttgaacaatggacagtcctggaaggtgtcgaagtgcagacagactacgtgcccctgctgaactcgctggcggcctatggctggcagctcacctgtgtgctaccaactcccgtcgtcaagactaccagcgaggggagtgtatccaccaagcagattgtctttcttcagagaccttgtctacctcagaaaatcaagaagaaggaatcgaagtttcagtggcgattctccagagaagaaatgcacaacaggcagatgaggaaatcaaaaggtaaactcagtgccagagacaaacaacaagcagaagaaaatgagaag

SEQ ID NO: 5014 - DNA, 381 bp, Homo sapiens
ccacccagactgaccagcgggagatggggccccacagggcctcctgcgtcaatgccatggaagggaagaaactggcccaggatgtcagagccaagggctacctggagtgctcagcccttagcaatcggggagtacagcaggtgtttgagtgcgccgtccgaactgccgtcaaccaggccaggagacgaaacagaaggaggctcttctccatcaatgagtgcaagatcttctaaaccccaagagacttcacacaacacttatgtatgcaccccaaagactaatggggagagggagggccgggaagccaggaaagcttggtgttttctctgggtacaccccaagcagcgtctccttttggatacagttattgatgaggcttgg

SEQ ID NO: 5015 - DNA, 524 bp, Homo sapiens
cctcacctcctcatttcatcacactggggatgaggtttcaaccactaatttttggtgggaggagacaaatatttagaccttagcaaagtacaacaaaatgttcctgtggttgctttctgatattcacccaatcaccctgaagggacaaacctttctaccacttcaaagagggagacaatcttactagcatgtaataatcagcactgttacccacagctcaagccctcaccctagaaacaaagccaagaccactaagtgggtaggtgtcctggctaagtgtggacacagggcacaatcagagatgtgaacacacaaagagcttcaccagcttctcacagaccctgcttgcctttcgaagtgatgaatacacatggcctggtcattccagagactaataagacccctctggcccattacctgaaactggggacccaataccatgcagatggactgagtcattacaaaggcaattaaatgcccaactccataaccaggtgccaacatgtaggcttttgtgcatggat

SEQ ID NO: 5016 - DNA, 432 bp, Homo sapiens
ctgaggccaccacacattacatacattcacgcacttcataaaaaacacctgagggagagaccctggctttgattagcaaataaggtatgaacctgggccagtgcccacattcacacagaccctggcccagggacatcctcctcatatgaagcattaaggcacatgctgtactgtgagccagcactccctgacctcagggtgtgtgaggagttggcactgtagagagaaaccaagactcttcctcaatgcctgccttattctgagcacccacccttagctctgataaggatatcctgagaccacattcaagatccaaaacctttcctcatagatgagggccgtcacccctgcaaacatgaccctgttctgtttgcagggtctccaagattttcacttctgagacaaaaattgaggagacttctgtctgcacca

SEQ ID NO: 5017 - DNA, 328 bp, Homo sapiens
  unsure (16): n=A,T,C or G
  unsure (54): n=A,T,C or G
  unsure (91): n=A,T,C or G
  unsure (186): n=A,T,C or G
cctacagacttatttnttcttggacacacccacggtgcggccacggcggccagnggtcttggtgtgctggcctcggacacgaaggccccanaagtgacgcagccctctatgggcccgaatcttcttcagtcgctccaggtcttcacggagcttgttgtccagaccattggctaggacctggctgtnttttccatcctttacatccttctgtctgttcaagaaccagtctgggatcttgtactggcgtggattctgcataatggtgatcacacgttccacctcatcctcagtgagttctcccgccctcttggtgaggtcaatgtctgct

SEQ ID NO: 5018 - DNA, 511 bp, Homo sapiens
  unsure (277): n=A,T,C or G
  unsure (471): n=A,T,C or G
  unsure (474): n=A,T,C or G
ccaaaagtttagcatattctgcagcctcttctttatttttcttggtacgctgcttcttcagagcaatacgccgccgtttgtgctgcaggacacgtggagtaacaagacgctgaatcttgggtgctttggtcctaggtttcttaccttctttatttaagggctttcttacaacatactggcggacatcatcttctttagagagattgaaaagtttgcggattctgctagctcttttggggcccaggcggcgaggcactgtggtatcagtcagtccagnaatatccttctctcctttttttacaataaccaagttgagaacgctcagatttgcatccacaatgcaaccacgaactgattttctctttctttctccagttctccttggtctgtaacaggaatgccccttactcagtagcaggcggacacggccatgggtcaagacaccctgcttcatggggaaaccttgtttgncgntcccaccactgattcggaccacataacccttccattc

SEQ ID NO: 5019 - DNA, 183 bp, Homo sapiens
  unsure (11): n=A,T,C or G
  unsure (14): n=A,T,C or G
  unsure (55): n=A,T,C or G
  unsure (100): n=A,T,C or G
aaaaccacttnacntgaaaatgaattttctgcaaatgtattctttataaatgtanagcatgcaagaatgtataaacataacagaagcatttgtaactggntaactcagttgacagcttgcaagataagtttttgttttgggaggaattggaagtctcccagattttgctggagtctttgctta

SEQ ID NO: 5020 - DNA, 217 bp, Homo sapiens
  unsure (63): n=A,T,C or G
ccatgagtgacaggtggcctcttggtgggagaggtggggcagggggaaggcagctcccactanaccagggcagtatttaggggaaggaggcagattggagcagttggctgccaacacctggcctcactcagggagaggggccttgggcctggatgatatctgggtgaggtacccacaccatctgctgcaacctctgtgtatccattatgggctcacg

SEQ ID NO: 5021 - DNA, 434 bp, Homo sapiens
  unsure (47): n=A,T,C or G
  unsure (74): n=A,T,C or G
  unsure (182): n=A,T,C or G
  unsure (204): n=A,T,C or G
  unsure (272): n=A,T,C or G
  unsure (339): n=A,T,C or G
  unsure (372): n=A,T,C or G
  unsure (373): n=A,T,C or G
  unsure (388): n=A,T,C or G
cccaggctgactccttctccctgactgcaagggctcactccctcctncaagctcccacaatgcttcatggctcntgccgcttacctagcttggcctagagtggcaaatggaacttctctgatctcccccaactagactggagcccccgaaggatggagaccatgtctgtgccatctctgttncccctgttttcccacatactangtgctcaattcatgcctgtgaatggcgtgagcccataatggatacacagaggttgcagcagatggtgngggtacctcacccagatatcatccaggcccaaggcccctctccctgagtgaggccaggtgttggcanccaactgctccaatctgcctccttcccctaaannctgccctggtctagngggagctgccttccccctgccccacctttcccaccaagaggccaca

SEQ ID NO: 5022 - DNA, 370 bp, Homo sapiens
  unsure (7): n=A,T,C or G
  unsure (9): n=A,T,C or G
  unsure (16): n=A,T,C or G
  unsure (22): n=A,T,C or G
  unsure (34): n=A,T,C or G
  unsure (38): n=A,T,C or G
  unsure (43): n=A,T,C or G
  unsure (49): n=A,T,C or G
  unsure (68): n=A,T,C or G
  unsure (76): n=A,T,C or G
  unsure (89): n=A,T,C or G
  unsure (95): n=A,T,C or G
  unsure (105): n=A,T,C or G
  unsure (116): n=A,T,C or G
  unsure (143): n=A,T,C or G
  unsure (145): n=A,T,C or G
  unsure (151): n=A,T,C or G
  unsure (176): n=A,T,C or G
  unsure (200): n=A,T,C or G
  unsure (207): n=A,T,C or G
  unsure (213): n=A,T,C or G
  unsure (243): n=A,T,C or G
  unsure (252): n=A,T,C or G
  unsure (258): n=A,T,C or G
  unsure (278): n=A,T,C or G
  unsure (286): n=A,T,C or G
  unsure (289): n=A,T,C or G
  unsure (302): n=A,T,C or G
  unsure (308): n=A,T,C or G
  unsure (324): n=A,T,C or G
  unsure (328): n=A,T,C or G
gccgccntnaatgacncctatngggttccaatancctnatgtncaaatntgactcgttagcaaatccncccaactnaacatcggtcatnttgacnttgcaggatnttcagcaagtntgaagtttttaatcgggaaggattttntnccgttnctgaacaaataaaggttctttgtancaatggctggaaatgcaacatganccctttnttcacnccaaaagaactcataaatagttcaccgggngaaccaaanactttntttttcaaaagcaggtaacnccaaagtnctntggggtatccatnttcgtngcaaaaatgataattnctgnaattttccaaacatcaaatgaagggggatcaatggttaccac

SEQ ID NO: 5023 - DNA, 471 bp, Homo sapiens
  unsure (233): n=A,T,C or G
  unsure (450): n=A,T,C or G
aaatttaggacacggtacattttccactgaaaatttacaatcatccaacataatgcacaccacccctcaaaggtaacattagctcatatacaaaatcatggaaaacctcacaacatccttggaaggtagatattgttatatccttacaaaaatttaatacacccattaacattcctatttcaaatagctcaatcgatatcaacacataagacagcccacaattgtgatacagnattaagaagaaactcaggccagccgcggtgcctcacgcctgtaaccccaacactttgggaggctgaggcgggcagatcacctgagcccaggagttcaggaccagcctggacaacatggtgagaccccgtctctacaaaaagtacaaaaattagctgggtgtggtgacccacgcctgtagtcccagctagttgggaggctaagacgggaggatggctngttgcttgagcccaaggaggt

SEQ ID NO: 5024 - DNA, 465 bp, Homo sapiens
  unsure (41): n=A,T,C or G
cctattctttctgtgggacagtggagtacatggcccctgangtcgtcaaccgccagggccactcccatagtgcggactggtggtcctatggggtgttgatgtttgagatgctgacgggctccctgcccttccaggggaaggaccggaaggagaccatgacactgattctgaaggcgaagctaggcacgccccagtttctgagcactgaagcccagagcctcttgcgggccctgttcaagcggaatcctgccaaccggctcggctccggccctgatggggcagaggaaatcaagcggcatgtcttctactccaccattgactggaataagctataccgtcgtgagatcacgccacccttcaagccagcagtggctcagcctgatgacaccttctactttgacaccgagttcacgtcccgcacacccaaggattccccaggcatcccccccagcgctggggcccatc

SEQ ID NO: 5025 - DNA, 485 bp, Homo sapiens
ccttgaaccaagtcacccagagagcctcccggagatcagactcagcctcctcagagcctgttgggatatatcagggtttcgagaagaagaccggagttgctggggaggacatgcaagacaacagtgggacctacggcaagatctgggagggcagcagcaagcgcaacatcaacaacttcatcttccacaaggtcctgggcaaaggcagcttcgggaaggtgctgcttggagagctgaagggcagaggagagtactttgccatcaaggccctcaagaaggatgtggtcctgatcgacgacgacgtggagtgcaccatggttgagaagcgggtgctgacacttgccgcagagaatccctttctcacccacctcatctgcaccttccagaccaaggaccacctgttctttgtgatggagttcctcaacgggggggacctgatgtaccacatccaggacaaaggccgctttgaactctaccgtgccacg

SEQ ID NO: 5026 - DNA, 297 bp, Homo sapiens
  unsure (230): n=A,T,C or G
aaaaaaaaaataccctaagtactctgtttacttctggtgaaacaaaaccagtcattagaaatggtctgtgcttttattttcccagactggagtggcttttctgaaacacacacacacacacacacacacacacacacacacacacgtacacacatccctcacttctcttaagccaagaagtttgctttccctagctgcagtgtagatggctcttgtttttgtttttttgntttaatcatttggcattcacatgtggctgttaatatgtgcttgtttttaattaaaacaagaagcttt

SEQ ID NO: 5027 - DNA, 411 bp, Homo sapiens
  unsure (60): n=A,T,C or G
  unsure (119): n=A,T,C or G
  unsure (174): n=A,T,C or G
  unsure (196): n=A,T,C or G
  unsure (220): n=A,T,C or G
  unsure (249): n=A,T,C or G
  unsure (254): n=A,T,C or G
  unsure (267): n=A,T,C or G
  unsure (272): n=A,T,C or G
  unsure (311): n=A,T,C or G
  unsure (363): n=A,T,C or G
caggaaacaaacactgcttgatttgaaatgaggtattcgtatacaaagcacactattgcnaagggtatgaaaggaagaacgtccgaacatgggcccctgccccaaccaatgcaggccanggctgggggcagccaagcaaggcaggctctcttccctaggtgattttctcagcanaacagacttatgagttgatgcngtgtctggaggacttgacgtcaanaagacctgtgcatggagaatctgataccnagcanctccaggatgatnacatngagaccaccaaggtggaaatgctgagactttctctggcncgaaatcttgctcgggcaattataagagaaggctcactggaaggttcctganaactgcttcaatgtggtatctttgtatggcaatgtatatagatttttt

SEQ ID NO: 5028 - DNA, 438 bp, Homo sapiens
  unsure (376): n=A,T,C or G
  unsure (423): n=A,T,C or G
ctgtttcccagactccaaaatacctggtcacacagatgggaaacgacaagtccattaaatgtgaacaaaatctgggccatgatactatgtattggtataaacaggactctaagaaatttctgaagataatgtttagctacaataataaggagctcattataaatgaaacagttccaaatcgcttctcacctaaatctccagacaaagctcacttaaatcttcacatcaattccctggagcttggtgactctgctgcgtatttctgtgccagcagccaacccaccttggggggctctggaaacaccatatattttggagagggaagttgactcactgttgtagaggacctgaaaaacgtgttcccacccgaggtcgntgtgtttgagccatcagaagcagagatctcccacacccaaaaggccncactggtatgcctgg

SEQ ID NO: 5029 - DNA, 461 bp, Homo sapiens
  unsure (57): n=A,T,C or G
cctactatgtgccaaggaggggtaaggcagctagctctcacagacacaccccacagngaaaatcacacacacacacacacaccccggcatctgtgctcactcacaggcagactgctcactttcttgcacctttcttgccatcacctcggccacacccacattcctccaataggcttgggaaccagcatggaagggtcaagtgtcatagaagaaaccccctagcctaccctactcccagacttcatgccagaggtttaactccacttcccttctgtttgcctgcctagatgctctccccttctccatccacaagcggtcagggcgacaggtaggcagactcctgagaaccagaagtccagaggctttgggtgtgtggagtgattccagtgccttcagattccttcaggctcctgggggtcccctctgccagccaccctatgttcagatcgtccatctgatgg

SEQ ID NO: 5030 - DNA, 258 bp, Homo sapiens
aaaagtttgaagactctcacaggtaagtgcagctcaggatcctgtgagtgcagcagaaagtcttaagaaatggcaggggctggttgaacccagattttccattggctgagcagatatccccagaggcgtagaaaattaaatttgttttatgttgttccaaaagaggagaactgaggccagaggagcacacttctgagacactcatttttgctgggtagaggaactctctggcaagcaggaccatcgatattagagcag

SEQ ID NO: 5031 - DNA, 133 bp, Homo sapiens
aaagcaagaaacagaatgcgagtaatcagaaagcactagcaggcatcagttaatccaagatactagctcttagttccaaaagcacttgcaaagaaaaccttttggggggaaggggtggagagggatggaagca

SEQ ID NO: 5032 - DNA, 187 bp, Homo sapiens
aaaagtcaactggattgcccagcagtttagatgcatgtgttttgttctttatcttatccacattgaagatgtaagtaggtcatctgaaagcatcgggtttgattacaccacataatgcatgtctttctgaagttaagtgttggtgttacacaaatggttcttatctcagaagcagagaagctgacag

SEQ ID NO: 5033 - DNA, 363 bp, Homo sapiens
  unsure (91): n=A,T,C or G
  unsure (94): n=A,T,C or G
  unsure (178): n=A,T,C or G
gagatgctgacgggctccctgcccttccaggggaaggaccggaaggagaccatgacactgattctgaaggcgaagctaggcatgccccagnttntgagcactgaagcccagagcctcttgcgggccctgttcaagcggaatcctgccaaccggctcggctccggccctgatggggcanaggaaatcaagcggcatgtcttctactccaccattgactggaataagctataccgtcgtgagatcacgccacccttcaagccagcagtggctcagcctgatgacaccttctactttgacaccgagttcacgtcccgcacacccaaggattccccaggcatcccccccagcgctggggcccatcag

SEQ ID NO: 5034 - DNA, 543 bp, Homo sapiens
ccacagaagttgctgctgacgctctgggtgaagaatggaagggttatgtggtccgaatcggtggtgggaacgacaaacaaggtttccccatgaagcagggtgtcttgacccatggccgtgtccgcctgctactgagtaaggggcattcctgttacagaccaaggagaactggagaaagaaagagaaaatcagttcgtggttgcattgtggatgcaaatctgagcgttctcaacttggttattgtaaaaaaaggagagaaggatattcctggactgactgatactacagtgcctcgccgcctgggccccaaaagagctagcagaatccgcaaacttttcaatctctctaaagaagatgatgtccgccagtatgttgtaagaaagcccttaaataaagaaggtaagaaacctaggaccaaagcacccaagattcagcgtcttgttactccacgtgtcctgcagcacaaacggcggcgtattgctctgaagaagcagcgtaccaagaaaaataaagaagaggctgcagaatatgctaaacttttgg

SEQ ID NO: 5035 - DNA, 461 bp, Homo sapiens
  unsure (419): n=A,T,C or G
  unsure (435): n=A,T,C or G
cctgcacccccatgttccgggagtactccctgcaggttctgaagaatgctcgggccatggcagatgccctgctagagcgaggctactcactggtatcaggtggtactgacaaccacctggtgctggtggacctgcggcccaagggcctggatggagctcgggctgagcgggtgctagagcttgtatccatcactgccaacaagaacacctgtcctggagaccgaagtgccatcacaccgggcggcctgcggcttggggccccagccttaacttctcgacagttccgtgaggatgacttccggagagttgtggactttatagatgaaggggtcaacattggcttagaggtgaagagcaagactgccaagctccaggatttcaaatccttcctgcttaaggactcagaaacaagtcagcgnctgggcggaggtgaangacgtccttccccaggagccgactgg

SEQ ID NO: 5036 - DNA, 491 bp, Homo sapiens
ctgctcatcttcagcagacggaaaccaagtgtgatgacccctactgagggcctggatacgggagagatgagtaatagcacatcctcactcaagcggcagagactcggatcagagagggcggcttcccatgttgctcaggctaatctcaaactcctggacgtgagcaagatcttcccaattgctgagattgcagaggaaagctccccagaggtagtaccggtggaactcttgtgcatgccttctcctgcctctcaaggggacctgcatacgaagcctttggggactgacgatgacttctggggccccacggggcctgtggctactgaggtagttgacaaagaaaagaacttgtaccgagttcacttccctgtagctggctcctaccgctggcccaacacgggtctctgctttgtgatgagagaagcggtgaccgttgagattgaattctgtgtgtgggaccagttcctgggtgagatcaacccacagcacag

SEQ ID NO: 5037 - DNA, 324 bp, Homo sapiens
ctgcccttctggcgagtacatgcacaggattgtaaatgagaaatgcagtcatatttccagtctgcctctatgatgatgttaaattattgctgtttagctgtgaacaagggatgtaccactggaggaatagagtatccttttgtacacattttgaaatgcttcttctgtagtgatagaacaaataaatgcaacgaatactctgtctgccctatcccgtgaagtccacactggcgtaagagaaggcccagcagagcaggaatctgcctagactttctcccaatgagatcccaatatgagagggagaagagatgggcctcaggacag

SEQ ID NO: 5038 - DNA, 570 bp, Homo sapiens
  unsure (296): n=A,T,C or G
  unsure (306): n=A,T,C or G
  unsure (401): n=A,T,C or G
  unsure (406): n=A,T,C or G
  unsure (522): n=A,T,C or G
tgttaacacttacatttttgtatatatagacactttttgtattttctacatttttcatatgtaaaccctccccactctccacacatcattattcattatgatcatgaggggtttatcccaggatattcattgatagaaaattaaaagagtaatttataaaatcactacatgaacaagtaaaaacacacacagcaaaatttacatcaaaattattacgtggtacagaatccaaaagtcataaaaagcaaaagctatctttttttcactctggcacccatctgttcttccctggagtnaaacactatnaccaatttttaggtatacttccaaagatacttactgcatttacaagcacagacttatattgattctaaaagaataagagacattttcagcatgtngtttngttcaacaccacagtatatcttaaagatggtcccccatcaatacatatagagatctctcttttttatggcttcatagtattatcatgtgctgatatgccaaaaactaatccattanacccttttgggtatatatttactattttgcagtcttctgctcttagga

SEQ ID NO: 5039 - DNA, 505 bp, Homo sapiens
  unsure (341): n=A,T,C or G
ctggagtaccaggaagaactgaggtcccactacaaggacatgctcagcgaactctccacagtcatgaatgagcagattacgggcagggacgacctgtcaaagcgcggagtggaccaaacctgcactcgagtaattagcaaagcaactccggccctacccacggtctccatctcatctagtgctgaagtctgagggctctgcagcatcagacccacctctaagagaactttctgaatttgcagctaatctcggggaagagaaagataggtttaatttatttgaagttttcatggtgttaatatttttgtttacctcgctagcttcagaattttgccaacctntgaatttgcacattttgtataatttttttttctttgagcagtgttgatcaagccaagttgaatatttgccatgaaattccagtgaatgtgtagctcaaatgcaaaccctaagtttgctgtcagttattgtatggtcagtgccccagtcctagtacacatatttt

SEQ ID NO: 5040 - DNA, 253 bp, Homo sapiens; identical to SEQ ID NO: 225

SEQ ID NO: 5041 - DNA, 430 bp, Homo sapiens
ctgaatgccactttcagatggaagggaaatgagatggaaaacaacaaaaaaggactgccaggcggaacagtttccaaccgagttttcgttgagtgaggatccagcagccatcaaactcaaacataggggcccgcagggaaactggaggaaatacttcagagacagcaaagctgaaggtttctgtgctctgagggatccgagagtggatgtcccactcctgtatcctcagccagacacagaactagccagattcattagggaagctcggatgctctcattctataaagtaaggcccccagcagggcacgtacatacattgggaaagaagaaaccccttagtaccatgttggtcaaaggcaagagagagaattctatttccatctggaatgtcattcttgtttacttcttccaacagtgaaatacttccagg

SEQ ID NO: 5042 - DNA, 381 bp, Homo sapiens
ctgggcctatgctggtcatgaacggtcctggaaaatgactcccttccttcagtatctgcatcctcatgaagtcattcattttggagattgtgtcttcacttttcttggtgaagaaactgctggatggagttgttggtggcatctgaggagtccgaaggtggctctcagggaaggttgtgctggcctctgaaggatttggaagctgactctgttcctggggtagcttcatgctcttggggtcattgtttctcgggtttgtttttttctttatctggataaaactatgcatttctgaaatcagttttgacatctggttcttttttctaagtcgaaagcagaaaagttggagcttatctccttcttcacaggggatattgtgac

SEQ ID NO: 5043 - DNA, 348 bp, Homo sapiens; identical to SEQ ID NO: 372

SEQ ID NO: 5044 - DNA, 318 bp, Homo sapiens
aaatatcacaagtaggtcttaagtgtcatctggcatcttctttctgtagccaggtaactcttagatcttattcatcagcctgctgaacagttcctttttcagagacatagataccatccaaaaatttcctgatatccttgtttttaactgttgtggcttgctgaatcaaagccgctgaatttgaaacaagctcaatgtcatttccttcaaggattaattcatctttctgggcttgagatactgaacaagcaacacctggtctcatccgaaccctgcggatgtatttttcacccaagaaatttcggatttcaacaagag

SEQ ID NO: 5045 - DNA, 568 bp, Homo sapiens
catggatcagtgcttccttccttttcatggctgcatcatattccacggtatggatggaggatggaccagtgatctacgggctggagttccaggcacgtgccttaacacctcaaactgcagaaacagatgccattcggtttttggttgggacgcagtctcttaaatatgataatcagatccatatcatagattttgacgatgaaaacaacattataaataaaaatgtcctcctccatcaagcgggtgaaatctggcatattagcgctagccctgcagacagaggtgtgctgacgacctgctacaacagaacttcagacagcaaagtcctgacatgtgcaaccgtgtggaggatgccgaaggaattggaatcaggcagccacgagtcccctgatgattcatccagcactgcacagaccctggagctgctctgtcaccttgacaacacagcccatggcaacatggcctgtgtcgtgtgggagccaatgggagatgggaagaaaatcatttccttggctgataaccatatcctgctgtgggatttacaggaaagctcgagccaggctgtgct

SEQ ID NO: 5046 - DNA, 598 bp, Homo sapiens; identical to SEQ ID NO: 226

SEQ ID NO: 5047 - DNA, 346 bp, Homo sapiens; identical to SEQ ID NO: 371

SEQ ID NO: 5048 - DNA, 556 bp, Homo sapiens; identical to SEQ ID NO: 490

SEQ ID NO: 5049 - DNA, 470 bp, Homo sapiens
aaataaagaagaaagctattgtacaaatatcgctcttcaggtttagcttacagagccatggctatggattcttagctctgtaaggaagtgcttctataaattcttaggtttagagatgataccatctgggtacctttgcttgaaccgtgcaaccacatctgggtctagtaggtggatcccatccagttggtttccaagggtgatccagttgggttgcacattgtgtggtcgtccaaataactcaatcttgcgagtgccaggagatagtctttcaatcatgccatagatttcatctggtttatgactggtggaacgaacctaggaaataaaaactagctgctttttaagttacacaagattgcaattctagccctttctattatgtttatgatctaaatgagaaaaatctgggatgagaatacacccaacatgaataactgataccaacaaaaatgtggaagctttggagg

SEQ ID NO: 5050 - DNA, 300 bp, Homo sapiens
  unsure (66): n=A,T,C or G
  unsure (89): n=A,T,C or G
  unsure (114): n=A,T,C or G
ctgcagggagtgccggctctgttcctgaaaatctgaacctgtttccggagccagggagcaaatcanaagaaataggcaagaaacagctntctaaagactccattctttcactgnatggatcccagacgcctcaaatgcctactcaagcaatgttcatggctcccgctcagatggcatatcccacagcctaccccagcttccccggggttacaccttctaacagcataatggggagcatgatgcctccaccagtaggcatggttgctcagccaggagcttctgggatggttgcccccatgg

SEQ ID NO: 5051 - DNA, 653 bp, Homo sapiens
ctgaacccaaacccacctttcttctcctctgggtctttctctttttcatcctctgttttgactctcttggcttttttgaagttggaagagttcttgcggcccccctctccctcctcttcagaatcggagaactcttcctcacaggcaattcgtttgtcagaggagcagactgggagggagtgggaagcatgggtgagagggcaggcgggtgctgatttagctcagcgtctatgcccagtgcttccctgcgtgtcctccaagagacaccaagggaaagggaaccagaagagggaggaactcgggctccctaacctgttcctacaggcactggaactcgaaaacagatttctctacaggtggggagcttggagggagtgtgcagccaggaatggtggtggaagtgtgagctgcctattgaatggaaggcatagggctctaggtctgggtctcactcgagatgcgcttgtcagggtcgtcttcgtcctcatcgccactctcctcagggatggcgtcctcaggaatcgcctgcatttggaccccaggtgcgtgcggcagcattctaaggttctcaaacagtcgctgtttgatcttctccaggtactcattcgtgttctggttagtcatattggaaggactgatgtggagcttgaaat

SEQ ID NO: 5052 - DNA, 278 bp, Homo sapiens
aaataaatacttagaacacgacttggctcctacaagcatctggactctaggtctcagtactgaagtgtctcacccatgggccccacgcagggacgccacggttccctcccaccccgtgatcaagacacggaatcggctgccgatggttggatcgcaatgcgccccttttctagagccttccccggccatctacaggcaggatgcggctgggaaaaagacaactggaatttctcgaaggttgatggtccgcacggttgaggattctacgtggttctctt

SEQ ID NO: 5053 - DNA, 171 bp, Homo sapiens
cgggcctgaggagggatgggagtaagaagtgctgtggaaaccgtcaggccatgaaccaggctgaccctcggctcagagcagtgtgcttgtggactctcacatctgcagccatgagcagaggcgacaactgcacggatctactcgcactgggaatcccctccataacccagg

SEQ ID NO: 5054 - DNA, 514 bp, Homo sapiens
ctggccgatttacaccttgataacaagaagcttggagagatgcgcctgaaggaggcgggcacagtggagcataacgcgctgtcaggatcgggggaattttccggtattttaatctgctgacatttggaatccgtgtgcagcccacatggtaaatgtggggagatttgctgatgatcggaacagatcaccaggggcctgctgtaggagacggagacatgctgttagtctgttctgtgagggtccatgacggatccacccaggcggcctgtgtgggagaggaggtgggcaggaggaacggccctttgtggcccggtttggatttgacgtggtgacgcgctgtggatacctcccccaggtgaatgactggcaggaggactgggtcgtgttctatgcccggcagcgcattcagccccagatggacatggtggagaaggagtctggggacagggaggccctccagctttggtctgctctgcagttaaagatccctgacctgttccgtgacctggagatc

SEQ ID NO: 5055 - DNA, 532 bp, Homo sapiens
aaataccataacctgtccctcccaccccccaactacattcgaaaaagtaagaacagcagaaagatcacgaaggccatgtaaaattaattcagatttaattttcttcagggctgtaatcactagggatcaaaactccttagtctggttgattgctgaatgggagaggagtaagtgagaaagatcatggcaggctggccctgcaattattcaaacccaggcccctggctgcctgggaacgggacttgggtgagatgaagtagtaaagacagtagttctgcccatggtgtggagactaaaaagcaaagcaggccaaacttagcttccatggttacatttggaagtttctattcatgacaccaaataaaagtggggaagaaggaagcatggcttactgaagtagtctcaggaagacagggcaagtgtgcaaaaagccacactgccaaagcaggctactagtgaggatcatcctgggtgacttcgaatgcacttgaggggaaaggctcaagtaccctgtagttgtagcaggaaaaag

SEQ ID NO: 5056 - DNA, 577 bp, Homo sapiens
ctgctgaagctcaactcccttttcgagcaggtgtggaagccctgaggcttctctgacatagcatgtgtttattttcttaggtgagacctgattcaggaaagtctgcagccgatatccatcttcaagtttgtggtcctttctccctctatatatccttgacctcagcagtcatgctggggtccagagtggatgattctctccgccttaggtagactcctccttaagagtgtaagtctctcagtctcacatattttgtgagacgtaagctgacattccacaaggagaggaggaaattctgtgggtcacatccaggggtgcttggaacctgattggttgtcaatcctccagttagtttgtcacgagtggaattctgtcctggattcccaaggatcaaggctgccccattagccaggaaatagggagatagaggaggtcacttgagaaagagctgcctctttgccgcctccaggttgtgtctgtttcctctcatatctgaagacagatgtgctggcagaagcaaagtcctttgtccggccacgtgcaaatgcatgggacataaatatgaacagagattctt

SEQ ID NO: 5057 - DNA, 647 bp, Homo sapiens; identical to SEQ ID NO: 571
  unsure (639): n=A,T,C or G

SEQ ID NO: 5058 - DNA, 426 bp, Homo sapiens
ctgcccttccatgtcgtcacaggcataccgggcgtggacccactgcttggtgcccttgccgaagtagtagcacttccgttggaaattgatccacttttcagggcacgtgttgcacacaaagccgctggacacctgcaactccatccttagctttgtcacctcctcccggagtctttccagcaaatctgaagcttcgttcctctcgttcaattcctgggacttgaagctgctcagatctgcttgaagcccgttcaggttccaggacagctccaagtcctgagatttcaatctctgctgttcagctcgaagttcctccagttcctgtgaaatctgcgtggactgggatttctgcgccatctggtcaccgtggtggctttccaagttcttggaaacttgagagacgttccgggcagccctctcttccag

SEQ ID NO: 5059 - DNA, 346 bp, Homo sapiens
aaaagtaagaacttcgttttgaaaatataaattaccaagatatacaaaggagctttcacattgtatttcatgcaatgtgtggatttttcttcaacttttcacttctcccttccatactgggttcttgaccagtgttttcatcagttgaacatataaatggtcttaaatttcctcgagcctccttcacaaaataatcaatgacactgaaaaggtttgggagtgttacaggtttttccagttcaatagtgtagttttgtcctacgctcatcactttgtagtgcttgattcttggaatgtctatctcctgccgaatagtgatggagtagtttctactgtcactaccagg

SEQ ID NO: 5060 - DNA, 514 bp, Homo sapiens
  unsure (233): n=A,T,C or G
  unsure (286): n=A,T,C or G
  unsure (419): n=A,T,C or G
  unsure (457): n=A,T,C or G
  unsure (459): n=A,T,C or G
  unsure (471): n=A,T,C or G
  unsure (506): n=A,T,C or G
ctgatgccaaaataataaaaatgttacaattgataacaaaatctattagaaaaacaggaatatgataaagctgcttcaatatgagaaaggtataataaaaacgaacacactttgtaaatatggatgaaatgttgcaatctttttacctaaaataggaactgatacatatgatatacatataacctttctgtgccttctattcaacattcaaaataaaaccttagctagtccanattcaatgcaatctgtatcaaaatgccagtgacattcttcacagaaatagcanaagcaatcctcaaatttatatggaaccacaaaacatccagtatagccaaagcaattctgagcaaaatatcaaagctggaggcatcacattacctgaatatactacaaagctacagaaaccaaaacagcatggngctcatattaaaacagacatacagaccaatgaatccananacaaatccattngtttacagacaactcacttttgacaaaggtgccangaacatac

SEQ ID NO: 5061 - DNA, 556 bp, Homo sapiens
ctgaagcaggggctccaggaggtgaagcaggtaaccctgtagtcctggtccaggtccagcttccaaaagggaatcacgtccaggaagcacagctctgcatggcggccttcaaggaaaccgtgtttatgtggagcctggttgcatagaaagcccctgcgctggttcagcaggacccaggtgtcattgtgcatgcgctccacctcataacacaggcaagtctcatgccgtcctctgacccaaggttcattgttaaagttgaaagtgaatgtgggtggatccatcgagtgtctgagaatctcccccagcatgatgtgcagtaatatataatatttaggcagattattccaaggctcaaatagctctctttggctgtacacgaacttgctccaacagtgctgaaattcgtcataattcatgatcttcatggtggcacgcggaccgtctcttttctgacacaggctgcgaagcgcctcctggtaatctgggtcccagaagtagtagaggcgggcaacgaagatggtcagggtaaccttcgggtcctcggccaggaacgtgg

SEQ ID NO: 5062 - DNA, 377 bp, Homo sapiens
ctgaaatgtctgcttaatagtgacgatggtgctattagcaggtgggtgagccagttcccaaggtacacgttcactatcaagagctaagcacacctgctaacaactcagtctcctacaaacctgatgtttctccagcaaaacaaattaaaattaaacctaatggtacttctggctgaggctccagaggtccccaggagggagggtgtttgcgtggagggggccttggttccacagaatggtggcttatggacgcttttaagacactaaagaaacccacatggtaaaaggctgggtgcggtggctcacgcctgtaatcccagcactctgagaggctgaggcgggcggatcacaaggtcaggagttcgagaccagcctgg

SEQ ID NO: 5063 - DNA, 270 bp, Homo sapiens
ccaacaataagaacttctctcccatgttgcacagcaagggtggcacgcccttctctccaagtccagaggctgctgctaagaacttttccaagagggcttccagtgttagtgagcgcacttcagggaaggcagattctaacagcttgaaggcccaagggaatcccgttatcagctctgatcctgagataatccctctgacttcctcccagaagccaagactctccagaactaagaagcaaaaaaagcaaaagggaaagagataatcacttt

SEQ ID NO: 5064 - DNA, 573 bp, Homo sapiens; identical to SEQ ID NO: 245

SEQ ID NO: 5065 - DNA, 280 bp, Homo sapiens
aaaatttattgcttgatacttttgacaacaaattaggttttgtacaattgaacttaaataaatgtcattaaaataaataaatgcaatatgtattaatattcattgtataaaaatagaagaatacaaacatatttgttaaatatttacatatgaaatttaatatagctatttttatggaatttttcattgatatgaaaaatatgatattgcatatgcatagttcccatgttaaatcccattcataactttcattaaagcatttactttgaaaaaaaaaaaa

SEQ ID NO: 5066 - DNA, 201 bp, Homo sapiens
ctgggggtcctgccgggcaagccgcagcagcatccctcgcttcaggtccatcccaaacttggagcacaggtcctccttcggggtcttgaggatgtaaaagtcgagcccataagcctcatcgatgaggtccagggtccgcatggtcacagtcactgtgaacttcttgtccaggatctcactgtagaactctcgctcaaacag

SEQ ID NO: 5067 - DNA, 295 bp, Homo sapiens
ccataaggaagaaattaaattaacactggtctttggtctctcagaaaccttcagccagaagaacctgtctttgaagaaaaagatcttatttcccacggtagtgacagcatcaaaactcaaattggggtcacagagagctggttctgaattgtcaggatttggcaagcgttggttctcttttgggtctccatacagggactgaatgccacgtatgtcatcagcagagaggcgaaatgtgttgatgtcaacatatttgtaggtggggaacattacggcctttggatcactagaatgg

SEQ ID NO: 5068 - DNA, 381 bp, Homo sapiens; identical to SEQ ID NO: 374

SEQ ID NO: 5069 - DNA, 372 bp, Homo sapiens
aaacacatgcatatatattgtcaattgtgggaagctttacaagttatattccatgcactttttggacagagttctaacagagccagccagtccacaaaacaggcagacaaaagttgaattaactggggcaaataggactcttatgcaacatccaaaatatctgacattctgccctgaaatacgttcagcacacctacaggactggggtgaaagtggataaagcaacatttatggttggcagctatggacctcggcctgaggagtatgagttcctcactccagagacaagtttatgtagtacttaatgtacatgatatgaatgtgaagcataaaattaaataaaatttttccccattggcttggttttatttt

SEQ ID NO: 5070 - DNA, 612 bp, Homo sapiens; identical to SEQ ID NO: 227
  unsure (544): n=A,T,C or G
  unsure (558): n=A,T,C or G

SEQ ID NO: 5071 - DNA, 443 bp, Homo sapiens; identical to SEQ ID NO: 563

SEQ ID NO: 5072 - DNA, 460 bp, Homo sapiens
ctgatctacgagtctgccatcacctgtgagtacctggatgaagcatacccagggaagaagctgttgccggatgacccctatgagaaagcttgccagaagatgatcttagagttgttttctaaggtgccatccttggtaggaagctttattagaagccaaaataaagaagactatgctggcctaaaagaagaatttcgtaaagaatttaccaagctagaggttctgactaataagaagacgaccttctttggtggcaattctatctctatgattgattacctcatctggccctggtttgaacggctggaagcaatgaagttaaatgagtgtgtagaccacactccaaaactgaaactgcggatggcagccatgaaggaagatcccacagtctcagccctgcttactagtgagaaagactggcaaggtttcctagagctctacttacagaacagccctgagg

SEQ ID NO: 5073 - DNA, 498 bp, Homo sapiens
aaagaaacttgaccaaaagacagtacaaaaacactggcacttgaatgttgaatgtcaccgtatgcgtgaaattatatatttcggggtagtgtgagcttttaatgtttaagtcatattaaactcttaagtcaaattaagcagacccggcgttggcagtgtagccataactttctgatgttagtaaaaacaaaattggcgacttgaaattaaatcatgccaaggttttgatacacttgtcttaagatattaatgaaacacttcaaaacactgatgtgaagtgtccagattctcagatgtttgttgtgtggattttgtttagttgtgtgtttttttttttttttcagtgaatgtctggcacattgcaatcctcaaacatgtggttatctttgttgtattggcataatcagtgacttgtacattcagcaatagcatttgagcaagttttatcagcaagcaatattttcagttaataaggtttcaaaaatcatgtaaggattt

SEQ ID NO: 5074 - DNA, 386 bp, Homo sapiens
ccaagcaggtagccagagagcgccatcagccaagaaaccatccactggttctaggtaccagcctctggcttctacagcctcagacaatgactttgtcacaccagagccccgccgtactacccgtcggcatccaaacacccagcagcgagcttccaaaaagaaacccaaagttgtcttctcaagtgatgagtccagtgaggaagatctttcagcagagatgacagaagacgagacacccaagaaaacaactcccattctcagagcatcggctcgcaggcacagatcctaggaagtctgttcctgtcctccctgtgcagggtatcctgtagggtgacctggaattcgaattctgtttcccttgtaaaatatttgtctgtctctttttt

SEQ ID NO: 5075 - DNA, 258 bp, Homo sapiens
ctgctctaatatcgatggtcctgcttgccagagagttcctctacccagcaaaaatgagtgtctcagaagtgtgctcctctggcctcagttctcctcttttggaacaacataaaacaaatttaattttctacgcctctggggatatctgctcagccaatggaaaatctgggttcaaccagcccctgccatttcttaagactttctgctgcactcacaggatcctgagctgcacttacctgtgagagtcttcaaactttt

SEQ ID NO: 5076 - DNA, 487 bp, Homo sapiens
  unsure (404): n=A,T,C or G
  unsure (406): n=A,T,C or G
  unsure (421): n=A,T,C or G
  unsure (423): n=A,T,C or G
ctgaggtagcaagaaccgcagactggagagatgtgtcagaacttcttaaacctcttggtctctacgatcttcgggcaaaaaccattgtcaagttctcagatgaatacctgacaaagcagtggaagtatccaattgagcttcatgggattggtaaatatggcaacgactcttaccgaattttttgtgtcaatgagtggaagcaggtgcaccctgaagaccacaaattaaataaatatcatgactggctttgggaaaatcatgaaaaattaagtctatcttaaactctgcagctttcaagctcatctgttatgcatagctttgcacttcaaaaaagcttaattaagtacaaccaaccacctttccagccatagagattttaattagcccaactagaagcctagtgngngtgctttcttaatgngngtgccaatggtggatctttgctactgaatgtgtttgaacatgttttgagatttttttacctgcc

SEQ ID NO: 5077 - DNA, 542 bp, Homo sapiens
  unsure (458): n=A,T,C or G
  unsure (486): n=A,T,C or G
  unsure (515): n=A,T,C or G
  unsure (532): n=A,T,C or G
cctgggcttgagcaatagcctcaggtatctccatcacttacacagcactcattcgttcagtgagatgtcatttattaagcagttacaatgctgcaggtgctgtgcaggagactggacatacaaaagaagaatttgacccagaccttccccctctggggtctcataatcttgtagggggaagggaatacaaatacaaattagcgaagaatgatagcagtatcttaggacactgtaactgtgtgctacgggacccaaggactggagagccatcccttcgtgaaggtcagggaagagctgggtggtggagagagctgagcctgtgtggacccctgatgcatgctctgatgctgagggagtacagtagagatggacactgatagtgacagaagagtttggccccaaagcagaagcggcatcctgcaccgactccccttagaatgaatgagtacgcacaaganaacaaccacaggcatcgccgcccttcantggatctctttgctggagaattgacagantgcgtgtcgcgcctgantgagccggta

SEQ ID NO: 5078 - DNA, 220 bp, Homo sapiens
ctgcctgaggaacccagcccctgacccctgccaccctccggtggcccaggtgcctacctccctcaagcctgggaaggtgggtctggggaaagtgggccaagtgatctgggggtaccccttgggttggtgtggggaaggagtgcctccttagtggtgcttgcagtcacaggaagcagcagcagtaaggacaaggggccggattccaggtcttcaacactgg

SEQ ID NO: 5079 - DNA, 518 bp, Homo sapiens
  unsure (147): n=A,T,C or G
  unsure (183): n=A,T,C or G
  unsure (220): n=A,T,C or G
  unsure (222): n=A,T,C or G
  unsure (257): n=A,T,C or G
  unsure (327): n=A,T,C or G
  unsure (370): n=A,T,C or G
  unsure (422): n=A,T,C or G
  unsure (458): n=A,T,C or G
  unsure (481): n=A,T,C or G
  unsure (487): n=A,T,C or G
  unsure (506): n=A,T,C or G
ctttttttttttttttttttttttgcaggtgaaccatagtctcactttatttcgaattttaggactgaacagaaagaaggttcacagatatttcttcagggaaggaaagtgggcaaatagcacaatgaggcaaaccacacaatctanacgtactttcccgggtaaacaaactgggaagcccanagctcacagaggaggagagcagagcttggggtggcananaggtgttccttgggaaggagtcaggaacacaaganaaatgttcatgagctcatccaggatagagaggactcttggggaaggggacctccttccccatgctgtctntgccccaagcccttaatgaagcaggagagggaagtctgtccanaaactcatctggttagacatttgcatcaggaatagggagggggtggaggcanagccactttggacatgggaaatcacagttgcagtanacagtgagctctagtcactccanaagctngacataatttgcagggaanagtccaaagtgg

SEQ ID NO: 5080 - DNA, 268 bp, Homo sapiens
ctgtatggctgggggctcctcgtatgcatggaacccccagaataaatatgctcagccaccctgtgggccgggcaatccagacagcaggcatagggcaccagttaccctgcatgttggcccagacctcaggtgctagggaaggcgggaaccttgggttgagtaatgctcgtctgtgtgttttagtttcatcacctgttatctgtgtttgctgaggagagtggaacagaaggggtggagttttgtataaataaagtttctttgtctcttt

SEQ ID NO: 5081 - DNA, 560 bp, Homo sapiens
  unsure (548): n=A,T,C or G
cctgctcctactatgtccttttccttctctcatatatttcagtcgtctggagttctcagaataaggaatccattatcaatgacctatcccatgaacattttttttgagaacctgtgtaagactatatagacatgaatatttgatgacctgacacctcaccgttcaaacctagatttgggttgtataaatatcaactcaaggctgtaagagcctcccatggtctaatgtttcaagagtaaagaagaatagacaaacacccatgttggaatcatctgttgcagaaaagaacacaaagatagttttattaatttagaacaaattttgagaactttacatagacagaaatcttctatctcctttttttctaattttggggaatgtcttccactagtggtcgctaaaaatgtagaaatatcatagggagtgcaaattacattgtctctttacctgccacaatctggcagcactcatcatgtagcaaatgcccaaataatagactacagattatagtgacttcaccctaggttaacattatttctaggtaaggnactagtatatct

SEQ ID NO: 5082 - DNA, 224 bp, Homo sapiens
ctgcctccgtttgggtggcagaaaatgtcacagggacctttcagccacaaagaggcttttaggccgtggttgggggtcttcagggtcttgctctgggcctggctgtatccatgctcaagagtggagaggggcagagggggtgggcaggcggccgtctgggtctggtcttgaatcaggtcccatggactccgcggaaccttcgctggctggcggcgtgcatgtgg

SEQ ID NO: 5083 - DNA, 288 bp, Homo sapiens
ctgtgagctggcaccgagaggggctgctgagctagaattcccacctatgtctttccaagggactgttcacggcttgggacttggtctctgtcctgccccatcctcgtcacttgggaccacgagccctggttcagtcacccagggaagcctcccagcggctcatgaagcatcgagctccaagcccagatgccaagctccctggctgagctgaatgatgtcactcatggtggacgcgttctgctcacgggcccagagccctgtgaaatgcatcaaggtcctctccgctgg

SEQ ID NO: 5084 - DNA, 181 bp, Homo sapiens
  unsure (11): n=A,T,C or G
  unsure (144): n=A,T,C or G
caacaatctgngtgcctctctggttgtttctcttttttattattactcctgagttgatgacattttttgttagatttcatggtaattctcaagtgcttcaatgatgcagcatttcttgcactaaaaaaaaaaaaaaaaaactanaaagttttgggacatggggttatattaaattattctt

SEQ ID NO: 5085 - DNA, 288 bp, Homo sapiens; identical to SEQ ID NO: 228
  unsure (9): n=A,T,C or G
  unsure (10): n=A,T,C or G
  unsure (176): n=A,T,C or G

SEQ ID NO: 5086 - DNA, 343 bp, Homo sapiens
ctggtctccctccaccctctcatatttacacccaaccccttccccaaagctagcttttaccaaagttcctggtaggaggtcaagaagtgtgtccacttagccggcagtcctagatgtagtggacgctgtttgtccccaggccagttgggcaccaggaagggctactctggggattcagggcatagactccgtactggggtcaagggaggcccccactcacagatactctcctttccttctggggctcaatgtacaccaaaaccttcagaaagcaaagttggagtggtggacccccaatgtcaagtttagtgctctctttgcttgtgaggacccacacaagtgg

SEQ ID NO: 5087 - DNA, 635 bp, Homo sapiens
  unsure (579): n=A,T,C or G
cctgattggttaaaaacatcaggctgtagctaaagcttaaactccctatatgattgggtgaagtttcaatcacttagtttgcagcagtgactcatttttgcttaggagaaagtcccctttgattggttgaagtttcaatcccttagcttgcagctatgactcattttggcttagaggaatgtccccttagggaagtccctgttgacccaggaagtctagctaacttagccacttagtgcctcagtaccccctctcaacaggaaagcccaagtgctgttgagaagttgggcaatgatcattctagctacttcctgctgaactggggcacagaaggggatctgcagttgagggttcctcaggaggggagtcttcttcagtgtcgtggtgttagaacaggttggtaggtcagtctaggggtcctcgatagtaggtgctagtggtggtcatttggggctccatttgtagaaccacttgcagtttcatggattctattcacttcagagaaatcccggacaggcccccagaaatgagatgagaagtctcttccgatcgaaggtttttatcaattgaagagtttgnggttccacgggcttcaaagaatgaaggcttggaccgcagcagtgagtgttacagct

SEQ ID NO: 5088 - DNA, 535 bp, Homo sapiens
aaaaacaaaaggttgatatactataaaataagatgcttcagtgcagctccaaaaacctttataaatacagccatttggaaggacgatcctggatcagaaattattccttgtgtatctatattatgtgcatgcctcatttcagttgtcataattgtctctgtaatttcctcctgagtagcggtcataaccaccctggtttctgccattatagtctctggaacgtccatatccatatccataccctccaggtcgactgtcataatacctgccactcccatagccctggtccccaccacctctagagtagctgcgaccacgcccatgggccccaaagccacctcctctggttccccgagcagacttgcctgcatgatccacacggatctgacgaccatccagagactaagtgtgggagacacaaggatgatgggttggcagtcagtcagggcaatggtgagggaagagcaggcaagggtaagtgggcaaaagaggccaaaaattcctgctgggcaccaggttctgggtgccatgttcc

SEQ ID NO: 5089 - DNA, 418 bp, Homo sapiens; identical to SEQ ID NO: 4915

SEQ ID NO: 5090 - DNA, 545 bp, Homo sapiens
cctagattttcaagaagtccaatatctctcacttgaagtgtcttttccctggagtagattgggagatttgagggatatctgtccaaagatgagacagtctgtttctagtttcccatccagcctgatggggcgtctacagtttttaccacaaggtgtcgctgttgaacagattctggtgcagtctagtgcatagctgtccacttctagagtgatcacttgctgggccaagttcctctccttaagtggtgtctcacattaaggttcccaaattacagactcattaattcaccctaataagctcatccaggcagtttaggtcttcaggggcttccagcctccaacacacattgggccaaaaccagcctgtaccaccagctccaagccctgtgttgaatctaggtcattggtccagatgccccttcattctgggcctgtggtgtcctttccagacagcagacctcagttaagggcatcccagtccatcagagaagttccaggatcacagaccctcaaaaggggcagtgttgaggattcagtctgttttc

SEQ ID NO: 5091 - DNA, 571 bp, Homo sapiens; identical to SEQ ID NO: 230

SEQ ID NO: 5092 - DNA, 584 bp, Homo sapiens; identical to SEQ ID NO: 231
  unsure (577): n=A,T,C or G

SEQ ID NO: 5093 - DNA, 409 bp, Homo sapiens
  unsure (359): n=A,T,C or G
cctctcctccactgcatgtggcggcagggcgggtaggtcgcagggctccatgattgtggggcagcttcaagggcacatggggcagaggccctcgaaggtcccctcctcagtaggggatgtcattctgatagtactggatcatgttgtaggtccggctcctgttgctgaggaagcagctctggatgaccttcatgatgaaatttgcagcctcgcgctcagtcatgttggggctaaacctgtgcttcaagaacttgattggccgcgaaaacagggcaggcccgtgtccaacatgatagtgaccagggagacgaccacatccatgtagggccgcacagccaggtagcctggacacacatctncatgaaccacttgaagggtgtggcctccatcttgccccccatgatcatca

SEQ ID NO: 5094 - DNA, 135 bp, Homo sapiens
aaaaaagagcattttattttaataaagaataaaagagatcaatatactgttttaatggatacaaaaataaatattcattcagcatattaaagatatgtgctttgacattcatttgaattggagattcaagcctat

SEQ ID NO: 5095 - DNA, 549 bp, Homo sapiens
ctgaggaaatgggcagtcccatcgctagaaccctgttcttagaaattacctggtctcttgctctgacagatgctgagctaatgctgggtcacatatttaacagctagcctaaagccataggctggaacagagttggcaagagcctggctcaggtgtagcgaggagtagagagggaagacaaagggagtatcagacccctcacacgggcctctcctccccaaagatggttccacctgggtgtgttcaggagtcactaccttcacgctccctcctcccccaccccagctcttccagggtatacctaaggggtccagagcaaggaagggggcttgagctgggcccgaggaggtgaggttggctggaatttagggtggctggcagaggagagctggggaggctgcagcctttacagcagacagcaggcacggaatatcagcaggtccttcggctcagtaagcttcagtgagacactctcattggccccaatgaagagcacgccaccacgttgcagagggattggtgtctgggttgtgggtgtgctggctatta

SEQ ID NO: 5096 - DNA, 276 bp, Homo sapiens
ccacaggcttctaccccgaccacgtggagctgagctggtgggtgaatgggaaggaggtgcacagtggggtcagcacagacccgcagcccctcaaggagcagcccgccctcaatgactccagatactgcctgagcagccgcctgagggtctcggccaccttctggcagaacccccgcaaccacttccgctgtcaagtccagttctacgggctctcggagaatgacgagtggacccaggatagggccaaacctgtcacccagatcgtcagcgccgagg

SEQ ID NO: 5097 - DNA, 443 bp, Homo sapiens
ctgttggggctctgccaggtcccctgggaccaactacagctccaatcagaaaccctgcgcttccttgagtgtggcttcccacttttcctgcattgtggagctgactgagtacaccggtgaggctggggtctctgcaggggaggtcactggaacagcgagcaagggactggtgcctcgctggtgctgggtctctggtttgctgcagagccgtaggacactcctggctcctcagtaggacagacagacgcaggcgggtttattttggaggggtacttgtggcattttcctgtattgtcttggacatgggatgtggggaggtggaaatgatgagcagtagcatcatttctccctgttgggttttagccagtttgccagcaagcgcatcctagcagggtccccgagcagcaggttgtgtggatgaagggacaggcacttgcatccag

SEQ ID NO: 5098 - DNA, 332 bp, Homo sapiens
  unsure (308): n=A,T,C or G
  unsure (309): n=A,T,C or G
aaatagaaaacagtatattgaaagtggtgggtttgatctttttatttagaaacccacaaaatcagaaacacagtacaaataaaacagaaatcaaactataagttgacttttagttcctaaaaagaaacatatttcaaaagcaatggaatctagaattcttataacatgaataacaaaatgtacagcaagcctatgtagttcaattaatatataaggaaaaggaaggtctttcttcatgatacaagcattataaagtttttactgtagtagtcaattaatggatatttccttgttaataaaattttgtnncataatttacaaattagttcttt

SEQ ID NO: 5099 - DNA, 594 bp, Homo sapiens; identical to SEQ ID NO: 229

SEQ ID NO: 5100 - DNA, 325 bp, Homo sapiens
  unsure (38): n=A,T,C or G
  unsure (43): n=A,T,C or G
  unsure (70): n=A,T,C or G
  unsure (83): n=A,T,C or G
  unsure (95): n=A,T,C or G
  unsure (99): n=A,T,C or G
  unsure (138): n=A,T,C or G
  unsure (147): n=A,T,C or G
  unsure (166): n=A,T,C or G
  unsure (171): n=A,T,C or G
  unsure (182): n=A,T,C or G
  unsure (196): n=A,T,C or G
  unsure (199): n=A,T,C or G
  unsure (229): n=A,T,C or G
  unsure (253): n=A,T,C or G
  unsure (268): n=A,T,C or G
  unsure (281): n=A,T,C or G
  unsure (283): n=A,T,C or G
  unsure (295): n=A,T,C or G
  unsure (300): n=A,T,C or G
  unsure (310): n=A,T,C or G
  unsure (316): n=A,T,C or G
gtacaagcttttttttttttttttttttttttttgcanaaaanaacacaaagatagttttattaatttanaacaaattttganaactttacatanacanaaatcttctatctcctttttttctaattttggggaatgncttccactngtggtcgctaaaaatgtanaaatntcatagggagngcaaattacattgnctntttacctgccacaatctggcagcactcatnatgtagcaaatgcccaaataatanactacagattatagngacttcaccctangntaacattatttntaggnaagggactantatatntgaattgaa

SEQ ID NO: 5101 - DNA, 166 bp, Homo sapiens
aaagccacacaaataagagtgctaaactgtggacttaaaagtaggtgtgtaaatatttttaatcagtattacttggaaaataaaatataacaaacccatagaccaatatgctattttttttacctgttaaatattgggagttctttacattttttaagtaaacttt

SEQ ID NO: 5102 - DNA, 574 bp, Homo sapiens; identical to SEQ ID NO: 380

SEQ ID NO: 5103 - DNA, 510 bp, Homo sapiens
  unsure (159): n=A,T,C or G
  unsure (189): n=A,T,C or G
  unsure (211): n=A,T,C or G
  unsure (215): n=A,T,C or G
  unsure (219): n=A,T,C or G
  unsure (361): n=A,T,C or G
ctggacacagacacttccccagccccagggccagagtggggctggagggaaggacagggctacagtagtagtgggggtatatgagggaaggctgcaaggatgtggtagctggagttttgagagatggataagagttttccaaggaggcaaaagtggcanaaaagctttgcaggtgaggaggagcagcanaagcttaacctgcatgagaatncctntcancagtcagaaagttgaccctgcacagccaaggggtaagctctgaccattttgcaggggacagaactgagacccagagagggaaaggaacttgcccactgtcacactgcatggaaggggcaaaactgtaggctccaatacttgngctcttaacctccttactctgagccttctcacgcttggcatgctgttccctctgccaggaatgcctttccttcccttgattgcgtgaaaagttcctgccaggtttggtgtcatccctttgtgccccttgtagggtgaggacagaaaggg

SEQ ID NO: 5104 - DNA, 130 bp, Homo sapiens
ctggcggtaaggctggaaaggactccggaaaggccaagacaaaggcggtttcccgctcgcagagagccggcttgcagttcccagtgggccgtattcatcgacacctaaaatctaggacgaccagtcatgg

SEQ ID NO: 5105 - DNA, 597 bp, Homo sapiens
  unsure (542): n=A,T,C or G
  unsure (593): n=A,T,C or G
ccagggatcagtctcatggccgtagaagcagccaaattcctctgcctttgccttcccttcaggagtcacatgctaaggcatccttgggcatttggaaaaggccgcttggggtgagagtgctctaggccactctgcaatgtccctgggcccgatgagtaacaaatgcaccccgggacccagagaagtggaaagacatgaaagggatttggaaacagatcgtaaaaataacctgtatgaaaatcacacagacaagaaaacaaacaaatccagctagccccttggatcctgccatccgtcttttctcccgggactgcctttgctttgtggagggtgagtcctgggacaggctttgggtgacaagttgtgggcatgttccatccaagcctggctctcccgactggcagagggaggtggctgacaatcaattcctctggatacattttcctgtgattgctcctgtgatcaaaggcagccaccgacaggtgcgggagcggttagttcaccacgtcatagtagtaattgcgcagccgcagttccactgntgcgaatccgggcctgttttccacatcgtatgtccagcacagattcatganatcg

SEQ ID NO: 5106 - DNA, 583 bp, Homo sapiens
ctgtttttaacccacgtttttataggacctacttctttgtagataaccagtattggaggtatgatgaaaggagacagatgatggaccctggttatcccaaactgattaccaagaacttccaaggaatcgggcctaaaattgatgcagtcttctactctaaaaacaaatactactatttcttccaaggatctaaccaatttgaatatgacttcctactccaacgtatcaccaaaacactgaaaagcaatagctggtttggttgttagaaatggtgtaattaatggtttttgttagttcacttcagcttaataagtatttattgcatatttgctatgtcctcagtgtaccactacttagagatatgtatcataaaaataaaatctgtaaaccataggtaatgattatataaaatacataatatttttcaattttgaaaactctaattgtccattcttgcttgactctactattaagtttgaaaatagttaccttcaaaggccaagagaattctatttgaagcatgctctgtaagttgcttcctaacatccttggactgagaaattatacttacttctggcataac

SEQ ID NO: 5107 - DNA, 123 bp, Homo sapiens
  unsure (8): n=A,T,C or G
  unsure (74): n=A,T,C or G
agctcttnttaagcctcttggatttccagattacaccaaagactgtttccaatttgactgagagcagctccaantccgtccagagcttcctgcagtcaatgatcaccgctgtgggcatccctg

SEQ ID NO: 5108 - DNA, 361 bp, Homo sapiens
ccagatggcgcagaaatcccagtccacgcagatttcacaggaactggaggaacttcgagctgaacagcagagattgaaatctcaggacttggagctgtcctggaacctgaacgggcttcaagcagatctgagcagcttcaagtcccaggaattgaacgagaggaacgaagcttcagatttgctggaaagactccgggaggaggtgacaaagctaaggatggagttgcaggtgtccagcggctttgtgtgcaacacgtgccctgaaaagtggatcaatttccaacggaagtgctactacttcggcaagggcaccaagcagtgggtccacgcccggtatgcctgtgacgacatggaagggcag

SEQ ID NO: 5109 - DNA, 343 bp, Homo sapiens
ccacttgtgtgggtcctcacaagcaaagagagcactaaacttgacattgggggtccaccactccaactttgctttctgaaggttttggtgtacattgagccccagaaggaaaggagagtatctgtgagtgggggcctcccttgaccccagtacgaagtctatgccctgaatccccagagtagcccttcctggtgcccaactggcctggggacaaacagcgtccactacatctaggactgccggctaagtggacacacttcttgaccccctaccaggaactttggtaaaagctagctttggggaaggggttgggtgtaaatatgagagggtggagggagaccag

SEQ ID NO: 5110 - DNA, 457 bp, Homo sapiens; identical to SEQ ID NO: 232

SEQ ID NO: 5111 - DNA, 547 bp, Homo sapiens
  unsure (483): n=A,T,C or G
ctgcagtttctcaatctctaggaatcctgcagtaaaacaagccccttggtgagctggaagatttgtgcccagtgacaaagagatagtttgtaaaatgctgtgtaattgtaagttaccacaaatgaaaatacatgacagcacaatgtggcccgtagaaaattcccctctccgcttctgcttttcctgaaggagagttctgagcatccaaaggctcctcacttacctcactgactccccttatttcctgggtttactttccccattaacactgacatctaaatctctagaggagtatgtcatcccttcctccctggttccatattctaagtttcagaatcatgatctttttctgcactaacgtcccacagtcctcagagtttctcacagttcattgatgtgtactgagtatataatttatacttagcccccacggcggggtggttctcagaagtggaagacaggtgggtctttggagaacacggngggaatcttggtgtactgactaacttgatgggcgcttggttcctcttccagccagacctcggcc

SEQ ID NO: 5112 - DNA, 256 bp, Homo sapiens; identical to SEQ ID NO: 233
  unsure (157): n=A,T,C or G
  unsure (187): n=A,T,C or G

SEQ ID NO: 5113 - DNA, 388 bp, Homo sapiens; identical to SEQ ID NO: 574
  unsure (321): n=A,T,C or G
  unsure (346): n=A,T,C or G

SEQ ID NO: 5114 - DNA, 259 bp, Homo sapiens
  unsure (18): n=A,T,C or G
  unsure (93): n=A,T,C or G
  unsure (223): n=A,T,C or G
cctatccaaggaacaggntagtaggaaatcacattctgaagcactcattctgcctttcttcagtgtaagaaagttgctcaaaagaagaagcgngacaacacaagctgctacaatggctacattctctacattcaatgtaagagagaaggagctatggtcactccatgcaaaggccagatagagatgtggtgcgtatgtgcagagtacctcaagaaatgaaagncagcatgtctcttggaagctatgaacactaatgttt

SEQ ID NO: 5115 - DNA, 143 bp, Homo sapiens
  unsure (135): n=A,T,C or G
  unsure (138): n=A,T,C or G
gaggtaaagctgttttacaatatgataacaagaacacccagcagatacaggttgtacagttaatcattttgactgtgtcagtaatataatcagaatactgtaacggtaagagaaaaatacttttttttttttttnganactgg

SEQ ID NO: 5116 - DNA, 364 bp, Homo sapiens
  unsure (182): n=A,T,C or G
  unsure (193): n=A,T,C or G
  unsure (209): n=A,T,C or G
  unsure (260): n=A,T,C or G
ccatgaacgcctttggagacatgaccagtgaagaattcaggcaggtgatgaatggctttcaaaaccgtaagcccaggaaggggaaagtgttccaggaacctccgttttatgaggcccccagatctgtggattggagagagaaaggctacgtgactcctgtgaagaatcagggtcagtgtggntcttgttgggnttttagtgctactggngctcttgaaggacagatgttccggaaaactgggaggcttatctcactgagngagcagaatctggtagactgctctgggcctcaaggcaatgaaggctgcaatggtggcctaatggattatgctttccagtatgttcaggataatggaggacctgc

SEQ ID NO: 5117 - DNA, 275 bp, Homo sapiens
  unsure (80): n=A,T,C or G
aaaaagcacaaaacttttggaatgttaatggataactactattagtctcaaaattctaggcatttctataaaacattggncaatgtgactagtaagttaacgggaccaaggtttcaaagatcaatactgaaccttgataaataataagaggaaatgtaactccacaaaatgtttctgattaagtttgtgcccatgcaaaattaacataaatttcttaactcaagaatgaggaatattaaagcaatgtattttttcaacataaagcatgcattttc

SEQ ID NO: 5118 - DNA, 247 bp, Homo sapiens
  unsure (14): n=A,T,C or G
  unsure (21): n=A,T,C or G
  unsure (63): n=A,T,C or G
  unsure (87): n=A,T,C or G
  unsure (100): n=A,T,C or G
  unsure (173): n=A,T,C or G
  unsure (177): n=A,T,C or G
  unsure (183): n=A,T,C or G
  unsure (203): n=A,T,C or G
  unsure (236): n=A,T,C or G
ctgtaattatttancctcaantgactttctccattgcttcacgctatgccactattttgcttntttaatttttttaaccttgcttantattctatagttngcccaaccagttttacgtccaaggaaaattagccaatgcataaaatatacaaactatgaaaggcaaggatcangaanccaganactttgccaccaaatctcanattattagaaactaggtgtcagggtttatcaanaaggccaggaa

SEQ ID NO: 5119 - DNA, 205 bp, Homo sapiens
ccatctccttcaccgcactgatcctgaccgagctgctgatggtggcgctgaccgtccgcacgtggcactggctgatggtggtggccgagttcctcagcttaggctgctacgtgtcctcactcgcttttctcaatgaatattttgatgttgcctttatcaccaccgtgaccttcctgtggaaagtgtcggcgatcaccgtggtcag

SEQ ID NO: 5120 - DNA, 320 bp, Homo sapiens
ccatcctccgccaagctcgagagcccaggcaagctgtgattgtcacaaggaagctgactccagaggtcatgcccgacctcaactcctccactgactctgcagcctcagcctctgcagccagtgatgtttctgtagaatctacagcagaggccacagtctgcacggtgacactggagaagatgtcggcagggctgggcttcagcctggaaggagggaagggctccctacacggagacaagcctctcaccattaacaggattttcaaaggagcagcctcagaacaaagtgagacagtccagcctggagatgaaatcttgcag

SEQ ID NO: 5121 - DNA, 161 bp, Homo sapiens
  unsure (9): n=A,T,C or G
  unsure (20): n=A,T,C or G
  unsure (29): n=A,T,C or G
  unsure (39): n=A,T,C or G
  unsure (88): n=A,T,C or G
  unsure (130): n=A,T,C or G
  unsure (131): n=A,T,C or G
  unsure (132): n=A,T,C or G
  unsure (147): n=A,T,C or G
tgtcagagnacggctcctgngacgctttngcttattttntgtacggctttttcgagttggcttaggcagaattctcctctgagcgatnaagacgacatgcttcccactgaactttttctccaattcgcgnnnctagccggacttggnttttctggaaagat

SEQ ID NO: 5122 - DNA, 258 bp, Homo sapiens; identical to SEQ ID NO: 5075

SEQ ID NO: 5123 - DNA, 318 bp, Homo sapiens
  unsure (9): n=A,T,C or G
tggggcgtntttgtgtttgagatattagctcaggtcaattccaaagagtaccagattctttcaaaagtcagatgagtaagggatagaaaatttgttcatcttaaggaacagccaggcgctagccagttaagtgaggcatctcaattgcaagattttctctgcatcggtcaggttagtgatattaacagcgaaaagagatttttgttaaggggaaagttattaagttgacactgtggatcaccttcggccaagggacacgactggagattaaacgtaagtaatttttcactattgtcttctgaaatttgggtctgatgg

SEQ ID NO: 5124 - DNA, 327 bp, Homo sapiens
ctgcagtgtccctttttatatcatgctagtgttgagacatacttgactaacttgggaacagttcgatatattgacaaccgtcaacttaagaaaatcaacagcttttggccccagcgtccaagtgaacttttcatggagtgcagaatctcaaatggacaaaatactttgtctttttaaatactgaaaatttaattattagtactatgactgaaagattcttcatggctaaaaagctctgcatcaaactcaattcaggaggccttccctccccaccaccatcaacctcttcaaaacctactccctccctctaagtatctctcaacacag

SEQ ID NO: 5125 - DNA, 421 bp, Homo sapiens
  unsure (16): n=A,T,C or G
  unsure (27): n=A,T,C or G
  unsure (41): n=A,T,C or G
  unsure (52): n=A,T,C or G
  unsure (62): n=A,T,C or G
  unsure (86): n=A,T,C or G
  unsure (118): n=A,T,C or G
  unsure (137): n=A,T,C or G
  unsure (172): n=A,T,C or G
  unsure (187): n=A,T,C or G
  unsure (232): n=A,T,C or G
  unsure (248): n=A,T,C or G
  unsure (269): n=A,T,C or G
  unsure (284): n=A,T,C or G
  unsure (306): n=A,T,C or G
  unsure (375): n=A,T,C or G
  unsure (385): n=A,T,C or G
  unsure (386): n=A,T,C or G
cttgctttgttatctnctacatatatnccaaagggataagntaggaacaccngaaactcagnagtaactcactttaaccttgcttntggggctccaattcaagtgatgctcaatttcnaggtacaaggaaaaccatnagaatataaagtcataatgccatttccactcagangaaaagatttatctntctttagatactcaaaattattcttggcattttagcacttttggnacacatttcctgatgnaggaaatagtaaaatttcagngcctatggcattggntttcaccacctatgcaattttntacacatctgaaaattaccaggttatctaactccttaaatgttcctctcttcaacaacaaaaaacacanacaaaaatgnngggagaaacaggaagcatccaggtccaaatgacag

SEQ ID NO: 5126 - DNA, 192 bp, Homo sapiens
  unsure (6): n=A,T,C or G
aagtgngctcctctggcctcagttctcctcttttggaacaacataaaacaaatttaattttctacgcctctggggatatctgctcagccaatggaaaatctgggttcaaccagcccctgccatttcttaagactttctgctgcactcacaggatcctgagctgcacttacctgtgagagtcttcaaactttt

SEQ ID NO: 5127 - DNA, 196 bp, Homo sapiens; identical to SEQ ID NO: 653

SEQ ID NO: 5128 - DNA, 323 bp, Homo sapiens
aaatttggggcgtttttgtgtttgagatattagctcaggtcaattccaaagagtaccagattctttcaaaagtcagatgagtaagggatagaaaatttgttcatcttaaggaacagccaggcgctagccagttaagtgaggcatctcaattgcaagattttctctgcatcggtcaggttagtgatattaacagcgaaaagagatttttgttaaggggaaagttattaagttgacactgtggatcaccttcggccaagggacacgactggagattaaacgtaagtaatttttcactattgtcttctgaaatttgggtctgatgg

SEQ ID NO: 5129 - DNA, 329 bp, Homo sapiens
cccggccaagagaagagattttcctaactgggcatatgcagcacatgtgtgccgatgggaatgatccactggaggaggagtagcgggaaacgacaggcactgtagagggggatacacaggggaggggcggagagaatcatccactctggaccccagcatgactgctgaggtcaaggatatatagagggagagaggaccacaaacttgaagatggatatcggctgcagactttcctgaatcaggtctcacctaagaaaataaacacatgctatgtcagagaagcctcagggcttccacacctgctcgaaaagggagttgagcttcagcag

SEQ ID NO: 5130 - DNA, 571 bp, Homo sapiens; identical to SEQ ID NO: 234
  unsure (483): n=A,T,C or G

SEQ ID NO: 5131 - DNA, 489 bp, Homo sapiens
ccgaagcgggagcggccaaaatgaagtttaatccctttgtgacttccgaccgaagcaagaatcgcaaaaggcatttcaatgcaccttcccacattcgaaggaagattatgtcttcccctctttccaaagagctgagacagaagtacaacgtgcgatccatgcccatccgaaaggatgatgaagttcaggttgtacgtggacactataaaggtcagcaaattggcaaagtagtccaggtttacaggaagaaatatgttatctacattgagcgggtgcagcgggaaaaggctaatggcacaactgtccacgtaggcattcaccccagcaaggtggttatcactaggctaaaactggacaaagaccgcaaaaagatcctcgaacggaaagccaaatctcgccaagtagggaaggaaaagggcaaatacaaggaagaaaccattgagaagatgcaggaataaagtaatcttatatacaagctttgattaaaac

SEQ ID NO: 5132 - DNA, 404 bp, Homo sapiens
  unsure (261): n=A,T,C or G
  unsure (265): n=A,T,C or G
  unsure (386): n=A,T,C or G
aaaagtgtcgtaaaattctcaactatatacaaaacattgtccacttaagctgcctgcctttcaagagtaactctcctcccatgcaaagggtactgttgcacataaaagatatcctcatctgcatgttttccagtacctctttctccaccctaaacagttgaaatttaattggtctcaaatttcaagtgaaactgatacatggcaaggctgacaccactgtatcatgtaggttttctaaataaagcattttatgtataattntaancattaaagtaagtagatagggatgccatttctaatatatcagcatggctgatggcagtgaaaccatccaagatagaaggcccacttttaacagagtttaaccagtatttatgggccttatnaaataaaaagataatttt

SEQ ID NO: 5133 - DNA, 413 bp, Homo sapiens
  unsure (314): n=A,T,C or G
  unsure (381): n=A,T,C or G
aaaattaaagtcatcacgaaatggaagttttcccaggatggaaaataagaggaagtgctgctgtaattgggagcacaaggggcctcccaaaaaggagccccacctcagcatcactgccttaatcgtggcctccctggggtgggtggggttctctcctccctccctccctcctcctggggtgggagggcgctcctgttcccatctctgtgttccctggaggcaggtatcacaaagcatttgtgaattgctttaggtgcagggacaccacccactcaggactcttccccatcatcccttccattgccacaccctanatccagcctcaggaactaacaagttttgagaaaagcaggtggtagagcagcagcttcgtgctctcancggtggctggctggcatttttctctagcgttg

SEQ ID NO: 5134 - DNA, 252 bp, Homo sapiens; identical to SEQ ID NO: 656
  unsure (40): n=A,T,C or G
  unsure (51): n=A,T,C or G
  unsure (91): n=A,T,C or G
  unsure (121): n=A,T,C or G

SEQ ID NO: 5135 - DNA, 379 bp, Homo sapiens; identical to SEQ ID NO: 657
  unsure (46): n=A,T,C or G
  unsure (55): n=A,T,C or G
  unsure (69): n=A,T,C or G
  unsure (78): n=A,T,C or G
  unsure (217): n=A,T,C or G
  unsure (338): n=A,T,C or G

SEQ ID NO: 5136 - DNA, 374 bp, Homo sapiens
  unsure (182): n=A,T,C or G
  unsure (321): n=A,T,C or G
  unsure (358): n=A,T,C or G
ccaggctgatcttgaactcctgacctcaagtgatctgcccacctcggcctcccaaagtgctgggattacaggcatgagccaccgcgcccggccagcattgtatcttaaaggtagcctttcagttgtttggatgacagttgtctccactggacatctgcttcatgccaggccctctcctgggngttggtgtgtccactcttccctccaaccaccatattcccttgaggccaggaatggacctaagggtgcctcaggcatgggaagacccgataccggcctctctggagctcgctggcttctggagttctgagttaaggaggnagttgaagagacccatgtatgacccccagatgccagnaaaactaatcatgtgc

SEQ ID NO: 5137 - DNA, 271 bp, Homo sapiens
  unsure (129): n=A,T,C or G
  unsure (226): n=A,T,C or G
  unsure (232): n=A,T,C or G
  unsure (258): n=A,T,C or G
aaacgcttcatgacagggtaattcatgtccaacatatcaaaaacatatttatagataactttagaaagaaaatacatactttttttgataatcacaagtagcaatgagattttctatattattttcagnctcactttagaaatgttttaattgtctaaatttaatcaattcatcgattaaaggaaagacaataaaatagtaaaattacatgtgtttatatataagngtgtgngtttcaaataacaaaacgcaggttgnaaactaaaatcac

SEQ ID NO: 5138 - DNA, 266 bp, Homo sapiens
  unsure (23): n=A,T,C or G
  unsure (168): n=A,T,C or G
  unsure (237): n=A,T,C or G
ctccaacacgaccatcgtagggngaagcccacgttttcttccatggcctcaaaggccctagaacttgcctacctttctggccttacctcctagctacttatccatctcttgaactttatactcttgtataaatttctaactttcagaaaatgccatactctgttttgncaccacacatgtatatttccccctggtacacttggaagactcttatccatctgtgaaaccctatgttgncatcacttggtccatgaaatattacctgg

SEQ ID NO: 5139 - DNA, 557 bp, Homo sapiens
ctgaggaaagacatcggaccgtcagagccggggactaccctcagcccagggagacacctgtgtttccagggctgggactgacctcacaggatcactgctggctctgctaacaaccccaaggacaccaacgtttcccattctgagtacttctccgcaaaccctttgtttcattaaggactgttttacatgaagggtgcaaaagtaggataaaaatgagaaccctagggtgaaacacgtgacagaagaataaagactattgaatagtcctcttctctacccatggacttggcatttttatattcgattttaaggaaatataacttagtagtaaagagatgagcattcaagtcaggcagacctgaatttgggtcaaggctgcgccactcaaaagctatatgacctctatatgagcagcttattcaacctcttttaacctccattttgtcatctgtagaatgatgataaatgcctagctcagaaggattcctaatgaataaatgagtgacagtgcatgtaaacagactagcttaattaatattaatatgattaggatgggc

SEQ ID NO: 5140 - DNA, 525 bp, Homo sapiens
gcaatttgagagcaagatcataaagtcctgcccagaatgccggatcacatctaactttgtcattccaagtgagtactgggtggaggagaaagaagagaagcagaaactcattctgaaatacaaggaggcaatgagcaacaaggcgtgcaggtattttgatgaaggacgtgggagctgcccatttggagggaactgtttttacaagcatgcgtaccctgatggccgtagagaggagccacagagacagaaagtgggaacatcaagcagataccgggcccaacgaaggaaccacttctgggaactcattgaggaaagagagaacagcaacccctttgacaacgatgaagaagaggttgtcacctttgagctgggcgagatgttgcttatgcttttggctgcaggtggggacgacgaactaacagactctgaagatgagtgggacttgtttcatgatgagctggaagatttttatgacttggatctatagcaaccttgcgtggcgtgtgaactggtctgctgacctca

SEQ ID NO: 5141 - DNA, 399 bp, Homo sapiens
  unsure (7): n=A,T,C or G
  unsure (13): n=A,T,C or G
  unsure (41): n=A,T,C or G
  unsure (44): n=A,T,C or G
  unsure (57): n=A,T,C or G
cagtggncttggngtgctggcctcggacacgaaggccccanaantgacgcagccctntatgggcccgaatcttcttcagtcgctccaggtcttcacggagcttgttgtccagaccattggctaggacctggctgtattttccatcctttacatccttctgtctgttcaagaaccagtctgggatcttgtactggcgtggattctgcataatggtgatcacacgttccacctcatcctcagtgagttctcccgccctcttggtgaggtcaatgtctgctttcctcaacaccacatgagcatatcttcggcccacacccttaatggcagtgatggcaaaggctattttccgccgcccatcgatgttggtgttgagtactcgcaaaatatgctggaactttt

SEQ ID NO: 5142 - DNA, 459 bp, Homo sapiens
  unsure (456): n=A,T,C or G
aaaaatggagagtctgaattttattagagctcacacaccatatattaacatatacaactgtgaaccagctaatccctctgagaaaaactccccatctacccaatactgttacagcatacaatctctgttcttgggcattttgtcagtgatgctgatctttgccctcttccaggaacttgtaatagctggcatcgttgagaatgaatggaaaagaacgtgctccagacccaaatctaacatagttctcctgtcagcagaagaaaaaaaagaacagactattgaaataaaagaagaagtggttgggctaactgaaacatcttcccaaccaaagaatgaagaagacattgaaattattccaatccaagaagaggaagaagaagaaacagagacgaactttccagaacctccccaagatcaggaatcctcaccaatagaaaatgacagctctccttaagngat

SEQ ID NO: 5143 - DNA, 248 bp, Homo sapiens
ccatggtcaagagaaaggatttctgaaggcagccctggaagtggagttaggagcttctaacccgtcatggtttcaatacacattcttcttttgccagcgcttctgaagagctgctctcacctctctgcatcccaatagatatccccctatgtgcatgcacacctgcacactcacggctgaaatctccctaacccagggggaccttagcatgcctaagtgactaaaccaataaaaatgttctggtctgg

SEQ ID NO: 5144 - DNA, 471 bp, Homo sapiens; identical to SEQ ID NO: 382

SEQ ID NO: 5145 - DNA, 452 bp, Homo sapiens
tgctgcccgagttatcgggaccctgttgggaactgtcgacaaacactcagtggaggtcaccaattgcttttcagtgccgcacaatgagtcagaagatgaagtggctgttgacatggaatttgctaagaatatgtatgaactgcataaaaaagtttctccaaatgagctcatcctgggctggtacgctacgggccatgacatcacagagcactctgtgctgatccatgagtactacagccgagaggcccccaaccccatccacctcactgtggacacaagtctccagaacggccgcatgagcatcaaagcctacgtcagcactttaatgggagtccctgggaggaccatgggagtgatgttcacgcctctgacagtgaaatacgcgtactacgacactgaacgcatcggagttgacctgatcatgaagacctgctttagccccaacagagtga

SEQ ID NO: 5146 - DNA, 425 bp, Homo sapiens
  unsure (338): n=A,T,C or G
  unsure (355): n=A,T,C or G
ctgcacactggcacacttgaccttcatgcagtcagaagctttggctgattccccatccaaaatattagagatgaaatgaaagcaaagtaggcatctgacaaaagttgctttttcccttctgcattttaggacctcaagtaatgtttatccagaaactgctatcataccagagattcactgtgtatttaacaacataggcatccaatctggcaaatttgaaaaactcttaacatacaccccaaatccctgcccaaatttaagaactagggtggacacagtgcttttttccatgtcgcatcttctgtgatggggctacgatatgtgggagcagagaatgnggagggtggagcgcatnccagatgaggatctatcagcaatgggagggggcctccactttagcatctccaccctgctcctctcagagg

SEQ ID NO: 5147 - DNA, 348 bp, Homo sapiens
  unsure (240): n=A,T,C or G
  unsure (275): n=A,T,C or G
  unsure (297): n=A,T,C or G
  unsure (335): n=A,T,C or G
aaagtttagacattaacaagtgatagattagcctcaaaaaaagacaatttggtaaggtttaggtcttttaatttggtgcttgttcacaacttgactggtgcttctttccttgctgtcttcacatcaagccatggggccaattctattttcagtaaatgtttgacagctttttacttagtaacagtctcagcacttttattaagcatgcaagactaacaaaaactttggcaatgcataagngtaacacagtgacaagagagcttttacaattaagncttctaatactgccttcacagngtggaaattgtgctacatccaccaaaagagggccccgnctactcaaatatt

SEQ ID NO: 5148 - DNA, 405 bp, Homo sapiens
  unsure (51): n=A,T,C or G
  unsure (257): n=A,T,C or G
  unsure (371): n=A,T,C or G
  unsure (387): n=A,T,C or G
ctgcccttccatgtcgtcacaggcataccgggcgtggacccactgcttggngcccttgccgaagtagtagcacttccgttggaaattgatccacttttcagggcacgtgttgcacacaaagccgctggacacctgcaactccatccttagctttgtcacctcctcccggagtctttccagcaaatctgaagcttcgttcctctcgttcaattcctgggacttgaagctgctcagatctgcttgaagcccgttcaggntccaggacagctccaagtcctgagatttcaatctctgctgttcagctcgaagttcctccagttcctgtgaaatctgcgtggactgggatttctgcgccatctggtcaccgtggnggctttccaagttctnggaaacttgagagacgtt

SEQ ID NO: 5149 - DNA, 130 bp, Homo sapiens
  unsure (103): n=A,T,C or G
cggatcagaaggccacaagcttccctctcctcccctatcttcccaggtctgtattccgggagcctgtgtaactcgggcctcaactccaggctcccggctgggnattctcattctctgcagtacttgaaaa

SEQ ID NO: 5150 - DNA, 345 bp, Homo sapiens
gagagagcgagctgagtggttgtgtggtcgcgtctcggaaaccggtagcgcttgcagcatggctgaccaactgactgaagagcagattgcagaattcaaagaagctttttcactatttgacaaagatggtgatggaactataacaacaaaggaattgggaactgtaatgagatctcttgggcagaatcccgcagaagcagagttacaggacatgattaatgaagtagatgctgatggtaatggcacaattgacttccctgaatttctgacaatgatggcaagaaaaatgaaagacacagacagtgaagaagaaattagagaagcattccgtgtctttcatttttc

SEQ ID NO: 5151 - DNA, 400 bp, Homo sapiens
ctgtcccttgaatatcatcattgaaagtacaatatttttctcggtactttctaaagaacctgaatgcattatgatttccaaagtcttcgaactgaatgagtgtgttccggccatatctgtcagtaatagctttcataaactcatcaatcaggtcatcatactgttgtgtgcgatctcgtttctggtacaagcccatgtaaaatgggtcttttaagagtgcgatattatcagttcccacatcaatacacactggcaggcatctatcaggccgtattcctgcacaagctgtatacaaacaaagttttcctactggaattcccattccatagacacccagatctccaagacccagaattctctctccatcagtcactacaacagccttaacatgattttctgg

SEQ ID NO: 5152 - DNA, 316 bp, Homo sapiens
  unsure (17): n=A,T,C or G
  unsure (46): n=A,T,C or G
  unsure (53): n=A,T,C or G
  unsure (107): n=A,T,C or G
  unsure (135): n=A,T,C or G
  unsure (137): n=A,T,C or G
  unsure (179): n=A,T,C or G
  unsure (186): n=A,T,C or G
  unsure (193): n=A,T,C or G
  unsure (221): n=A,T,C or G
  unsure (231): n=A,T,C or G
  unsure (232): n=A,T,C or G
  unsure (241): n=A,T,C or G
  unsure (295): n=A,T,C or G
  unsure (296): n=A,T,C or G
taatgaaaaagacttanaacaatgtattatttacatgtaaataacnaaaaganagcagaatccccatatcctcttcaaaggaagggagacggcaggccatttatganaagaaagtccatataaaccccattaagnanaatctggatctaaatacttccaaacaggagtacacagcaggngaacagnctccctnatcccactgatctgctgcttcagataanatcagcaacnntcatcggcntctcatcaatctgagtggaatagtactgctcgatatctctgaggatgcggatgnngtcattctttacaaagttaa

SEQ ID NO: 5153 - DNA, 408 bp, Homo sapiens
  unsure (32): n=A,T,C or G
  unsure (44): n=A,T,C or G
  unsure (82): n=A,T,C or G
  unsure (117): n=A,T,C or G
  unsure (131): n=A,T,C or G
  unsure (148): n=A,T,C or G
  unsure (164): n=A,T,C or G
  unsure (191): n=A,T,C or G
  unsure (199): n=A,T,C or G
  unsure (215): n=A,T,C or G
  unsure (223): n=A,T,C or G
  unsure (236): n=A,T,C or G
  unsure (277): n=A,T,C or G
  unsure (307): n=A,T,C or G
  unsure (313): n=A,T,C or G
  unsure (315): n=A,T,C or G
  unsure (335): n=A,T,C or G
  unsure (352): n=A,T,C or G
  unsure (354): n=A,T,C or G
  unsure (360): n=A,T,C or G
  unsure (377): n=A,T,C or G
  unsure (393): n=A,T,C or G
aaaaaaaaaaaaaaaaaaaaaaaaaaaaaaangaaaaacttctntttaggctgggtgcggttcctcatgcctataatcccancatttagggaggctgaggtgagtggattgcagganctcaggagttcganaccagcctgggcaaggnggcaaaaccccgtctntactaaaaaaaattagctgggcttggnggcaggcncctgtaatcccaggtnctcggganactgaggtagganaattgcttgaacctggaaggtggaggttgcagtgagttganatcacaccaatgcactccacccagggtganagtgananactgtctcaaaaaaaaaaancaaaagaaaaacttctntntagctntgtgacgggcagttcanataataccttcaccanatttacctgttttca

SEQ ID NO: 5154 - DNA, 327 bp, Homo sapiens
  unsure (5): n=A,T,C or G
  unsure (50): n=A,T,C or G
  unsure (97): n=A,T,C or G
  unsure (235): n=A,T,C or G
  unsure (275): n=A,T,C or G
caggncttattcatcagggaggaaagtttctttgaaaatagttattcagntataagtaatacaggattattttgattatatacttgttgtttaatgnttaaaatttcttagaaagcaatggaatgagaatttaagcctcaaatttgaacatgtggcttgaattaagaagaaaattatggcatatattaaaagcaggcttctatgaaagactcaaaaagctgcctgggaggcaganggaacttgagcctgtcaagaggcaaaggaatccatgtagnagatatcctctgcttaaaaactcactacggaggagaattaagtcctactttt

SEQ ID NO: 5155 - DNA, 426 bp, Homo sapiens
ctggaagagagggctgcccggaacgtctctcaagtttccaagaacttggaaagccaccacggtgaccagatggcgcagaaatcccagtccacgcagatttcacaggaactggaggaacttcgagctgaacagcagagattgaaatctcaggacttggagctgtcctggaacctgaacgggcttcaagcagatctgagcagcttcaagtcccaggaattgaacgagaggaacgaagcttcagatttgctggaaagactccgggaggaggtgacaaagctaaggatggagttacaggtgtccagcggctttgtgtgcaacacgtgccctgaaaagtggatcaatttccaacggaagtgctactacttcggcaagggcaccaagcagtgggtccacgcccggtatgcctgtgacgacatggaagggcag

SEQ ID NO: 5156 - DNA, 481 bp, Homo sapiens
ccacacagactcaccaagccacagacttgtcttccacaagcacgttcttaccttagccacgaagtgaccaagccacacgtactaaaggttgaactcaaagatatgtacagggtattaaacaaataccaaggggaacagttaacttcaatacaaggtcaaaatcagcaacaagttctacaatccagtgctgatatcagatacaagcttcaaggacaatttcttttcgaaggcttattccagtttcgtgaggctagcatgaggtgtgtgcatttgccaggggcaaatttctattctcaattaacccatgcagcaaatgctacgcatctgctgagtccgtttagaagcatttgcggtggacgatggaggggcccgactcgtcgtactcctgcttgctaatccacatctgctggaaggtggacagtgaggccaggatggagccaccgatccacaccgagtacttgcgctctgggggtgcgatgat

SEQ ID NO: 5157 - DNA, 463 bp, Homo sapiens
  unsure (380): n=A,T,C or G
  unsure (418): n=A,T,C or G
  unsure (437): n=A,T,C or G
ctgagattggctcagtgacccgggggcgtgaggctgaggcatgcggtactgactgaagattggctctggctcgtctgagggcacggatgtccttcccaatgcctcgtgtgagttggtaagtattgccagctaaggaaagaaagttggatatgttctcacccaaaaactccttcacctccttcaatttgtcaaggcttttgatgaccaggtcgtgggcttgggcttgtgtccaccacttctttccgtagtctatggtactgctggtaatcccggtcaaagctgctgtgattcccaactccatcccaggttccaagagtacaaggctgcctccctctgtgaagggtgccagacccatgccgacgagggtcaggatgccagangaaatgctgagagagccagacaccacattggcgatggnggtgcctttgtggaccttntgaaccccatctgcaagggcacggag

SEQ ID NO: 5158 - DNA, 326 bp, Homo sapiens
  unsure (100): n=A,T,C or G
cctgccttttacacaccagttgtgtgtttgttagtggctgctggatgccagtccacaccctcaaacacctctcagtcccaaacggggtgctcctacaggncccagggtcctgttagtggaagaaaggcagttccaggaagtcttcctctagccttcatgacaggaagtagttaatcctctgggaaatagacttgcagccctgggaagaaaagagttgttcctccttggggacatacaccatcatctgggctatttcatccagtgtctcttctttatacaggagctcctggctcaggaaggcatcccgtgcacacagcctcacgtga

SEQ ID NO: 5159 - DNA, 357 bp, Homo sapiens
  unsure (89): n=A,T,C or G
  unsure (224): n=A,T,C or G
  unsure (298): n=A,T,C or G
ttgtgttaatcccagttttagtgcagcttaggaggctgctagttaggaagatggcagtggctgtaggttgggttgccagaaaagatggnggcctagtcttattattcagatggagaacttagaaagcctgaagagtacccaaattggattgtattttaatggacaatggctgtattttttccatgttagaaggatcctaatgaaagcacctgttatttttaagnttctaagggtctagttgttcagaatccccaaggatatttccctaacctcactcagtcacattgtaggagccagngtagctatggaattatcttaggaactcaagcttctaaaactatccatgtagtcaaatct

SEQ ID NO: 5160 - DNA, 332 bp, Homo sapiens
  unsure (168): n=A,T,C or G
  unsure (193): n=A,T,C or G
  unsure (266): n=A,T,C or G
ctgtgtaaagtacagatcctaatataggtaactaactaatacctactaaatatgcattatttttagcttgttttagaagcagatacctatcgatttcagaagaatctgcgaatggcaaccaaaaggcaaaagaaaagtaaatgaacacagcagtgtttattaggtggnttttaatattgtttattagcacagnaacaaatgcagacttaagtagtccacaacatagaaccaatccactgagcaactcctattccacgccttacagntagttaacagcttaaggtatttcactacaggttttcacaagtcctgattcagaccttttttacctc

SEQ ID NO: 5161 - DNA, 452 bp, Homo sapiens
  unsure (396): n=A,T,C or G
gttttaaggatgataaaaaaaaataacaactagggacaatacagaacccattccatttatctttctacagggctgacattgtggcacattcttagagttaccacaccccatgagggaagctctaaatagccaacacccatctgttttttgtaaaaacagcatagcttatacatggacatgtctctgccttaacttttcctaactcccactctaggctattgtttgcatgtctacctacttttagccattatgcgagaaaagaaaaaaatgaccatagaaaatgccaccatgaggtgcccaaatttcaaataataattaacatttaggtatatttataatttccagatgacaaagtatttcatcaaataacttcatttgatgttccatgatcaaganagaatccctatctctattttacaagtaattcaaagaggccaaataacttgtaaaca

SEQ ID NO: 5162 - DNA, 292 bp, Homo sapiens
  unsure (225): n=A,T,C or G
ctgctggtgctgggcaggctggagactcacgggagaggcaggaggagaatcagcgtgttgagtccctcgctgtgttagtgtgaaaaattctcattactgttgcaaataaaagggatcacgatcactagccccggaaaccctcatctcccggaccatcaggatcgcactgaacagaatggtcccctaatggtccctgaggacagcgtcttgcagaacataaatgtnaacattgaatggcagacgactcccttccccttgaaatcttcacaaaagtgtgtacgagaaagtatgt

SEQ ID NO: 5163 - DNA, 464 bp, Homo sapiens
gagaaacataagctagactgaaacataggggcaacactttcactgtgcttttcaatccaaaataattttcctaagagcccactatgtaccacacactattgagcacttgggattaaaaaaaagttctccagaggctttccagtctagtaccatgtgtctcagtcttggtgctactggtattcggggcttcagaattatttgttggggattggtggggtggggagctttcctgtgcttcgtaggaggttcagcaacacctctggcttctaccaaatagataccagtaagcacatgcaccctcacagccagatgggacaatcagcaatgtcttcagccattgccaggggacagaatcatcctcgattgaaagcatctggtctaaggggaaagaccagtgtggaagtcagacaggaagtcactggcaggctagtatcctttggatgaacagtttacttactataagt

SEQ ID NO: 5164 - DNA, 505 bp, Homo sapiens
  unsure (486): n=A,T,C or G
cctcagggcctcttctggaaaatgaagaaattcaactagtagattcctgaggtctccccagcttaaaaaaaaaaaatctgccccgtgattctaacactcgcagtagtgatagtgtatctagttgttctgctggtgtccttccttggctaagtcttggccttcagttatcttcaaatgtaccagaacctgagccaacgcctccctgtgaaactgttgctgatctgtagtacagtaccaggaagaaacctcttttgttctctttagacatcttctacttgctcttggccttgagatcgtgtaacaaaatgaaggagggctctcttctttcttcctcatcctactcaaaaacttcccgagagcagtggtggttttgagggttttgacttctattacttttggcagcctggaaagttgtgtcttctgggaaagagacccggggaggccaggagtagctgagggtcctttctgtgcccttaaaccgcccanaggagccctattccactct

SEQ ID NO: 5165 - DNA, 489 bp, Homo sapiens; identical to SEQ ID NO: 235
  unsure (197): n=A,T,C or G
  unsure (273): n=A,T,C or G
  unsure (315): n=A,T,C or G
  unsure (316): n=A,T,C or G
  unsure (326): n=A,T,C or G
  unsure (386): n=A,T,C or G
  unsure (392): n=A,T,C or G
  unsure (425): n=A,T,C or G
  unsure (465): n=A,T,C or G
  unsure (478): n=A,T,C or G

SEQ ID NO: 5166 - DNA, 480 bp, Homo sapiens
caacatgccatccagactgaggaagacccggaaacttaggggccacgtgagccacggccacggccgcataggcaagcaccggaagcaccccggcggccgcggtaatgctggtggtctgcatcaccaccggatcaacttcgacaaataccacccaggctactttgggaaagttggtatgaagcattaccacttaaagaggaaccagagcttctgcccaactgtcaaccttgacaaattgtggactttggtcagtgaacagacacgggtgaatgctgctaaaaacaagacgggggctgctcccatcattgatgtggtgcgatcgggctactacaaagttctgggaaagggaaagctcccaaagcagcctgtcatcgtgaaggccaaattcttcagcagaagagctgaggagaagattaagagtgttgggggggcctgtgtcctggtggcttgaagccacatggagggagtttcattaaatgc

SEQ ID NO: 5167 - DNA, 395 bp, Homo sapiens
aaaaaaaaaaaaaaacaaaaaacagggtggagaggaggataggaaggggacagttgataaaaccccagggccacagcagaggcaaagggcatctggggagagggttcgaagctgtggcggactccactaatgtaaccctccaatgtcaagccatgggcgtgatcagtagctaagtgatgacaaggctgttgggggtggacggaaaagacttggggcaaagcagactgtttatagcctgagctggtagggcctggtgcagcagcctacccggaactggcactactctttcccaggttccctgactctctatcctggtctctgagagcgtgccctacttccgtttcccccactccaaacacacctgaggcatcttccagtgctaggccccatgctgg

SEQ ID NO: 5168 - DNA, 269 bp, Homo sapiens
  unsure (104): n=A,T,C or G
  unsure (221): n=A,T,C or G
ccaattatccatatgatgagacgcggagtggtagtgctcacgaatacagctcctccccagatgacgccattttccaaagcttggcccgggcatactcttctttnaacccggccatgtctgaccccaatcggccaccatgtcgcaagaatgatgatgacagcagctttgtagatggaaccaccaacggtggtgcttggtacagcgtacctggagggatgcangacttcaattaccttagcagcaactgttttgaaatcaccgtggagctt

SEQ ID NO: 5169 - DNA, 456 bp, Homo sapiens
ctggagtgaagggagctagtgtttaggtagcagtcaccattatgctcaaagcggtgatcctgattggaggccctcaaaagggaactcgcttcagacctttgtcttttgaggtgcccaaaccattgtttcctgtggcaggggtccctatgatccaacaccatattgaagcctgtgcccaggtccctggaatgcaggagattctgctcattggcttctaccaacctgatgagcccctcacccagttcctagaagccgcccagcaggagtttaaccttccagtcaggtacctgcaggaatttgcccccctaggcacagggggtggtctttaccattttcgagaccagatcctggctgggagccccgaggcattcttcgtgctcaatgctgatgtctgctccgacttccccttgagtactatgttggaagcccaccgacgccagcgtcaccctttcttac

SEQ ID NO: 5170 - DNA, 342 bp, Homo sapiens; identical to SEQ ID NO: 577
  unsure (36): n=A,T,C or G
  unsure (265): n=A,T,C or G

SEQ ID NO: 5171 - DNA, 363 bp, Homo sapiens
  unsure (21): n=A,T,C or G
  unsure (101): n=A,T,C or G
  unsure (132): n=A,T,C or G
  unsure (134): n=A,T,C or G
  unsure (178): n=A,T,C or G
  unsure (193): n=A,T,C or G
  unsure (210): n=A,T,C or G
  unsure (225): n=A,T,C or G
  unsure (229): n=A,T,C or G
  unsure (307): n=A,T,C or G
  unsure (318): n=A,T,C or G
  unsure (319): n=A,T,C or G
  unsure (333): n=A,T,C or G
acgcagcagcctatccgtcgncctatgccccagtgagcacagcttttccccagcagccttcagccctgccccagcagcagagagaaggccccgaaggctgnaacctcttcatctatcacctgcctcaggagntnggtgatgcggaactcatacagacattcctgccctttggagccgntgtctctgctaaagnctttgtggatcgagccnccaaccagagcaagngttntggggttgttaattttgacaatccaactagtgcccagactgctattcaggcgatgaatggctttcaaattggcatgangaggctcaagnnccagctaaagcggnccaaggatgccaaccggccttactgacctg

SEQ ID NO: 5172 - DNA, 272 bp, Homo sapiens
  unsure (127): n=A,T,C or G
  unsure (129): n=A,T,C or G
ctggaactggctcacagacaggacatctgcctcctcactcaactccactgctctctgggctaagaagatctcaagctccatgagctcatcaaggaactgattccgggtctcagtgtattcaagcagngncagggcatctgggcccctggcaacaccttctggagcctgggttcctgcttccagcactgtgatctgcaaagcaacagcatcgtctccccagtctatcccatcacctccaggatcctttgaatctgattccgggaagatgcccc

SEQ ID NO: 5173 - DNA, 275 bp, Homo sapiens
  unsure (50): n=A,T,C or G
  unsure (135): n=A,T,C or G
  unsure (179): n=A,T,C or G
caaagttgaaaattcatagtaagattgatatctataaaatagatataaanttttaagagaaagaatttagtattatcaaagggataaagaaaaaaatactatttaagatgtgaaaattacagtccaaaatactgntctttccaggctatgtataaaatacatagtgaaaattgtttagngatattacatttatttatccagaaaactgtgatttcaggagaacctaacatgctggcgaatattttcaactttttccctcactaattggtactttt

SEQ ID NO: 5174 - DNA, 560 bp, Homo sapiens; identical to SEQ ID NO: 237
  unsure (461): n=A,T,C or G

SEQ ID NO: 5175 - DNA, 306 bp, Homo sapiens; identical to SEQ ID NO: 236

SEQ ID NO: 5176 - DNA, 451 bp, Homo sapiens
  unsure (49): n=A,T,C or G
  unsure (57): n=A,T,C or G
  unsure (82): n=A,T,C or G
  unsure (96): n=A,T,C or G
  unsure (102): n=A,T,C or G
  unsure (114): n=A,T,C or G
  unsure (115): n=A,T,C or G
  unsure (169): n=A,T,C or G
  unsure (172): n=A,T,C or G
  unsure (196): n=A,T,C or G
  unsure (214): n=A,T,C or G
  unsure (237): n=A,T,C or G
  unsure (250): n=A,T,C or G
  unsure (252): n=A,T,C or G
  unsure (275): n=A,T,C or G
  unsure (286): n=A,T,C or G
  unsure (307): n=A,T,C or G
  unsure (320): n=A,T,C or G
  unsure (329): n=A,T,C or G
  unsure (339): n=A,T,C or G
  unsure (341): n=A,T,C or G
  unsure (366): n=A,T,C or G
  unsure (375): n=A,T,C or G
  unsure (379): n=A,T,C or G
  unsure (419): n=A,T,C or G
  unsure (430): n=A,T,C or G
  unsure (436): n=A,T,C or G
  unsure (445): n=A,T,C or G
ttttttttttttttttttttttttttttttttataaaagcttatttttntttattanaatacttttttcaattctgatttgncacaatttaaattntttttntaagaataagcnnaaatttacaaaatttaatttttatttatacatccatccgttcaatacacatttnaanaaagctgtattgcaccctttcagnggtagttacaggacaaanaaacaaaataatccaagagaganaccaacaaatgtntntttataacacagagtaataaacncaaataaatgnggagttatttaagcatgtaanatggtacatgctntaccaggtntgggggcttntntaagacacaagatcagattaaagtnttgaaaganaatntggggttagtcaagcaggtaaaagtgtgaaaagcactttntgagcggaatntccatntgccaagtntaaacc

SEQ ID NO: 5177 - DNA, 484 bp, Homo sapiens; identical to SEQ ID NO: 238
  unsure (407): n=A,T,C or G
  unsure (431): n=A,T,C or G
  unsure (471): n=A,T,C or G

SEQ ID NO: 5178 - DNA, 416 bp, Homo sapiens
  unsure (60): n=A,T,C or G
  unsure (141): n=A,T,C or G
  unsure (146): n=A,T,C or G
  unsure (162): n=A,T,C or G
  unsure (166): n=A,T,C or G
  unsure (170): n=A,T,C or G
  unsure (180): n=A,T,C or G
  unsure (215): n=A,T,C or G
  unsure (291): n=A,T,C or G
  unsure (321): n=A,T,C or G
  unsure (332): n=A,T,C or G
  unsure (342): n=A,T,C or G
  unsure (358): n=A,T,C or G
  unsure (369): n=A,T,C or G
  unsure (386): n=A,T,C or G
  unsure (389): n=A,T,C or G
  unsure (392): n=A,T,C or G
  unsure (397): n=A,T,C or G
ctttttttttttttttttttttttttttttttttatgacaaattttttatttcaaaaatntcaagttgtaaccagcatagcaccactgacatggatgccttgatagaactccttgatagaactttatgatctgttcaccanaaaanattctacatgatcacnccanactntaattaaggntaaccaatcaaaattcaggtacccaaaaccagttntaatccaggtagaaactacagatcataggaaccctgggactggttttccagggaaccctggaattattttttaagngctacagcatgtacaaggacactggcccanaagcttgcttntcacacgtanaaactgacagactaanaggtagatganagattccaggttccatntancantgganaggcagggctccagcatgt

SEQ ID NO: 5179 - DNA, 186 bp, Homo sapiens; identical to SEQ ID NO: 386

SEQ ID NO: 5180 - DNA, 439 bp, Homo sapiens; identical to SEQ ID NO: 240
  unsure (351): n=A,T,C or G
  unsure (429): n=A,T,C or G

SEQ ID NO: 5181 - DNA, 306 bp, Homo sapiens
  unsure (295): n=A,T,C or G
ccacccagactgaccagcgggagatggggccccacagggcctcctgcgtcaatgccatggaagggaagaaactggcccaggatgtcagagccaagggctacctggagtgctcagcccttagtaatcggggagtacagcaggtgtttgagtgcgccgtccgaactgccgtcaaccaggccaggagacgaaacagaaggaggctcttctccatcaatgagtgcaagatcttctaaaccccaagagacttcacacaacacttatgtatgcaccccaaagactaatggggagagggagnccgggaagcca

SEQ ID NO: 5182 - DNA, 320 bp, Homo sapiens; identical to SEQ ID NO: 388
  unsure (125): n=A,T,C or G
  unsure (139): n=A,T,C or G
  unsure (173): n=A,T,C or G
  unsure (240): n=A,T,C or G
  unsure (246): n=A,T,C or G
  unsure (266): n=A,T,C or G
  unsure (311): n=A,T,C or G

SEQ ID NO: 5183 - DNA, 173 bp, Homo sapiens
  unsure (14): n=A,T,C or G
  unsure (106): n=A,T,C or G
  unsure (158): n=A,T,C or G
ccttagcagtagcntgagctgcccccagggctgtgagctgctgaatcttctgactcatcatttccatgacggctgtttcatggcgtgcttctcctgaagagctggntggattttctccatctgcttggctagaaaatctatcttcctcttgaagaagnccttggcatcctcag

SEQ ID NO: 5184 - DNA, 228 bp, Homo sapiens
  unsure (26): n=A,T,C or G
  unsure (78): n=A,T,C or G
  unsure (81): n=A,T,C or G
  unsure (82): n=A,T,C or G
ctggaagatggccgcactctttctgnctacaacatccagaaggagtcgaccctgcacctggtcctgcgtctgagaggnggnntgcagatcttcgtgaagaccctgaccggcaagaccatcactctggaggtggagcccagtgacaccatcgaaaatgtgaaggccaagatccaagataaagaaggcatcccccccgaccagcagaggctcatctttgcaggcaagcag

SEQ ID NO: 5185 - DNA, 331 bp, Homo sapiens; identical to SEQ ID NO: 389

SEQ ID NO: 5186 - DNA, 439 bp, Homo sapiens
aaaagaggtgcctgcatgtcactattacccccctccccaaatgagaaaaggattttgtttccggaaactggatcagcttctcctcagttaaagaggaaacgggaagtgggcggctggccttctgaccaggcacccgtttgaaccaggatgctcagggcggcctaggcttggctttgtgaagtgtgtgctgctacgcgtcttgtttttggcagtttggtgtctctgagggaggggaggagagtggcaaccggccactggttaatggaagaggatgcgatgcggagatgcttgcttccttcctttggtccaccgccaccccgcctttggagagggcacccacgtaatagacctcatttgtctccaccagagctcactcttacaaaataagctttggattaataccgagttaggcgcagtatggcaggcagggggcgaaaag

SEQ ID NO: 5187 - DNA, 493 bp, Homo sapiens; identical to SEQ ID NO: 239

SEQ ID NO: 5188 - DNA, 435 bp, Homo sapiens
cctgtattatacgtgtcctcctgggggttggagatgatccctcaagtacacaaaggtcccctggcccttcatctgggaatcatatactccactctagctcccagaatctacagacctggctcctcggatctgaagcccagcacaaaataatctccccgtccaaggagcttgtggaacttgaattgggaactttggagtcttgtctcccatcccagcacattgaggatgtagttggtgaatggactcttccaggcatggagatcctccatcctaaaagtacctgcctccttcccagccatccctgacacattccagccagttggatctcacagcacagctatccacagggagactgggatgttcacgcagcactccattactcagtacctccatacccagccctatacgcagacccacaggtggggaaactgaggc

SEQ ID NO: 5189 - DNA, 377 bp, Homo sapiens
  unsure (370): n=A,T,C or G
ccgggttgacaaatggtggggtaacagaaaggaactggctaccgttcggactatttgtagtcatgtacagaacatgatcaagggtgttacactgggcttccgttacaagatgaggtctgtgtatgctcacttccccatcaacgttgttatccaggagaatgggtctcttgttgaaatccgaaatttcttgggtgaaaaatacatccgcagggttcggatgagaccaggtgttgcttgttcagtatctcaagcccagaaagatgaattaatccttgaaggaaatgacattgagcttgtttcaaattcagcggctttgattcagcaagccacaacagttaaaaacaaggatatcaggaaatttttggatggnatctatg

SEQ ID NO: 5190 - DNA, 345 bp, Homo sapiens; identical to SEQ ID NO: 498
  unsure (205): n=A,T,C or G
  unsure (245): n=A,T,C or G
  unsure (273): n=A,T,C or G
  unsure (276): n=A,T,C or G

SEQ ID NO: 5191 - DNA, 391 bp, Homo sapiens; identical to SEQ ID NO: 390
  unsure (27): n=A,T,C or G
  unsure (35): n=A,T,C or G
  unsure (44): n=A,T,C or G
  unsure (47): n=A,T,C or G
  unsure (56): n=A,T,C or G
  unsure (86): n=A,T,C or G
  unsure (95): n=A,T,C or G
  unsure (112): n=A,T,C or G
  unsure (133): n=A,T,C or G
  unsure (142): n=A,T,C or G
  unsure (243): n=A,T,C or G
  unsure (268): n=A,T,C or G
  unsure (276): n=A,T,C or G
  unsure (277): n=A,T,C or G
  unsure (321): n=A,T,C or G
  unsure (339): n=A,T,C or G
  unsure (376): n=A,T,C or G
  unsure (387): n=A,T,C or G

SEQ ID NO: 5192 - DNA, 178 bp, Homo sapiens
  unsure (6): n=A,T,C or G
  unsure (121): n=A,T,C or G
tctctntcacacacacagagcccctaccagaaccagacagctctcagagcaaccctggctccaacccctcttccctttccagaggacctgaacaaggtgttcccacccgaggtcgctgtgnttgagccaccagaagcagagatctcccacacccaaaaggccacactggtgtgcctgg

SEQ ID NO: 5193 - DNA, 490 bp, Homo sapiens
  unsure (24): n=A,T,C or G
  unsure (36): n=A,T,C or G
  unsure (44): n=A,T,C or G
  unsure (64): n=A,T,C or G
  unsure (77): n=A,T,C or G
aggagctgtgcccagtgcctgcanccttcataagcncacacgtncattccctactaaggcccanacctcctggtatntgccccgggctccctcatcccacctccatccggagttgcccaagatgcatgtccagcataggcaggattgctcggtggtgagaaggttaggtccggctcagactgaataagaagagataaaatttgccttaaaacttacctggcagtggctttgctgcacggtctgaaaccacctgttcccaccctcttgaccgaaatttccttgtgacacagagaagggcaaaggtctgagcccagagttgacggagggagtatttcagggttcacttcaggggctcccaaagcgacaagatcgttagggagagaggcccagggtggggactgggaatttaaggagagctgggaacggatcccttaggttcaggaagcttctgtgcaagctgcgaggatggcttgggccgaagggttgctct

SEQ ID NO: 5194 - DNA, 457 bp, Homo sapiens
  unsure (312): n=A,T,C or G
  unsure (370): n=A,T,C or G
ctgcttccagagtgctctgttactgactcagtgaacctggctgagcccatggaacagaatcctcctcagcaacaaagactagcactccacaatcccctgccaaaagccaagcctggcacacatcttcctcagggaccatcttcaaggacgcacccagaacctctagctggccgacacttcaatctggcccctctaggccgacgaagagttcagtcccaatgggcctccactaggggaggccataaggagcgccccacagtcgtgctgtttccctttaggaatctcggctcaccaacccaggtcatatctaancctgagagcaaggaagaacatgcgatatacacagcagacctagccatgggcacaagancagcctccactgggaagtctaagagtccatgccagaccctggggggaagggctctgaaggagaacccagttgacttgcctgccacag

SEQ ID NO: 5195 - DNA, 202 bp, Homo sapiens
  unsure (92): n=A,T,C or G
  unsure (156): n=A,T,C or G
  unsure (157): n=A,T,C or G
  unsure (172): n=A,T,C or G
tcctctatggcccctgccttcccaggagtacaccccaacagcaccctctccagatgggagggcccccaacagcaccctctccagatgagagnacaccccaacagcaccctctccagatgagagtacaccccaacagcaccctctccagatgagagnncaccccaacagcacnctctccagatgcagccccatctcctcagca

SEQ ID NO: 5196 - DNA, 565 bp, Homo sapiens
ctggcctgggtttctgacccattgagactgccgtgccacgatgctccgtcacctcctttgatcctcctgtatgctgggctggagagaacaggaagggctactgacccatttttatagaagcaaccctaacgatttgagcaatggagtctggcacaggctcagcaggtggaggaagagtaagctgtcaggaaagcagcaggggagagtagtagggtcctgacttgactcagggtctttggaaagttgggtgtggcctccaaggtgagaagataggtgtgggccaccaccaggccatgacaggcgggcagtattgcccaggcttctctctccagtctgtcctgcgtggcatctcctttgagggtcagagaagccagggagggaggcaagctggggtgggtctcattatagaaaagagaagactggggctaagaggggatgttcctgccagcatgccagcctctgatgccacctgcaaaactggtggcaccacctcaaactcagcaatggccttttcaaacctggctcagtacaaacaactcccaaaccatacactttaggaaaactt

SEQ ID NO: 5197 - DNA, 441 bp, Homo sapiens
ctgcaaatggttctgctgaaacatctgccttggacacagggttctcgctcaacctttcagagctgagagaatatacagagggtctcacggaagccaaggaagacgatgatggggaccacagttcccttcagtctggtcagtccgttatctccctgctgagctcagaagaattaaaaaaactcatcgaggaggtgaaggttctggatgaagcaacattaaagcaattagacggcatccatgtcaccatcttacacaaggaggaaggtgctggtcttgggttcagcttggcaggaggagcagatctagaaaacaaggtgattacggttcacagagtgtttccaaatgggctggcctcccaggaagggactattcagaagggcaatgaggttctttccatcaacggcaagtctctcaaggggaccacgcaccatgatgccttgg

SEQ ID NO: 5198 - DNA, 441 bp, Homo sapiens; identical to SEQ ID NO: 5197

SEQ ID NO: 5199 - DNA, 462 bp, Homo sapiens; identical to SEQ ID NO: 391
  unsure (11): n=A,T,C or G
  unsure (74): n=A,T,C or G
  unsure (78): n=A,T,C or G
  unsure (167): n=A,T,C or G
  unsure (182): n=A,T,C or G
  unsure (255): n=A,T,C or G
  unsure (269): n=A,T,C or G
  unsure (271): n=A,T,C or G
  unsure (299): n=A,T,C or G
  unsure (312): n=A,T,C or G
  unsure (326): n=A,T,C or G
  unsure (340): n=A,T,C or G
  unsure (350): n=A,T,C or G
  unsure (384): n=A,T,C or G
  unsure (396): n=A,T,C or G
  unsure (398): n=A,T,C or G
  unsure (433): n=A,T,C or G

SEQ ID NO: 5200 - DNA, 276 bp, Homo sapiens
ccaaggaatgcaggctgtactatctgcgaaatggagaacgtatttcagtgtcggcagcctccaagctgctgtccaacatgatgtgccagtaccggggcatgggcctctctatgggcagtatgatctgtggctgggataagaagggtcctggactctactacgtggatgaacatgggactcggctctcaggaaatatgttctccacgggtagtgggaacacttatacctacggggtcatggacagtggctatcggcctaatcttagccctgaagagg

SEQ ID NO: 5201 - DNA, 469 bp, Homo sapiens
ccatccactagcccagggggggacgcagaccccacactccatggagtctggaatgcatgggagctgcccccccagtggacaccattggaccccacccagcctggatctaccccaggagactctgggaacttttaggggtcactcaattctgcagtataaataactaatgtctctacaattttgaaataaagcaacagacttctcaataatcaatgaagtagctgagaaaactaagtcagaaagtgcattaaactgaatcacaatgtaaatattacacatcaagcgatgaaactggaaaactacaagccacgaatgaatgaattaggaaagaaaaaaagtaggaaatgaatgatcttggctttcctataagaaatttagggcagggcacggtggctcacgcctgtaattccagcactttgggaggccgaggcgggcagatcacgagttcaggagatcgagaccatcttgg

SEQ ID NO: 5202 - DNA, 362 bp, Homo sapiens
aaaaaacaaacaataggatagtacttgagctcaggtctggttctcagctacttcatttttattttgttttattttattattatttttgagagagaatctcgctctgttgcccagtggcacgatctcggctcactgcaagctccacctcccaggttcacgccattctcctgcctcagcctcccgactagctgtgactacaggcgcctgccaccacgcccggctaattttttttttttttgtatttttagaagagacatggtttcaccacgttagccaggatggtcttgatctcctgaccttgtgatccgcccacctcagcctcccaaagtgctgggactacaggcgtgagccaccgtgcctgg

SEQ ID NO: 5203 - DNA, 300 bp, Homo sapiens
aaaacgatcaaaatctgtcatcttggctttcctttctctggcttcaatcttcttggcccatcgtgtggctgcccattttgtattgatgtctgccttctgccaggcttgtcggacatacttctggtgggcactgtgcggaaacttgaggatgaaatcagtgagctgcatgcacttgaaaggcatggcctgtctcctcacttgagtgcaaggtccatcgaccaaagccctgttctgatcaataacatctacaatcgcgaccaattttccggcatgaggtccaaaggagacataggccacccg

SEQ ID NO: 5204 - DNA, 574 bp, Homo sapiens
  unsure (120): n=A,T,C or G
  unsure (318): n=A,T,C or G
ctggaagaccaagcccagaaattcagaggaaataatcttccaaacaaggaacaccaaggtgatcttcttccattccagccacaatactggtgatcataatggtgctagtcagttatccanattatcgagtgtttaccacatcatctattttcagaatgctccgaacagtttcagttgcaagagtcagagcactgactgataccaacagaggctggacaaccagttcctccaaaatgttggaaataccaccctttcggacattaatgcctgcagttttttctccctgggcatgccggtttcttagttctgttactgtanaaatgggattcaggccggcattttcagctagtgtagatggaatgacctccatagcatctgcaaaagcacgaacgcagtaggattccataccactcagtgttcgtgaatattcagttaatcgtagggccaactctatttctggagcaccacctcctgcaataagagccctcttcttcactaaacaacgaataacacatagggcatcatgaatggagcgctcagcttcttcaatcaccagtttgttagaaccacgaac

SEQ ID NO: 5205 - DNA, 88 bp, Homo sapiens
aaattacaaaagaatggggcactcctaggttcaggttgtgagtctgtccatcgcgaaatgcttccacagggtcagggctgaggcatgg

SEQ ID NO: 5206 - DNA, 607 bp, Homo sapiens
ccagggaacgactcagtggcacaaaggaaagagaagaaatgttacaggctgatgctgtcggggcaaatagccctgcaaccagccggacttactgtctaaaagtattaaccgtaatttcaaagacaaaccacaccccttccttttcccctaatggcctcagagatttgtaatgtactttggaaaattaacttctaaggcagagtggaagccaacctcaagtcctgccacttggactctgtgtcttctcttcgaggaagcagcattgtgcacccagcaggggcagatgctgaggcttgccttaacatctcagcagctacaaaatgaaatccactgatacagaaccccttgctgtgagcagtgaggagagagagctgtaaacagacacaaattgagatttttgcacttccaaaaaatacgaggtgaacattagtgctaaacagagagaatgttctaggaagggagaaatctgagaagaaaaagtaagatgagagagaagaaacatgatttttctaatgtacttgtttgagatcaacactttaagactactgataaaactaaatttcgtggggatagacagtgagcagtgagcatcagccagtgaatctgg

SEQ ID NO: 5207 - DNA, 537 bp, Homo sapiens
  unsure (180): n=A,T,C or G
  unsure (520): n=A,T,C or G
ctggctgggcccaagagctccatctgtttccccaaagtacaggcagcttctaggccattgagtggggcatgatattggatgcttggctcaggaaacaaccccagccaacccaaggggcagtgggacatgttggcctcaggttagaaattattgctcaaagcagaaacagttgtgtcctanagagggtctgttaaaccctctttccatgtgtatctctatgtagcaattgatgggccctgcggtcaggatccctggtttctccagctccatgaatgcctccctgtgaggccctggacagtttctccctcttcttctcctggcttcagtttccccgtatgtacattgagacagtaaggctggatgattctcaggttccctctggctttccattctggcatcccagagtggaggctctgggagggcagaaccctgttcctgcctcagtttccccacctgtgggtctgcgtatagggctgggtatggaggtactgagtaatggagtgctgcgtgaacatcccantctccctgtggatagct

SEQ ID NO: 5208 - DNA, 539 bp, Homo sapiens
ccagtgggttgatttctttattccaggagtctctgtggttggtgggttttcaatatgctccagtcccagactgctagaacaagagagagtgatagaattggcagtgaaatatacgaaccaccctcctgccctctgggttcacaatacgtgtacacttgactgtgaagtggctgtgagagtgggtggagagttcttctttgaccctcagcctgcggatgcctctagaaacctcgtgttgattgcaggaggagtcggaattaactctctgctttccatcctgcggcacgcagcagatctcctcagagagcaggcaaacaaaagaaatggatatgagataggaacaataaaactattctacagtgcaaaaaataccagcgaactcctgtttaagaaaaatatccttgatttagtaaatgaatttcctgagaagattgcatgcagtttgcatgttacaaaacagactacacaaatcaatgcggaactcaagccatacatcacggaaggaagaataacggagaaggagataagagatcatattt

SEQ ID NO: 5209 - DNA, 543 bp, Homo sapiens
  unsure (150): n=A,T,C or G
  unsure (282): n=A,T,C or G
  unsure (309): n=A,T,C or G
  unsure (311): n=A,T,C or G
  unsure (385): n=A,T,C or G
  unsure (405): n=A,T,C or G
  unsure (468): n=A,T,C or G
  unsure (514): n=A,T,C or G
  unsure (541): n=A,T,C or G
ctgtgtagtaaagatgccttctggtgaatttgcacgtatatgccgagatctcagccatattggagatgctgttgtaatttcctgtgcaaaagacggagtgaaattttctgcaagtggagaacttggaaatggaaacattaaattgtcacngacaagtaatgtcgataaagaggaggaagctgttaccatagagatgaatgaaccagttcaactaacttttgcactgaggtacctgaacttctttacaaaagccactccactctcttcaacggtgacactcantatgtctgcagatgtaccccttgttgnanagtataaaattgcggatatgggacacttaaaatactacttggctcccaagatcgaggatgaagaaggatcttangcattcttaaaattcaaganaataaaactaagctctttgagaactgcttctaagatgccagcatatactgaagtcttttctgncaccaaatttgtacctctaagtacatatgtagatattggtttctgnaaataacctatttttttctctattctntg

SEQ ID NO: 5210 - DNA, 424 bp, Homo sapiens
ctgctggctggctgggcccccgtagctggactggtttgctgttaagttaagaaaacattagaaccttttttcttatgtgatgtggtacctggtggtaccgggcttgtaattctatagctatcattttccagtcttgatcttacattactgtaaccctctgcctccttctgcctactgtctataaccaggccacccttctatccatcatttgagccagtcaaatattgataaaccaaagtgctaacggtaaacacatcagcaggactaaaatcaacatgattccgtaagtagaggcattttgtgaagatcttatgaaactgcttgactggatttagtgggttccccctcagtttgatacatcaaaggcatgtcaatacacctaattatgcccacatttatcttaatcctgttttgctattgattt

SEQ ID NO: 5211 - DNA, 308 bp, Homo sapiens
  unsure (168): n=A,T,C or G
  unsure (170): n=A,T,C or G
  unsure (171): n=A,T,C or G
  unsure (178): n=A,T,C or G
  unsure (181): n=A,T,C or G
ccatttaccagactccgacacaatgggccaccaccagtgtgacagcaggacatcctaatatatggatcttgatttttaagtttcagtatctgaacttcgtaaattagtaacttttagctgggaaagtataacatgaaaccagaggttctcagaatgactgtaagatancnnacatttnctntttttgcctttatctccccaactaaaatacaatggggaagaagtctgcctatgatctttgaatgagctttttaaggaagaaatattatatattgtttgttaaagtttattgaaataaagaatcattt

SEQ ID NO: 5212 - DNA, 327 bp, Homo sapiens
  unsure (222): n=A,T,C or G
aaaaaaggtctgaatcaggacttgtgaaaacctgtagtgaaataccttaagctgttaactaactgtaaggcgtggaataggagttgctcagtggattggttctatgttgtggactacttaagtctgcatttgttactgtgctaataaacaatattaaaaaccacctaataaacactgctgtgttcatttacttttcttttgccttttggttgccattcgcanattcttctgaaatcgataggtatctgcttctaaaacaagctaaaaataatgcatatttagtaggtattagttagttacctatattaggatctgtactttacacag

SEQ ID NO: 5213 - DNA, 237 bp, Homo sapiens
cctaccgtttcctctttggtttttctgccgtttccatcatgtacctggtgttggtgttggcagtgcaagtgcatgcctggcagttgtactacagcaagaagctcctagactcttggttcaccagcacacaggagaagaagcataaatgaagcctctttggggtgaagcctggacatcccatcgaatgaaaggacactagtacagcggttccaaaatcccttctggtgattttagcag

SEQ ID NO: 5214 - DNA, 525 bp, Homo sapiens
  unsure (62): n=A,T,C or G
  unsure (89): n=A,T,C or G
  unsure (324): n=A,T,C or G
ctgtcttctctacatagtacccagttcccacatcgatgagcacgtgttccacatcatgcagnttcccagggacatacatagaactcgtnagtgggacgagtaattctttccctgtgaaagcaatgaagacaaacacctggggaaggttagcggctccaacgtaagacgttaaagagagttccaacagggcacagcacccacagacagtgtgaaaagaacggaaacaggggcaataggagcagaggaatgtcctgtacttttcaattctaggcaggcaacatgcaaagggttcatgaagcggtatacgatatgtaatggattttntcgtttcaggtaagaaaaactgggttaggaggtgggacgagagaagcaggttcgccactttaggttaccctcacccgcctaccccataccctcgttgctcttgttcagcacgttcagacagtccttggcttccacatacttggtctgtaccactttgagctgagcaatggacgtggacaagaactccacttcctggtccag

SEQ ID NO: 5215 - DNA, 118 bp, Homo sapiens
aaaaaaatgttttttaactctcctttctgtcccactgaaaaatttattttgaaagggttaagaagagtctatcattgctggtcaaaatcggcctgaggatggccgccagggacagagg

SEQ ID NO: 5216 - DNA, 616 bp, Homo sapiens
  unsure (555): n=A,T,C or G
cctgtattatacgtgtcctcctgggggttggagatgatccctcaagtacacaaaggtcccctggcccttcatctgggaatcatatactccactctagctcccagaatctacagacctggctcctcggatctgaagcccagcacaaaataatctccccgtccaaggagcttgtggaacttgaattgggaactttggagtcttgtctcccatcccagcacattgaggatgtagttggtgaatggactcttccaggcatggagatcctccatcctaaaagtacctgcctccttcccagccatccctgacacattccagccagttggatctcacagcacagctatccacagggagactgggatgttcacgcagcactccattactcagtacctccatacccagccctatacgcagacccacaggtggggaaactgaggcaggaacagggttctgccctcccagagcctccactctgggatgccagaatggaaagccagagggaacctgagaatcatccagtcttactgtctcaatgtacatacggggaaactgaagccnggagaagaagagggagaaactgtccagggcctcacagggaggcattcatggagctggagaa

SEQ ID NO: 5217 - DNA, 392 bp, Homo sapiens
  unsure (12): n=A,T,C or G
  unsure (276): n=A,T,C or G
  unsure (295): n=A,T,C or G
  unsure (311): n=A,T,C or G
  unsure (345): n=A,T,C or G
  unsure (350): n=A,T,C or G
  unsure (376): n=A,T,C or G
cctggcctccanttgggactcctccatcatcagagtctgagcctgtgagaaccagcagggaacacccagtgcccttgctgcccattaggcagactctcccggaggacaatgaggagcccccagctctgccccctaggactctggaaggcctccaggtggaggaagagccagtgtacgaagcagagcctgagcctgagcccgagcctgagcccgagcctgagaatgactatgaggacgttgaggagatggacaggcatgagcaggaggatgaaccanagggggactatgaggaggntctcgagcctgaagantcttctttttcttctgctctggctggatcatcangctgnccggctggggctggggctggggctgnggctctggggatctca

SEQ ID NO: 5218 - DNA, 496 bp, Homo sapiens
  unsure (67): n=A,T,C or G
  unsure (99): n=A,T,C or G
  unsure (364): n=A,T,C or G
ctgttgactcagattcggcattttaattacattgtttccaagtatgatattctgagagtgtctatancacttagtgtctgcttcatataaactaccagntattatatatttatgatgcaagtagttttccaaatgtggtgaaagtctgagtctttttatccccatgggtaaaatctgaatctggctctctgtgtctctcagtgcttgtttattgctggtcagagagtaaattcttgataaaagctgttgacttggctcccacagtttatgcagacattggagagacaatttggttatttcaaacatcacaggatttgagtaagaagacctggttatgaaacaaggctctcataattactagttntgactgttgacaagttaccttttcttgtttacaagttatttggcctctttgaattacttgtaaaatagagatagggattctttcttgatcatggaacatcaaatgaagttatttgatgaaatactttgtcat

SEQ ID NO: 5219 - DNA, 504 bp, Homo sapiens
  unsure (242): n=A,T,C or G
  unsure (372): n=A,T,C or G
  unsure (420): n=A,T,C or G
  unsure (436): n=A,T,C or G
  unsure (451): n=A,T,C or G
  unsure (474): n=A,T,C or G
ccagcctcacgctggagtgcttcgtgcagatgttccccttggtggcggagcacgtgcgcaagtgcatgggggaggaactctaccagctcttcctgagcaacgctgaggacttgtacatgaaaatagacagcattcaggcggacatcttggcggccaacacagtcaatgttaccaaagccctgtgcctccatggcagctcctacagcatgaacactctctatggctcgcgcgattcggctcanatggcctacctcacacacttcgaggaggatgtagaatcaaaggagtaacagcccctgtggcaaaccaggaaggccaaggctgcggggcagggaagcctggcaagaggaaggcgcctggggtcaagctcanagccactccacttggctccaggggggagacggggattaggcatcccanaggggcagaggaaganccgctggctgcgaanagtcaataaacagccttgatacncaaaaaaaaaaaaaaaaaaaaaaaagcttg

SEQ ID NO: 5220 - DNA, 141 bp, Homo sapiens
  unsure (78): n=A,T,C or G
  unsure (134): n=A,T,C or G
aaaaacaatgtttgcattttggtatttttcagattcaaattcagtaatacggttcatacgggagctaatacgtgcatntaccaatgaaaagcattgtatctcatgatttgcaaggcacccctgggggggtgaanaccccag

SEQ ID NO: 5221 - DNA, 344 bp, Homo sapiens
ctgctcagagtcttctgcagggattccattcgggacacctctgccagcctccatcttctccttcaggttccgtttgaagaaaccaacctgtacaaagacaaaatttgaacgagcaaagaattcactgagcactttggccccaagaaaatgtgagaacaccttttttttttgagatggagtctcactgtgttgcccaggctggagtgcagtggtgcgatctcggctcactgcaacctctgcctcccagacttaagcaattctcttgcctcagcctcctcagtagctgggattacaggcatctgccaccacgcccggctaatttttgtatttttagtagagacagg

SEQ ID NO: 5222 - DNA, 162 bp, Homo sapiens
gtgtgcatgcacatagggggatatctattgggatgcagagaggtgagagcagctcttcagaagcgctggcaaaagaagaatgtgtattgaaaccatgacgggttagaagctcctaactccacttccagggctgccttcagaaatcctttctcttgaccatgg

SEQ ID NO: 5223 - DNA, 505 bp, Homo sapiens
ctggagtaccaggaagaactgaggtcccactacaaggacatgctcagcgaactctccacagtcatgaatgagcagattacgggcagggacgacctgtcaaagcgcggagtggaccaaacctgcactcgagtaattagcaaagcaactccggccctacccacggtctccatctcatctagtgctgaagtctgagggctctgcagcatcagacccacctctaagagaactttctgaatttgcagctaatctcggggaagagaaagataggtttaatttatttgaagttttcatggtgttaatatttttgtttacctcgccagcttcagaattttgccaacctctgaatttgcacattttgtataatttttttttctttgagcagtgttgatcaagccaagttgaatatttgccatgaaattccagtgaatgtgtagctcaaatgcaaaccctaagtttgctgtcagttattgtatggtcagtaccccagtcctagtacacatatttt

SEQ ID NO: 5224 - DNA, 555 bp, Homo sapiens; identical to SEQ ID NO: 393

SEQ ID NO: 5225 - DNA, 78 bp, Homo sapiens
  unsure (24): n=A,T,C or G
  unsure (54): n=A,T,C or G
  unsure (58): n=A,T,C or G
ctggatggtcctcatgtctcttanttgcttccttcagcctaagcacagcagccncagncctttctggctccattgctg

SEQ ID NO: 5226 - DNA, 554 bp, Homo sapiens; identical to SEQ ID NO: 392
  unsure (150): n=A,T,C or G
  unsure (183): n=A,T,C or G
  unsure (523): n=A,T,C or G

SEQ ID NO: 5227 - DNA, 533 bp, Homo sapiens
cctgtcaggtctccttgggaaaggcttcatatttgcaactttgatgattctatgtccagcttcagagctgctttcccagaaattcacgcttaaacaaccaaccggtaaccaccacttccccacaccgccgcccggtaattatttgcattacaaaccggaggcgccctcatttgcatttgtgtacagattaactagttaaggcttgagaagctctgaataattcaaaagtattagacccacacagccttggagagaccttcagaaactaaggaggagttttatattaagggagacattttagtcagtaagacgatataacctacttactccgtaaggggaaatgaaggcccagagaagggaagggacttgaccgaggtcccacttctgtttcgaggcagaagccagactaattttcatgcctcctgactcccaatcagtttcacaaagggattcaatctgtttatatacgttacattcctggatacgaggtcttttgatgttcagagtaactgactagttagtattagaagacc

SEQ ID NO: 5228 - DNA, 236 bp, Homo sapiens
ggaaaggagagtatctgtgagtgggggcctcccttgaccccagtacgaagtctatgccctgaatccccagagtagcccttcctggtgcccaactggcctggggacaaacagcgtccactacatctaggactgccggctaagtggacacacttcttgacctcctaccaggaactttggtaaaagctagctttggggaaggggttgggtgtaaatatgagagggtggagggagaccag

SEQ ID NO: 5229 - DNA, 267 bp, Homo sapiens
ctgtagacaggtccttttcgatggtacatatttctttgcctttataatcttttatacagtgtcttacagagaaaagacataagcaaagactatgaggaatatttgcaagacatagaatagtgttggaaaatgtgcaatatgtgatgtggcaaatctctattaggaaatattctgtaatcctcagacctagaataatactagtcttataataggtttgtgactttcctaaatcaattctattacgtgcaatacttcaatacttcattt

SEQ ID NO: 5230 - DNA, 618 bp, Homo sapiens
  unsure (617): n=A,T,C or G
cctcgccccgatacggtcgccatgcccaagagaggaaagcgactcaagttccgggcccacgacgcctgctccggccgagtgaccgtggcggattacgccaactcggatccggcggtcgtgaggtctggacgagtcaagaaagccgtagccaacgctgttcagcaggaagtaaaatctctttgtggcttggaagcctctcaggttcctgcagaggaagctctttctggggctggtgagccctgtgacatcatcgacagcagtgatgagatggatgcccaggaggaaagcatccatgagagaactgtctccagaaaaaagaaaagcaagagacacaaagaagaactggacggggctggaggagaagagtatcccatggatatttggctattgctggcctcctatatccgtcctgaggacattgtgaatttttccctgatttgtaagaatgcctggactgtcacttgcactgctgccttttggaccaggttgtaccgaaggcactacacgctggatgcttccctgcctttgcgtctgcgaccagagtcaatggagaagctgcgctgtctccgggcttgtgtgatccgatctctgtaccatatgtatgagccatttgctgnt

SEQ ID NO: 5231 - DNA, 333 bp, Homo sapiens
cctgcgttcagttggtgcttccagacaccaagggcccttgtgaatcccatcctggaatggaagggctgactgaaaccgtggctaagaattgggagactctcttgtttcaagccaatttaacatcatttaccagatcatttgtcatgtccagtaacacagaagcaaccaactacagtatagcctgataacatgttgatttcttagctgacgttaatatttctttcttccttgtgttcccacccttggcattgccacccacccctcaattaaggcaacaatgaagttaatggataccctctgcctttggctcagaaatgttatagcaaaaatttt

SEQ ID NO: 5232 - DNA, 193 bp, Homo sapiens
  unsure (15): n=A,T,C or G
  unsure (17): n=A,T,C or G
  unsure (23): n=A,T,C or G
  unsure (25): n=A,T,C or G
  unsure (28): n=A,T,C or G
  unsure (35): n=A,T,C or G
  unsure (41): n=A,T,C or G
  unsure (57): n=A,T,C or G
  unsure (63): n=A,T,C or G
  unsure (108): n=A,T,C or G
  unsure (126): n=A,T,C or G
  unsure (129): n=A,T,C or G
  unsure (187): n=A,T,C or G
ctggctccaaaggananagcggnancangggtgancccggntctgctgggccccaangtcctnctggtcccagtggtgaagaaggaaagagaggccctaatggggaanctggatctgccggccctncangacctcctgggctgagaggtagtcctggttctcgtggtcttcctggagctgatggcanagctgg

SEQ ID NO: 5233 - DNA, 546 bp, Homo sapiens
  unsure (290): n=A,T,C or G
  unsure (300): n=A,T,C or G
  unsure (486): n=A,T,C or G
aaaaattgtgtaattgttaaatgtccagttttgctctgttttgcctgaagttttagtatttgttttctaggtggacctctgaaaaccaaaccagtacctggggaggttagatgtgtgtttcaggcttggagtgtatgagtggttttgcttgtattttcctccagagattttgaactttaataattgcgtgtgtgtttttttttttttaagtggctttgtttttttttctcaagtaaaattgtgaacatatttcctttataggggcagggcatgagttagggagactgaanagtattgtanactgtacatgtgccttcttaatgtgtttctcgacacattttttttcagtaacttgaaaattcaaaagggacatttggttaggttactgtacatcaatctatgcataaatggcagcttgttttcttgagccacggtctaaattttgtttttatagaaattttttatactgattggttcatagatggncagttttgtacacagactgaacaatacagcactttgccaaaaatgagtgtagcattgttt

SEQ ID NO: 5234 - DNA, 281 bp, Homo sapiens
gttacatctaaaatacagaatgtcaaatggttgcatagcttgtttcccacaagaagaaaaaaaagaacagactattgaaataaaagaagaagtggttgggctaactgaaacatcttcccaaccaaagaatgaagaagacattgaaattattccaatccaagaagaggaagaagaagaaacagagacgaactttccagaacctccccaagatcaggaatcctcaccaatagaaaatgacagctctccttaagtgatttcttctgttttctgtttcctttttt

SEQ ID NO: 5235 - DNA, 508 bp, Homo sapiens
  unsure (339): n=A,T,C or G
  unsure (421): n=A,T,C or G
ccaggcgcaatggctcaagcctataatcccagcacttgggaacctgaggcaggcagatcacctgaggtcaggagttcaagaccagcatgtccaacatggtgaaaccccatctctactaaaaatacaaaaaaattagccaggcatggtggcacatgcctgtaatcccagctacttgggaggctgaggaggagactcactagaactcaggaagcagaggttgcagtgagccaagactgcgccactgcactctggcctaagcaacagagggagactccatctcaaaaaaaaaaaaaaagattatttctctaacttactggtttatcttttatagctcatttnaggtgatttgttgtgtttgtctatagagtaaaataacatgtctaatgagttataatttaatgtccttccattcaatcactgnatttcaaatttattccaatattttggaataagcttccaatattttaacttaaatagggaaggtcatacttggtatttttcctgacct

SEQ ID NO: 5236 - DNA, 446 bp, Homo sapiens
  unsure (38): n=A,T,C or G
  unsure (45): n=A,T,C or G
  unsure (95): n=A,T,C or G
  unsure (103): n=A,T,C or G
  unsure (208): n=A,T,C or G
  unsure (259): n=A,T,C or G
  unsure (266): n=A,T,C or G
  unsure (281): n=A,T,C or G
  unsure (327): n=A,T,C or G
  unsure (412): n=A,T,C or G
  unsure (442): n=A,T,C or G
aaaaatctatttatttatcaaaacagtattggcacagnaattctnatattatcatcaaataataaaattgctactttctgtactcaattctttanaatcctanaaattgcaaatgcattcaatttaacaatattgtaaataacaatacaaaagaaagaactctgcatatttatggaaacattgttgatggtacagttctactgaaacncatacacatttcactatttaatttacatatggtcttgttgaaaaaaaccantatgttntactttttcaatttncttatgctaaaatacatgtaattctaaaggatatctcttaggtgtnataaaaaccaaggaaggtccaccaccaagtcaaagttagagtcaaagatacttcaaagattccatgaaatgatctgaaaacaaanttaaccaaaaaatgtgtactgtattggggnacat

SEQ ID NO: 5237 - DNA, 538 bp, Homo sapiens
  unsure (509): n=A,T,C or G
ctgctgtgtgcctccacatggacttctcgtgtctctaggtcattggcattccttcctcctcctcctcctgggagtggggtggatttcaggcggtgtcaaaggctcaacggggctgcaacagtttttttttttttttgagacggagtttcgctcttgtcgcccaggctggtgtgcagtggtgtgatctcagctcactacaacctccgcctcccaggttcaagcgattctcctgcctcagcctcccaagtagctgggagtacaggcacatgccaccacgcccagctaattttgtatttttagtagagaaggggcttcactatgttggtcaggctggtcttgaactcctacctcaggtgatccacctgcatcggcctcccaaagtgctgggattacaggcgtgagccaccgcactgggctggaaagtctttttgagatcttcctcctccttctctccctttttcacagaagggacaaactaaggttgggaagcagcaagtcatgcaccctanatccacctgcccacccaggctcaaggacc

SEQ ID NO: 5238 - DNA, 340 bp, Homo sapiens; identical to SEQ ID NO: 325

SEQ ID NO: 5239 - DNA, 528 bp, Homo sapiens
aaaagaactggctggaatattcatcagcctactaatgtcatctcccaacccactctccaaactccatcccaaaaaagcatccagttcagaattgcccactgttggcaaagaaagaatgtcactaatttatttacaggtgagtattaacactttctgccaatgtgtattttaagcaattacatttagcaattacaattagattcttggcatcctcaagggttccatcatcttcaatctgtcctaagcctcagtttccccatctctaaaatgaggataatagtacctacatcataaggtggttctgagtattaagtaagatgatccatgtaaagcacttagcacaatgcctggcacataaaaacactcagtaaatattagctattattttgcatagatttatttacctggtttggaattttgaggatccacctcaaaagctgatctttgtaattttcctgaagcagggctcagaacagcccacttgataagagacagagtatgtgagtcttatcaaaggagtgaacccag

SEQ ID NO: 5240 - DNA, 443 bp, Homo sapiens
aaaaagttccatacccatcattcagcagcatgcctttttttccttactcaacagtgtttttgagattctgttgtataaatatattctaattttatttagccagtctcctgctgatggacagttaagcagcttccagttgttcactatcacaaacaatgctgcaatgggcatctgtgtatatggcttcctgggcgcagggaagccaccatgatgcctctctgggcaccaaactgctggatcggaaggtctggtggatattactaaaccataccccaacaccaccaccaccaaacttctgcctctgtctttaatacaagttgagagactggatgggctccagggtgaagtgagaggttcttcaaggtgaactgtttctgcatccagtgccaggtctcctgtctcaaactgcaggggtgcaggcagaagcggggagctatgcccag

SEQ ID NO: 5241 - DNA, 529 bp, Homo sapiens; identical to SEQ ID NO: 241
  unsure (517): n=A,T,C or G
  unsure (520): n=A,T,C or G

SEQ ID NO: 5242 - DNA, 544 bp, Homo sapiens
  unsure (33): n=A,T,C or G
  unsure (93): n=A,T,C or G
  unsure (458): n=A,T,C or G
  unsure (536): n=A,T,C or G
gttttcatactgctgtggtttgaatgttccctncaacactcatgttgagacttaatccctaatgtggcaatactgaaaggtggggcctttganatgtgattggatcgtaaggctgtgccttcattcatgggttaatggattaatgggttatcacaggaatgggactggtggctttataagaagaggaaaagagaactgagctagcatgcccagcccacagagagcctccactagagtgatgctaagtggaaatgtgaggtgcagggagaatggcgtcaacccgggaggcggaggttgcagtgagccaggattgtgcgactgcactccagcctgggtgacagggtgaaacgccatctcaaaaaataaaaattaaaaaaataaaaaaagaacctggatctcaatttaatttttcatattcttgcaatgaaatggacttgaggaagctaagatcatagctngaaatacagataattccacagcacatctctagcaaatttagcctattcctattctctagcctattccttaccacctgnaatcttga

SEQ ID NO: 5243 - DNA, 589 bp, Homo sapiens
  unsure (568): n=A,T,C or G
aaaataagctgttttaagaggaacagaagggaaatctgctacctagtctatacacagcgtgaacctcacagggggcttctgataccctcaaacatggagaacagtaagggagcagagtggttaaggactttcaggaacttaactattctggaataaggaatgaatcaactgaccttgggccagcaggtttttaactaaattgttacttgcctttctcacccagctaatcagtctctgtacttgtttccctttttgaaacaagtgtcttggttaactaattctgttttatggttgtgctaaattcatagcaggtgccttattctttgcttttagtcaaaccattccatatcagaattttccttggtttactatagatatttggctttaagttgttgtttgtgttttttaatgtacaatgttctgataaatttgactgttaaattgctatagctagcaatcattttacatatgtaaaattgcattccctttgtatttcatgtgtaattcaccaattaagtgcagtttatattcaggttggattatgcatgtttaggtaaacgaaagctgngtcttacttgatttattcttt

SEQ ID NO: 5244 - DNA, 498 bp, Homo sapiens
atagcaaatgcagttgttaaagaacttgctgagactataaaatgtcgtacattattttcaactcactaccattcattagtagaagattattctcaaaatgttgctgtgcgcctaggacatatggcatgcatggtagaaaatgaatgtgaagaccccagccaggagactattacgttcctctataaattcattaagggagcttgtcctaaaagctatggctttaatgcagcaaggcttgctaatctcccagaggaagttattcaaaagggacatagaaaagcaagagaatttgagaagatgaatcagtcactacgattatttcgggaagtttgcctggctagtgaaaggtcaactgtagatgctgaagctgtccataaattgctgactttgattaaggaattatagactgactacattggaagctttgagttgacttctgacaaaggtggtaaattcagacaacattatgatctaataaactttatttttcaaaaaaaa

SEQ ID NO: 5245 - DNA, 482 bp, Homo sapiens; identical to SEQ ID NO: 395

SEQ ID NO: 5246 - DNA, 440 bp, Homo sapiens; identical to SEQ ID NO: 242

SEQ ID NO: 5247 - DNA, 265 bp, Homo sapiens
  unsure (8): n=A,T,C or G
  unsure (32): n=A,T,C or G
  unsure (50): n=A,T,C or G
  unsure (55): n=A,T,C or G
  unsure (80): n=A,T,C or G
  unsure (87): n=A,T,C or G
  unsure (91): n=A,T,C or G
  unsure (120): n=A,T,C or G
  unsure (128): n=A,T,C or G
  unsure (138): n=A,T,C or G
  unsure (165): n=A,T,C or G
  unsure (195): n=A,T,C or G
  unsure (205): n=A,T,C or G
  unsure (218): n=A,T,C or G
  unsure (252): n=A,T,C or G
  unsure (253): n=A,T,C or G
ctggcctnaggagggagtaagagccccatccntgaaggtacacaagttgnggcancaaccatctggcctgcagtttccanaggggantcangcgtggggtgggactggagtgaacgggtngatgcttncacatgcggnagttggcactgacggcaggaacacggnggtggcttaatgggtcctggggctcccctntggccctcangaaggcaggagcntgaggggcttgggatgcagcacctgcaaatttgnncgttcctggcct

SEQ ID NO: 5248 - DNA, 167 bp, Homo sapiens
  unsure (34): n=A,T,C or G
  unsure (80): n=A,T,C or G
  unsure (94): n=A,T,C or G
  unsure (96): n=A,T,C or G
  unsure (101): n=A,T,C or G
  unsure (111): n=A,T,C or G
  unsure (115): n=A,T,C or G
  unsure (141): n=A,T,C or G
  unsure (152): n=A,T,C or G
  unsure (154): n=A,T,C or G
  unsure (161): n=A,T,C or G
cttttttttttttttttttttttttttttttttncggataaaataagtttttatttatagtcttatagtaaagggggaanccttaacttgcaananaattnttcggcagtntgtncaacatactttttatttccatggaanggaatcaaacncnaactganactaca

SEQ ID NO: 5249 - DNA, 438 bp, Homo sapiens
gtaactatccgcactagaaagttcatgaccaaccgactacttcagaggaaacaaatggtcattgatgtccttcaccccgggaaggcgacagtgcctaagacagaaattcgggaaaaactagccaaaatgtacaagaccacaccggatgccatctttgtatttggattcagaactcattttggtggtggcaagacaactggctttggcatgatttatgattccctggattatgcaaagaaaaatgaacccaaacatagacttgcaagacatggcctgtatgagaagaaaaagacctcaagaaagcaacgaaaggaacgcaagaacagaatgaagaaagtcagggggactgcaaaggccaatgttggtgctggcaaaaagtgagctggagattggatcacagccgaaggagtaaaggtgctgcaatgatgttagctgtgg

SEQ ID NO: 5250 - DNA, 345 bp, Homo sapiens; identical to SEQ ID NO: 243
  unsure (154): n=A,T,C or G
  unsure (335): n=A,T,C or G
  unsure (337): n=A,T,C or G
  unsure (340): n=A,T,C or G

SEQ ID NO: 5251 - DNA, 368 bp, Homo sapiens; identical to SEQ ID NO: 244
  unsure (40): n=A,T,C or G
  unsure (56): n=A,T,C or G
  unsure (60): n=A,T,C or G
  unsure (79): n=A,T,C or G
  unsure (85): n=A,T,C or G
  unsure (102): n=A,T,C or G
  unsure (108): n=A,T,C or G
  unsure (118): n=A,T,C or G
  unsure (125): n=A,T,C or G
  unsure (126): n=A,T,C or G
  unsure (134): n=A,T,C or G
  unsure (152): n=A,T,C or G
  unsure (196): n=A,T,C or G
  unsure (197): n=A,T,C or G
  unsure (203): n=A,T,C or G
  unsure (209): n=A,T,C or G
  unsure (234): n=A,T,C or G
  unsure (245): n=A,T,C or G
  unsure (247): n=A,T,C or G
  unsure (258): n=A,T,C or G
  unsure (263): n=A,T,C or G
  unsure (267): n=A,T,C or G
  unsure (271): n=A,T,C or G
  unsure (273): n=A,T,C or G
  unsure (282): n=A,T,C or G
  unsure (292): n=A,T,C or G
  unsure (301): n=A,T,C or G
  unsure (311): n=A,T,C or G
  unsure (336): n=A,T,C or G
  unsure (339): n=A,T,C or G
  unsure (346): n=A,T,C or G
  unsure (354): n=A,T,C or G

SEQ ID NO: 5252 - DNA, 304 bp, Homo sapiens
  unsure (149): n=A,T,C or G
  unsure (279): n=A,T,C or G
  unsure (297): n=A,T,C or G
aaaagagaagggttgaaaaagattgtgtgtgtgtgtgtgtgtgtgtgtttaattggcccagggttacttaaataaatcataaccattttgccacattctgtaactgtttagctaaggtcaaattaagtttaccctatggattttgtttnatcttttgtttcgtgtatatactgtttgcctttttcataaaaatcttggatttgttatatattgttcctgttatttttgacatctttgctattgtaaataaattactattttgttttaagtgaaaaaaanaaaaaaaaaaaaaaaaanaaagctt

SEQ ID NO: 5253 - DNA, 272 bp, Homo sapiens
ctggcctcaggagggagtaagagccccatccctgaaggtacacaagttgtggcagcaaccatctggcctgcagtttccagaggggagtcaggcgtggggtgggactggagtgaacgggtagatgcttccacatgcggcagttggcactgacggcaggaacacgggggtggcttaatgggtcctggggctcccctctggccctcaggaaggcaggagcatgaggggcttgggatgcagcacctgcaaatttgcacgttcctggcctcaggagg

SEQ ID NO: 5254 - DNA, 191 bp, Homo sapiens
  unsure (113): n=A,T,C or G
  unsure (124): n=A,T,C or G
  unsure (130): n=A,T,C or G
  unsure (132): n=A,T,C or G
  unsure (147): n=A,T,C or G
  unsure (159): n=A,T,C or G
  unsure (161): n=A,T,C or G
caccttgaaggcccaagggaatcccgttatcagctctgatcctgagataatccctctgacttcctcccagaagccaagactctccagaactggctggttgtcctttgcagatntgttgaggcancaagtnantaggaagagaatatnaatatatacagntntggtcaccaaacatggattttgcctcttgg

SEQ ID NO: 5255 - DNA, 156 bp, Homo sapiens
  unsure (7): n=A,T,C or G
  unsure (10): n=A,T,C or G
  unsure (24): n=A,T,C or G
tttacantcncatgttcattgtgncactcttcacaatcactgtttccaaagttatggaaacaacccaaatttccattgaaaaataaatggacaaagaaaatgtgcatatacgtacaatgggatattattcagcctaaaaaaagggggaatcctgtt

SEQ ID NO: 5256 - DNA, 448 bp, Homo sapiens; identical to SEQ ID NO: 396

SEQ ID NO: 5257 - DNA, 577 bp, Homo sapiens
  unsure (497): n=A,T,C or G
aaagaatatgtagaatctaggtaagtggataaaaggtctgggggcaggggaaaggagagcatttcattgtgaatcaaggaatttctccacctgttttaactcttccatatgacatcaaagagatgtcacttgcagctagcatttcagtgatgttttcttactaataatatcgtgataaaagaaacattgactataagaaataggaatgggtctcataaaaggaaacagcaaaacccccaaactaaaaaacagcgcaggctgtttctctcttctctccttttgcttggcactcatgagatgctaggtgtggaagtcagccaactgaaaaagagaggtggctgaagaaggtggggaggctgaagccagttaaataggatggtccaattcacagacggcgaggctacagtgcaaataggactctttcaacttgagcaggaccccattacttcactggagttagaaagaaaggagagcgtagactttttgaactttctatnaagagtgtacctccacagtatacagaagacgacgtgaaatttgatctgcaagaaaactgagtccatattcacatatgtat

SEQ ID NO: 5258 - DNA, 525 bp, Homo sapiens
cttcgagtgcatcgaggacctgtctgaagacttggaatggaaaattatctatgtgggctctgcagaaagtgaagaatacgatcaagttttagactctgttttagtgggtcctgttcccgcaggaaggcatatgtttgtatttcaggctgatgcacctaatccaggactcattccagatgcagatgcagtaggcgtaactgttgtgctaattacttgtacctatcgaggacaagaatttattagagttggctattatgtaaataatgaatatactgagacagaattaagggaaaatccaccagtaaaaccagacttttctaagcttcaaaggaatattttggcatctaatcccagggtcacaagattccacattaattgggaagataacacagaaaaactggaagatgcagagagcagtaatccaaatctacagtcacttctttcaacagatgtattaccttcagcatcaaagggatggtccacatcagaaaactcactaaatgtcatgttagaatcccacatgga

SEQ ID NO: 5259 - DNA, 562 bp, Homo sapiens
  unsure (467): n=A,T,C or G
  unsure (503): n=A,T,C or G
  unsure (540): n=A,T,C or G
ccacacacagaaggaaagttgatccccagggcagcctttcccaccaaaaaaatcaggcccaatccaggagagtttgccagtagctccccagggttccagggtgtctgccagccttcctaggaatcgtgggcaggcttctaggtgccagtgactcaaactcctttttccacttcccagttcaacctggtcactctcatccccacaagttcccaatctgaatcccattctctgaccattctctgcttccttgtttttaatctcatttgagagtgatcctcacgggttcccctggcccctgcactcattttccttactgggtatgctaacgtttgtcttctaattcaggaaatccttccaaccctgttttcagctctgcctccaaacccttccatttccccatttcacctcccagtctcctcactcctggagcaaagagctctgcacttggattgctaagcatgcatggntcatgtggagcaggggagtgggaagatgtccctcanggcagaaagcctgcttttggtggggaacctacgtatnattcaaacaggcttagctgtag

SEQ ID NO: 5260 - DNA, 422 bp, Homo sapiens
ccaccaaggctatcgatgagtacatgaagctcgtggcacgggattacctccaggagaccctgggtgagctgggggagagtccatgtcagcggcctgctggtgagctaggggacctgggtgaagttctaagagtccttgagcaacctggattctggtagtgagtggtgttttgggggtgctaggatcctggggacaattgggagctccccaagatgttgggtgcctctggaataacctgaagacaaggttggaggatgggtgtggcaggttttggtggtcatggccccagcccctatctggctgtgctgggctgcaggacaggttgtgcggcgtctctgtgcttctactgaggactgtgaagtggaccccagcaaatgtccagcctcggagctgccagagcaccaggccagacttcggaacag

SEQ ID NO: 5261 - DNA, 573 bp, Homo sapiens; identical to SEQ ID NO: 245

SEQ ID NO: 5262 - DNA, 426 bp, Homo sapiens
  unsure (184): n=A,T,C or G
  unsure (205): n=A,T,C or G
ctggaagagagggctgcccggaacgtctctcaagtttccaagaacttggaaagccaccacggtgaccagatggcgcagaaatcccagtccacgcagatttcacaggaactggaggaacttcgagctgaacagcagagattgaaatctcaggacttggagctgtcctggaacctgaacgggcttnaagcagatctgagcagcttcnagtcccaggaattgaacgagaggaacgaagcttcagatttgctggaaagactccgggaggaggtgacaaagctaaggatggagttgcaggtgtccagcggctttgtgtgcaacacgtgccctgaaaagtggatcaatttccaacggaagtgctactacttcggcaagggcaccaagcagtgggtccacgcccggtatgcctgtgacgacatggaagggcag

SEQ ID NO: 5263 - DNA, 354 bp, Homo sapiens
aggtctgagggaggggtcagggtgggtgcgcggtgacggggagggcaaaggtggtgtcagtatcttcattttgaggattggggttcagagcacttctggggtgtcagctcctccttgtccccccgtggggctccgtaggactggaaagaggacatgaagagctctgacagagagcagcagaaactctggaactgtttccagagggcctgcactgcatggaccagggccaccaccttctccttcacccaggccagaaccccgtgccaccaggtctgcagccgctgcagcatggcctggaaccatctcatgaccttgtcacaaaagctctccccaggctcctcggttgcgggatcc

SEQ ID NO: 5264 - DNA, 268 bp, Homo sapiens
ctgtatggctgggggctcctcgtatgcatggaacccccagaataaatatgctcagccaccctgtgggccgggcaatccagacagcaggcataaggcaccagttaccctgcatgttggcccagacctcaggtgctagggaaggcgggaaccttgggttgagtaatgctcgtctgtgtgttttagtttcatcacctgttatctgtgtttgctgaggagagtggaacagaaggggtggagttttgtataaataaagtttctttgtctcttt

SEQ ID NO: 5265 - DNA, 342 bp, Homo sapiens
ttgataaaaccccagggccacagcagaggcaaagggcatctggggagagggttcgaagctgtggcggactccactaatgtaaccctccaatgtcaagccatgggcgtgatcagtagctaagtgatgacaaggctgttgggggtggacggaaaagacttggggcaaagcagactgtttatagcctgagctggtagggcctggtgcagcagcctacccggaactggcactactctttcccaggttccctgactctctatcctggtctctgagagcgtgccctacttccgtttcccccactccaaacacacctgaggcatcttccagtgctaggccccatgctgg

SEQ ID NO: 5266 - DNA, 450 bp, Homo sapiens
  unsure (12): n=A,T,C or G
  unsure (13): n=A,T,C or G
  unsure (20): n=A,T,C or G
ccgaggtccaannttttccntgatgaggaatgggttggaaagctggcctacttatcagatatattttcacttataaatgaattaaatttaagtctccaaggaactttgactactttcttcaatttgtgtaataaaattgatgtatttaagagaaagttaaaaatgtggttgaagcgcacacaagagaatgattatgacatgttcccttcattttctgaattctcaaattcatcaggcttaaatatgacagacatcacaaggattatttttgagcacctggaaggactttctcaagtgttcagtgactgttttccaccagaacaagacttgcgttcaggaaatttgtggataattcacccttttatgaatcaccaaaataataatctcaccgacttcgaagaagaaaagctaacagagctatcttcagatttaggattacaagcactattt

SEQ ID NO: 5267 - DNA, 421 bp, Homo sapiens
ctgctgaagctcaactcccttttcgagcaggtgtggaagccctgaggcttctctgacatagcatgtgtttattttcttaggtgagacctgattcaggaaagtctgcagccgatatccatcttcaagtttgtggtcctttctccctctatatatccttgacctcagcagtcatgctggggtccagagtggatgattctctccgccttaggtagactcctccttaagagtgtaagtctctcagtctcacatattttgtgagacgtaaactgacattccacaaggagaggaggaaattctgtgggtcacatccaggggtgcttggaacctgattggttgtcaatcctccagttagtttgtcacgagtggaattctgtcctggattcccaaggatcaaggctgccccattagccaggaaataggg

SEQ ID NO: 5268 - DNA, 250 bp, Homo sapiens
  unsure (239): n=A,T,C or G
ctgttgaaacagaagaagttgagcctgatgaagaagaatttcaggaagagtctttggtggatgactcattacttcaagatgatgatgaagaagaagaggacaatgaatctcgttcttggagaagatgatttgactgatcattgatctacatatgctagaactctacctgtgtttcattagtattatctaatgtacttttacatatttgtaaaaacaatttttggtaaaatgtgatgaanatggatttcac

SEQ ID NO: 5269 - DNA, 395 bp, Homo sapiens
aaatgaaatggggttgaagtgaacatgattttgttgaccatgttcgtgaattacagatgcaatatgcattggtagaatcgtgtgatggtcttttgtgatacttaatttttacatatcccagtctctgtatgtatctgcatagacaaagaaaaaacaaactcctgctttgcttttattgaagggtttccaggactgcgtgtctgctcctgagctctgttttaagtatgtgtatcctttgcttgtattttgtattaaaaaaataagaaaaagaagcctttattgttgagcatgttggcattgtcccctttatttttttctctttttgggacatatgaagcaagttattctttttctgtatctttttttcttttgtaaactttttttttgttttgttt

SEQ ID NO: 5270 - DNA, 340 bp, Homo sapiens; identical to SEQ ID NO: 325

SEQ ID NO: 5271 - DNA, 425 bp, Homo sapiens; identical to SEQ ID NO: 246

SEQ ID NO: 5272 - DNA, 593 bp, Homo sapiens; identical to SEQ ID NO: 247

SEQ ID NO: 5273 - DNA, 453 bp, Homo sapiens; identical to SEQ ID NO: 248
  unsure (420): n=A,T,C or G

SEQ ID NO: 5274 - DNA, 504 bp, Homo sapiens; identical to SEQ ID NO: 400

SEQ ID NO: 5275 - DNA, 303 bp, Homo sapiens; identical to SEQ ID NO: 580

SEQ ID NO: 5276 - DNA, 363 bp, Homo sapiens; identical to SEQ ID NO: 581
  unsure (188): n=A,T,C or G

SEQ ID NO: 5277 - DNA, 584 bp, Homo sapiens; identical to SEQ ID NO: 582
  unsure (340): n=A,T,C or G
  unsure (529): n=A,T,C or G
  unsure (534): n=A,T,C or G
  unsure (547): n=A,T,C or G

SEQ ID NO: 5278 - DNA, 591 bp, Homo sapiens
ctgttccctgaatggcttccctgggttatgtagaaacagcctggggaggaggtgatacaacatacttaatggggcctctgggcagaaaacagactgaatcctcaacactgccccttttgagggtctgtgatcctggaacttctctgatggactgggatgcccttaactgaggtctgctgtctggaaaggacaccacaggcccagaatgaaggggcatctggaccaatgacctagattcaacacagggcttggagctggtggtacaggctggttttggcccaatgtgtgctggaggctggaagcccctgaagacctaaactgcctggatgagcttattagggtgaattaatgagtctgtaatttgggaaccttaatgtgagacaccacttaaggagaggaacttggcccagcaattgatcactctagaagtggacagctatgcactagactgcaccagaatctgttcaacagcgacaccttgtggtaaaaactgtagacgccccatcaggctggatgggaaactagaaacagactgtctcatctttggacagatatccctcaaatctcccaatctactccagggaaaagaca

SEQ ID NO: 5279 - DNA, 365 bp, Homo sapiens
ctgtacaatactttggtgttaacctgtggtcttccttcacctcagtgaactctgccctgcccatctgtccagaggaagtcttagctcctaccccccaccctccctggcgcttggatgggaggcgacacagtatgggattgtgaaatccctgctgcgatgctgggtatctggaaggggagaagggggtggaagcagcgcagggaatgctgtgagatgagaagagctcacatcgatgggaaatggccctggcccaggctccagaatgtgacagcaacagtggcctggctgttttcccggggggcggggggcgggactggcaaactgggaggagaggcaattaagacgcaacaatcaaaccaaccttt

SEQ ID NO: 5280 - DNA, 553 bp, Homo sapiens
  unsure (487): n=A,T,C or G
ccacaactgtgaagttagaaaagccctgtcaaagcaagagatggctagtgcttcatccagccaaagaggtcgaagtggttctagaaactttggtggtggtcgtggaggtggtttcggtgggaatgacaacttcggtcgtggaggaaacttcagtggtcgtggtggctttggtggcagccgtggtggtggtggatatggtggcagtggggatggctataatggatttggtaatgatggaagcaattttggaggtggtggaagctacaatgattttgggaattacaacaatcagtcttcaaattttggacccatgaagggaggaaattttggaggcagaagctctggcccctatggcggtggaggccaatactttgcaaaaccacgaaaccaaggtggctatggcggttccagcagcagcagtagctatggcagtggcagaagattttaattaggaaacaaagcttagcaggagaggagagccagagangtgacagggaagctacaggttacaacagatttgtgaactcagccaagcacagtggtggcagggcct

SEQ ID NO: 5281 - DNA, 577 bp, Homo sapiens
ccagaggatcagtgtccgatgaggaaatgatggagctcagagaagcttttgccaaagttgatactgatggcaatggatacatcagcttcaatgagttgaatgacttgttcaaggctgcttgcttgcctttgcctgggtatagagtacgagaaattacagaaaacctgatggctacaggtgatctggaccaagatggaaggatcagctttgatgagtttatcaagattttccatggcctaaaaagcacagatgttgccaagacctttagaaaagcaatcaataagaaggaagggatttgtgcaatcggtggtacttcagagcagtctagcgttggcacccaacactcctattcagaggaagaaaagtatgcctttgtcaactggataaacaaagccctggaaaatgatcctgattgtcggcatgtcatcccaatgaacccaaacacgaatgatctctttaatgctgttggagatggcattgtcctttgtaaaatgatcaacctgtcagtgccagacacaattgatgaaagaacaatcaacaaaaagaagctaacccctttcaccattcaggaaaatct

SEQ ID NO: 5282 - DNA, 70 bp, Homo sapiens
  unsure (5): n=A,T,C or G
  unsure (10): n=A,T,C or G
  unsure (16): n=A,T,C or G
  unsure (19): n=A,T,C or G
  unsure (31): n=A,T,C or G
agaanctgcnaaagtnggngggagcgccccnggagaacaaacagcaagccttatttcccctagcccatcc

SEQ ID NO: 5283 - DNA, 484 bp, Homo sapiens
ccacattcattttgaagtaacctttccagccctggtggaaatccagtcggtctttctttaccgcctctgcctgtagatacttggcaatatgcttagggcagcggcggtttagggtacgctgcgagtcaaaataggtgatggtgcgtcgcctcacatcaacagagatgagggaccaatgcacctccaggtggatggggattagcagtagctccttattgaagatgtccacgtttttggtccaccttttcaccccatcataacccttggtacggagtttatcatagaagaaactattgaagaaatgcaccttttcagggactgtgtccatgaccaggtctccatacatgttcatcacctggtcattgagccagttctgtccatacaaggtccccaagtcatccatggtcagcacatgccgcttataagccactcggaagcccctcaccatggcattgcctggcatccgctggtaagactggatcag

SEQ ID NO: 5284 - DNA, 298 bp, Homo sapiens
  unsure (89): n=A,T,C or G
  unsure (99): n=A,T,C or G
  unsure (103): n=A,T,C or G
  unsure (122): n=A,T,C or G
  unsure (249): n=A,T,C or G
gcaagggaggacagtggatgacagggaagatgagtgggggcagagctgctcaggaccatggctgaggccatcacctatgcagatctgangtttgtgaangctnccctgaagaagagcatctncagccggttaggacaggacccgggggctgatgatgatggggaaatcacctacgagaatgttcaagtgcccgcagtcctaggggtgccctcaagcttggcttcttctgtactaggggacaaagcagcngtcaagtcggagcagccaactgcgtcctggagagccgtgacgtcaccag

SEQ ID NO: 5285 - DNA, 439 bp, Homo sapiens
ctgccgctcatccaccatcagtgactttgtgctgttatcattcatgtgcaccttgacgacgagcttcttaaccttggcctccttcagtttttccagcgccagcttaattttatcagccttggcttgggcttcttcctcttcctgagagagaggttcaggaggtggtggtggcagtggaaggtctaacacaggatcggctggtggaggtggtaagtcatcctcatattggctgataccagtggcagcaacatttgttccataaccaagagaggctgcaccactgaaaattgatgcttgtagagatgctgaatgatgttgattctgcaaggactctttctgtgcctggattgtcctctgctcagcctcacttatgtctgctaccagatctgccatgagagcatctaaatcttggtcttccagtgcatttaaggactcattt

SEQ ID NO: 5286 - DNA, 257 bp, Homo sapiens
  unsure (12): n=A,T,C or G
  unsure (14): n=A,T,C or G
  unsure (37): n=A,T,C or G
  unsure (51): n=A,T,C or G
  unsure (57): n=A,T,C or G
  unsure (70): n=A,T,C or G
  unsure (79): n=A,T,C or G
  unsure (81): n=A,T,C or G
  unsure (87): n=A,T,C or G
  unsure (89): n=A,T,C or G
  unsure (95): n=A,T,C or G
  unsure (121): n=A,T,C or G
  unsure (128): n=A,T,C or G
  unsure (129): n=A,T,C or G
  unsure (157): n=A,T,C or G
  unsure (165): n=A,T,C or G
  unsure (219): n=A,T,C or G
  unsure (242): n=A,T,C or G
ccaaaaacaatnanggtcataaccatccatgcagacntggaggctcggctnaaccangactcctcactgnctacctgananaatgancncccctnatccatctcagcatcaacacaatttncaggggnnctcaggtctacctcaggactgaacgccncacctcangattcctcctccttgaatctgagactggctgcccattctgagatggggatgaangtaagatgccgcatcaccaggcncgccgcccctgacag

SEQ ID NO: 5287 - DNA, 496 bp, Homo sapiens
ccaacaggagcctgacagcaacaaggagattgagagctttgcccgccgcacctacagtgtctcattccccatgtttagcaagattgcagtcaccggtactggtgcccatcctgccttcaagtacctggcccagacttctgggaaggagcccacctggaacttctggaagtacctagtagccccagatggaaaggtggtaggggcttgggacccaactgtgtcagtggaggaggtcagaccccagatcacagcgctcgtgaggaagctcatcctactgaagcgagaagacttataaccaccgcgtctcctcctccaccacctcatcccgcccacctgtgtggggctgaccaatgcaaactcaaatggtgcttcaaagggagagacccactgactctccttcctttactcttatgccattggtcccatcattcttgtgggggaaaaattctagtattttgattatttgaatcttacagcaacaaataggaactcctgg

SEQ ID NO: 5288 - DNA, 628 bp, Homo sapiens
  unsure (602): n=A,T,C or G
  unsure (624): n=A,T,C or G
cctcagggcctcttctggaaaatgaagaaattcaactagtagattcctgaggtccccctagcttaaaaaaaaaaaaaaaatctgccccatgattctaacactcgcagtagtgatagtgtatctagttgttctgctggtgtccttccttggctaagtcttggccttcagttatcttcaaatgtaccagaacctgagccaacgcctccctgtgaaactgttgctgatctgtagtacagtaccaggaagaaacctcttttgttctctttagacatcttctacttgctcttggccttgagatcgtgtaacaaaatgaaggagggctctcttctttcttcctcatcctactcaaaaacttcccgagagcagtggtggttttgagggttttgacttctattacttttggcagcctggaaagttgtgtcttctgggaaagagacccggggaggccaggagtagctgagggtcctttctgtgcccttaaaccgcccagaggagccctattccactctggttttaggctgatctgagagggtctccctttgctcctttctggagcatttctctaacgtttattacaattaggagggggaccccacatctgngagattctgtttcatttgaggnttac

SEQ ID NO: 5289 - DNA, 611 bp, Homo sapiens
ctggacacagacacttccccagccccagggccagagtggggctggagggaaggacagggctacagtagtagtgggggtatatgagggaaggctgcaaggatgtggtagctggagttttgagagatggataagagttttccaaggaggcaaaagtggcagaaaagctttgcaggtgaggaggagcagcagaagcttaacctgcatgagaatccctctcaccagtcagaaagttgaccctgcacagccaaggggtaagctctgaccattttgcaggggacagaactgagacccagagagggaaaggaacttgcccactgtcacactgcatggaaggggcaaaactgtaggctccaatacttgggctcttaacctccttactctgagccttctcacgcttggcatgctgttccctctgccaggaatgcctttccttcccttgattgcgtgaaaagttcctgccaggtttggtgtcatccctttgtgccccttgtagggtgaggacagaaagggtcccattggacaggtgggaaaactgaagccctaggacactcagataccattagggtggactgggaccccagcctttcctgccccctttcaggatcccaaag

SEQ ID NO: 5290 - DNA, 597 bp, Homo sapiens
  unsure (526): n=A,T,C or G
ccattgcccgggcccttgtacgagacccgcgggtcctcatcctggatgaggctactagtgccctagatgtgcagtgcgagcaggccaatgggttctgggtgggtcccctgggtggtggctctgctagtgaatctgacccgactggattcctccatgactcaaggcacagactctccagtgatgtggggatgtttgtggcattgaccaagctggggcagccagatgctgagcagtggaacagccggctggatctcttggagaggagcagacaggccgtggatggggtctgtagacacaactacaggctgggcgcacccttcactgtggggagaaaagtgcaaccagaggtgacagtgtacccagagaggaccccactcctgcaccagcataatctgctgcactgctctgtgacaggcttctatccaggggatatcaagatcaagtggttcctgaatgggcaggaggagagagctggggtcatgtccactggccctatcaggaatggagactggacctttcagactgnggtgatgctagaaatgactcctgaacttggacatgtctacacctgccttgtcgatcactccagcctgctga

SEQ ID NO: 5291 - DNA, 590 bp, Homo sapiens
  unsure (505): n=A,T,C or G
aaaggatttattttccagcagtcctgaggggcaaggacaggacaggagggagaaggagatcccaggacgcttgagggccccgttcatgggcagtaggcagattcgtccttctagtgcctgtggcaggcaggttgaccctgggttcgggagggacacaggccctggatgacactgagctggatgcctaggcagtgtcactccccacactttcaacctgagccccacagcaagcctataaggtgaacattctcactgtgatttgtcaggctgggttcagggagtgaaatggcctcctccaattccacaggttcaaataccctgcagagcggcaccagcctccctcagaaaggaccagacacttgtaacatttatgtcctttacctgggacactgctgtcccatacttgctgtatgaaaagaatatttctcaagaggaagaggaagccaggcgcagtgactcacgcctgtaatcccagcactttgggaggctgagccaggaggatcgnttgagcccaggagtttgagaccagcctgggtaacatggcaaaaccccgtctctacaaaaatcagccagaaaggcatagatagacc

SEQ ID NO: 5292 - DNA, 369 bp, Homo sapiens
ctgcaggaggcgctctgagtcagcctggaggaggcaggacttgctggtggacaccacctcaaagcagaaccgcctttctgagtcagggtagagtttcactgtgcagagacgaaggtcatccaccaccacagtcacagggtccttgtacttcttctggtaaaccagttggttgctctgaatggtgaaccagcgtctgctccaggtcttaaatgcgttgctggcccgtttgaagagatgtccttccatcaccaggccaccaggcccctctcttaagcttggttctggctcctccccacccagctccttctgtttcagcagcacgtgtctctgctccatgcccctcttctctcgtgctgaattcaagaccag

SEQ ID NO: 5293 - DNA, 608 bp, Homo sapiens; identical to SEQ ID NO: 249

SEQ ID NO: 5294 - DNA, 333 bp, Homo sapiens
  unsure (9): n=A,T,C or G
ccagtacanatctttgagaggtctgtgtacagtgacaggctccactttgaggctctgatgaacattccagtgctggtgttggatgtcaatgatgatttttctgaggaagtaaccaaacaagaagacctcatgagagaggtaaacacctttgtaaagaatctgtaaccaataccatgatgttcaggctgtgatctgggctccctgactttctgaagctagaaaaatgttgtgtctcccaaccacctttccatccccagcccctctcatccctggagcactctgccgctcaagagctggtttgttaattattgttagactttgccattgttttct

SEQ ID NO: 5295 - DNA, 345 bp, Homo sapiens; identical to SEQ ID NO: 4886

SEQ ID NO: 5296 - DNA, 581 bp, Homo sapiens; identical to SEQ ID NO: 654
  unsure (532): n=A,T,C or G
  unsure (574): n=A,T,C or G

SEQ ID NO: 5297 - DNA, 574 bp, Homo sapiens
ctcagcaatcagactgtcgacattccagaaaatgtcgacattactctgaagggacgcacagttatcgtgaagggccccagaggaaccctgcggagggacttcaatcacatcaatgtagaactcagccttcttggaaagaaaaaaaagaggctccgggttgacaaatggtggggtaacagaaaggaactggctaccgttcggactatttgtagtcatgtacagaacatgatcaagggtgttacactggagaatgggtctcttgttgaaatccgaaatttcttgggtgaaaaatacatccgcagggttcggatgagaccaggtgttgcttgttcagtatctcaagcccagaaagatgaattaatccttgaaggaaatgacattgagcttgtttcaaattcagcggctttgattcagcaagccacaacagttaaaaacaaggatatcaggaaatttttggatggtatctatgtctctgaaaaaggaactgttcagcaggctgatgaataagatctaagagttacctggctacagaaagaagatgccagatgacacttaagacctacttgtgatattt

SEQ ID NO: 5298 - DNA, 547 bp, Homo sapiens; identical to SEQ ID NO: 583
  unsure (8): n=A,T,C or G
  unsure (9): n=A,T,C or G
  unsure (516): n=A,T,C or G
  unsure (522): n=A,T,C or G

SEQ ID NO: 5299 - DNA, 531 bp, Homo sapiens
aaaattatttcttgaatctctccatacacaggcaaaaataagtgtgttacttaacatactggaaattgcctaacttaatcattgcctaaagaagagaaaattatccccaaaacgtgcttaaccaggaggccaatgcatttgccgacctccaagaacatggagatgaacgtgatagacagactgtccaccatctgaaccttcattcaccaccattcgataacccttattcaggcccagatcagcagcacatttcttgccaacaatcattaagtgtccaagaagactttcatcatcatcttctgccacagaaatctgggatatatgtttcttgggtatcaccagaaaatgtgttggtgcttgaggggaaatgtcatggaaagcaaggcaccggtcatcctcaaaaatgattttggctggtatttccttgcggatgatcttcccaaagatcgtgtcgccaccaggccgagcgacctgagccttggcaatctcatctgccatctcggcctctctcccgcgcggcggccagaggag

SEQ ID NO: 5300 - DNA, 246 bp, Homo sapiens
ctgagctggggatactcaggtcctggggtgctgaggagatggggctgcatctggagagggtgctgttggggtgtactctcatctggagagggtgctgttggggtgtactctcatctggagaaggtgctgttggggtgtactctcatctggagagggtgctgttgggggcactcccatctggagagggtgctgttggggtgtactcctgggaaggcaggggccatagaggagcgggagatgtgtcag

SEQ ID NO: 5301 - DNA, 410 bp, Homo sapiens
cctttgaccaggttcacgaagttctccaccgacttggcaatggttgggtgctctgcagcacattccatcaggattgactccaggagctgcatgtactgctcgtcgcctcggcccccttctacctcgtggtccagcttcaggatgatttcgttttcaaactttttgaaatccccacttctttgatattcacacagcatcatgtcgaagaagattggtatggtggctttccggagctcagcctcagggataagtgtcatctctaatataggtcctaccatgcctgggatgaagcagattttgttctgaccaagcttgtaccacatatcacggatggagaagccaattagccgtctcatgtccccatacttattcaggattttgttgtatttggcgtgtgagaactgctccag

SEQ ID NO: 5302 - DNA, 424 bp, Homo sapiens
  unsure (37): n=A,T,C or G
  unsure (83): n=A,T,C or G
  unsure (90): n=A,T,C or G
  unsure (139): n=A,T,C or G
  unsure (141): n=A,T,C or G
  unsure (145): n=A,T,C or G
  unsure (160): n=A,T,C or G
  unsure (209): n=A,T,C or G
  unsure (215): n=A,T,C or G
  unsure (228): n=A,T,C or G
  unsure (237): n=A,T,C or G
  unsure (251): n=A,T,C or G
  unsure (261): n=A,T,C or G
  unsure (266): n=A,T,C or G
  unsure (281): n=A,T,C or G
  unsure (291): n=A,T,C or G
  unsure (307): n=A,T,C or G
  unsure (309): n=A,T,C or G
  unsure (315): n=A,T,C or G
  unsure (359): n=A,T,C or G
  unsure (414): n=A,T,C or G
tacaagcttttttttttttttttttttttttttttgntttttttttttggatctcttaaagggaatttattgcttccatgganattttanatcgatgttactgaggaattaggtagctgggcggcttaccccaggcatntnttantaggtaacacctganaaaagaaaaaaaaatcaggaggtcagggaaagaattcaaaggcatttgngagctntgaggggatacanaagcttaanaaaaaaaagcaganaaaaggtaanagganaaacatttgcagganaaaaagggtntgataaatcgggccananaatagngctaggtcatgtagcaagtccactcttccgctgctgtaaatggngatgcaccttccttttcaggatgggattcacaagggcccttggtgtctggaagcnccaactgaac

SEQ ID NO: 5303 - DNA, 263 bp, Homo sapiens
cctaggaaatctgtgagggaatccccaggggaatctcgtgaccagccaggtgtgaaatctgctaactggaagatctcaaagcttccttcactttttgtgattttgtggtcatgtaacgttactgtattattctacgtaaatgtgggtacttggatgtttatcatactgtttctctgtgtttacatactaatttgtgtaagaaatgcattttagtctgtgtacctcaacctgctgtttgtttcctagaggtgttagtagtcttt

SEQ ID NO: 5304 - DNA, 606 bp, Homo sapiens
  unsure (525): n=A,T,C or G
ccaggacccctggcggacatggcacccacaaggaaggacaagctgttgcaattctaccccagcctggaggatccagcatcttccaggtaccagaacttcagcaaaggaagcagacacgggtcggaggaagcctacatagaccccattgccatggagtattacaactgggggcggttctcgaagcccccagaaggtgaggcgaaggacaaagccggaggtggaggaagtggtgtgggagctcagggcagaagccatacctccaggcaggagaggaggctgggcctgggttcggatgatgatgccaattcctacgagaatgtgctcatttgcaagcagaaaaccacagagacaggtgcccagcaggagggcataggtggcctctgcagaggggacctcagcctgtcactggccctgaagactggccccacttctggtctctgtccctctgcctccccggaagaagatgaggaatctgaggattatcagaactcagcatccatccatcagtggcgcgagtccaggaangtcatggggcaactccagagagaagcatcccctggcccggtgggaagcccagacgaggaggacggggaaccggattacgtg

SEQ ID NO: 5305 - DNA, 536 bp, Homo sapiens
ccagggccacaacttcttctgtcgtggggaagagggatgaaaagacaagaccagggctggagctggggtggaagaggggagggggacactggctgcattcccccgcccccaggaagcacctctaggccctggacccctcgctcaccctggcccctaagactccatctcttctctgcctctggccctcctggctcttcctcctgctccccttgactttttcccctgacagattctcaagtaggacgatgttcagggcctgaccccaaccccccataccaccttatgaaggtacaacctttaccggccctgcttctgcccctcctcaaacctcaccgctttccctctttgggacagctctgatccccctccttcctctcctccctccccctggaaaaaaaaaaggaaaagaaagcaccaactccccggggaggggctgcagacagcagggggagaggactggaaggagagaagaggaccgtcgagggaagaggctcacaagtccctgggaagacagggcatgggcttacagagaggag

SEQ ID NO: 5306 - DNA, 400 bp, Homo sapiens; identical to SEQ ID NO: 250

SEQ ID NO: 5307 - DNA, 493 bp, Homo sapiens
ccagggatcagtctcatggccgtagaagcagccaaattcctctgcctttgccttcccttcaggagtcacatgctaaggcatccttgggcatttggaaaaggccgcttggggtgagagtgctctaggccactctgcaatgtccctgggcccgatgagtaacaaatgcaccccgggacccagagaagtggaaagacatgaaagggatttggaaacagatcgtaaaaataacctgtatgaaaatcacacagacaagaaaacaaacaaatccagctagccccttggatcctgccatccgtcttttctcccgggactgcctttgctttgtggagggtgagtcctgggacaggctttgggtgacaagttgtgggcatgttccatccaagcctggctctcccgactggcagagggaggtggctgacaatcaattcctctggatacattttcctgtgattgctcctgtgatcaaaggcagccaccgacaggtgcgggagcg

SEQ ID NO: 5308 - DNA, 393 bp, Homo sapiens; identical to SEQ ID NO: 251

SEQ ID NO: 5309 - DNA, 361 bp, Homo sapiens; identical to SEQ ID NO: 5108

SEQ ID NO: 5310 - DNA, 620 bp, Homo sapiens
ctgagggaggggtcagggtgggtgcgcggtgacggggagggcaaaggtggtgtcagtatcttcattttgaggattggggttcagagcacttctggggtgtcagctcctccttgtccccccgtggggctccgtaggactggaaagaggacatgaagagctctgacagagagcagcagaaactctggaactgtttccagagggcctgcactgcatggaccagggccaccaccttctccttcacccaggccagaaccccgtgccaccaggtctgcagccgctgcagcatggcctggaaccatctcatgaccttgtcacaaaagctctccccaggctcctcggttgcgggatcctcaacatccgggacaggggatctgttgcctcggcaccgtaatccatctctttctttttcaagtagaggagtgagctctgggtgctgctcctcataataagccgccactgtctccaggtagccctctttgaagtcgtcctccagctctgccaggctcgacatcacctgtccacgtcctgattctgcattttgcattttatcataaaatctttctatggcctggtgcattcgggccttcagcttcttcatgtcatcagagaggaccttcggg

SEQ ID NO: 5311 - DNA, 514 bp, Homo sapiens
  unsure (68): n=A,T,C or G
  unsure (71): n=A,T,C or G
  unsure (75): n=A,T,C or G
  unsure (81): n=A,T,C or G
  unsure (84): n=A,T,C or G
  unsure (91): n=A,T,C or G
  unsure (94): n=A,T,C or G
  unsure (102): n=A,T,C or G
  unsure (104): n=A,T,C or G
  unsure (108): n=A,T,C or G
  unsure (153): n=A,T,C or G
  unsure (164): n=A,T,C or G
  unsure (185): n=A,T,C or G
  unsure (212): n=A,T,C or G
  unsure (216): n=A,T,C or G
  unsure (226): n=A,T,C or G
  unsure (251): n=A,T,C or G
  unsure (279): n=A,T,C or G
  unsure (281): n=A,T,C or G
  unsure (313): n=A,T,C or G
  unsure (324): n=A,T,C or G
  unsure (333): n=A,T,C or G
  unsure (347): n=A,T,C or G
  unsure (407): n=A,T,C or G
  unsure (413): n=A,T,C or G
  unsure (415): n=A,T,C or G
  unsure (434): n=A,T,C or G
  unsure (442): n=A,T,C or G
  unsure (450): n=A,T,C or G
  unsure (462): n=A,T,C or G
  unsure (469): n=A,T,C or G
  unsure (472): n=A,T,C or G
  unsure (475): n=A,T,C or G
  unsure (488): n=A,T,C or G
ttttttttttttttttttttttttttttttttattttttttttttttttgctttcatgtttattaaanaanatcnctaaanatnttgactnganaatgctgngngctntttcaattacatttgtttttcttttattaacaggaattttgattnttcaaggaagnggctcaatttcaatttcaggngaccaggtttatcgggacttttccttnttgnttacttttcnctaggaaggggagttgtaggggcanattcaggttttggaataggaaaattacntntaaaccatggaaatcttggaaatggaattggnggaagtgggcnaaatggatntgggtaagggaacncaaaaaaccctgaagctaattcatcgctggcactgatacttcttttttctcgttcctggncttgananactgggaaaccaacagccnctgccaanatggctgngatcaggagganaactttnttnatntcaaacgtttcantcagttaccttgggcgggaacacgct

SEQ ID NO: 5312 - DNA, 588 bp, Homo sapiens; identical to SEQ ID NO: 402

SEQ ID NO: 5313 - DNA, 571 bp, Homo sapiens
  unsure (561): n=A,T,C or G
aaatggttctggcaaactgctcaagattacaggctgtgccagccctggaaaaacagttacaattgttgttcgtggttctaacaaactggtgattgaagaagctgagcgctccattcatgatgccctatgtgttattcgttgtttagtgaagaagagggctcttattgcaggaggtggtgctccagaaatagagttggccctacgattaactgaatattcacgaacactgagtggtatggaatcctactgcgttcgtgcttttgcagatgctatggaggtcattccatctacactagctgaaaatgccggcctgaatcccatttctacagtaacagaactaagaaaccggcatgcccagggagaaaaaactgcaggcattaatgtccgaaagggtggtatttccaacattttggaggaactggttgtccagcctctgttggtatcagtcagtgctctgactcttgcaactgaaactgttcggagcattctgaaaatagatgatgtggtaaacactcgataatctggataactgactagcaccattatgatcaccagtattgnggctggaatg

SEQ ID NO: 5314 - DNA, 637 bp, Homo sapiens
  unsure (619): n=A,T,C or G
atcgctgtgtcttgttccgccccctccctgacaccccagcttcccaggatgtggaaagcctggatctcagctccttgccccatatcccttctgtaatttgtacctaaagagtgtgattatcctaattcaagagtcactaaaactcatcacattatcattgcatatcagcaaagggtaaagtcctagcaccaattgcttcacataccagcatgttccatttccaatttagaattagccacataataaaatcttagaatcttccttgagaaagagctgcctgagatgtagttttgttatatggttccccaccgaccatttttgtgcttttttcttgttttgttttgttttgactgcactgtgagttttgtagtgtcctcttcttgccaaaacaaacgcgagatgaactggacttatgtagacaaatcgtgatgccagtgtatccttcctttcttcagttccagcaataatgaatggtcaacttttttaaaatctagatctctctcattcatttcaatgtatttttactttaagatgaaccaaaattattagacttatttaagatgtacagacatcagaaaaaagaagcacataatgcttttggtgcgatggcactcactgngaacatgtgtaaccacat

SEQ ID NO: 5315 - DNA, 255 bp, Homo sapiens
ctgcatggtgagctgcagagtggtcagaggggctggggccctgccaagagagcaaggccagacctgcccagcgggaggcaggaaggccctgatccagcaaggagaagtagaggaagtccacagccacctctgttactcatcgctactgggacatctggggacaggctctgttcttgggagagcaggccaccaggatttgtagggctgcctgccggtgacagacacgtaagtcacagggagaggccgggatccagg

SEQ ID NO: 5316 - DNA, 108 bp, Homo sapiens
  unsure (8): n=A,T,C or G
  unsure (18): n=A,T,C or G
ccctggcnaactgctcangattacaggattatggaaaggcaaagtatatacagtaatgtgagagaaactcaaaccaagtaagggtaaaaatgaaatgattaacaccac

SEQ ID NO: 5317 - DNA, 546 bp, Homo sapiens
ctgtggccctggatacggagatccctaatgagcttccatacaatgactactttgaatactttggaccagatttcaagctccacatcagtccttccaatatgactaaccagaacacgaatgagtacctggagaagatcaaacagcgactgtttgagaaccttagaatgctgccgcacgcacctggggtccaaatgcaggcgattcctgaggacgtcatccctgaggagagtggcgatgaggacgaagacgaccctgacaagcgcatctcgatctgctcctctgacaaacgaattgcctgtgaggaagagttctccgattctgaagaggagggagaggggggccgcaagaactcttccaacttcaaaaaagccaagagagtcaaaacagaggatgaaaaagagaaagacccagaggagaagaaagaagtcaccgaagaggagaaaaccaaggaggagaagccagaagccaaaggggtcaaggaggaggtcaagttggcctgaatggacctctccagctctggcttcctgctgagtccctcacgtttct

SEQ ID NO: 5318 - DNA, 425 bp, Homo sapiens; identical to SEQ ID NO: 252

SEQ ID NO: 5319 - DNA, 459 bp, Homo sapiens
ctggaacagtatatgaagacctgaggtataagctctcgctagagttccccagtggctacccttacaatgcgcccacagtgaagttcctcacgccctgctatcaccccaacgtggacacccagggtaacatatgcctggacatcctgaaggaaaagtggtctgccctgtatgatgtcaggaccattctgctctccatccagagccttctaggagaacccaacattgatagtcccttgaacacacatgctgccgagctctggaaaaaccccacagcttttaagaagtacctgcaagaaacctactcaaagcaggtcaccagccaggagccctgacccaggctgcccagcctgtccttgtgtcgtctttttaatttttccttagatggtctgtcctttttgtgatttctgtataggactctttatcttgagctgtggtatttttgttttgtttttgtctttt

SEQ ID NO: 5320 - DNA, 603 bp, Homo sapiens; identical to SEQ ID NO: 404
  unsure (511): n=A,T,C or G
  unsure (514): n=A,T,C or G
  unsure (549): n=A,T,C or G
  unsure (572): n=A,T,C or G

SEQ ID NO: 5321 - DNA, 603 bp, Homo sapiens; identical to SEQ ID NO: 253

SEQ ID NO: 5322 - DNA, 397 bp, Homo sapiens
gaaagagtaaaaccttttatgacaggggctgcagaacaaatcaagcacatccttgctaatttcaaaaactaccagttctttattggtgaaaacatgaatccagatggcatggttgctctattggactaccgtgaggatggtgtgaccccatatatgattttctttaaggatggtttagaaatggaaaaatgttaacaaatgtggcaattattttggatctatcacctgtcatcataactggcttctgcttgtcatccacacaacaccaggacttaagacaaatgggactgatgtcatcttgagctcttcatttattttgactgtgatttatttggagtggaggcattgtttttaagaaaaacatgtcatgtaggttgtctaaaaataaaatgcattt

SEQ ID NO: 5323 - DNA, 595 bp, Homo sapiens; identical to SEQ ID NO: 587

SEQ ID NO: 5324 - DNA, 444 bp, Homo sapiens
ctggaggggcagagaggccagggccaatgggagaggctgaaaagggggcagtacttgcccagggtcagggagatggtactgtttccaaaggaggaaggggccccggttcccagcataccaaagaagcagaagataaaattcccttggtcccctcaaaagtgagtgtcatcaagggcagcagaagccaaaaggaggcttttcctttggcaaagggagaggtagacactgcaccacagggtaataaagacttaaaggagcatgtgcttcaaagttccttatcccaggagcataaagacccaaaagcaacacccccatgatacaggtctgtggggaagagtgtttatatccctacgttaactttgcctagtagaggcccttctttgcacttgcttctcatttggctattcttttcctaaggaagtccattctcctctgtacagacag

SEQ ID NO: 5325 - DNA, 386 bp, Homo sapiens
ctcttctccggctccctgcccctccagattgcctggtgatctattttgtttccttttgtgtttctttttctgttttgagtgtctttctttgcaggtttctgtagccggaagatctccgttccgctcccagcggctccagtgtaaattccccttccccctggggaaatgcactaccttgttttggggggtttaggggtgtttttgtttttcagttgttttgtttttttgttttttttttttcctttgccttttttcccttttatttggagggaatgggaggaagtgggaacagggaggtgggaggtggattttgtttatttttttagctcatttccaggggtgggaatttttttttaatatgtgtcatgaataaagttgtttttgaa

SEQ ID NO: 5326 - DNA, 272 bp, Homo sapiens
  unsure (47): n=A,T,C or G
  unsure (73): n=A,T,C or G
  unsure (105): n=A,T,C or G
  unsure (110): n=A,T,C or G
  unsure (142): n=A,T,C or G
  unsure (163): n=A,T,C or G
  unsure (193): n=A,T,C or G
  unsure (203): n=A,T,C or G
  unsure (243): n=A,T,C or G
  unsure (253): n=A,T,C or G
cacacattcaccgttggcctgcctctgttcaccctccatggccctgntactggccctcagcctgctggttctntggacttccccagccccaactctgagtggcancaatnatgctgaagactgctgcctgtctgtgacccanaaacccatccctgggtacatngtgaggaacttccactaccttctcatcaangatggctgcngggtgcctgctgtagtgttcaccacactgaggggccgccngctctgtgcncccccagaccagccctggg

SEQ ID NO: 5327 - DNA, 307 bp, Homo sapiens
aaatattttttacacagatttgatgctgtgcaaatgccctctccccttttaggtgttgcttgttcagtatctcaagcccagaaagatgaattaatccttgaaggaaatgacattgagcttgtttcaaattcagcggctttgattcagcaagccacaacagttaaaaacaaggatatcaggaaatttttggatggtatctatgtctctgaaaaaggaactgttcagcaggctgatgaataagatctaagagttacctggctacagaaagaagatgccagatgacacttaagacctacttgtgatattt

SEQ ID NO: 5328 - DNA, 600 bp, Homo sapiens
ctgtgcttttcacatcaagttggcttagttcttggaggaaagtcttagtgactaaaattgtacacagatcacaagacaagagaactagtctaacaaattcaataagaaatcaggacaactgtagactatataaaaactgtcttagaaaattatttacaactttatcatagtgtaaatactctaaatgtaaaataaatctatggattttatacaaaaatactctaaagtacaaatgtaagttaaatgctgaataaaacattttcaccttttccagtggatgctattactaagactataatctaggtgtcaaaacttaaagtgataaccacaaagcaatgttttcttaatcactcataattttacatttgttagtagtcatcacaaggtttagagttccactgaaaaagtctcatttttacaaatgcaactcatgcactttccttcatggaccctttctctgtttaacacatgttaaaaaagtaaaacaaaattcttagtcaaaagttgacatgctatgtgaagcatataaattgtaaaattatcagtcttaaatacctagttgattctctttacaaaagaaacagtcatgtaatacatcag

SEQ ID NO: 5329 - DNA, 232 bp, Homo sapiens
aaacaagttagtattaatgcgttggcccacgtagcaaaaagatatttgattatcttaaaaattgttaaataccgttttcatgaaagttctcagtattgtaacagcaacttgtcaaacctaagcatatttgaatatgatctcccataatttgaaattgaaatcgtattgtgtggctctgtatattctgttaaaaaattaaaggacagaaaccataaaaaaaaaaaaaaaaaaa

SEQ ID NO: 5330 - DNA, 442 bp, Homo sapiens
  unsure (62): n=A,T,C or G
  unsure (66): n=A,T,C or G
  unsure (109): n=A,T,C or G
  unsure (120): n=A,T,C or G
  unsure (141): n=A,T,C or G
  unsure (170): n=A,T,C or G
  unsure (176): n=A,T,C or G
  unsure (185): n=A,T,C or G
  unsure (189): n=A,T,C or G
  unsure (202): n=A,T,C or G
  unsure (220): n=A,T,C or G
  unsure (230): n=A,T,C or G
  unsure (238): n=A,T,C or G
  unsure (241): n=A,T,C or G
  unsure (248): n=A,T,C or G
  unsure (250): n=A,T,C or G
  unsure (286): n=A,T,C or G
  unsure (311): n=A,T,C or G
  unsure (323): n=A,T,C or G
  unsure (352): n=A,T,C or G
  unsure (357): n=A,T,C or G
  unsure (358): n=A,T,C or G
  unsure (381): n=A,T,C or G
  unsure (387): n=A,T,C or G
  unsure (413): n=A,T,C or G
  unsure (420): n=A,T,C or G
  unsure (421): n=A,T,C or G
  unsure (424): n=A,T,C or G
acaagctttttttttttttttttttttttttttttttgattcttcagctaaaacagcggaanaggngatttattatatggttgttacactcggccacaaataaacacanaaatagtccanaatgtcacaggtccagggcanaggaccaacatgggcattttgtttatgancaaggngggtctcanaggngatcggcgatcanagggcgatgaagttctanatccattganacaagctntanacagtantntgcagtcccacaacttgtaccagcatccccagcgtntggcattccatgtttctgctcctgnggcctccacggngcaacaagctagcggtttacttggacctntgccnnatctttcttcttttgcgcttcancctgcncattcgcttcttcctccacttggctntcatggnncanaggtttccaaaaaaatgg

SEQ ID NO: 5331 - DNA, 114 bp, Homo sapiens
  unsure (37): n=A,T,C or G
  unsure (43): n=A,T,C or G
  unsure (78): n=A,T,C or G
  unsure (89): n=A,T,C or G
ctttttttttttttttttttttttttttttttcgggngcaaanattcactttatttattcattctcctccaacattancataattaaanccaaggaggaggaggggggtgaggt

SEQ ID NO: 5332 - DNA, 483 bp, Homo sapiens
  unsure (15): n=A,T,C or G
  unsure (17): n=A,T,C or G
aaatctttgcctttnanatacaggaaaaataatggcattaaattgctttaatttgcattattttagttatccagtttgcacatatttttataggtatcttaggcatcgattggtattttttaactgggccaagcccattaaggtctttcttctgttgggtgctatcattttctgattaagtctttttgactattgacatacagtctttcacagatggtggagtgtttttcccccaaatctgttgtttgtcttataatgttgtatatgaggttttatggtgtatgaatatgaatgcttctgtaatgtcaaacagatccctagtaaactccttcttcacttttactgtcagatttacaaaggtcctcccattgcaaagcagtgtttgtcctaatttatatattgtttttctagttcattttgtgtttccaacttttcatgtaaaattttaattatttttgaatgtgtggatgtgagactgaggtg

SEQ ID NO: 5333 - DNA, 319 bp, Homo sapiens
ccaagggtctctggtcacagtgccgaggtgggcctggcttttccacagtggagtccattgatgattacgtgaacgttccggagagcggggagagcgcagaagcgtctctggatggcagccgggagtatgtgaatgtgtcccaggaactgcatcctggagcggctaagactgagcctgccgccctgagttcccaggaggcagaggaagtggaggaagagggggctccagattacgagaatctgcaggagctgaactgagggcctgtggaggccgagtctgtcctggaaccaggcttgcctgggacggctgagctgggcag

SEQ ID NO: 5334 - DNA, 593 bp, Homo sapiens
ccacttttttttttctgtaaacctcaaatgaaacagaatctcacagatgtggggtccccctcctaattgtaataaacgttagagaaatgctccagaaaggaacaaagggagaccctctcagatcagcctaaaaccagagtggaatagggctcctctgggcggtttaagggcacagaaaggaccctcagctactcctggcctccccgggtctctttcccagaagacacaactttccaggctgccaaaagtaatagaagtcaaaaccctcaaaaccaccactgctctcgggaagtttttgagtaggatgaggaagaaagaagagagccctccttcattttgttacacgatctcaaggccaagagcaagtagaagatgtctaaagagaacaaaagaggtttcttcctggtactgtactacagatcagcaacagtttcgcagggaggcgttggctcaggttctggtacatttgaagataactgaaggccaagacttagccaaggaaggacaccagcagaacaactagatacactatcactactgcgagtgttagaatcatggggcagatttttttttttttaagctagggggacctc

SEQ ID NO: 5335 - DNA, 568 bp, Homo sapiens; identical to SEQ ID NO: 255

SEQ ID NO: 5336 - DNA, 485 bp, Homo sapiens; identical to SEQ ID NO: 254

SEQ ID NO: 5337 - DNA, 546 bp, Homo sapiens
ctggaactgaagcctgggtggactatggagccctggttgggacccccagggagtcaaaggctgcgggccaagaggccagaggtccttgagcctgggtgggcaggtggatctagggtgcatgacttgctgcttcccaaccttagtttgtcccttctgtgaaaaagggagagaaggaggaggaagatctcaaaaagactttccagcccagtgcggtggctcacgcctgtaatcccagcactttgggaggccgatgcaggtggatcacctgaggtaggagttcaagaccagcctgaccaacatagtgaagccccttctctactaaaaatacaaaattagctgggcgtggtggcatgtgcctgtactcccagctacttgggaggctgaggcaggagaatcgcttgaacctgggaggcggaggttgtagtgagctgagatcacaccactgcacaccagcctgggcgacaagagcgaaactccgtctcaaaaaaaaaaaaaaaaactgttgcagccccgttgagcctttgacaccgcctgaaatccacccca

SEQ ID NO: 5338 - DNA, 578 bp, Homo sapiens; identical to SEQ ID NO: 406

SEQ ID NO: 5339 - DNA, 475 bp, Homo sapiens; identical to SEQ ID NO: 4646

SEQ ID NO: 5340 - DNA, 450 bp, Homo sapiens
cgagcttctcgatcctcttggaggaatgggggtagtctttcctttgatgctgctgtggccctagcccgggaccgccaaaggactgaggctcaaggagttcggcgaacccagacctgtactgagggtggggattactgcctcatccccagaacctccccttgtagcatgatctctgcccattctcctcggccccttagctgcctggagctcccatctgaaggtgcagaagggtctggatcccggagtcgtcttagtctgccccccagagaaccccaggttcctgaccccctgttgtcctctcagcgcaggtcatatgcatttgaaacacaggctaaccctgggaaaggtgaaggactgtgattaggaccacagccctgggcaaaggggaccagcaagttgtcttgaatctccagggttcctgactagctgtctcctctgcagcatgagcag

SEQ ID NO: 5341 - DNA, 293 bp, Homo sapiens
cctacagcattccatcagtgtctttgcatcccaagtgtctgctttactgccacaaaggagctgatccagttcctccgggtagaagtactgaagatgactgagtgggaagactgattcaaatccatctctgaacgaatcaaattgcctagaaacgccttcatttagtgcccagaatataaccagtcttagatactcctctaaattgtggatagtgactggtatatccttccctcctttcttcagttcgatattgggaaaccctggcagagtgaaatccagtcctagatcttcaa

SEQ ID NO: 5342 - DNA, 525 bp, Homo sapiens
  unsure (472): n=A,T,C or G
ctggaatcagaaaagcagcaaataatggaaaagcattatggcttcaatgaaatacttaagcatatcaatgaattgtccatgaaaattgatgtggaagatatactctgcaaggcagaagcaatttctctacagatggtaaaatgcaaggaattgccacaagcagtctgtgagatccttgggcttcaaggcagtgaagttacaacaccagattcagacgttggtgaagacgaaaatgttgtcatgactccttgtcctacatctgcatttcaaagtaatgccttgcctacactctctgccagtggagccagaaatgacagcccaacacagataccagtgtcctcagatgtctgcagattaacacctgcatgatcactgttcttgcttttttgggaagagacactttgttgcaaccctttttcaagtacttgaaagttgaaaatttgaaatcttggtattgatcatgctttaaggnttatgtaaagaaagtgtactgatgttcttacattaaagctttacaaagattta

SEQ ID NO: 5343 - DNA, 429 bp, Homo sapiens
  unsure (107): n=A,T,C or G
tcaaccccaacttcgtggcgcgtatgatacctaaagtggagtggtcggcgttcctggaggcggccgataacttgcgtctgatccaggtgccgaaagggccggttganggatatgaggagaattaggagtttctgaggaccatgcaccacctgctgctggaggtggaagtgatagagggcaccctgcagtgcccggaatctggacgtatgttccccatcagccgcgggatccccaacatgctgctgagtgaagaggaaactgagagttgattgtgccaggcgccagtttttcttgttatgactgcgtatttttgttgatctataccctgtttccgaattctgccgtgtgtatccccaacccttgacccaatgacaccaaacacagtgtttttgagctcggtattatatatttttttctcattaaaggttt

SEQ ID NO: 5344 - DNA, 125 bp, Homo sapiens; identical to SEQ ID NO: 408
  unsure (81): n=A,T,C or G
  unsure (82): n=A,T,C or G
  unsure (89): n=A,T,C or G
  unsure (95): n=A,T,C or G

SEQ ID NO: 5345 - DNA, 637 bp, Homo sapiens
cctgtattatacgtgtcctcctgggggttggagatgatccctcaagtacacaaaggtcccctggcccttcatctgggaatcatatactccactctagctcccagaatctacagacctggctcctcggatctgaagcccagcacaaaataatctccccgtccaaggagcttgtggaacttgaattgggaactttggagtcttgtctcccatcccagcacattgaggatgtagttggtgaatggactcttccaggcatggagatcctccatcctaaaagtacctgcctccttcccagccatccctgacacattccagccagttggatctcacagcacagctatccacagggagactgggatgttcacgcagcactccattactcagtacctccatacccagccctatacgcagacccacaggtggggaaactgaggcaggaacagggttctgccctcccagagcctccactctgggatgccagaatggaaagccagagggaacctgagaatcatccagtcttactgtctcaatgtacatacggggaaactgaagccaggagaagaagagggagaaactgtccagggcctcacagggaggcattcatggagctggagaaaccagggatcctgaccgcagg

SEQ ID NO: 5346 - DNA, 412 bp, Homo sapiens
ctgacattgataccagatctgaattctacaaacacattgtgctttctggagggtctactatgtatcctggcctgccatcacggttggaacgagaacttaaacagctttacttagaacgagttttgaagggtgatgtggaaaaactttctaaatttaagatccgcattgaagacccaccccgcagaaagcacatggtattcctgggtggtgcagttctagcggatatcatgaaagacaaagacaacttttggatgacccgacaagagtaccaagaaaagggtgtccgtgtgctagagaaacttggtgtgactgttcgataaactccaaagcttgttcccatcatacccgtaatgctttctttttcctttattgccaatctttgaactcattcaactccaggacatggaagagg

SEQ ID NO: 5347 - DNA, 518 bp, Homo sapiens; identical to SEQ ID NO: 256

SEQ ID NO: 5348 - DNA, 440 bp, Homo sapiens
  unsure (175): n=A,T,C or G
  unsure (190): n=A,T,C or G
  unsure (358): n=A,T,C or G
tgcaaatggttctgctgaaacatctgccttggacacagggttctcgctcaacctttcagagctgagagaatatacagagggtctcacggaagccaaggaagacgatgatggggaccatagttcccttcagtctggtcagtccgttatctccctgctgagctcagaagaattaaanaaactcatcgaggangtgaaggttctggatgaagcaacattaaagcaattagacggcatccatgtcaccatcttacacaaggaggaaggtgctggtcttgggttcagcttggcaggaggagcagatctagaaaacaaggtgattacggttcacagagtgtttccaaatgggctggcctcccangaagggactattcagaagggcaatgaggttctttccatcaacggcaagtctctcaaggggaccacgcaccatgatgccttgg

SEQ ID NO: 5349 - DNA, 272 bp, Homo sapiens; identical to SEQ ID NO: 5253

SEQ ID NO: 5350 - DNA, 533 bp, Homo sapiens
aaaattctaagtatgcatgcaatctgtaaaaattccaatttaggatagctaaattcattacatttttttttttgcttatattaccttactattttacctgtctccttgttattaatagcaagacatatgttccttttagaaatgtttgattctcttatttgcttagaaatagaattcaatgagtgattaatgtacaccatgattcagaaaaacaaatgcaaatttccatacattaactctacacataatggcttgcaatattttatctaaaacattcattttattttccaattcttaaagatagtttttgctataggtggcatctctgtgaacgcagagctctaaattaaaactgccaaagcaacaaaagatataatatattgggactttataagctaagaaacataaatacaggcgggaaaaagcatagcttatgtagattgctgctgggttaaatgaatatgaattcacactaaaattgtcaatcagctacacatctctcaccaaatcattctttttggtcgtgcataatt

SEQ ID NO: 5351 - DNA, 387 bp, Homo sapiens
ttgttttatcactggacaagaaatgtattaggtttgatatttacaaagatgtttatgttgtctgctattttctattataggtttattcaaagagaatatcacctatagcataaataattaaatttttcaataaaaacaaactaaaaaaaccctagaaacatttgacatcaccaaattcaacagctctcactagaaatccaagcaataaacttagatatttgaaataaacataaattatgattatataactctaagtcacatacataattttgaattatggtaatagcactgtaaacatgaatacaaaggattacagttttatacagaattttttttgtttttcttcttttaggcttatttctccttgaaagaacagaatgatctttt

SEQ ID NO: 5352 - DNA, 440 bp, Homo sapiens
  unsure (150): n=A,T,C or G
  unsure (151): n=A,T,C or G
aaaaaacccacaaaatgctgattcagttcaaaattaatgcaaatgtttcaaaactgggtttctgatatttgtaaatgtgtttctttattagataagagtgtattaccattaaagtcattagtataatattgctttcaaaaagagatggtnnacaaaactataatccagcatcttttattgcattggaaagactggcaaagtcttttggatgggttgggagatgtggctggaaagtactttggaaaatatacaatcaagatatctcatggcatattaaaagaaaaatcttaatagcagtgttggcttttatttggattttttcatctcagttttttctgtggaatctccttcattggcattgttatttaatcataaacggggcagatgtctacttgttcagtttttcaaatctgttttcctgagtataaataagagtattt

SEQ ID NO: 5353 - DNA, 306 bp, Homo sapiens
aaatacaagtataattttggaaggggtatttgacaaattcagcattaactgccaactctatagacatgttttaacaaaaagcaaaacaaaacaaaacaaaaaaacaaaacaaggcatttactcttggccctttcagtacaggcgaagtgttctattgcatcacaagtgctagtgatgcagtaacagatccaagggcataatattaaatatgtttttttccaactgcgatttagttgaaaaataacataatacaaacatatattaatggctatcaagaccagcagtgatctgcagaatacctagagg

SEQ ID NO: 5354 - DNA, 347 bp, Homo sapiens
cctgtactgaagacagcaagctgttagtacagaccagatgctttcttggcaggctcgttgtacctcttggaaaacctcaatgcaagatagtgtttcagtgctggcatattttggaattctgcacattcatggagtgcaataatactgtatagctttccccacctcccacaaaatcacccagttaatgtgtgtgtgtgtgttttttttaaggtaaacattactacttgtaactttttttcttagtcatatttgaaaaagtagaaaattgagttacaatttgattttttttccaaagatgtctgttaaatctgttgtgcttttatatgaatatttgttttttatagttt

SEQ ID NO: 5355 - DNA, 603 bp, Homo sapiens
  unsure (13): n=A,T,C or G
  unsure (514): n=A,T,C or G
aaactagtaatanaattttctgaagaatatccaaataaaccaccaactgttaggtttttatccaaaatgtttcatccaaatgtgtatgctgatggtagcatatgtttagatatccttcagaatcgatggagtccaacatatgatgtatcttctatcttaacatcaattcagtctctgctggatgaaccgaatcctaacagtccagccaatagccaggcagcacagctttatcaggaaaacaaacgagaatatgagaaaagagtttcggccattgttgaacaaagctggaatgattcataatagacaactggtctgttaatctttttcatcattgttgtgtataatttacctctcattagaaaggctaacaaattttaagtgccacaggttttaaggattctgcagaaaaaaaagaaaaaagtccttcagtttagaacctacaaaagcttgtgtatcttgattaatgtactttttattgcatggtgtgaactaagttattgctgcataaatttgnaatatatcctgtttgtatttttttccaagtgtataatgttgggtgtggagttttcatgacagaatatacacattttgtaaatctgtact

SEQ ID NO: 5356 - DNA, 444 bp, Homo sapiens
aaagataccatctaccttactcaggtgatgcaggcccagtgtgtcaaaacagaaactgaattctaccgccgtagtcgcagcgagatagtggatcagcaagggcacacgatgggggcactttattggcagttgaatgacatctggcaagctccttcctgggcttctcttgagtacggaggaaagtggaaaatgcttcattactttgctcagaatttctttgctccactgttgccagtaggctttgagaatgaaaacatgttctatatctatggtgtgtcagatcttcactcggattattcgatgacactcagtgtgagagtccatacatggagctccctgtggcccgtgtgctctcgtgtgactgaacgttttgtgatgaaaggaggagaggctgtctgcctttatgaggagccagtgtctgaattgctgaggagatgtgggaat

SEQ ID NO: 5357 - DNA, 332 bp, Homo sapiens; identical to SEQ ID NO: 4110

SEQ ID NO: 5358 - DNA, 640 bp, Homo sapiens
  unsure (616): n=A,T,C or G
ccaacatggtgaaaccccatctctactaaaaatacaaaaattagccgggcatggtggcagttgcctgtaatcccagctactcaggaggctgaggcaggagaatcgcttgaacctgggaggcggagatttgcagtgagccgagatcacgccattgtactccagcctgggcaacagagagagactcagtctcaaaaaaataaaaattaaaaagtaagcatgtcttattgtttatttttccccagtgctaaaaatgactattttgaaacaatgctgatagagtttacagttcaatttttactttgaggtactaattttgcatttggccggatgctcttaaaaattaaaaagtagacatgtcacctagtaatatgcctattttaattttctaagaagttttgttaaaaattctattaaaatatacatatcctagttaccaatcacattcatacagagaaaatgaacattaaacatattactgtacaaacaatttggacttcagttccagctttggagtcccctccattctattaattagggtgataaacatggcatttagcagggaattaactgtggataccagcacatgcctaagatctaaacaactgaaaaagtattnaagagttctactttggagcagagt

SEQ ID NO: 5359 - DNA, 562 bp, Homo sapiens; identical to SEQ ID NO: 346

SEQ ID NO: 5360 - DNA, 416 bp, Homo sapiens
cctagtatgaggagcgttatggagtggaagtgaaatcacatggctaggccggaggtcattaggagggctgagagggcccctgttaggggtcatgggctgggttttactatatgataggcatgtgattggtgggtcattatgtgttgtcgtgcaggtagaggcttactagaagtgtgaaaacgtaggcttggattaaggcgacagcgatttctaggatagtcagtagaattagaattgtgaagatgataagtgtagagggaaggttaatggttgatattgctagggtggcgcttccaattaggtgcatgagtaggtggcctgcagtaatgttagcggttaggcgtacggccagggctattggttgaatgagtaggctgatggtttcgataataactagtatggggataaggggtgta

SEQ ID NO: 5361 - DNA, 287 bp, Homo sapiens
aaatctttaatcctttgattaagcagcaagcatatcactcttccaggccaaacactgcttaaacaaaaaagaaaaataatgacgtgcaaaatatttacaaaatatgcaaagcacacaataaagacatctcactatatacatgtgtcatattactaatgaagctaacgtttttctactgtgtgctctaatgcatgtaaatcaaattacagcacatccctcagatacagcaccttggcccatgtctgggatagaagagattttttaatgaatcacaatatactgaacag

SEQ ID NO: 5362 - DNA, 334 bp, Homo sapiens
cctggcctcttcagagtaccccccattccactttccctgcctccttccttaaatagctgacaatcaaattcatgctatggtgtgaaagactacctttgacttggtattataagctggagttatatatgtatttgaaaacagagtaaatacttaagaggccaaatagatgaatggaagaattttaggaactgtgagagggggacaaggtggagctttcctggccctgggaggaagctggctgtggtagcgtagcgctctctctctctgtctgtggcaggaggcaaagagtagggtgtaattgagtgaaggaatcctgggtagagaccattctcag

SEQ ID NO: 5363 - DNA, 420 bp, Homo sapiens; identical to SEQ ID NO: 644
  unsure (343): n=A,T,C or G
  unsure (404): n=A,T,C or G

SEQ ID NO: 5364 - DNA, 452 bp, Homo sapiens
  unsure (103): n=A,T,C or G
aaaaatctatttatttatcaaaacagtattggcacagtaattctcatattatcatcaaataataaaattgctactttctgtactcaattctttagaatcctanaaattgcaaatgcattcaatttaacaatattgtaaataacaatacaaaagaaagaactctgcatatttatggaaacattgttgatggtacagttctactgaaactcatacacatttcactatttaatttacatatggtcttgttgaaaaaaaccagtatgttttactttttcaatttccttatgctaaaatacatgtaattctaaaggatatctcttaggtgttataaaaaccaaggaaggtccaccaccaagtcaaagttagagtcaaagatacttcaaagattccatgaaatgatctgaaaacaaatttaaccaaaaaatgtgtactgtattggggcacatccatgg

SEQ ID NO: 5365 - DNA, 549 bp, Homo sapiens
ccacagaagttgctgctgacgctctgggtgaagaatggaagggttatgtggtccgaatcagtggcgggaacgacaaacaaggtttccccatgaagcagggtgtcttgacccatggccgtgtccgcctgctactgagtaaggggcattcctgttacagaccaaggagaactggagaaagaaagagaaaatcagttcgtggttgcattgtggatgcaaatctgagcgttctcaacttggttattgtaaaaaaaggagagaaggatattcctggactgactgatactacagtgcctcgccgcctgggccccaaaagagctagcagaatccgcaaacttttcaatctctctaaagaagatgatgtccgccagtatgttgtaagaaagcccttaaataaagaaggtaagaaacctaggaccaaagcacccaagattcagcgtcttgttactccacgtgtcctgcagcacaaacggcggcgtattgctctgaagaagcagcgtaccaagaaaaataaagaagaggctgcagaatatgctaaacttttggacctcg

SEQ ID NO: 5366 - DNA, 471 bp, Homo sapiens
atcactaagtcaagttctttacttcccagaagtgatggctaaggggagggaggagggtgagaagaggaagacagaaagagccagagagaatgaggaggtgagaagggggggacagtaaaccactgttctatgaagtctcacgaggcaagtgctcaaggtaaaaaaagagtcctggagaatcgtccacggctgcgggaagcatctcggtttccttctgcttttaagtcctctcagggaaggctgtcgccgctaccgctgcattaaatagttatgtacatcgcagagagtcccaggccatgggcaggtgggggaggggcgtcatttcaccaggggccgagttttatcatcgtcaccgcactggtgagctttgtactttttcacttctgccatgtacttggcccacgcgtcacctttacttgttaatacctcatcctccgtcttctgcttcttggctactattcccgtcttgag

SEQ ID NO: 5367 - DNA, 152 bp, Homo sapiens
ccaattgaaacaaacagttctgagaccgttcttccaccactgattaagagtggggtggcaggtattagggataatattcatttagccttctgagccttctgggcagacttggtgaccttgccagctccagcagccttcttgtccactgcttt

SEQ ID NO: 5368 - DNA, 574 bp, Homo sapiens
aaagaaaaaggtgtttatttaggccatcaactaggatcataataaataacgtaatatactaatgtaataacagatcttctcatgcatttatcgtgtttataaatatagaagaaagctggcttacagggctgttgggacaaatttggaaaagtgtatttggcaattacacagtaaaagttaacagtgttgactatcagattctcttttctgtcagtttttagaatacatcccctatacatctgtgaataaatggtaatggtctcttagagtttctactttttgtgaacatgccagagttaagtaaattgtcaaaggatccaggttgacaatgtgttatttgtcaatatttctaatgaaaaacagatcttagaaaaatgaactcttctgcatttcattgtagaggctgatatattacaagccggaatcattcaaacaataaaaaaagtgcctcaatgaaataaaacccaaaagtagtttatcaatagtaactgtgatacttaatatacaaatgctgtagtattgcgtttgtaatttggtaagtaaatgaccaagtatctgaatgcaaaagtgatga

SEQ ID NO: 5369 - DNA, 446 bp, Homo sapiens
  unsure (409): n=A,T,C or G
aaacaagttttttttagtgtttgtacacaatttgtcaatttttcaatattcaattttctgtacaggtacttttgggacaattcttatagttacataatgtgaattcatcaaaatgcagttaagaaacttacaggaatatatacacttgaacccaagacccaaacctgacattatatacaacctatttacaaatacatatggacagacaatatatgtacatagattatcataaatattgaaaaataggttagctttaatggattaatgttgttctataaataacattacagttgtaactgaaacatccacggaagacagtaatgcaaaatgaggtgacaagacagtggttttaatactgaagactgctcattaatgtgaggaagctcctccaatcctctggctatttaangttcaaaatcaagtgcctagggaaaattccaatggat

SEQ ID NO: 5370 - DNA, 565 bp, Homo sapiens; identical to SEQ ID NO: 204

SEQ ID NO: 5371 - DNA, 367 bp, Homo sapiens
aaagttgaactaagattctatcttggacaaccagctatcaccaggctcggtaggtttgtcgcctctacctataaatcttcccactattttgctacatagacgggtgtgctcttttagctgttcttaggtagctcgtctggtttcgggggtcttagctttggctctccttgcaaagttatttctagttaattcattatgcagaaggtataggggttagtccttgctatattatgcttggttataatttttcatctttcccttgcggtactatatctattgcgccaggtttcaatttctatcgcctatactttatttgggtaaatggtttggttaaggttgtctggtaataaggtggagtgggtttggg

SEQ ID NO: 5372 - DNA, 519 bp, Homo sapiens
ctggcttttcgatataaagagaattctaaagtggatgacaaatgggaaaagaaatgccagaagattttttcatttgcccaccagactatcagtgctttgatcaaagcagagctggcagaattgcccttaagactttttcttcaaggagcactagctgctggggaaattggttttgaaaatcatgagacagtcgcatatgaattcatgtcccaggcattttctctgtatgaagatgaaatcagcgattccaaagcacagctagctgccatcaccttgatcattggcacttttgaaaggatgaagtgcttcagtgaagagaatcatgaacctctgaggactcagtgtgcccttgctgcatccaaacttctaaagaaacctgatcagggccgagctgtgagcacctgtgcacatctcttctggtctggcagaaacacggacaaaaatggggaggagcttcacggaggcaagagggtaatggagtgcctaaaaaaagctctaaaaatagcaaatcagtgcatg

SEQ ID NO: 5373 - DNA, 205 bp, Homo sapiens
ctgtggatttcaaaacacagtgtattctagatcatctaagatccatgctgatttttattgcacaagaattaggtttgaactcttgagctggaacctcagcaaactagagtatatattgttcagtatttctttggaaacatttcattaatgtacttgtcttacagaaatttctgaactttagtaaaaaaaataaagttaaactttt

SEQ ID NO: 5374 - DNA, 332 bp, Homo sapiens; identical to SEQ ID NO: 4110

SEQ ID NO: 5375 - DNA, 90 bp, Homo sapiens
  unsure (10): n=A,T,C or G
  unsure (13): n=A,T,C or G
aaataactcnctnaaccctgcccattaagatcacggtaaacatacaataatttttattatggaaattaatctttacatacaaaatcagct

SEQ ID NO: 5376 - DNA, 408 bp, Homo sapiens
  unsure (165): n=A,T,C or G
ctgtgcaagaaaaattaaatgaaatagtagatcagataaaaactagaagagaagaagaaaagaaacaaaaagaaaaagaagcagaagaagctgaaaagcaattattccatggtactccagttacaattgagaatttcttaaattggaaagccaagtttgatgcanaactcttggaaattaaaaagaaaaggatgaaagaagaagaacaagcaggaaaaaataaattaagtgggaaacaactatttgaaacagatcataatcttgacacatctgatatccagttcttggaggatgctggaaacaacgtggaggtagatgagtctttgttccaagaaatggatgacttggagctggaggatgatgaagatgatccagactataatcctgctgacccagagagtgactcag

SEQ ID NO: 5377 - DNA, 238 bp, Homo sapiens
  unsure (34): n=A,T,C or G
  unsure (79): n=A,T,C or G
  unsure (104): n=A,T,C or G
  unsure (127): n=A,T,C or G
acaagcttttttttttttttttttttttttctanaaaaatttaacaggtttatttataattattataaagttgaaccgntaaaacttgttcactgaaacatttnaacttgcattaatgctttacgtntccgcatttatattaaaaattcacacacaaatgaaaatggaaaaactgccaatacctgatttctgtcccctatttttccactcgcaatcatatacttaggtaccttttggc

SEQ ID NO: 5378 - DNA, 342 bp, Homo sapiens
ctgctgatacccaggcagtagctgatgctgtcacccaccagctcggtttccacagcattgaactgaatgagcctccactggtccacacagcagccagcctctttaaggagatgtgttaccgataccgggaagacctgatggcgggaatcatcatcgcaggctgggaccctcaagaaggagggcaggtgtactcagtgcctatggggggtatgatggtaaggcagtcctttgccattggaggctccgggagctcctacatctatggctatgttgatgctacctaccgggaaggcatgaccaaggaagagtgtctgcaattcactgccaatgctctcgctttgg

SEQ ID NO: 5379 - DNA, 397 bp, Homo sapiens
  unsure (130): n=A,T,C or G
  unsure (131): n=A,T,C or G
  unsure (142): n=A,T,C or G
  unsure (185): n=A,T,C or G
  unsure (286): n=A,T,C or G
  unsure (293): n=A,T,C or G
  unsure (304): n=A,T,C or G
  unsure (305): n=A,T,C or G
  unsure (306): n=A,T,C or G
  unsure (320): n=A,T,C or G
  unsure (363): n=A,T,C or G
gaaaagccttgtaaatgcctatattgtgggcttttaacgtatttaagggaccacttaagacgagattagatgggctcttctggatttgttcctcatttgtcacaggtgtcttgtgattgaaaatcatganngaagtgaaatngcattgaatttcaagggaatttagtatgtaaatcgtgccttanaaacacatctgttgtcttttctgtgtttggtcgatattaataatggcaaaatttttgcctatctagtatcttcaaattgtagtctttgtaacaaccaaatnacctttngtggtcactgnnnaattaatatttggnagacagaatccatgtacctttgctaaggttagaatgaataatntattgtatttttaatttgaatgtttgtgcttttt

SEQ ID NO: 5380 - DNA, 314 bp, Homo sapiens; identical to SEQ ID NO: 3212

SEQ ID NO: 5381 - DNA, 332 bp, Homo sapiens; identical to SEQ ID NO: 347

SEQ ID NO: 5382 - DNA, 330 bp, Homo sapiens
caaaactttttatatcaaaaggctttgcacatttctatatgagtgggtttactggtaaattatgttattttttacaactaattttgtactctcagaatgtttgtcatatgcttcttgcaatgcatattttttaatctcaaacgtttcaataaaaccatttttcagatataaagagaattacttcaaattgagtaattcagaaaaactcaagatttaagttaaaaagtggtttggacttgggaacaggactttatacctcttttactgtaacaagtactcattaaaggaaattgaatgacaaaaaaaaaaaaaaaaaaaaaaaagcttgta

SEQ ID NO: 5383 - DNA, 570 bp, Homo sapiens
cttttgtaaagagaatcaactaggtatttaagactgataattttacaatttatatgcttcacatagcatgtcaacttttgactgagaattttgttttactttttaacatgtgttaaacagagaaagggtccatgaaggaaagtgtatgagttgcatttgtaaaaatgagactttttcagtggaactctaaaccttgtgatgactactaacaaatgtaaaattatgagtgattaagaaaacattgctttgtggttatcactttaagttttgacacctagattatagtcttagtaatagcatccactggaaaaggtgaaaatgttttattcagcatttaacttacatttgtactttagagtatttttgtataaaatccatagatttattttacatttagagtatttacactatgataaagttgtaaataattttctaagacagtttttatatagtctacagttgtcctgatttcttattgaatttgttagactagttctcttgtcctgtgatctgtgtacaattttagtcactaagactttcctccaagaactaagccaacttgatgtgaaa

SEQ ID NO: 5384 - DNA, 356 bp, Homo sapiens
caagcacatccttgctaatttcaaaaactaccagttctttattggtgaaaacatgaatccagatggcatggttgctctattggactaccgtgaggatggtgtgaccccatatatgattttctttaaggatggtttagaaatggaaaaatgttaacaaatgtggcaattattttggatctatcacctgtcatcataactggcttctgcttgtcatccacacaacaccaggacttaagacaaatgggactgatgtcatcttgagctcttcatttattttgactgtgatttatttggagtggaggcattgtttttaagaaaaacatgtcatgtaggttgtctaaaaataaaatgcattt

SEQ ID NO: 5385 - DNA, 397 bp, Homo sapiens
  unsure (155): n=A,T,C or G
  unsure (156): n=A,T,C or G
ctgtcggaattaaaggatcagatgacagaacaaaggaagcagaaacaaagaattggtcttctaggacatcctcctcacatgaatgtcaacccacaacaaccagcataagcaaatgaaagaaaggaattgtatttaccttttataattattattanngtgggtatggctaatgagttctgattcacccacgaaggttacatttatgctgaatacatttgtaaatactcagttttatactgtatgtatatgattgctactctaaaggtttggatatatgtattgtaattagaattgttggcatgatgacatttcatttgtgccaaaaatattaaaaatgccttttttggaaggactaacagaaagcacctgatttgcacttgaaccagattatagattt

SEQ ID NO: 5386 - DNA, 314 bp, Homo sapiens
  unsure (12): n=A,T,C or G
  unsure (13): n=A,T,C or G
  unsure (14): n=A,T,C or G
  unsure (43): n=A,T,C or G
  unsure (45): n=A,T,C or G
  unsure (46): n=A,T,C or G
  unsure (56): n=A,T,C or G
  unsure (57): n=A,T,C or G
  unsure (94): n=A,T,C or G
  unsure (102): n=A,T,C or G
  unsure (114): n=A,T,C or G
  unsure (115): n=A,T,C or G
  unsure (135): n=A,T,C or G
  unsure (181): n=A,T,C or G
  unsure (252): n=A,T,C or G
  unsure (270): n=A,T,C or G
gaaagtggtggnnntgatctttttatttagaaacccacaaaancnnaaacacagtnnaaataaaacagaaatcaaactataagttgacttttanttcctaanaagaaacatatnncaaaagcaagtggaatctanaattcttataacatgaataacaaaatgtacagcaagcctatgtagntcaattaatatataaggaaaaggaaggtctttcttcatgatacaagcattataaagtttttactgtagtantcaattaatggatatttncttgttaataaaattttgtgtcataatttacaaattagttcttt

SEQ ID NO: 5387 - DNA, 499 bp, Homo sapiens
  unsure (19): n=A,T,C or G
  unsure (20): n=A,T,C or G
aaaagttgtattcgtctcnnattcaaaatattatcacacaggtgatttatcttaaaaatccatgtgagtactgacctatatgtcattttttgcaaatctaaaacaaaaatatttcaaaatgttcagtggcagagagtactggtaccacaaaatcagagcagtagaagcaaaggggatataagatgtggacattttgtagcttgaggagatggcacctagggaaaagagaattaagtgtttatttgggaaaatgttaatgatatacacagaacataggagctggaataaagaaggcatgcttaggttatagcaaggtatactcctggcctaaaatatcaccatctttctctgcatgcctgggacaaagtaagaatgggggcagaaaaaaagggaagactgagaacacagagcacttagtctacttattagcaaaaataaagtgagattttctaaaatcaggtataatgtcatctgcctctccaaaaaactgttctttttg

SEQ ID NO: 5388 - DNA, 570 bp, Homo sapiens
ctgtagctttttcattcagaaactggagaccatcttttcactgagttgttattccttcctcttcccttagcttagggatatgttgaaaaaggcttttcaacaagtattttattttttacaagttgctatgaaattaaaatttatatatatatcttaagtgtttataaagcactcaaaattgtagcttacatgtatatgacttctgaaaataaaaatcacacttctaacataatctttctgctctgcaaaaatattctacatacatgcatatgatcaaaacaatcttttcatgtttggggtatttcttacacatagtaaaagaaaagtcaacaattgtatcagtacttcccctgttaagataactgagtgccacctagtgttcaatttctgcaactactaagcttacaaattcaatactgctattaaaacccaggttctgaaaacggcattttggaaatctttttttttttttttttatgtttacggtggcaaaatacgactatgaaaagaacatgatatcaaaatcagtataaaaatagccacaggctacttaaatatgacaaacagact

SEQ ID NO: 5389 - DNA, 453 bp, Homo sapiens
tttttttttttttggtgggttttggggatgtttaccctattgttttttatttggatgccctaaggcatataaagcgcatagtgaattacctactggaatgtaaatggttctaaaattaaaactgttaaaatagaaagagggaaaaggaaggcccaagaactcttaaagagaggctgagaacaagaacaaaaaaacccagaagtgtaggtaatacataacagcgcagacagaaccgttgtaggccatgtataataaataatgcatgccccaaatttcagttaatcatataatttcaacttgagttctaatactggaaccagccaaccacttgggcttcaacactgtactagatgtcagtagaatcgcttgatggaattacagccttgttacagttgagatcaagagagggtgcttttttttttccttcttttattaaagctatcattccaggct

SEQ ID NO: 5390 - DNA, 520 bp, Homo sapiens
aaattggctttgcccgcttcagtagtcacaggtagctacctgaccgagaagccgacttgggaattactgttacttgtgggtgatactgtcataaaggggttgaaagtacttgttagctgtatatgtcagaattgattaaagagaaccaactattcttgtgcaagggatggtattgtagttaattatgacatttggagaaactaatttctgtctgtcgacactatctctgttccatttagacttagagacttacatgggcaatgcttgactttttgcattcagcacagaaagttaagtaatccactgtggtaaaatattaactaaatttatatgacttcttgactgctgtaagtagagaatatttatcatataagcaccattttcctgaattttttgttactgcatattttatcttactgtcactattgtgtaaaatctttgaaaggaaaatgaatactgtgtaatagttaaacccattcataggttgcaatagagtgtcagccaaatgtgtcatacatca

SEQ ID NO: 5391 - DNA, 519 bp, Homo sapiens
ctggcctgtcatataaaacatactgtcattgagcttaagctccgcttgttctgaggtttcacctccatgtgtttcattggtgcaaaagtggatctcttagttggtcacttaattctttctttttcagaaagatagtatgttcactggtatatttggtcactcttagaaccttccttcacattgttttttatgggacccatgaatggttagcctttcttttctattgtagaaggaaataaataggagtaaaaagaccattgtagtaaataagttcaaggggaacttgggaccagaaaccactgttatgtacaaaaaatggcaaattcaataaactcaaatttaaaataatttttaaattaacagttatgataaattttatattttatacaaatagattgcttagaatggttctcaagaattataagagaaatgaactcacagtacaaaaattttataattactatacttgtgttttgtttgggggctgggaaatgtatttttacattgtagccaatcatt

SEQ ID NO: 5392 - DNA, 522 bp, Homo sapiens
  unsure (35): n=A,T,C or G
  unsure (121): n=A,T,C or G
  unsure (159): n=A,T,C or G
  unsure (175): n=A,T,C or G
  unsure (193): n=A,T,C or G
  unsure (237): n=A,T,C or G
  unsure (241): n=A,T,C or G
  unsure (245): n=A,T,C or G
  unsure (272): n=A,T,C or G
  unsure (297): n=A,T,C or G
  unsure (303): n=A,T,C or G
  unsure (360): n=A,T,C or G
  unsure (372): n=A,T,C or G
  unsure (379): n=A,T,C or G
  unsure (384): n=A,T,C or G
  unsure (470): n=A,T,C or G
  unsure (482): n=A,T,C or G
  unsure (495): n=A,T,C or G
  unsure (496): n=A,T,C or G
  unsure (498): n=A,T,C or G
  unsure (521): n=A,T,C or G
caagctttttttttttttttttttttttttttttnattcaatttcctttaatgagtacttgttacagtaaaagaggtataaagtcctgttcccaagtccaaaccactttttaacttaaatnttgagtttttctgaattactcaatttgaagtaattctntttatatctgaaaaanggttttattgaaacgttngaaattaaaaaatatgcattgcaagaagcatatgacaaacattntganagtncaaaattagttgtaaaaaataacatantttaccagtaaacccactcatatanaaatgngcaaagccttttgatataaaaagttttgtacaccaagcacctatttttataacttancttcccatgganagataanggctngcgtgcattttatgtatccataacatacatacaaggctcggtcttttcaatgggataacagttcacaactcttcgatttgaattgnaatgaatctggngacaaggattttnntntaatggattccaaagttagccana

SEQ ID NO: 5393 - DNA, 336 bp, Homo sapiens
ctgtgttatttgatttcttgcttttcggagctccttaagaattacaagcaattgatgctgcacatgttgacggtcgagtttttcattttcaaagtctaaagtacatgcctgcatctgttgttccaacagagctacccttgtttgttcttcttgctgctttagcagagatgtgtaaagaaactggacctgagataagagctcttcggatctcttcttctcttcttcaagttttcccctagcaatatcattctcttccctgagtttttgtatcttctctgttttatgcctatcatcttccagatgttgcacatctgcccttctttgtgaatacaacag

SEQ ID NO: 5394 - DNA, 275 bp, Homo sapiens
aaatcctttactaattatataatttgaaagcaaaaagaagggcctatattaaatgctgaaagtgaaaagtgatgacattattagcagacactgcttaaaggagaccatttgtagcagttggcttaacctcaacttctaaaactacattgaaaatgtaaatacatagcttagttttttgtaatatatggtgacttcagatttttttgtacagtattttgaatgtgagatgattgtcaggactaactgcctttttaacaaaacattttcagtatttt

SEQ ID NO: 5395 - DNA, 168 bp, Homo sapiens
ctgcggagcatgtcgaccccggcccggaggaggctcatgcgggatttcaagcggttacaagaggacccacctgtgggtgtcagtggcgcaccatctgaaaacaacatcatgcagtggaatgcagttatatttggaccagaagggacaccttttgaagatggtactttt

SEQ ID NO: 5396 - DNA, 126 bp, Homo sapiens; identical to SEQ ID NO: 348
  unsure (3): n=A,T,C or G
  unsure (14): n=A,T,C or G

SEQ ID NO: 5397 - DNA, 469 bp, Homo sapiens
cctcaggcaaattatagtcaaatacatcacccccctcaggcatctgtggcaaggcatccctctagagaacaactaattgattacttgatgctgaaagtggcccaccagcctccatatacacagccccattgttctcctagacaaggccatgaactggcaaaacaagagattcgagtgagggttgaaaaggatccagaacttggatttagcatatcaggtggtgtcgggggtagaggaaacccattcagacctgatgatgatggtatatttgtaacaagggtacaacctgaaggaccagcatcaaaattactgcagccaggcgataaaattattcaggctaatggctacagttttataaatattgaacatggacaggcagtgtccttgctaaaaactttccagaatacagttgaactcatcattgtacgagaagtttcctcataagcactgtggacaaaaaaagcgggga

SEQ ID NO: 5398 - DNA, 408 bp, Homo sapiens
  unsure (274): n=A,T,C or G
atcccattgaaaagaccgagccttgtatgtatgttatggatacataaaatgcacgcaagccattatctctccatgggaagctaagttataaaaataggtgcttggtgtacaaaactttttatatcaaaaggctttgcacatttctatatgagtgggtttactggtaaattatgttattttttacaactaattttgtactctcagaatgtttgtcatatgcttcttgcaatgcatattttttaatctcaaacgtttcaataaaaccatttttcanatataaagagaattacttcaaattgagtaattcagaaaaactcaagatttaagttaaaaagtggtttggacttgggaacaggactttatacctcttttactgtaacaagtactcattaaaggaaattgaatgat

SEQ ID NO: 5399 - DNA, 307 bp, Homo sapiens
ctgagggtctccgcaggaacaccatcacccggcatgactgccaagtcccaggtctgtctggaagccagcgggaggatcagcatcctgccccctttggtccatcctgtgggctgtggggaccaggcccctgctactcaaggccaaggtaggaaacagtctttcctgttttcttcagggttgcaagcagagtgtccatgctgtgctcagattcaatgcagaccttcttgttgggcaggtcaatgtcatacttaactccggcatgactgaggcagcggcggtgtggcggcggtgtggcggcggtgtcagc

SEQ ID NO: 5400 - DNA, 350 bp, Homo sapiens
ccttcactgcccctccagtttttatagacctgaggttccagtgtctcctggtaactggaacctctcctgagggggaatcctggtgctcaaattaccctccaaaagcaagtagccaaagccgttgccaaaccccacccataaatcaatgggccctttatttatgacgactttatttattctaatatgattttatagtatttatatatattgggtcgtctgcttcccttgtatttttcttcctttttttgtaatattgaaaacgacgatataattattataagtagactataatatatttagtaatatatattattaccttaaaagtctatttttgtgttttgggcattttt

SEQ ID NO: 5401 - DNA, 620 bp, Homo sapiens
  unsure (12): n=A,T,C or G
  unsure (396): n=A,T,C or G
  unsure (421): n=A,T,C or G
  unsure (594): n=A,T,C or G
agaatggcaacngacaccaagtactttgtagagattgacttcctaagctacttaagacaacttgcatcactaagaaaaaaatgtagaaccatttggaaaaatgaaatttagtagttccaagtttcaaagaaatgtcaacattttattccattcaataaagaacaaaaccaatagtgtttttattactttcatctgaaacattccatgttttaatctgagccttgcagactttcatttggagtttgaacccgttttggttgcatttcatttttggagaacttaattaacgtgagattggcaattgaaatgcaggtgcagttttctgttaatgtcatgctgttgttttaggtaataagaaatattaagtaattggctttagattttgtaatttttttnccctgagtttcctgctagatttcgnattctagtagtcaatgtattttcagtgaaatgcaaaaatattcccattatcttttgaccagtattaatttttgagatcttactgcttgtcacttgaatcccgtgattgtcatacatctctggtataagcaacatttgatttttgaagtgtgtagaccatctcttcatattttncagatgtaattttacatttctgcatt

SEQ ID NO: 5402 - DNA, 408 bp, Homo sapiens
aaacttaaggaaagagtgggaaagtgagggcaaaataatcctatggtgaaaaaaatcaacaagataatctctgcttgagaaaaaggaccaaagacaagtgaattttctgagggtgatgaaagtgttgcttcgaaaaggggcgaagtttatatgggtctatttatttgtctaacatgtacagttaaggtttatgccttgcaatgtatgtacatcttcacaaaaaaaatcttaaaaaaattaaatgggtgggggtagggaaagggttgaagtatagatgaagcagaagtggtacatgattagtagttgaagctgggggcaggtctatatattttatttttatgtctttaatagcatttgtataaatgtacaatattcgtttacaatgttagctcaggatcttgtttacct

SEQ ID NO: 5403 - DNA, 314 bp, Homo sapiens; identical to SEQ ID NO: 3212

SEQ ID NO: 5404 - DNA, 147 bp, Homo sapiens
agaatcattttgttctttactaacaataatttgaaaattggtaatttaatatcttgtgaatatgaaaatattatggtatagattagcttctaggagaagttaagtgtagcatgatttcttgaagattaaaaaaacatttaacttttt

SEQ ID NO: 5405 - DNA, 524 bp, Homo sapiens
ccaattatttccaatttttattttattcttaaaacttaagcatggtaaaatgttaagctgttttcatccactgatattattctactataaaaagcccttcttgagcagatttgatgataaaaaggagaacatttctaaggtataattagagaagctgttgcatgagaaatcatgtctccatctccattttgctatgcgttatctgaggattgtttctgaaagagatctatttaggcagtgtatgtatgtgtcagcatgtaaaaagtaaagaactgaaaatagacaaaccttgtaaatgcacttcaaaaccaattgtggctcaagtgtaggtggttccccaaggctggtaccaatgagactggggtttgggaattagttggtcatcatccctcctgctgcccagcagtggtcagtcatttttcatgagggatggactaggaaaatgaagtgtctattataaggagagttcctgtaacttaaggagcaagctcactacaaaacccagctacctgcttatcgtagtg

SEQ ID NO: 5406 - DNA, 526 bp, Homo sapiens
ccacagaagttgctgctgacgctctgggtgaagaatggaagggttatgtggtccgaatcagtggtgggaacgacaaacaaggtttccccatgaagcagggtgtcttgacccacggccgtgtccgcctgctactgagtaaggggcattcctgttacagaccaaggagaactggagaaagaaagagaaaatcagttcgtggttgcattgtggatgcaaatctgagcgttctcaacttggttattgtaaaaaaaggagagaaggatattcctggactgactgatactacagtgcctcgccgcctgggccccaaaagagctagcagaatccgcaaacttttcaatctctctaaagaagatgatgtccgccagtatgttgtaagaaagcccttaaataaagaaggtaagaaacctaggaccaaagcacccaagattcagcgtcttgttactccacgtgtcctgcagcacaaacggcggcgtattgctctgaagaagcagcgtaccaagaaaaataaagaagaggctgcaga

SEQ ID NO: 5407 - DNA, 349 bp, Homo sapiens
aaagagtaaactgaaaaattatgaaggatttttcccagtaatgcatagccttcattaattatttttttaataaataaactagtttagcattttttttttttaaccctacaaaatgctactattcatcatgtcttatttaaggtagccttttattctgattaattaagatacatctttaagggttattctggtggtaagaacatttatcttgacttatgtttaatttttttaatgctttggcagatgaagtaacgtttgaaaactgtttgtgaaaatagtatgagactggaaagattacgtcgtggtaaaagtttcacagttttccaggtatttccttatactgaagagg

SEQ ID NO: 5408 - DNA, 201 bp, Homo sapiens
cctagcctccattttatttatttgttctgcaaattcgatgcgtctaccttcaaataaagcgttcatttttctctgtgactcttctattagtttttgggtagctggacacattcttccaggaatataaaacaaatggggctttgtcttagttcttatatatttaattattttggcattatgttcattccattcttcttgcag

SEQ ID NO: 5409 - DNA, 246 bp, Homo sapiens
aaatatttgtgactctttcctaaagccaaagtttctgttgaattatgttttgacacacccctaagtacaaggtggtatggttgtatacacatgctgccttcttggggattcaaaaacaggtttttgattttgaatagcaattagtgatatagtgctgtttaagctactaacgataaaaggtaataacattttatacaatttccatatagtctattcattaagtaatctttttacagttgcatcagg

SEQ ID NO: 5410 - DNA, 307 bp, Homo sapiens
  unsure (236): n=A,T,C or G
aaaaaattaacagccaagtcacaaaggtaatggattgcacatagactaaggaataaacttcagatttgtgatttttgtttctaatcttgatgtaaatttacactatttataaatacatatttattgcttgaaaatatttgtgaatggaatgctgttattttttccagatttacctgccattgaaattttaaggagttctgtaatttcaaacactactcctattacattttctatgngtaaataaaactgcttagcattgtacagaaacttttattaaaattgtttaatgtttagaaaaaaaaaaaaa

SEQ ID NO: 5411 - DNA, 331 bp, Homo sapiens
aaatagaaaacagtatattgaaagtggtgggtttgatctttttatttagaaacccacaaaatcagaaacacagtacaaataaaacagaaatcaaactataagttgacttttagttcctaaaaagaaacatatttcaaaagcaatggaatctagaattcttataacatgaataacaaaatgtacagcaagcctatgtagttcaattaatatataaggaaaaggaaggtctttcttcatgatacaagcattataaagttttactgtagtagtcaattaatggatatttccttgttaataaaattttgtgtcataatttacaaattagttcttt

SEQ ID NO: 5412 - DNA, 251 bp, Homo sapiens; identical to SEQ ID NO: 4543

SEQ ID NO: 5413 - DNA, 128 bp, Homo sapiens
  unsure (13): n=A,T,C or G
  unsure (14): n=A,T,C or G
aaaatggttgaanngaattcaaagaataataatattttgggacatgttaaaattatgtgaaattcaaatttcagcatccataaataaagttttattgaaacacagccaaaaaaaaaaaaaaaaaaaaa

SEQ ID NO: 5414 - DNA, 533 bp, Homo sapiens
  unsure (8): n=A,T,C or G
  unsure (9): n=A,T,C or G
  unsure (511): n=A,T,C or G
  unsure (512): n=A,T,C or G
ctggcctnncatataaaacatactgtcattgagcttaagctccgcttgttctgaggtttcacctccatgtgtttcattggtgcaaaagtggatctcttagttggtcacttaattctttctttttcagaaagatagtatgttcactggtatatttggtcactcttagaaccttccttcacattgttttttatgggacccatgaatggttagcctttcttttctattgtagaaggaaataaataggagtaaaaagaccattgtagtaaataagttcaaggggaacttgggaccagaaaccactgttatgtacaaaaaatggcaaattcaataaactcaaatttaaaataatttttaaattaacagttatgataaattttatattttatacaaatagattgcttagaatggtttctcaagaattataagagaaatgaactcacagtacaaaaattttataattactatacttgtgttttgttttgggggcttgggaaatgtatttttacattgnngccaatcattttatatttgtc

SEQ ID NO: 5415 - DNA, 563 bp, Homo sapiens
aaaaaaagaaaaataaaataaagtgttttgattatttagggctgacttacatttcagtatgtgacaaaaattcaaacccaaatgcatctagctcactcagtttcagacaggtcctatgttcagcccctaaacgaatggcacaatgccaccaattttgggattcctgagtttggttcccttaagttctcagagttttcccaactctcaaaaccaaagcatcatgggagtgacagggccactggcaagactttttgccagtcagcctagttcttcttttaagatgcagtagtctcaaagcttaaagtcagaaaatcttgcaatacaagagtaactgcaagaacatataaagaaggaaaagaaaggacggggtttctagttgctaagatttgccaaacatggctacaaaactggtaaacaaacctttcttgagtgcaaagtccattagcccaacttgccatgaagagatttgaaataaaaatgaacaaatcaatttctgttgtagatacaaagcgaaaaaataaaattcaatcaatatattgaatttctctgagtttatcactaga

SEQ ID NO: 5416 - DNA, 292 bp, Homo sapiens
aaaaaattaacagccaagtcacaaaggtaatggattgcacatagactaaggaataaacttcagatttgtgatttttgtttctaatcttgatgtaaatttacactatttataaatacatatttattgcttgaaaatatttgtgaatggaatgctgttattttttccagatttacctgccattgaaattttaaggagttctgtaatttcaaacactactcctattacattttctatgtgtaaataaaactgcttagcattgtacagaaacttttattaaaattgtttaatgttt

SEQ ID NO: 5417 - DNA, 309 bp, Homo sapiens
ctgctgctgccgttgaccatcctgaactctgggggagaggaggagtcagcctggcttgcagacggccgacccagaacatggctgtctgtggtcatttccttccttcacacccagtgggatgggcacagagcccagccttggtctcaccagctcccccaccctcctctgcatcagcatccagctcacacagctctccagaagaatttgatcttagctgcagccttggggtacatcactctacacccagtctcttccctgcgcttctttcaaccaacagaagcaaacatcaaaagcacccacacctactgg

SEQ ID NO: 5418 - DNA, 388 bp, Homo sapiens
agcacttatggcaaggcatctcgagggggtggcaatcaccaaaacaattaccagccatactaaaggagaacattggagaaaacaggaggagatgttaaagtaacccatcttgcaggacgacattgaagattggtcttctgttgatctaagatgattattttgtaaaagactttctagtgtacaagacaccattgtgtccaactgtatatagctgccaattagttttctttgtttttactttgtcctttgctatctgtgttatgactcaatgtggatttgtttatacacattttatttgtatcatttcatgttaaacctcaaataaatgcttccttatgtgattgcttttctgcgtcaggtactacatagctctgtaaaaatgtaattt

SEQ ID NO: 5419 - DNA, 344 bp, Homo sapiens
  unsure (50): n=A,T,C or G
  unsure (77): n=A,T,C or G
  unsure (124): n=A,T,C or G
  unsure (141): n=A,T,C or G
  unsure (199): n=A,T,C or G
  unsure (239): n=A,T,C or G
  unsure (272): n=A,T,C or G
  unsure (284): n=A,T,C or G
  unsure (308): n=A,T,C or G
  unsure (309): n=A,T,C or G
  unsure (324): n=A,T,C or G
  unsure (326): n=A,T,C or G
  unsure (336): n=A,T,C or G
tttttttatctttaacctgggactttatttgtacaactaagacatttgtntaaaacaaacagaaaatgaaagaagcnttaagccatgggagagtagaaatgggagctgagaaacttaagagtanaaatgggagctgagganatgaagtgaactcctatcctcaaacccgcaagttcccggccccaaaggaagccctcanagactgatatgccttctgggaactggacagcccctctcancaagcctcattcccaacctgcacctggcctctntgcgaggaaggncagccccagcctgggaagaccaannagggagccagcccancntcaccccatnaaagaccc

SEQ ID NO: 5420 - DNA, 458 bp, Homo sapiens
  unsure (13): n=A,T,C or G
  unsure (355): n=A,T,C or G
ctgccatcttganaacagttttctgagagatttcccacacagttttataaagttgcttcaggtcatcaggaatttctggtatgctctgaatagagccattgcatgcaataatctggtttttcatctcttcatgccataggccccgctcggtaagatctttcaataagtgaggatttacaatctgaaattctcctgacaagactctgcgagtatagatgttgctggtgtaaggttcaatggactcattattccccaggatctgagcagtggaagctgtaggcatcggggcaataagtaaactgtttcttataccatactttgcaatcttctccttgagaaccttccagtcccatangtctgtaggagtaacattccacatatcatactgaagaattcctttgctaactggagagccctcataggtttcgtatgggccctgctccttggcaaggtcacag

SEQ ID NO: 5421 - DNA, 243 bp, Homo sapiens
  unsure (17): n=A,T,C or G
  unsure (67): n=A,T,C or G
ctggatgggtccagacnaagtggaatccctggaacctttaactgagcagtgaaggtcagtgtctcanagcctgagagatgaacaggaccagagagagaggtgggcaggcaggcacaaggttatgtcttcctcagactcggaacccttgagatccttcctgaaggctgtgtacattctgtttatctgtgtcctgtatcactgcactcctgtgtgtacacctctgtttgcacatgcgtggcatgg

SEQ ID NO: 5422 - DNA, 548 bp, Homo sapiens
ctgtttcagaggaggggggaggaggtagcagatgtcaagggatttccatttctctttcgatgccgacatacttcagggcatcagcctggctgtatctgtaatcaaaaaacagctcttcgccagtctggatggctctcttggcaaaaatacctatcctgtgatcaccgttaaccatcataacttttgcatagcagtttggatttaccgaatgatttgcaaaacgaattttgttacccttgcgggttgcatccaccacaaaatcattgttcaagttgaacagaaagctgcacatgtatttatcatacactttccctcttctgtcagcttcatcttgagaaataatctctccacagtattctgagatgaattcatttttctgcacaggatctttgataaaaatcccccagcctgccacgtcagatggtgccagcaatagatgctttttggagccccgctgaatactgcagttcttgcaggacacatttttactgtcccaatggtcagcggctccacaagtaagacagaggtcagggtcacactctcggaca

SEQ ID NO: 5423 - DNA, 203 bp, Homo sapiens
ccagagggccctctacagggaagtgatgctggagaaccacagcagtgtggctggactaggattcctggttttcaagcctgagctgatctctcggctggagcagggagaagagccatgggtcctcgacctgcagggagcagaggggacagaggcaccaaggacctccaagacagattctacgattaggactgaaaatgagcagg

SEQ ID NO: 5424 - DNA, 513 bp, Homo sapiens
  unsure (14): n=A,T,C or G
  unsure (15): n=A,T,C or G
  unsure (40): n=A,T,C or G
  unsure (478): n=A,T,C or G
aaagttcatatggnnccaaaaaagagcccacatcgccaangcaatcctaggccaaaagaacaaagctggaggcatcacactacctgacttcaaactatactacaaggctacagtaaccaaaacagcatggtaccggtaccaaaacagagatatagatcaatggaacagaacagagccccagaaataacgctgcatatctacaactatctgatctttgacaaacctgagaaaaaaaagcaatggggaaaggattccctatttaataaatggtgctgggaaaactggctagccatatgtagaaagctgaaactggatcccttccttacaccttatacaaaaatcaattcaagatggattaaagacttaaacgttagacctaaaaccataaaaaccctagaagaaaacctaggcattaccattcaggacataggcatgggcaatgacttcatgtccaaaacaccaaaagcaatggcaacanaagacaaaattgacaaatgggatctaagtaaacta

SEQ ID NO: 5425 - DNA, 167 bp, Homo sapiens
aaagaaacaccaccaaaaggggattagcttagtccatcccttcctcagtcatctgcttcccaccttcctccaaatgttatcccagaacattctggaggcagggagaaggggaggcagctaatcagagtctgagagcacgatgatctcttctggatcgcattgtgtgg

SEQ ID NO: 5426 - DNA, 306 bp, Homo sapiens
  unsure (14): n=A,T,C or G
ctgaggagcggcgncgggactttggagagaagttaactcgtctgcgggaacttatgggggagctgcagcggcggaaggcagccttggaaggtgtctccaaggaccttcaggcaaggtataaagcagttctccaggagtatgggcatgaggagcgcagggtccaggatgagctggctcgctctcggaagttcttcacaggctctttggctgaagttgagaagtccaatagtcaagtggtagaggagcagagttacctgcttaacattgcagaggtgcaggctgtgtctcgctgtgactacttcctgg

SEQ ID NO: 5427 - DNA, 487 bp, Homo sapiens
ctggctcaagacctctcctttctcagagcctggcccaggccccccactgcctgcagctcccttccggacattttgggtggtcagtgtcgtcctgggagcccttcttggtcttctccttctgggcctcatggcttttctgattctgcctcgagtcacacaagccatgcagaggggtctgggaagatccgaggtatctcctggagaagccatctatgatgtcattggggaaatgccgctagcaggactgtacgaggaaatcatggaggccgaggctgtgctccaagatgaggaggacggaagtgtggtgaaggtggacacagaagccgcagtttcaggggaggtgtctaacctcctggagggacagtctatacgtgcggagggaggacacagcagacctgtttctcagggatatgacgaggctgcgtttcctctggaggagatgacgttgtaaagcaacctgaggatgagatacaccagacctcggccg

SEQ ID NO: 5428 - DNA, 312 bp, Homo sapiens
gatgtgatggtgtccaccttccacaagtactcgggcaaagagggtgacaagttcaagctcaacaagtcagagctaaaggagctgctgacccgggagctgcccagcttcttggggaaaaggacagatgaagctgctttccagaagctgatgagcaacttggacagcaacagggacaacgaggtggacttccaagagtactgtgtcttcctgtcctgcatcgccatgatgtgtaacgaattctttgaaggcttcccagataagcagcccaggaagaaatgaaaactcctctgatgtggttggggggtctgccag

SEQ ID NO: 5429 - DNA, 292 bp, Homo sapiens
aaatttagcaataccatctcaaacctggagcaatcctggaacagttaccaggatcaccttttcccttcaatccttgtggcttctgggaatcttcagagcctgggtctgaaaggtgtttcctacatgtctcagggctggatgcaaacctggctggggacctgagcatcaactcccatttagaatcagacatctcccttccctgcaaatgtctacaactaccaaattgctccccaacagttagctcaatggattgaatttgcagaagccaactcctaaaatggggactgcctgg

SEQ ID NO: 5430 - DNA, 443 bp, Homo sapiens
  unsure (386): n=A,T,C or G
cctagtgcagctcgacgacgtttagtgcaatgttccgcggtctcttgcatacctggacgctactgtttctccaactcagtcacatagatcaggtggtcctcgggagacttgccgtgggtcttactaaggtgcagtttgactgcgtgcttgctcgcaaaagtccggttgcagagcttacattggaatgtggagcccaagtcttcctcggtggcccccagtgggcccagagttttgttggtgaggactttcgaaacattctgctgttcttgaatctgattgagtggcagcttggagagatccttcaggctgaagcccaagtgtgtctccaaatgacttatgtatgtagaagcagttctgaactgagaggcacaatcgttgcaaaaganaacaggatgccctgtgtccaggttctttaggaatttcgttccccctgtcctcctcaa

SEQ ID NO: 5431 - DNA, 342 bp, Homo sapiens
ctgcacaaaaacacttcagccaattctaacgcagagggagcatagacatggaggggctgggggttaggctgggggagaccagccttccctgctaagggctcgtggtccaagcccacaaccagagggtgctctgggtggtgtccaggaacatgcagtgccggctccggggaggagggacgagaagagaaaggggagtcacagaggaggctgcagatgagcacgagtttattggactctggcctcgcgctgctgcttgatgaagttgatgagcccattggtagaagcgtcgtgagaggtcacttgagcactgccatcaagctcaggctctattttcttagccag

SEQ ID NO: 5432 - DNA, 247 bp, Homo sapiens; identical to SEQ ID NO: 2922

SEQ ID NO: 5433 - DNA, 371 bp, Homo sapiens
  unsure (14): n=A,T,C or G
  unsure (15): n=A,T,C or G
  unsure (16): n=A,T,C or G
aaacatctgcctannntcccccattcctccaacacctagaatgtgctgaaactctattcctcttccaaagtgcatctcagcctcatgaagcttttactggtcctctttccggacagagttaaccttcacaccgagggattctaaacgttttctcaatcttggagtcatgggatattcacaatcaccctgtgagatactaaaggatggaaccagggctctaggggcagagccattttactaagctgacagagttggtgagtggcggtggctctgtattgactctgagctggttcccaagcctagcgcctttccactcggaccctggctcactgtccctgcagcgtctggctggatggtggtgttggtgtgtc

SEQ ID NO: 5434 - DNA, 313 bp, Homo sapiens
  unsure (178): n=A,T,C or G
  unsure (239): n=A,T,C or G
  unsure (267): n=A,T,C or G
  unsure (273): n=A,T,C or G
  unsure (275): n=A,T,C or G
  unsure (295): n=A,T,C or G
ctgagttcccttcccgaaggtcagctcggggctcccgacgatcatgcagaagtagatgccactgtcttccggcttcacgcttgtgagattgagaatgaaccggcttgcatcccgaaacacagctatcttctcctgttccacctcttcaccgtggatagtcccttttgcggaatcccanagggccaggaactcgtggtgactgtcactgctcggtgcctggcgctgtctcagccagtaanatgcgcatgttactgagggagattttancctcgnangacagcatcaccatcttgtnggtttgcacctttatata

SEQ ID NO: 5435 - DNA, 386 bp, Homo sapiens
ctgtcaatgcattccaggaagcagctagtcttttaggtaagaagtatggagagacagctaatgagtgtggagaagccttctttttctatgggaaatcacttctggagttggcaagaatggagaatggtgtgttgggaaacgccttggaaggtgtgcatgtggaagaggaagaaggagaaaaaacagaagatgaatctctggtagaaaataatgataacatagatgaaactgaaggctcggaagaggatgataaagaaaatgataagactgaagaaatgccaaatgattcagtccttgaaaacaagtctcttcaagaaaatgaggaggaggagattgggaacctagagcttgcctgggatatgctggatttagcaaagatcattttt

SEQ ID NO: 5436 - DNA, 372 bp, Homo sapiens
cgctgcctcagcctctgcctcccagcctctttctgagggaaaggacaagatgaagtggaaggcgcttttcaccgcggccatcctgcaggcacagttgccgattacagaggcacagagctttggcctgctggatcccaaactctgctacctgctggatggaatcctcttcatctatggtgtcattctcactgccttgttcctgagagtgaagttcagcaggagcgcagacgcccccgcgtaccagcagggccagaaccagctctataacgagctcaatctaggacgaagagaggagtacgatgttttggacaagggacgtggccgggaccctgagatggggggaaagccgagaaggaagaaccctcaggaagg

SEQ ID NO: 5437 - DNA, 407 bp, Homo sapiens
aaaatacattcaaataaaaagatataagttacttgcagtgaatgcacacatacaacagcagggagagctgagaacataattaaccaatactcttgtgttcagagaataaatagtctgaaaccgtgggactgaggcttgttccttaggggctttctcaaagtatccttggtggacataaggttaccctcactcaatggaaggacacatcttctgctgccggggaggacacagcatgacagtttcatttatatgggatgttttccttccataaatgtctggaacacggtgtcacaggacaccatggtgtacagtgcagccctcaaattagaataaataagtcacatggttggactggaatgccacagacacactatgactgaaactggaaggaacgagaatgtttattt

SEQ ID NO: 5438 - DNA, 332 bp, Homo sapiens
  unsure (227): n=A,T,C or G
tttttttttttttttttttttttaggacaggaagtagaatttattggtgagtattaagaggggggcagcacattggaagccctcatgagtgcagggcccgccacttgtccagagggccacgactggggatgtacttgaccccacagccatctgggatgagccgcttttcagccaccatgtcttcaaattcatcagcattgaacttggtgaagccccacttctttganatgtggatcttctggcggccaggaaacttgaacttggccctgcgcagggcctcaatcacatgctccttgttctgcagcttggtgcggatggacatgataacttgg

SEQ ID NO: 5439 - DNA, 428 bp, Homo sapiens
ctgtcaaacttggcctgggcctgctcccctccaatgccctggctgaagagcttggtgcagtcactctccagtgtcttcttcagagtggagatgttttcactgcagacttccacgttgttcagagtcaccaggaaggacatcttcgcctcgtcagtactctcgatgccttttgtgtcaaatttgccttgctggaggctgctgtgcatgatgttcacggcacttgtcaccccgcgctggatgtcctggaaggtggtggcaggaaagcccatccgcagcttattacacagaacatccctgaagtcagactccagctctgtggtggcgaggttgatcatggcacagagacagtcaatgctggagctggacagagcccgcccaatgcacttcttaacaatgtagaagacatcatccaccatgctggatgtcag

SEQ ID NO: 5440 - DNA, 360 bp, Homo sapiens
ccagaactgttacaaggccaccccttgcttcaagggaggttagagcagtgaatattcagcttctcctttctctactgtagaggtcagcgaggatgaagagagccagaaatgggcattgggtcagtcaagccatgcttctgacctgcaaagcctccatatcagacccaaaaattcacgagtaagtaagtaagagcttcaaagaacttctctccctcagccagggttaactataaaatgacccaaatatgcttaacagaccaaaaaaaaaaattggctaatgaatggaactatttacaactgtatttttgcaaatagaatcaaaagctagatattgaattaaatgaattgtttctacagttt

SEQ ID NO: 5441 - DNA, 333 bp, Homo sapiens
  unsure (20): n=A,T,C or G
  unsure (27): n=A,T,C or G
  unsure (99): n=A,T,C or G
  unsure (192): n=A,T,C or G
  unsure (216): n=A,T,C or G
  unsure (228): n=A,T,C or G
  unsure (245): n=A,T,C or G
  unsure (280): n=A,T,C or G
  unsure (291): n=A,T,C or G
  unsure (296): n=A,T,C or G
aaaagaaatgcaaactgcanattatanagtgcagctacacatatatataatggggtggatagtttatagtgtgctcattgctgctttgttattattagngttgagagttcctgtgctgtgtggaattcaacactaatctgctgtaagtatggagctgggtatgtggaacatttgcagggaagtttgtttctncgcttgtttttccaggggtattcnagatgacattgnagaggaagatgaccaantgagttcctatgcagtatttctatcttttattttnatccacaaagnctatnctggggacaagctagagcttgccttcactcaaaatgg

SEQ ID NO: 5442 - DNA, 333 bp, Homo sapiens
cctgaggtgcacaagcccatcagtggaagatatgaggtgtttgaccaggtcactcaggagggcgctggacatgacccagcccctgagggccaagcagactatgatcccgtcactccatatgtcacggaagctgagtctgtggttggagagaacaccgtgtatgcacaagtgttcaacttacagggaaagaccccagtttctcagaaggaagagagctcagccacaatctactgctccatacggaaacctcaggtggtgccaccaccacaacagaatgatcttgagattcctgaaagtcctacctatgaaaatttcacctgaaaggaaaagcag

SEQ ID NO: 5443 - DNA, 231 bp, Homo sapiens
  unsure (17): n=A,T,C or G
ctgcagaatagcaggtnagagggatcccagacttgaccaaatagccagaactggctacggttctgagaaatctatggaagcagtcttgctatgggcggcagaggagagtgaaaacagtcttcaaaatttaatcgtagaataattctatcaaattaagccctttattagagctgaaaaaattgagtttaagagcacagctagtttagcataaagtgcagattatacagtttt

SEQ ID NO: 5444 - DNA, 206 bp, Homo sapiens
gccgtgcgtggaccgcatcctcaagctctgccaggacatcttcctggtgcgggagactcgggagctggagctggaggaggagttgtacgccaagctcatcttcctctaccgctcaccggagaccatgatcaagtggactcgtgagaaggagtaggagctgctgctggcgcccgagagggagggagccggcctgctgggcagcgtgg

SEQ ID NO: 5445 - DNA, 384 bp, Homo sapiens
  unsure (14): n=A,T,C or G
  unsure (17): n=A,T,C or G
  unsure (215): n=A,T,C or G
  unsure (315): n=A,T,C or G
  unsure (319): n=A,T,C or G
  unsure (340): n=A,T,C or G
  unsure (361): n=A,T,C or G
  unsure (374): n=A,T,C or G
aaaagatactttgnatncaattaagaagagtttttaagaaaaaagaggaaggttctggcatggggagctctgcaacccactgctgggtgccagaagcgagctgtggagcggaagatgaagatggcaccatgtgtctctaaaccacaaatggaaccactgatttctatgtgtatttgcatttgctgtaatgtgtgggaaatctgaaggttacacancacaactgtccacagcagatggccctcgaaggggatgaggtttagaaccaggcagggcctggaaggactggattttacatggacatgggggacattgcanaganaaaggcatccaaggtgttctnacgaaatccactacaattgtncaagaaaatgaanagctgtgatt

SEQ ID NO: 5446 - DNA, 557 bp, Homo sapiens
  unsure (13): n=A,T,C or G
aaaaaaggcattngaatgaatgtttgactcaggtttgttaaattaaccttcagtaactgcagtaccaaaaattacactcaactgatgaaaaaaacgaattgtatgatttaggaatcaaaaactaaaataagtggaattatgtatcttttctaaagttaaaaaagtaaaatattttattatgagttattataaaaattggttaattgtataggaagatgacagcatttttttcaagttatcataaaaagtaattcagatgacatttgagaagtaggggaaagggaatcatgttgacagttttagttctgtgaacactaatttgtgtgaagctattaaaatgattgtaaagttgactactgtaaatttcccataattatgtgtgtatatgtgtcatatgtatgtacatgtatatgtctaaaaattactttacacatgtgcctacatagacacaccaagaagtggatgtatataatatagaaagtatatagcaaagtaattttactctgataataaaaattgtttgacatgtattttgttatgaatagtttatcttccaa

SEQ ID NO: 5447 - DNA, 496 bp, Homo sapiens
  unsure (12): n=A,T,C or G
  unsure (13): n=A,T,C or G
aaaaaaggcatnngaatgaatgtttgactcaggtttgttaaattaaccttcagtaactgcagtaccaaaaattacactcaactgatgaaaaaaacgaattgtatgatttaggaatcaaaaactaaaataagtggaattatgtatcttttctaaagttaaaaaagtaaaatattttattatgagttattataaaaattggttaattgtataggaagatgacagcatttttttcaagttatcataaaaagtaattcagatgacatttgagaagtaggggaaagggaatcatgttgacagttttagttctgtgaacactaatttgtgtgaagctattaaaatgattgtaaagttgactactgtaaatttcccataattatgtgtgtatatgtgtcatatgtatgtacatgtatatgtctaaaaattactttacacatgtgcctacatagacacaccaagaagtggatgtatataatatagaaagtatatagcaaagtaa

SEQ ID NO: 5448 - DNA, 229 bp, Homo sapiens
ccaatcaaggcttgctggagtgtctcccagccaatcagggccttgaggaggatgtatcctccagccaatcagggcctggggaatctgttggcgaatcagggatttgggagtctatgtggttaatcaggggtgtctttcttgtgcagtcagggtctgcgcacagtcaatcagggtagagggggtatttctgagtcaatctgaggctaaggacatgtcctttcccatgagg

SEQ ID NO: 5449 - DNA, 137 bp, Homo sapiens
aaacactgttataaaatgtagccaaagctcacctttgaacagatcccggtgacattctatttccaggaaaatccggaacctgattttagttctgtgattttacactttttacatgtgagattggacagtttcagagg

SEQ ID NO: 5450 - DNA, 221 bp, Homo sapiens
ctgtctccacccaggaaaaggaaagccaggtacacttctcatcacagtaagactagcctaacaggggaaaacagatttacatgtttcgttcattagcatattagggaaggggaaaccttttgggctctggccccgtggttgggaaacccttcctaagagcatggagccacactctggccttgatacagtagatgggacttaacacactctgatgctcaagg

SEQ ID NO: 5451 - DNA, 234 bp, Homo sapiens
cctacagatgaaggccaaataatccccaaacagccctgtttgatcacagaactaccattcataggaaattgtatgtaaaaacacaggactgtttctgggggcttatccaataaagaaaacaaacaacaaaaaacaaaccccaaaggattagatcagctactgcctaagcagattccacgtggactatattatcaacatttaatgggaacaactattcaaagctcccactcattt

SEQ ID NO: 5452 - DNA, 492 bp, Homo sapiens
  unsure (478): n=A,T,C or G
ctggtacacggcagggtcagggttctggatatcaggtaaaacagtcaattgtgtcccagatccaaaggtcagttgccttgcagaaccagaagactccatgtcacccacgaggcagtagtacacagcagtgtcgctcagggaaacccggggcaggctcagagtgctggactttctgtcggcagggataaacagggaggccacttcgtttgtaacttttgtcttgtatccttgaataataaatcgtggtccttggctgggaaactgttggtaccacgtgatataatcatttgtagcaatgttgttgtggctacaggttatgttcacttcttgtccttcatatgagtccatggagatgggctgggtggtcttagcaaggctcaaagtactcagggtcaggaacacgatcactctcgccacttgcctcatattctaggtgcaaactaggacccaggttctaggctcttttgctgtgtctganctgcaatgagccca

SEQ ID NO: 5453 - DNA, 218 bp, Homo sapiens
  unsure (29): n=A,T,C or G
cctcttgaaaaaccttaatcacagttaantgatggcatgggcaatgaattttaatcatatttaggaataaaatactagatattagtgtataacaattagatatatgttaattgagcactacaaagcctgaaagcttaacaaagtggggctataactagtaattttttggtaaaaatatagtgatctttttctacagggtattattataagggacaaat

SEQ ID NO: 5454 - DNA, 271 bp, Homo sapiens
  unsure (14): n=A,T,C or G
aaatttaacagcgncctcttgaaaaaccttaatcacagttaagtgatggcatgggcaatgaattttaatcatatttaggaataaaatactagatattagtgtataacaattagatatatgttaattgagcactacaaagcctgaaagcttaacaaagtggggctataactagtaattttttggtaaaaatatagtgatctttttctacagggtattattataagggacaaattatacgttgtaaattagattaatgaattttgtgagtttt

SEQ ID NO: 5455 - DNA, 297 bp, Homo sapiens
aaatgactgtgctgcccctttcacatcaaagaactactgacaacgaaggccgcgcctgcctttcccatctgtctatctatctggctgacagggaaggaaagaacttgcatgttggtgaaggaagaagtggggtggaagaagtggggtgggacgacagtgaaatctagagtaaaaccaagctggcccaaggtgtcctgcaggctgtaatgcagtttaatcagagtgccattttttttttgttcaaatgattttaattattggaatgcacaatttttttaatatgcaaataaaaagttt

SEQ ID NO: 5456 - DNA, 369 bp, Homo sapiens
aaaagtttttcttctgtaattgttgaacgggtgattattattaactctagataagcaggtactagaaaccaaaactcagaaaatgtttactgttagaattctattaaattttaagtgttgtattctttttcattgggtgatgtcagggtgataaccagacattcatggaaaggcatgcagtttgtccattgtgacagtttgtttaataaaaccacatacacactttatttaagattaaaatctaactggaaagtcagcttggaaaatggacatttccaagtatgtttggtgagtcacagatataaaaatagaaattctgatgagaggtttcagtttttaataccaagtccttaggagtcttaacattgg

SEQ ID NO: 5457 - DNA, 437 bp, Homo sapiens
  unsure (11): n=A,T,C or G
  unsure (12): n=A,T,C or G
  unsure (14): n=A,T,C or G
  unsure (410): n=A,T,C or G
aaattgtatgnncncacaagttttggacatgtctgaagtaaaagctaaggtacagtcactggaccttattttgggtgcacttcaattatgactgtgactttagtggtgggttagtatggtttattgcaatgatgcttttttaagccctttaatacagatgatgggtaccatggatgccagatgaatacatatttcaactagtattttacattcattccaaaagtgcctattatatgccaggcactgtcctattccacaaggatatataacagtaaatgaaccagataaatccctgccaccgaggaacttacatgaccaccagttaaaatcaaaacaattggaagagtaatgtaagaataaggatggtaagaatcatcagactggtatacgccattaccagaagcacagantgagattataagcctgttagaacacag

SEQ ID NO: 5458 - DNA, 207 bp, Homo sapiens
ccttgtcctacggccagaagccctacaagaagatgaaagggccggaggtcatggccttcatcgagcagggcaagcggatggagtgcccaccagagtgtccacccgaactgtacgcactcatgagtgactgctggatctacaagtgggaggatcgccccgacttcctgaccgtggagcagcgcatgcgagcctgttactacagcctgg

SEQ ID NO: 5459 - DNA, 390 bp, Homo sapiens
cctgaggcttctatctatcttggaacatgggctttccatcttagtcctcgggtctcaagtctcaaaccatctgtcttatactttgggccttctatccatatgagccttccaccttctgccctacttgagttctgggttttactgcagtctagggccttgttttggtcttggatcatctcacatggcagcctggcataaggaaccgctccacaatgcttgctctgatagccgacgttctgcacctatcaggcaggggttaggaagcccctctgccacacatgacacacacacacgtacacttgcccacatatgcaaagaaatatttaaggagagattacatgaaatcaaagagagggagatagattcatgaagaggctgaaatactcaaag

SEQ ID NO: 5460 - DNA, 610 bp, Homo sapiens
  unsure (579): n=A,T,C or G
aaatttgaacatgtactgtgacacttttgacacttttctgaagatttatcccgtttttctagcctttaaggtaatgctgaaggaatacatatactttaatatcaccttttttagaaacttaaaattgaatcaaaataatcagttttaaggaagctttttctcctccttccttttttgtagaggaaagaacacttgataaaaattagatttgttcttaaaaacacccatgattaccatcacattttcagcctgggagagattctcaaggaggtgatatagatcgcaatgatgtgatttatcaccctcaagaaaattcactaaaggctttttctccccaaagatcatattgaaagtaatcatttggagtaaattagaattattaactttaataagcttttatggaatcatgtactggatttactaattctcaaaatctttcactataaagatattttgttgaaacttactatttggcaaaagtttgcactgagcgttaactgctttcaacagtcttggcagattgagagtttgtggcagggaagagagggcactagtctcttcattaagattataaatttnataaaacaaaaaccaaatggagatctggaat

SEQ ID NO: 5461 - DNA, 314 bp, Homo sapiens
  unsure (23): n=A,T,C or G
  unsure (42): n=A,T,C or G
  unsure (66): n=A,T,C or G
  unsure (70): n=A,T,C or G
  unsure (85): n=A,T,C or G
  unsure (124): n=A,T,C or G
  unsure (127): n=A,T,C or G
  unsure (247): n=A,T,C or G
tgaacataacctgtatccacaanaacattgctacaaatgatnatatcacgtggtaccaacagtttnccanccaaggaccacgatntattattcaaggatacaagacaaaagttacaaacgaagnggnctccctgtttatccctgccgacagaaagtccagcactctgagcctgccccgggtttccctgagcgacactgctgtgtactactgcctcgtgggtgacatggagtcttctggttctgcaangcaactgacctttggatctgggacacaattgactgttttacctgatatccagaaccctgaccctgcc

SEQ ID NO: 5462 - DNA, 236 bp, Homo sapiens
ctgggcttgccttggagacctgcccctgctcagttctgttcctgttctcctggccctgggtggcccctactcgtcctctgtggtggatgtcagcatccctttgtcgatcagatgagaccgcagcgtgttgaagatgtggagctgctgatctggccgtaaagtcaggaactgctgaatcagtttgcttgggttagggcctctgataaaactggcgatgtatacattgacaaaggtgg

SEQ ID NO: 5463 - DNA, 292 bp, Homo sapiens
ccagcagccaggagggaggtaggctgatgtgatgggatgggatcttgccctgggttggtctcatggtgcagaagagcagtgttggaatcattctaatgcttcaggatgcctcatgtgccccatggagctcagacatcaggaggtgctgggactctatttagccgttcgatgatgcggttgttgtccaggaggtcagatgccggcagcttcatcccctcgcagagctcttgcatgtggagaagcaggccctttcgtgtagggctggggtaaggagctatgggaggcggcgagg

SEQ ID NO: 5464 - DNA, 284 bp, Homo sapiens
ctgagacccctgccctgtgagcccttctatccccacaagttgtcaggacaatcccttgtggttagggggaggggcggggagagagctctatttctcagccagtgccgagctaccctccctcctgggctgtgatttcatttgtgcaatgggggtgtgcaggagtcactagcttctcggggcctgtcccgcacatacacgcacttatgcgacatccagacatttgctacattttccaagggcttggcctctcccctccagcctccagaagggagggcaggacacag

SEQ ID NO: 5465 - DNA, 427 bp, Homo sapiens
ctgagaagatccttgaggacaattttggcctattcagaagaggacacagccatgcagatgactccttttcccacccaggtggaggaacttctctgtaatctgaatagcatcttatatgacacagtgaaaatgagggaatttcaggaagatcctgagatgcttatggatctcatgtacagaattgccaagagttaccaggcatctcctgatctgcggctgacctggctccagaacatggcagagaaacacaccaagaagaagtgctacacggaggctgccatgtgcctggtgcacgccgctgcgttagtggctgagtatctgagcatgctggaggaccacagctacctgcccgtgggcagtgtcagcttccagaatatttcttccaatgtgctggaggagtctgtggtctctgaggacaccctgtcac

SEQ ID NO: 5466 - DNA, 167 bp, Homo sapiens; identical to SEQ ID NO: 3712

SEQ ID NO: 5467 - DNA, 236 bp, Homo sapiens; identical to SEQ ID NO: 3713

SEQ ID NO: 5468 - DNA, 326 bp, Homo sapiens
ctggctgataagaagggcctccatgttgtggaaatccgggaggaatgtggccctctgcccattgtggttgcgtccccccgggggcccttgaggaaggatccagagccagaagatgaggttccagacgtcaaactgactgggaagatgtgaagactgcacagggaatgaagcgctctgtgtggtctaatttgaagagagccgccacgtaacctctctggccttgtgcagccagttcctgtgctgccctgcacctaggagagactcagcccctcacagcttgggatgttaccttgccttttgtttgttttgagggaagtttaatcttt

SEQ ID NO: 5469 - DNA, 87 bp, Homo sapiens
  unsure (15): n=A,T,C or G
  unsure (25): n=A,T,C or G
  unsure (62): n=A,T,C or G
cctggaaggtgtgcnggagtttggnagaggagtgatctaggtgaggggaatggaaggtgcanagaccatagctgagagggcctgagg

SEQ ID NO: 5470 - DNA, 461 bp, Homo sapiens
ccagagggaaggcccaagagacgtctctgaagccaccgttcctgattattcagaggcagggtccacagtgagtgactcggtggggctggaggaacccagggtgacccagagggggctctggagcgggtccctaacatctgaaaaagtcctcccagggaactcggagctggaacttccaggcagcttcgggggtgacatttgtatccggccagccgagcggggaaaggagaccttgtgtcctggcaacagggagagccgggactgggatggccacagctcagcctccaggtgaggagcccagggccctgctcgagctgtgacctccacggtcacggagtcctcggaaaaagagaagttgagcttgttcccctggtagaagatgccggagacgctcactctggagatccccgacagacacacagggtcaaaggtcacacccgctcgggtgaccctgaaccccg

SEQ ID NO: 5471 - DNA, 294 bp, Homo sapiens
ggccgcttctgtgtggtgtggggagacgctggtcctccccgtcctcccatagcgcttattgcctcaccctcaccccctaggggccggatccaaaggcgctgcactccccaagccttggggcatcagccaggaaggtttcctacctcctaattcaggggcaggactcctcttttccccccacggggaaaagaggcagaaacttaggggtttccctcctttcttagggtcagacgctcttagggtccacttcttcaggggcggaagcctctcctacccttcccataggggcacagg

SEQ ID NO: 5472 - DNA, 176 bp, Homo sapiens
cttttgtaatggaaatctcgcgagggttaatcttctcttgagaatggcagtcaagaaatgagatggttcacttgactactgagcagttacaccaaggagagcgtgaaggagatgattgagccagagaagaaacgggttgtgatggcaatggtgtgggggaaatgaacttgagcttt

SEQ ID NO: 5473 - DNA, 247 bp, Homo sapiens
  unsure (16): n=A,T,C or G
  unsure (18): n=A,T,C or G
  unsure (19): n=A,T,C or G
cctggaaggtgtgcangnntttggtagaggagtgatctaggtgaggggaatggaaggtgcagagaccagagctgagagggcctgaggcactttccagagcgtggggaggggcctccaccaaggcgagaagggctgcaggtccagatcaccagcgtttgtagacagtagtgtggcgcttggagtttacctgagggccagtggagctccagggacctatcaggacggggacctgtggggactgggaagg

SEQ ID NO: 5474 - DNA, 345 bp, Homo sapiens
aaaaagaccacatgaaatgctgattctaattgtgtgtaggtcttgaggattaagcacacaaatttcacaaacttctgtttgagtaaacaaactcggccttctgtaaatatacatgcaagtttggaaacagtaatactgtacctataaatatatgctgtctgttttgtgtacagtatgtaaaaactccttttctgccacactaaaaatgcaagccatttatgggaatcctaaaactagtattgaactaaaactttgctaatgatctttattagaggatcgtccaacttttcacttaccttgggttttcttttcaattcactcttacactagtctgcttatttccag

SEQ ID NO: 5475 - DNA, 369 bp, Homo sapiens
cctaatcttttcttcccacccccacccagccatcctgtgtgccctcttccccttggaggccactgccctaagtgaggatcagcatcgactccaccacagcccactttagtggtgacaacttttaatccacggaagcagtttttcaaagtgaaaactgtttcaaatcacgaagcttaccacttagacaattcagacaaggtaatgctcatttagactgacacaggtatgaaaattccaatcccttcttttcactatcattgtatctgacacacacatcaccttcctaggcactatgacactatcctgggagaagcaaatgtgtacaaagaagcacaatcctgctctctccccacacttcacataaaccag

SEQ ID NO: 5476 - DNA, 315 bp, Homo sapiens
aaagaggccacacatcttttttctgacttgaataaactgaaaccagatgactcaggagttaatatagcagaagctgctgcccagaacgtgtactgcttgagaacagaatacattgctgattatctcatgcaggaatcacctcctcatgtagaaaattactgtctaccagaagctatttcatttattcagaataataaggaacttgggactggattatcacaaaagaggaaagctcctacagaaaaaaataaaatcaaacgacctagagtacactaatcgcatctaccctttagttaccaaacattaaatgttttt

SEQ ID NO: 5477 - DNA, 257 bp, Homo sapiens
ccaaatcttttgccgtctaggcccagccaggcttttctgactaaataagcaataagaggctctaagctgactgagttgcaaggaccctttccgccctcccttggatctccatgtttttccagatggcggaagagcatgtgccaccccctttcctaacagacttgtccaagtgcttggcgtgggacccatgaccaaagcccaggatggcttggtgggagtgtccctgctgcatctgcatgaagcccctgctttttagg

SEQ ID NO: 5478 - DNA, 178 bp, Homo sapiens
  unsure (11): n=A,T,C or G
  unsure (12): n=A,T,C or G
  unsure (80): n=A,T,C or G
  unsure (99): n=A,T,C or G
  unsure (100): n=A,T,C or G
  unsure (109): n=A,T,C or G
  unsure (110): n=A,T,C or G
  unsure (176): n=A,T,C or G
ccagagggaanncccaagagacgtctctgaagccaccgttcctgattattcagaggcagggtccacagtgagtgactcgntggggctggaggaacccanngtgacccanngggggctctggagcgggtccctaacatctgaaaaagtcctcccagggaactcggagctggaacttnca

SEQ ID NO: 5479 - DNA, 344 bp, Homo sapiens
aaaaatggaactctgaaaattaagcatctgaagaccgatgatcaggatatctacaaggtatcaatatatgatacaaaaggaaaaaatgtgttggaaaaaatatttgatttgaagattcaagagagggtctcaaaaccaaagatctcctggacttgtatcaacacaaccctgacctgtgaggtaatgaatggaactgaccccgaattaaacctgtatcaagatgggaagcatctaaaactttctcagagggtcatcacacacaagtggaccaccagcctgagtgcaaaattcaagtgcacagcagggaacaaagtcagcaaggaatccagtgtcgagcctgtcag

SEQ ID NO: 5480 - DNA, 320 bp, Homo sapiens
aaaagcctgagggaacctggaggggggctcccactctctaccttctttcctccgagtttgtgactccgagatggacaaagtgtgtgctgtttttggaggctcccgaggcattggcagagctgtggcccagttaatggcccggaaaggctaccgactggcggtcattgccagaagcctggaaggggccaaagccgccgccggtgacctcggcggagatcatttggcatttagctgtgatgttgctaaagaacatgatgttcaaaatacatttgaagagatggagaaacatttaggtcgagtaaatttcttggtaaatgcag

SEQ ID NO: 5481 - DNA, 188 bp, Homo sapiens
ccacagcgcatcactttccttgcaaatgttcactgacagcagcacggtggaaagcatctcgctccagtgtgcgtgcagcctgaaagccatgatcatgtgccaaggccgcggtgcgttctgtcacgatgactgtattggaccctcaaagctctgtgtattgtgccttgtggtgagataataaattatgg

SEQ ID NO: 5482 - DNA, 347 bp, Homo sapiens
ccattcttgcactggcagagagtacactcagtgccatgtttgatccaagaggacccggtgaagcgaaccacattcatttcgtccaggcaagtcttggtgatgtcattgcggatggtgtcagcctggcaagggtctgtgacacagcgcgggcagcactcattctctgggagaatgctgaattcacactccacatctgggcaaggcaggggccaacaatcaacttccccttgctacaaggaaagcagatgtgcaagggcagagggagagggaggaggaaatggagggaggccaggaaaaagcagatgagcacagtgtttactgaatactcaattatttgattgatattt

SEQ ID NO: 5483 - DNA, 319 bp, Homo sapiens
ctgacagttctccatggcaactcagtcctccagcagacccctgcatacataaaggtgcaaaccaacaagatggtgatgctgtcctgcgaggctaaaatctccctcagtaacatgcgcatctactggctgagacagcgccaggcaccgagcagtgacagtcaccacgagttcctggccctctgggattccgcaaaagggactatccacggtgaagaggtggaacaggagaagatagctgtgtttcgggatgcaagccggttcattctcaatctcacaagcgtgaagccggaagacagtggcatctacttctgcatgatcg

SEQ ID NO: 5484 - DNA, 373 bp, Homo sapiens
ctggctttcctgtcccaaatcagccagtgtataatcagccagtatataatcagccagttggagctgcaggggtaccatggatgccagcgccacagcctccattaaactgtccacctggattagaatatttaagtcagatagatcagatactgattcatcagcaaattgaacttctggaagttttaacaggttttgaaactaataacaaatatgaaattaagaacagctttggacagaaggtttactttgcagcggaagatactgattgctgtacccgaaattgctgtgggccatctagaccttttaccttgaggattattgataatatgggtcaagaagtcataactctggagagaccactaagatgtagcag

SEQ ID NO: 5485 - DNA, 490 bp, Homo sapiens
aaaaacagaaaatctttattgtgccataactgatttttagtatacaaaaaacctaatataacctaatttcctggaccaaataatgtaaaataggccaaaatcaagccacagcacaaaggatactattggatatggacctttttgctttggtgaaaacttcaaagtaaggagacactgtcaatcaattccactaaaattgcatttattttcctgtcatagtaaaaaaaggaaaaacagtagcaaatactgggcttcgttttccccctcaacggcacgccttccacaacagcacaggtggttctctgcttcactggcagaaccacacaagcttatcctagagaaaatctgctgtcgtaagtccacaaggaagagttgactgggcccaccgctatagccaatacttccagaatcaccagcccaccttcgtcaaagggctgactgtggcagcaaggggtgtctgtcacattcgtcctggctcactgagcccagg

SEQ ID NO: 5486 - DNA, 241 bp, Homo sapiens
ctggaaagcattggggagcttttctcaagatcagtcacacatagacaactctctgaagtatatattaagtggcagaaacactcccagcttctcaaggacagtgattttagttttcaggagcctatcatggctctacgcacagtcattttggagatcctgatggaaaaggaaatggacaactcacaaagagaatgtattaaggacattctcaccaaacaccttgtagaactctctatactgg

SEQ ID NO: 5487 - DNA, 232 bp, Homo sapiens
ctgatgaagacggagcggccccggcccaacaccttcatcatccgctgcctgcagtggaccactgtcatcgaacgcaccttccatgtggagactcctgaggagcgggaggagtggacaaccgccatccagactgtggctgacggcctcaagaagcaggaggaggaggagatggacttccggtcgggctcacccagtgacaactcaggggctgaagagatggaggtgtccctgg

SEQ ID NO: 5488 - DNA, 506 bp, Homo sapiens
tgctctttcagctttgaacgtcctttcccattctccatcatccacattcacctatcctgcctgccccagttaaaatcctgtttcttctaggaagtccctcatcccacccgcttaccccagggagactgagcttgttccttctcctagtaagaccctcagcccatggagtcctgtgtgatgttgtgagcgtgggaggacagactgaactgctcggcccgtggagtcctgtgtgatgttgtgagcggggaggacagactgaactgcgtggtgcttcgcacatagacctcaacagggattggcattttgaagctgttggcgggggctgtggactgcttttcttcctttctagctcaacggcagctaaagccactgcatacaatgcaaggactggctcctgtttggccgcgactgattgcagcccctggtgaaatgagaaccctgtgggtcggaacaaagtttggattatttatgttgcaagtaactaaaatctcaagtgaaactggttt

SEQ ID NO: 5489 - DNA, 282 bp, Homo sapiens
tgctcactcaccctggcacattcagcccccctaacccaccttgaacattgaccaccacacactccctggcacgctcttctcaccctcaacttctgccacctctccctgggcaatactgccagcctttccctaatctcagagctgcagccctgccctgtcactcacctcaaacctgccatgtccctggggctactgaaattccaggcagtgggtgaagaggacgaggaggatgaggagggggagagcctggactctgtgaaggcactgacagccaagctgcag

SEQ ID NO: 5490 - DNA, 326 bp, Homo sapiens; identical to SEQ ID NO: 3635

SEQ ID NO: 5491 - DNA, 480 bp, Homo sapiens
aaatcacagcttttacctatttgttaggctatagtgttttgtaaacttctgtttctattcacatcttctccacttgagagagacaccaaaatccagtcagtatctaatctggcttttgttaacttccctcaggagcagacattcatataggtgatactgtatttcagtcctttcttttgaccccagaagccctagactgagaagataaaatggtcaggttgttggggaaaaaaaagtgccaggctctctagagaaaaatgtgaagagatgctccaggccaatgagaagaattagacaagaaatacacagatgtgccagacttctgagaagcacctgccagcaacagcttccttctttgagcttaggtgagcaggattctggggtttgggatttctagtgatggttatggaaagggtgactgtgcctgggacaaagcgaggtcccaaggggacagcctgaactccctgctcatagtagtgg

SEQ ID NO: 5492 - DNA, 307 bp, Homo sapiens
aaatccttagcactgagtttgaatggtataaaaagtataacttccatagatgagctgttgttaggaaggcaccaaagaacctcctctgcactaaacaggagaatggaaagaaaagtctccattgagtacatatcatgtcagtttagtaatcaattatgttgatattgttaaactggttcaaagaaataaactggcaatatgtaaagtaattcctcatttgtgtcactatgatatagagatattaaaggaatgttggtttgctaaatagtatagatgtccatttgtactatagtttactgagcatttt

SEQ ID NO: 5493 - DNA, 258 bp, Homo sapiens
ctggaaagaccaatagctgactggaaagaagaaaggaagcagtttctattttcaatgtagaaaaaaaatctaatcgctacaaaggtcttgtaaaatcctcaaaacaaggtctagccaagtttattgtttggtaatttttttctttttttaaggggaaaaaaagcaagatttaatgtgaatactactggttacaactaatataacagcttgaaaaaatcatgacacagaagcataaatataatataaaaagacaatttt

SEQ ID NO: 5494 - DNA, 197 bp, Homo sapiens
cctacagggggggactatgtctagagtaggctgaacctgtaaagtggggctcccagataaattgggggcccctgagcaggaaggacctgactggcttaatttgacctggcccaggacagttccctttctgaaagaagggggcattctatgaaacacctgggtagaagtccagcagtgaagagttgggtcagtgtgta

SEQ ID NO: 5495 - DNA, 268 bp, Homo sapiens
ccatcatgtttaagttgaggaaaactcagttcttaaattatctgggaagggtctggattctctatttttgagattgactttatcacaatatgattcttacatctttataccatttacaattgtgttttagatctacagagttagaaattcgaaaactattccaggactaattcttaatcggcattatttatacaagaggtcaagtaacatttactagcgcaatactgcacttgtaaatgaattataaacgctcttctggaatatattt

SEQ ID NO: 5496 - DNA, 490 bp, Homo sapiens
  unsure (11): n=A,T,C or G
  unsure (12): n=A,T,C or G
  unsure (14): n=A,T,C or G
  unsure (49): n=A,T,C or G
  unsure (137): n=A,T,C or G
  unsure (276): n=A,T,C or G
  unsure (398): n=A,T,C or G
  unsure (418): n=A,T,C or G
  unsure (438): n=A,T,C or G
  unsure (464): n=A,T,C or G
  unsure (482): n=A,T,C or G
ttttttttttnntntttttttgcatcaagattcctgtactctaccctanaactaatacatctgaatctctgggaatggagtataacaatcagatttgaaaaggtttctttagtaattttaaggactgaccagtttanacactgctttgttagagtaaaatgattaggtacctagtatcaacctagccatccaaccttatattaataactaggaaaataaagggttggagcctctgtgtttctttgttgaaaaatctgctactattattagatctgngaaaacaattgaaaattcggttattatcaccttaaaagtacaaaacctatagattttgaaaatgtaattatttttctgtaggcatagttaaaaagattttgtaaatgttataaatcagtttntttataagcggtttatttanataaattttgttatactganatgattcactaatttttctaaatatnaatggttcagcctcttanttattttt

SEQ ID NO: 5497 - DNA, 489 bp, Homo sapiens
  unsure (282): n=A,T,C or G
  unsure (308): n=A,T,C or G
gccgccgcttgtgctgcagccatgtctctagtgatccctgaaaagttccagcatattttgcgagtactcaacaccaacatcgatgggcggcggaaaatagcctttgccatcactgccattaagggtgtgggccgaagatatgctcatgtggtgttgaggaaagcagacattgacctcaccaagagggcgggagaactcactgaggatgaggtggaacgtgtgatcaccattatgcagaatccacgccagtacaagatcccagactggttcttgaacagacanaaggatgtaaaggatggaaaatacanccaggtcctagccaatggtctggacaacaagctccgtgaagacctggagcgactgaagaagattcgggcccatagagggctgcgtcacttctggggccttcgtgtccgaggccagcacaccaagaccactggccgccgtggccgcaccgtgggtgtgtccaagaagaaataagtctgtagg

SEQ ID NO: 5498 - DNA, 159 bp, Homo sapiens
  unsure (11): n=A,T,C or G
  unsure (12): n=A,T,C or G
  unsure (14): n=A,T,C or G
  unsure (74): n=A,T,C or G
  unsure (98): n=A,T,C or G
  unsure (101): n=A,T,C or G
  unsure (102): n=A,T,C or G
  unsure (141): n=A,T,C or G
  unsure (142): n=A,T,C or G
cctcctgcagnntnccgcacagcaaaccgcacgctatggctgacagccgggatcccgccagcgaccagatgcancactggaaggagcagcgggccgcncannaagctgatgtcctgaccactggagctggtaacccagtannagacaaacttaatgtta

SEQ ID NO: 5499 - DNA, 528 bp, Homo sapiens
ccatctcccagaaagtttaacaaaacccgaccaggttgcccccttcaccttcttacaacctcttcccctttccccaggggtcctgtcctccactccagatcattcctttagtttagagctgggcagtgaagtggatatcactgaaggagataggaagccagactacactgcttacgttgccatgatccctcagtgcataaaggaggaagacaccccttcagataatgatagtggcatctgtatgagcccagagtcctatctggggtctcctcagcacagcccctctaccaggggctctccaaataggagcctcccatctccaggtgttctctgtgggtctgcccgtcccaaaccttacgatcctcctggagagaagatggtagcagcaaaagtaaagggtgagaaactggataagaagctgaaaaaaatggagcaaaacaagacagcagccactaggtaccgccagaagaagagggcggagcaggaggctcttactggtgagtgcaaagagctggaaaagaagaacga

SEQ ID NO: 5500 - DNA, 406 bp, Homo sapiens
cggccgaggtaaagctggctcaagactggcccaggcataatactgtcaatctaaaggtaaccggcaacatcaaaaagtacatctcaaaagaatcaggcttaaagataaacaggagaactggaaatatctaagagtaagaagtgtaaacaatagaaaagaggtagggtttagggttctcatcttgggatttccccaggtcttcaagcttctatccttcccgggttctgggtcatgggcctccagattccggccgttagtcttgagatacctttttcgcttgggtcctctatccatctaggtaggctttgtgacaggggccttccatccttgggttgtaggtcttccagctacaaccctgggctaatcttaggtcgttggccttgtgtcacaagtctcagttcttagg

SEQ ID NO: 5501 - DNA, 377 bp, Homo sapiens
cgccaacatgggccgcgttcgcaccaaaaccgtgaagaaggcggcccgggtcatcatagaaaagtactacacgcgcctgggcaacgacttccacacgaacaagcgcgtgtgcgaggagatcgccattatccccagcaaaaagctccgcaacaagatagcaggttatgtcacgcatctgatgaagcgaattcagagaggcccagtaagaggtatctccatcaagctgcaggaggaggagagagaaaggagagacaattatgttcctgaggtctcagccttggatcaggagattattgaagtagatcctgacactaaggaaatgctgaagcttttggacttcggcagtctgtccaaccttcaggtcactcagcctacag

SEQ ID NO: 5502 - DNA, 367 bp, Homo sapiens
gttttttaccgccttgtctggcactatgaccacgcttcagggttgcttctgggggtcttggtccctggatgtgccatttccttgcccttctgaccctcacacttcttccaaagtcttgagcagagttgggggccaatggtagcattgctgtcatctctgggaggagagtgagtatacaagtcagtgacagttcagccaggctcccttgggtttgggaagaggcactgcccttctgtgctgtggatcctgcttgtctgctctggagtccccccacccttgccaggagcttcacaaaccagagacgggctgtcagcaagagctcagacaggatgtggtgcaagtgcaggtgcacgagtttaaccctcag

SEQ ID NO: 5503 - DNA, 381 bp, Homo sapiens
ctgaaggccaaaggaatgtgcctgtgggatgccaaagccatcagtagctggaagaaagaatacctctttctagaggtttggtgtcctcttgctggcctgtcattatttggaaatacgcgcttttggaatttccttcattttcgctatttccaggttcagaaatcatacctaccacttgttctttctttgcccagtaaaactcagggtttctcttattcagagttaccatgttgcacacccccggtgctcagcctgcccagaagcccttctctgatctcagcaagatcttagtagtaaagctaacggatccattgaaattcatactcagcatctgtgactactagacaaagcccatttactgaaccataagtgtgcactttt

SEQ ID NO: 5504 - DNA, 264 bp, Homo sapiens
ccaacattggagaccacttctgtcaaatggtgatttctgaaaaggaagctatgtcaactattgagccacacagacaggttgcttggaagcgagctgtcaaaggtgttcgagaaatgtgtgatgtgtgcgacaccaccatcttcaacctgcactgggtgtgtcctcggtgtgggtttggagtatgtgtggactgctaccggatgaagagaaagaattgccaacagggtgctgcttacaagactttctcttggctaaaatgtgtga

SEQ ID NO: 5505 - DNA, 279 bp, Homo sapiens
gtgtgagaggtgtggtagcagattgcaatgctctgcacctcttccttgcaagtgagcaacttcaggctctctgggcagaggctggcccactgtagtttgcagacatgctctccagatggttttactaagtcccctctccctgatagggaatcctgctggaccagcgcagccctggtgtggagaggttaaaagacttgcacaggatcaccaagtcatgctgtagagccaggattcctagacccagggctctgcactctcaaggctggccccatgtgctca

SEQ ID NO: 5506 - DNA, 406 bp, Homo sapiens; identical to SEQ ID NO: 5500

SEQ ID NO: 5507 - DNA, 270 bp, Homo sapiens; identical to SEQ ID NO: 2914

SEQ ID NO: 5508 - DNA, 497 bp, Homo sapiens
ctggtgatcaagtctgggaacagccgtaacaggtcaaccttgtggagccatcgcgagttagagggtgaaagatggcagaaaaaaaagtcttgtgtgtgagtgtgttttttgagtttgcatcaatcttaatgtctcttcataatacttttataatacattaagcctcttgtctacatatttggagagaatatgactttactagcagagaaatacaatatatcttgtctactggactgtaaaatatatgtatgaaataaaattagttccatttggtcttctagtatattaaagtgctatctgacgttgttatcctgtttttgcaaaaaaaaaaaaaaagttaactacagaccattgtttctaataagcagagagatctattttagtagtaaactgaaggtttagttgtgagcttcagattttgtgaactccagatgttgtgcggtgttttttttttttttaagacaacaactaaaaaaatgcaaggaatatgtacactg

SEQ ID NO: 5509 - DNA, 286 bp, Homo sapiens
aaatgaacacattccaggcaatgtaagacagtcaaaagacaaactcaaatccctgagaatggctgggaagggaagatggtggtaaaaattccaaatgagtgaaacttacaaagggcagtctcccctgcctgggctctgtcctagacagaagtgacagtgatgactttggtgatgttctccccagtgcagagaactgcattcagaattagacaacctcagtgacgagtatctctcctgcctgcgtaagctgcagcactgtcgagaagagctgaaccagagccagcag

SEQ ID NO: 5510 - DNA, 419 bp, Homo sapiens
ccttctaattagtctaacttaaacggacgggattcacctaacaaaagcaagaagaaaagcacaagaacaggtgtcttaatgcatttggataatttatttggggtgtgtgcgtgtgtgtgtgtgtcttggtggaggtgggggccgtgttctcaccaagccttttcataatcaagtttgctttgcaaactttatggccttacacccagcagaacagtccttgctaataaaaggaggatgccctgtcacagttctctgtaaattatcatgtgttgggaagttctgttgatgcttagtttgatcttccatggtggacacatctgttctgtatgtacaaggcattacatgtgtgttttagcggatgggaattgaagcctttccacagtccttgtgctctgagatggctgttgagctctgctcag

SEQ ID NO: 5511 - DNA, 264 bp, Homo sapiens; identical to SEQ ID NO: 5504

SEQ ID NO: 5512 - DNA, 275 bp, Homo sapiens
ctgggcgacatcggcacgtcctgttacaccaaaagtggcatgatcctttgcagaaatgactacattaggttatttggaaatagcggtgcttgcagcgcttgcggacagtcgattcctgcgagtgaactcgtcatgagggcgcaaggcaatgtgtatcatcttaagtgttttacatgctctacctgccggaatcgcctggtcccgggagatcggtttcactacatcaatggcagtttattttgtgaacatgatagacctacagctctcatcaatgg

SEQ ID NO: 5513 - DNA, 335 bp, Homo sapiens
  unsure (16): n=A,T,C or G
cctgcttcacttgcanataagtttattataattctccagaaatgtgcaggatgtgcattagcaaattgcactgtacttttcactccagcctgggtgacagagcaagactcccgtctcgggggcttaaaaaaaaaaaaaatgctgtatctaaatgaatctgtgtaattgggcccagatgtgggtttgctcagtattagtagacaaggtctttgttcagacgattaggtgcctaactggcaaatgccttagtttcttaaaacgtattttctgatgtggctttacatttcaaaagtgaacttgattcaacctgagaaaactgattaaaaaattagttt

SEQ ID NO: 5514 - DNA, 294 bp, Homo sapiens
ttggcatttcaagcaggaaatgaaatgcttgctttaatggcaaagcagcgttaacatttttcctgtcgtgtagcagagagtacaagaatcatttcagcaaagcagtgactcaccatgagacgttatctccgtggagctgcgttttgacttttcccactctcttactcatagaaggaggacaaaggaacgaaatgaaatcatgctcacaatgaactgttcattacatcaactgatctctctctctctctcttcctctctttctctttctcccataccccaaggcaaaattttttt

SEQ ID NO: 5515 - DNA, 93 bp, Homo sapiens
ttttttttttttagataatatatattaaaaaataaacctccaattcagggtataaaaacagagcgaaggcacttgggggtgggggtggagggg

SEQ ID NO: 5516 - DNA, 188 bp, Homo sapiens
cctgggacctggcctgcacccagtctgtggcccagggaggcatggcaccctagcagcaaagcctgggcaaaggctgagccataccagacacagtagcccaggctacacagggcagagctgcgagtgctacctagccctggggccaaggcgggcaccacaatgctgaagagggcactgcccacagccag

SEQ ID NO: 5517 - DNA, 286 bp, Homo sapiens
aaatgaacacattccagacaatgtaagacagtcaaaagacaaactcaaatccctgagaatggctgggaagggaagatggtggtaaaaattccaaatgagtgaaacttacaaagggcagtctcccctgcctgggctctgtcctagacagaagtgacagtgatgactttggtgatgttctccccagtgcagagaactgcattcagaattagacaacctcagtgacgagtatctctcctgcctgcgtaagctgcagcactgtcgagaagagctgaaccagagccagcag

SEQ ID NO: 5518 - DNA, 356 bp, Homo sapiens
ctgacagttctccatggcaactcagtcctccagcagacccctgcatacataaaggtgcaaaccaacaagatggtgatgctgtcctgcgaggctaaaatctccctcagtaacatgcgcatctactggctgagacagcgccaggcaccgagcagtgacagtcaccacgagttcctggccctctgggattccgcaaaagggactatccacggtgaagaggtggaacaggagaagatagctgtgtttcgggatgcaagccggttcattctcaatctcacaagcgtgaagccggaagacagtggcatctacttctgcatgatcgtcgggagccccgagctgaccttcgggaagggaactca

SEQ ID NO: 5519 - DNA, 405 bp, Homo sapiens
ccttattttgtcatactaagtgtctcctgtaattttcaggaagatgatttgttctttccagaagaggagacaaaagcaagatagccaaatgtgacatcaagctccattgtttcggaaatccaggattttgaattcgagatgaaacaaccagcaatcacagttaaatcttaactttgcctgcactctttgtaggaatgatcagaaatttatctttatcattctgagtgcttcaggagtacaataggaagaaagatactggagaaagcacaagtgtaatcaccatgaagtctgacaacaggagcccattatttgcgtactgtcccaccctgtatcatggttctctgggaacaagctttatgattctcattagagtttatttgttgattgtcagtagttgcgactttt

SEQ ID NO: 5520 - DNA, 208 bp, Homo sapiens
aaaataacctaaattagaactacatataaacagggagttttctcatacattcagaacccaagcaacagcaactatccttaaagctcaaaactgattacagctaacatcaggtccgacgtgacttacgtaaagctgaacccagagttagttcaagttaagattttacgaattttacaaaacatgaactttgatcttggcctctgtcttt

SEQ ID NO: 5521 - DNA, 488 bp, Homo sapiens
cctgcttgatccataggctcacatttgatcccaactggcggctgcttcttggcattaactttggattcccaaccagtaaatcttagcaagatctgagtttctccaggtatgatattattttgtttgaccatccttatcttcaagggctgtgggatctggcagctcttcatttggcccacaccgtgtgaggttgctcttggtgcaccgaatggggaagtttctacatcagtacctcggagagtccactggaagccctggacagtgggaattggtggcacccccagcatggaggccaagaacacacagcactgaagctccaggacaccctcaggaggacggtaagggacggtaaggtgagagcctgggtcaccaggaaccttcgcctgcatctaaacaggatttgctttcagattgcctgtaggtcccagctacttgggggctgaggcaggaggatcacctgagccttgggaggtcaaggttgcggtcag

SEQ ID NO: 5522 - DNA, 236 bp, Homo sapiens; identical to SEQ ID NO: 3713

SEQ ID NO: 5523 - DNA, 287 bp, Homo sapiens
cctctcctgtgggttccagaccctgttccagcaacaattgctgggacacctgggccgactgctccacctcgccaggccctggccctctccatctcagccctgacagccacccagtgataaacacagcaggcttcctaagcaatgtgacgcaccagaggggtggtggtacacgctccccttgaagtcatctgaaaattagagaacagatttgcctcagagctgaagagagaccctattccaagcatgaatggccttgacaatgttcctgcccagtgagcgacccttgg

SEQ ID NO: 5524 - DNA, 312 bp, Homo sapiens
ctgccgggcctgcttagctcctccctaggcagaagctttgttccagccccacttccacatcccaactccacagtcaggatgggaggcacatggttgctagcaggggaaagaatactgtagttccagcctctgctcctttcagtctcagcctggatggtggtcactcatccctctgcagctagttcctcacttgtcccagcccaggagccaggagggcactcaatcacacccaaaggagcaggcagtgtgacttcagtcatcttcagatgactcctcttctgcctcttttagccactggatgaacctctgcag

SEQ ID NO: 5525 - DNA, 269 bp, Homo sapiens
aaaaatgaatttcctgagtattaatactaaaatactgttacatgatcagctcttgatataattgaagagatttcagatacctgatgagtctcattctcacactaattcagaaccttggaaggcactgagtgttcaaaaaaggtagctcttaactgaggaccctctgttgaaccattgtgcgcacccctggctcttgggcagtgtagtagcaggaagacagggttgttgccattagaaatggaggctttaactctccctgtcccccattt

SEQ ID NO: 5526 - DNA, 329 bp, Homo sapiens
aaagtaacgttactgctatatccttaggcacggtaagctgaggatattgtgagtgttcgcaaatatacagagaccaccctcacatgtagaaccgtagaatcctagagttggggaaaagaggtcttgggggacatctggacggctcccctccagagtagaaccttctcccccgtgggttccacattgctctgtggggggcagagcatggtacggtgtgcaagaaacaagctctccaagtcacctccccccatacctccatctccttatctggaaaaggaggggagtcatccacatgacctttgaaagcatttccagctcagttactttgg

SEQ ID NO: 5527 - DNA, 346 bp, Homo sapiens
ctgggcccgggggaccactaccaccaattcgcggagaccagtagtggccccgaatgtctagctgcgctgttatttattggatacaaagcaaaaggggcagggtaaagagtgtgactcatctccaatgatatgtaaggttacgtgggtcacgtgtccactggacagggggcccttctctgcctggcagccaaggcagagagagagaggaagagagagagacaggcttatgtcattatttctgcatatcagagacttttagtactttcactaattttgctactgctatctaaaaggcagagccaggtgtacaggatggaacatgaaagtgggtggaccaggagcgtgg

SEQ ID NO: 5528 - DNA, 142 bp, Homo sapiens
cctgcccgtccgccagtgagtccttggtttttaataatgagaagtcctttcccccaaggtgtgagcattgcagcgcagtgtgtgtgtgtggttagagccagcttagtccttcactttgtcgaccgaagtgggagctcaacag

SEQ ID NO: 5529 - DNA, 470 bp, Homo sapiens
  unsure (259): n=A,T,C or G
  unsure (316): n=A,T,C or G
  unsure (317): n=A,T,C or G
  unsure (318): n=A,T,C or G
  unsure (402): n=A,T,C or G
aaatgatctgccaaatctctttgatagtttaggaatgttgtggggagggttcattaataaaagttcagcaattttttaactgaaatagtttatctcttttacctagtcacaaaaaaggtatgtaaacaaggccattatatgtgtttattgctctttatttccctatctagattttctaagtatcttagctttcttaatataagtttaacttggtacttactgaaaatgcctttttacccctgttaacggtattttgagncttttgaaaagaacttggttgacactgcttttattgtggataaaggagagatggtcnnntaattaatggcttgaagtattattggagtggtttatcatttctgaaactaatcgtggtcagaattgactttgaaaagcattgcntttttacagaagtatattaactttttaggagtaatttctaggttttggattgtaatatgaaataattt

SEQ ID NO: 5530 - DNA, 281 bp, Homo sapiens
tggccccgaatgtctagctgcgctgttatttattggatacaaagcaaaaggggcagggtaaagagtgtgactcatctccaatgatatgtaaggttacgtgggtcacgtgtccactggacagggggcccttctctgcctggcagccaaggcagagagagagaggaagagagagagacaggcttatgtcattatttctgcatatcagagacttttagtactttcactaattttgctactgctatctaaaaggcagagccaggtgtacaggatggaacatgaaa

SEQ ID NO: 5531 - DNA, 319 bp, Homo sapiens
ctgcatttcagggctttctatcgatgggcgtgcctgcgcctgcagctcctggccttataggaaatgtgatgggacagagtccaagcatgatggtgggcatgcccatgcccaatgggtttatgggaaatgcacaaactggtgtgatgccacttcctcagaacgttgttggcccccaaggaggaatggtgggacaaatgggtgcaccccagagtaagtttggcctgccgcaagctcagcagccccagtggagcctctcacagatgaatcagcagatggctggcatgagtatcagtagtgcaacccctactgcaggttttgg

SEQ ID NO: 5532 - DNA, 404 bp, Homo sapiens
  unsure (14): n=A,T,C or G
cggccgaggtaaanctggctcaagactggcccaggcataatactgtcaatctaaaggtaaccggcaacatcaaaaagtacatctcaaaagaatcaggcttaaagataaacaggagaactggaaatatctaagagtaagaagtgtaaacaatagaaaagaggtagggtttagggttctcatcttgggatttccccaggtcttcaagcttctatccttcctgggttctgggtcatgggcctccagattccggccgttagtcttgagatacctttttcgcttgggtcctctatccatctaggtaggctttgtgacaggggccttccatccttgggttgtaggtcttccagctacaaccctgggctaatcttaggtcgttggccttgtgtcacaagtctcagttctta

SEQ ID NO: 5533 - DNA, 391 bp, Homo sapiens
cctacagtgagattgggatgaaaggcgagcgccggaggggcaaggggcacgatggcctttaccagggtctcagtacagccaccaaggacacctacgacgcccttcacatgcaggccctgccccctcgctaacagccaggggatttcaccactcaaaggccagacctgcagacgcccagattatgagacacaggatgaagcatttacaacccggttcactcttctcagccactgaagggccagaagatgaacagactgaccttgatgagctgtgcacaaagtggcataaaaaacagtgtggttacacagtgtgaataaagtgctgcggagcaagaggaggccgttgattcacttcacgctttcagcgaatgacaaaatcatctttgtgaagg

SEQ ID NO: 5534 - DNA, 277 bp, Homo sapiens
ccaggatggtttcgatctcctgacctcgtgatccaccggcctcagcctcccaaagtgttgggattacaggcgtgagtcaacgtgcctggatgtaacagttctcagtttagcagttatccgtccagttctttttcaattgatctgtgctttttaacccataaaaataggatagatagtagtatctgtctcacaggaaaagaacagaagtgaaatgcaaagtgggtaatgttttcctttttctcgttcctaagagctgagacctactgcagaaacacag

SEQ ID NO: 5535 - DNA, 274 bp, Homo sapiens
caggtaaacacctatagagatcttcaattccttgagtctgagcttgtgggtggaattctaaatttgtatcataatctgtcttttgtgaaacattttgaaaatatgtatatataatattgtatatgcaaattgtgttgtttcacttgtaaagggaaaaggcttatttttctttatatttctgataacttgttttgcatatgaccagcactgactgaaaggcatgtgtagctgcaaacactgttgctttttttgtgaaatgaaaataaaagtattt

SEQ ID NO: 5536 - DNA, 261 bp, Homo sapiens
  unsure (34): n=A,T,C or G
  unsure (58): n=A,T,C or G
  unsure (69): n=A,T,C or G
  unsure (140): n=A,T,C or G
  unsure (144): n=A,T,C or G
  unsure (149): n=A,T,C or G
  unsure (176): n=A,T,C or G
  unsure (186): n=A,T,C or G
  unsure (195): n=A,T,C or G
  unsure (197): n=A,T,C or G
  unsure (200): n=A,T,C or G
  unsure (205): n=A,T,C or G
  unsure (216): n=A,T,C or G
  unsure (225): n=A,T,C or G
ctcttttttttttttttttttttttttttttttncggctaattttgttttttaatganaaacatctganttgtacatatcacaaacagcttcaagtttctgtaccaacccccggcccccacccccgccggggaaaccttnactntgtanagcctaaaggatgatggaaaaagggcnaggaaagcanaaagagaancncancatantacaaactacnccgcgcggnttatttaggatttggaaattcaacatgctcagggac

SEQ ID NO: 5537 - DNA, 198 bp, Homo sapiens
ccaaggccccttttgcagcccacggctatggtgccttcctgactctcagtatcctcgaccgatactacacaccgactatctcacgtgagagggcagtggaactccttaggaaatgtctggaggagctccagaaacgcttcatcctgaatctgccaaccttcagtgttcgaatcattgccagccaggaggaagttcaca

SEQ ID NO: 5538 - DNA, 546 bp, Homo sapiens
ccttgctctattactgtgaagcactaacaaagacaaacctccagctccagaaagcagcttgcctggctctgaaaatccttgaggctactgaaagcattaaaatgctggtgacattgtgtcaatctgatactgaagaaatcagaaatgtggcctcagaaaccctcttgtctctgggagaagatgggcggctggcatatgaacaattggacaaatttcctcgagactgtgttaaagtcggaggtcgtcatggaactgaagttgccacagccttttaattacaggttaactgcctaacagacctgcccgggcggccgcccgggcaggtaaatttcaccagttaaattaggtcaaatggaaggaactcaaatgagtattgcccaatcagagcccattatttgtaagtcatcagtaaccttaaaactccacttagacctaattattgaaaacttgcatataatgaagtgaaagaatttccattcatcaacctctcaatcccaggttttcaaagaaaaacctatctaaggaatacttaccaaaatcagataa

SEQ ID NO: 5539 - DNA, 236 bp, Homo sapiens
cgcccggcacccaggccgcaccaaaggctataactcagatgacaacctctgtgagccatccctggagtttgaggtccccaaccacaggcagtacgtgtcgcggccaagtagcttagagagcagtagaaacacatccagcaacagctcacctcttaacctaaaaggctcctccgagcagctccatggccggtctgagagcttcagcagcgaagacctgatccccagcagggacctgg

SEQ ID NO: 5540 - DNA, 322 bp, Homo sapiens
ctgctcatgctgcagaggagacagctagtcaggaaccctggagattcaagacaacttgctggtcccctttgcccagggctgtggtcctaatcacagtccttcacctttcccagggttagcctgtgtttcaaatgcatatgatctgcgctgagaggacaacagggggtcaggaacctggggttctctggggggcagactaagacgactccgggatccagacccttctgcaccttcagatgggagctccaggcagctaaggggccgaggagaatgggcagagatcatgctacaaggggaggttctggggatgaggcagtaatcc

SEQ ID NO: 5541 - DNA, 415 bp, Homo sapiens
  unsure (362): n=A,T,C or G
  unsure (363): n=A,T,C or G
  unsure (364): n=A,T,C or G
  unsure (375): n=A,T,C or G
  unsure (377): n=A,T,C or G
  unsure (388): n=A,T,C or G
  unsure (400): n=A,T,C or G
aaacgattttgccttaaattgttgctaaatgtttatctacacatgctgtcagaaataaccttgttaagaaggtgaagctggtgtctcagcaaatcagaccccttggagaaggcgtcgaatggcctgtgccccgttttcctttttctctttccgcaccatcaaaaggaaaagtgagaaaatagcagaaacattagttaaatcctgaattataccccataacctacaggaataatctcactacactgaaagctgacaatatttgtaggattttttgaaataattaggatcctaattattaataaactggtaattttggctaggtttacatctttaactaataatactttcaattaaaaaccttnnngaaaaaaacananggttgcttttnactatttatggnttacctgacttacca

SEQ ID NO: 5542 - DNA, 498 bp, Homo sapiens
aaattgaaatgaataaagttagcaccttgcttgttgatgtgaaatttcttcaactccacaagtgttaccattcataaatctaatttccatgaatggaaagtggaggaacatgtgttcaaatgcctggctgaagggtgcagcaaggttcttaccagccaagaggtggggtgatctgtccaacaccacccggagacaagggataaaaagtagggatatcaggagctggaggatgtctggacatgccttgtttggagttgacatctgatgggatgtgcgacgggtgtgatcctggagaaaagtgctcgtcactgtaagtgatgaggggggtgagaggatggaccgcatgggatggctgcaccacgggcactttatttgatgttctcgggatgggtggagaaagagatccatttgacatgtatgggtcgttattcatatttggcatcattatgtacccggaataactcgagtaggagggtcccttgttgtagaggacctcgg

SEQ ID NO: 5543 - DNA, 245 bp, Homo sapiens
ctgaacggtctggggtgagttggaggtcaaaggaggttgaagggttcgggggagaacaggacggtcggcgtgcagagttcctggagtgctggggggcctgagatggttgtatgacgtctggaggattcaggagggtgtatggggtctcaaggacacagcagtcccgcttcctcccctttcccacaggacccccaaggaagtgggagatgtgatcgccctgagcgacatcacctcctcgggggcag

SEQ ID NO: 5544 - DNA, 491 bp, Homo sapiens
ccctatagggcgaattgggccctctagatgcatgctcgagcggccgcccgggcaggtctgcttttgagtcccgcctggagaaacgcagtgaatttcggaagcagccagtggggcattccaggcaaggtgattttatcaaatgtgtggaacagaagacagatgccttggggaaacagtctgtgaacagaggattcactaaggacaagactctcagttcaatctttaacattgagatggtaaaagaaaaaactgcagaagaaataaaacagatttggcagcaatattttgcagcaaaagatacagtctacgcagttattcctgcagaaaagtttgatttgatctggaaccgggctcagtcctgtccaacatttctatgtgctctgccaagaagggaaggttatgagttttttgtaggacaatggacaggtactgaactccacttcactgcacttataaatattcagacccgaggggaagctgcagccagccag

SEQ ID NO: 5545 - DNA, 452 bp, Homo sapiens
aaaacttgctttgtttagaattcccacctcatttttccatggacaaaagtattctttatgtcctagtgcacttacaatttggtattacctgggagtgaaaagaaatattacagccatgcctaactgacttcttgaggtaagattgttctgtcagaaaaccctctcccagttcccctgcagctcttcaggaatccacatctctccagagctctttgttctcatgggtggcacctccagagtgaagaagatcctttgtcaagaagggaaacagaggggaaatgagagggtcctgcaggcagagctggaatcaacttccactctgcctcttgcaagctgtgtgaccctgggcacaatttctccttcctctggaaacctctgttttcttagatttggagcaggatggtcacactgaccttgcagagttctgagaatcagagacagaacataaaagg

SEQ ID NO: 5546 - DNA, 338 bp, Homo sapiens
aaagaaatacagaaaaagaatgttaagtattctcagtccaacgtgctttgcatcatcaacaaaatgacaagtcaaagtattttgcagggatcagatatcaatcaacctccataacaagttaggtatatcaaatactgctgtaaaacccatccagcaaaaactgattattgtggatttcagtacaaatttccaagttgtcacacattactgatgatgatcagggcaggcatggaattctgctgacttgtttcaaacactgtaacttggtccgataacttggcaaataccctaggagttccaaggttataaacacctgtatgaacaaagcatgctttcag

SEQ ID NO: 5547 - DNA, 488 bp, Homo sapiens
  unsure (403): n=A,T,C or G
  unsure (448): n=A,T,C or G
  unsure (452): n=A,T,C or G
caattatttccaatttttattttattcttaaaacttaagcatggtaaaatgttaagctgttttcatccactgatattattctactataaaaagcccttcttgagcagatttgatgataaaaaggagaacatttctaaggtataattagagaagctgttgcatgagaaatcatgtctccatctccattttgctatgcgttatctgaggattgtttctgaaagagatctatttaggcagtgtatgtatgtgtcagcatgtaaaaagtaaagaactgaaaatagacaaaccttgtaaatgcacttcaaaaccaattgtggctcaagtgtaggtggttccccaaggctggtaccaatgagactggggtttgggaattagttggtcatcatccctcctgctgcccagnagtggtcagtcattttccatgagggatggactaggaaaaatgaantgtntattataaaggagagttcctgtaacttaaggagcaa

SEQ ID NO: 5548 - DNA, 549 bp, Homo sapiens
ccaagtctacttttgaaataagacatggagttttcttgcataacccagggctgagctgctcagttaggagtcagagttggcaacatgagaggaagaggaggaaaaattatcctctctgcacattaacttgctctggaagctctcacataattacacctagaagttctaagggtcatataagggtctgatctttgggtcatatgtcaaaacagagcagctctgatgataagatctctctctctccacatccccatctcctttgtcatctctatctctgcacatatatttctcaacttgctttgctcaaagcagcctatacgttctggataaaaacctcataatccttatgttccccacgtttcatttcagaatttatcaaagagtatggcatgaatctaactgttcctttcactttccttgctcttgtagatcaattattacctaccgaacacaaggattagaatcataatgtgagatgtaggattatctaattttacaaaccttcaactcgaaaaacttcacattccaaatactgacggtggacctcgg

SEQ ID NO: 5549 - DNA, 273 bp, Homo sapiens
ccttccaattcaggccacatgtacctccagatactatgtggctggctgcctctgcctttttgggcaatctcagttccaaatattctatcatgttgtcatgccagcttttggcttgggaaatatggtcagtatgtctgtggggaaactgattctgtgtgccggccgcagaggaaggactctgggctggaggaaaggggtagggctcagcgccagtgctaggactggttgaactgtagggtgcagccctggctagtgaccacaccccatgtccag

SEQ ID NO: 5550 - DNA, 207 bp, Homo sapiens
  unsure (11): n=A,T,C or G
  unsure (12): n=A,T,C or G
  unsure (109): n=A,T,C or G
  unsure (176): n=A,T,C or G
ccagagggaanncccaagagacgtctctgaagccaccgttcctgattattcagaggcagggtccacagtgagtgactcggtggggctggaggaacccagggtgacccanagggggctctggagcgggtccctaacatctgaaaaagtcctcccagggaactcggagctggaacttncaggcagcttcgggggtgacatttgtatccg

SEQ ID NO: 5551 - DNA, 291 bp, Homo sapiens; identical to SEQ ID NO: 409

SEQ ID NO: 5552 - DNA, 293 bp, Homo sapiens
ctggcctctcctgacgtgttcctctttaggagcaacaggtgaaaaaatgatacggttctggggcaggcccatgttttgtgcatactgttgaatattaggttctcctactgctggaaaacgcaacagccagagtacactattgggaacacgcttcagaatgtttgcccacatctgcaaagtagaagggtcaattttatacaactgattaaagttacagtatacgatggcatcttctggtaacccgtactgagaacgggtggttacaataatggtacggggaacctcctctccag

SEQ ID NO: 5553 - DNA, 399 bp, Homo sapiens
aaaatgactgtctgactcaccatggtaatttttcacaaattaaaaacacattttgggttgtgcaacagtgttctcatctttccaggcaggcagattattttaatgctgttatacagggaattgggactctcggattttcttttttaacctttttatgcctttcagtaggggaagtttccttgaaagttagagagctgcaaatctctaagtatcaatgtaaagaagccgatgacccaattcggaaggtggttcaagtgttctgtttgtttacaaaggcacagaccacgaccatggacacacccagtggaagtaaccacacccggtgtgttcctagaagctcatctgtgacagttcaacaagaacttactattctagaaaagtattacacaaagttatttt

SEQ ID NO: 5554 - DNA, 245 bp, Homo sapiens
ggagtgcgcttcccagggcaccattcgcttaaagtgtgttaatgacttgtccagcaagtttctttaccttcccacacccctcttctcaacgtccccccagagtcctcaggggggccttcgacctgcaaaagcctcacaggagtgcgaggggccccagctcccagggcggccgatggagcctcacacggtcaccttctccatcacgctttcagccacgtggacttcgtctgcctggacggtgacag

SEQ ID NO: 5555 - DNA, 472 bp, Homo sapiens
ctgacgctgacctggactgcctcagtctagaagcaggccagagagcagaggcacgtggcatcccagggcgacctcagacggccagccggttagctagttctgctgttgcttcacgagttctgagcattctctgctagcctatggaagctgcagccctcggaggacagaagtgttgtgcgcccaacagaaccctctgagacgcaagctgctcccttggctagctcatatgtggaaatagccctgtaattcgaggtaactccttccgctcgtgtccacatccctcttgttgagagctcactgaaagtcatgtgcccggggaatgttcctgtgactgttttttgtttttccttttttttttaactttgtttttgtttttttcaattaagctggaactaaagtcaggcccagccattacgctccccacgtgcagccaggtgcagcctgggcccagtcatgcctggctcatagatga

SEQ ID NO: 5556 - DNA, 215 bp, Homo sapiens
ccactgtgggcgtgagcttctttatcacctgcatcaccctggtgtacagcatggctcactctttcggggagagctaccgggtgggcagcacctctggcatccacgccatcaccgtcttctgctcctgggactacaaggtgacgcagaagcgggcctcccgcctccagcaggacaatattcgcacccggctgaaggagctgctggccgagtggcag

SEQ ID NO: 5557 - DNA, 156 bp, Homo sapiens
aaaagataagccatttctatcaccatcccctcagtgcccagaattccagatgggaagtgataccgttttagagttaaaatttccggcctcacgcgtgtaatcccagcactttgggaggccggatcacttgaagtcaggagcgtcagaccagcctgg

SEQ ID NO: 5558 - DNA, 250 bp, Homo sapiens; identical to SEQ ID NO: 2938

SEQ ID NO: 5559 - DNA, 335 bp, Homo sapiens
ttgaagacatgcacattttgttatgtctatgcagccctcagagcagtcacaggaatcagtaaacatgctggaaaagttggttagattatatgctcgaggccacacagtctttctgtacttaaactgtgggagctttctactgtcaatttcattacagaaagaaatgggcactgattccactccattgctaatatccacatcagaaacaacttctttttgctttgggtaattccgagccaactgaacataggtattgaaagaaaagttatgtggagtgctgaagaatgagagtttgtctttgcatgtcgtctttggaagtgacatttgattggcag

SEQ ID NO: 5560 - DNA, 380 bp, Homo sapiens
ctgaggaggttcctgaggatgatccactgctcactgagcgtggtcagggagcgccgctgtcggacgagcatcttcatcaaatgtgctgagaaccctctgcacctctccacgttgcccatgcccatttccttggcaggagttgctagtgctgcgttaagcctggcatgccgtgcaagagagcgataaaaatacttctggcatccatcccatgaagacgagatttctgtaagcagcctagaatcagcctcctgagtgctgctgacgatggacaatgcgctctggagatctaatgggtgaagatgaagcatctcttgagggttttttgaacgggcccaagcaagacctttgcgatacgacaaaccaatttttgcaaggtgttt

SEQ ID NO: 5561 - DNA, 331 bp, Homo sapiens
aaatattgctaagaaagaacttggagagagaagttggtgataccggagacagcaggcaacagacagagtgagaggcccgaagaacaagaggaggagggagtctcttctgggagcagaaggagtgtcgacttaaatattagggagccaaagatgaacctcgcagagaacctgcaaaacccagttgcagaaatacctgcccacacctaaaaactcagtcactgaaagtctgaagtcaaatgattatgtgaaatcttagtagtgggtacatgtggtttcattagattattctttgtatctatatttgtactatcttataagcactataagtttt

SEQ ID NO: 5562 - DNA, 293 bp, Homo sapiens
ccttccagggctgaccagtttgagtatgtaatgtatggaaaagtgtacaggattgagggagatgaaacttctactgaagcagcaacacgcctctctgcgtacgtgtcctatgggggcctgctcatgaggctgcagggggatgccaacaacctgcatggattcgaggtggactccagagtttatctcttgatgaagaagctagccttctgaacctcgcctgaagccagcctctctgccaagtcactcaggtcatgggcattgttcaagcctgagtggcagccgctcttgctcac

SEQ ID NO: 5563 - DNA, 342 bp, Homo sapiens
  unsure (271): n=A,T,C or G
  unsure (274): n=A,T,C or G
  unsure (280): n=A,T,C or G
  unsure (294): n=A,T,C or G
  unsure (295): n=A,T,C or G
  unsure (314): n=A,T,C or G
  unsure (330): n=A,T,C or G
ctgagttcccttcccgaaggtcagctcggggctcccgacgatcatgcagaagtagatgccactgtcttccggcttcacgcttgtgagattgagaatgaaccggcttgcatcccgaaacacagctatcttctcctgttccacctcttcaccgtggatagtcccttttgcggaatcccagagggccaggaactcgtggtgactgtcactgctcggtgcctggcgctgtctcagccagtagatgcgcatgttactgagggagattttagcctcncanggacancatcaccatcttgnnggtttgcacctttatgtangcagggggtctgctgngaggactgagtt

SEQ ID NO: 5564 - DNA, 201 bp, Homo sapiens
ttgaggtttggaaggtggaggtaaacttgaggccaccttcttcactttggccgtcttccgctgccagagctgtggatgagcttgactctcctccctctcacacctgacatggaatctatcagcagatcacgtgtgtgctacccttgaaatcagtatctagaatccaatcacttcccagtgcccctgctgttagcggcctgg

SEQ ID NO: 5565 - DNA, 258 bp, Homo sapiens
ttgagatttcccaggactggctttaatttgaaaaatctgattggggtctcttcccgtatcagagaaggaacagcccaagctatgaccccagggccagggaattcagtccccaccagaccctgtcattccatcactagggggtaattccaggctccccctgccagccctgagacaggaggacggatgtgaagttgcccaggactagattctgtctctccaaagtggcccaagccctgttctctgtactagggaagccag

SEQ ID NO: 5566 - DNA, 348 bp, Homo sapiens
ccaggtgccggccctggccccctctaaggccaaactcccccctgcagggctggatcttcaacgtggttccttggttggtggcgattccggccagtctattcagcgggtttctctctgatcatctcatcaatcagggttacagagccatcacggtgcggaagctcatgcagggcatgggccttggcctctccagcgtctttgctctgtgcctgggccacacctccagcttctgtgagtctgtggtctttgcatcagcctccatcggcctccagaccttcaaccacagtggcatttctgttaacatccaggacttggccccgtcctgcgccggctttctgtttggtgtgg

SEQ ID NO: 5567 - DNA, 383 bp, Homo sapiens
  unsure (15): n=A,T,C or G
  unsure (16): n=A,T,C or G
  unsure (88): n=A,T,C or G
gtacaagcttttttnntttttttttttttttttttacagtcttcaaatattttttattggaaggccatgcattgccttcatttattgnatttcaaatcactgtacatttacttttgtgaaaacactgcctgcattttctagtacaaaaaaaacctaaaaattgtttcaggaatgtagagaaatatccaacttaaatagcgaaaaagtgcaccataattactgctgcactgcagtcatttctgcaattcccatgtttcttaaataactatcttgtcagataacacacaatataaagagcaattatgaaaaacagacatttacatatacttctaaagtcttattgggaatatcctgttggcattggataaccaatcataggtgca

SEQ ID NO: 5568 - DNA, 206 bp, Homo sapiens
  unsure (12): n=A,T,C or G
  unsure (20): n=A,T,C or G
  unsure (23): n=A,T,C or G
  unsure (27): n=A,T,C or G
  unsure (32): n=A,T,C or G
  unsure (148): n=A,T,C or G
  unsure (162): n=A,T,C or G
  unsure (166): n=A,T,C or G
  unsure (167): n=A,T,C or G
  unsure (179): n=A,T,C or G
ccagagggaagncccaaganacntctntgaanccaccgttcctgattattcagaggcagggtccacagtgagtgactcggtggggctggaggaacccagggtgacccagagggggctctggagcgggtccctaacatctgaaaaagtnctcccagggaactngganntggaacttccangcagcttcgggggtgacatttgtatcc

SEQ ID NO: 5569 - DNA, 383 bp, Homo sapiens
ccaactgctctttcaactccaagcttttcttctcctaaggaaagtgttccaagaagacatctttcagaaggaacaaattcttatgcgacaagacttctaaataatcatcaagttccacctcagtctgaacctgagagcaacagcttgaaacggagactttctactcgttcctcaattttgaatgcaaagaatcggagattgagtagtcagtttgaaaattcagtttataaaggtgatgatgatgatgaagatgtcatcatcttagaagaaaacagtacccccaaacctgcagtagatcatgatattgacatgaaatcagaacagagtcacgttgagcaaggtggtgttcaggttgagtttgtgggtgacagtgaaccttgtgg

SEQ ID NO: 5570 - DNA, 128 bp, Homo sapiens
ccaagtcccttcaattctctgtgcctcaactttctcatctgtaaaaaactatctcgtcaggaaaataataggttacgaggttggaaaggctcacgggtgtgcgggcactccaaaaaaaagaaaaggac

SEQ ID NO: 5571 - DNA, 251 bp, Homo sapiens
aaactcttaaacctggaactccttaaatggggtaggtgggtgagattatcaaagctgaagctggctttgctgagaagctccctacctccctgcccttctcctccttcctgctggaatgaactaaagcagatgtcaagcaggggctggtgggggtgcctactcccttttccactctatctttagatttcaaaccttaggcttacagcccctcaatatctctctgctaacaccagtgtctctttctagttagg

SEQ ID NO: 5572 - DNA, 111 bp, Homo sapiens
ctggcctgcgtctgtcccagagtcctgcctgcggggccttgtgttagctgtgttgtgcctggggagactgttgctagtggaaggtgcctctggagatggggtggggcccag

SEQ ID NO: 5573 - DNA, 300 bp, Homo sapiens
ctgttgaacactgcagaaatctcccctgatagcaagctgcttgctgctgggtttgacaactcctgtataaaactttggagcttacaatccaggaagttaaaatcagagtcctgtcaagtagacatgtcccgcatccatttggcttgtgatattctggaggaggatgtgtgaataccgttttttcttccctgcacctgccttcctagtttgcttagaatgtccttaccaaacacgacatatcttagaatggacttcctaattttcctcatcatatagctaaagccagactaatgccatgta

SEQ ID NO: 5574 - DNA, 242 bp, Homo sapiens
aaaagcttcctgtattttattagtggtccttgaaaaactgtgaatgtttgggaattggtagaaaggcaaaaagtaggatattttgacctgactggaaagatggttgtgtttttattgccaggtaataagtgtgatcattgttgaacttcagctccagtgtctctccagaataagacattggcattcaaatgtctatatcttgttacttacaaaataaaaaacagattaattagtggcttttt

SEQ ID NO: 5575 - DNA, 170 bp, Homo sapiens
  unsure (9): n=A,T,C or G
gttggtgangctgccagcatgtgcgatgagacgtgcacctacctggagagagagtcaaggaagcagtcagagaaatgaactgctgacctgcccagttgcacgacagccctgctccccacctccccatcaagcacaactagggaagacatggtgggtcacgaaatacagca

SEQ ID NO: 5576 - DNA, 365 bp, Homo sapiens
ctgcaggggcaggcggattcagaactttttttgcattttcccgctggactgtaggtaacccctgaggagactcggtcctgctgacctggtttgcgctggctacagaagtctgcttgggttgtgtctcgcatgctttgctttgggaagctggcatttctggagctccctgtgcatcaacggctacttgactgactgaggggattaaggtgggcaatgctatgttcaagatctggagacctggaatgtgtgcctgaggggcggggctgctttgtgatgaagggtttgcagtcagaacctgcagtccgacagcattcagagccagtcctggtggatggacttgtggggccatatttgtattggctagg

SEQ ID NO: 5577 - DNA, 248 bp, Homo sapiens
ccaagctccagctaatctacttggatgggttgccagctatctggagaaaaagatcttcctcagaagaataggcttgttgttttacagtgttagtgatccattccctttgacgatccctaggtggagatggggcatgaggatcctccaggggaaaagctcactaccactgggcaacaaccctaggtcaggaggttctgtcaagatactttcctggtcccagataggaagttaaagtctcaaaaacaacc

SEQ ID NO: 5578 - DNA, 334 bp, Homo sapiens
ccttcgtgcagtttgcttcacaggaaatagctgaaaaggctctaaagaaacacaaggaaagaatagggcacaggtggggatggatggttggttggatatgtcacttttcttatggtaaacaattaaatccatattctctctgcttaaaagaagaaattaatgttttgtagtcctaggtaattgatgttttgccatgatttccaaacttgtgtcagtcccacgttacacgcaaactaaattttaggtttgaaatttgtccctagttaattggtctgcttgacaattttgtgagtcttattaaccccaatcaatagagttgagagactatggcttt

SEQ ID NO: 5579 - DNA, 168 bp, Homo sapiens
  unsure (40): n=A,T,C or G
  unsure (112): n=A,T,C or G
ctgattgtcagagccttagacccagcacgccttggattanctctgcagagtgtcttggttgagagaataacctcaccgtacccacatgacacgtgatttggaaagagactanaggccacacttgataaatcatggggaacagatgtgttccacccaacaaatgtgata

SEQ ID NO: 5580 - DNA, 303 bp, Homo sapiens
  unsure (11): n=A,T,C or G
ctgcggcccanacctcagccaccagcaccaatgcaaaccctctctctgccacgagcagcgccctgggagccctcacgagtcccgtggctgcttcaacccccaactccactgctggtgcagccatgaactccttgacctctcttgggactctgcaaggactggctggagccactgttggactgaataatattaatgcactagcagttgctcaaatgctctcaggtatggcggctctgaatggaggacttggcgccacaggcttgacgaatggcacggctggcaccatggacgccctcacccagg

SEQ ID NO: 5581 - DNA, 627 bp, Homo sapiens
  unsure (559): n=A,T,C or G
  unsure (580): n=A,T,C or G
  unsure (587): n=A,T,C or G
  unsure (603): n=A,T,C or G
cctgtgcacgaggtgaagtccaccttggtctgaaagcagaagatggtgactgaaatggataccaccgcagtgatgatcattgcaatgatgacggctttggtttggtacatactggaaatggtgcccgtcatgaagcccatggcaaaagtaaaaagggtcagcagaatgatgttccatgggaaacggcgtctgggtccctggcagcaggcaaggatcaggtaggtgacaacgaaggcagcataggacacgtagtagacagccacatttctcctcacaaaggcgctgacaggttccacaaaggtgaagatagcaatgatggacctgcccgggcggccgcccgggcaggtgtgctcaacattatctgctgcagggcattctcagacacagactgagatattcaggatgggatccgaagcacctagaacctggtagccttagaaagctgggctgacctaagggcagagttggtgtttctgcacgtcatcctcctcgtcatcctcatagtcatcctcatcatctgagtactgctggggtgggcggactggaactcggctgcggnccacacctgccgccaggtctncttcctnctgggacaaagaccanggcagttacaaacaagtgctgctc

SEQ ID NO: 5582 - DNA, 421 bp, Homo sapiens
ctgccgtgttctgggactgtctcatggggcaatgtgtcctcacccccagcagtgccagcccaggtcagaaggcttcattcagaaggggggtgtcacagcacctggctgagcccccatggaggatggagacccacagatacacacaaacacacagagacatctccaaatctctgactcagactcgcacacaggcacacacagacgcacgctcaacacagacacacgcaggcctttattctattacacagagtagggctggggccagggcaggtcattctcaggctgcgtcagaaggtgcagagcgttcgggggacacaggccgaaccccaaagtgataataagttacggggggatttctcaggctgttgtcaggctggagcaagggcaggacgccatgtgaggaccccagagccacttccag

SEQ ID NO: 5583 - DNA, 262 bp, Homo sapiens
gccagggctggggggaagagctaggcttaatgaacagagcttgaggggaggagcctggactggtgggaggagctaggtttgatggacagagcttaagggacagagccaagactgatgataggaggagctaggtttgatggacatagcttaagggaaggagccaagactgataggagctaggcttaatggatagcgcttgaggggaggagccagacctcgtgggaggaactaggcttaatagcgcttgaggggaggagccagg

SEQ ID NO: 5584 - DNA, 301 bp, Homo sapiens
ccagtgattgtagcagctttactcttttgctgcatgatattgtttggtcttggagtgagaaaatggtgtcagtaccaaaaagaaataatggaaagacctccacctttcaagccaccaccacctcccatcaagtacacttgcattcaagagcccaacgaaagtgatctgccttatcatgagatggagaccctctagtctcgtgagactttgccccatggcagaactctgctggaatcctattgagaaggtagacattgtgctttattaatatagtcgctcttcagccatgcctttactgcag

SEQ ID NO: 5585 - DNA, 189 bp, Homo sapiens
ccagagatgggagaaataactaatttagttttattgtctctttttattgtcccaatagttgaaattgcccacaaccacagaaggcagagttatcctcgttgaagcaagctaacacaaatgagttccttttagcaaacttctctgtcttgcccattctttggatcatagcacaagtttttgagagatcag

SEQ ID NO: 5586 - DNA, 395 bp, Homo sapiens
  unsure (62): n=A,T,C or G
  unsure (152): n=A,T,C or G
ccaacagagcaagaccatgtctcaaaaaaaaaaaaaaaaaaaaaaagtaggcattctattanacgtcagacccatgatcacatcactcattgtacggcctctggaaaactccgagatacactggtgagtgaatgggaatgggaagggcttantattattatgaaaaattctgacccagtgaacctcctaaaagggtcttgagcacccttagggagcctgcagactgcactttgagaaccaccactttagctggctgggtgaatactaaaattagtctagctaattttttgtattttttgtagaggcagagggtttcaccatgttgcccagactggtctcgaactcctgggctcaagtgatccacccaccttggcctcccaaagtaccctctcttt

SEQ ID NO: 5587 - DNA, 174 bp, Homo sapiens
cctttccttgagctgcacgtgaacctgtgtgggcaggcagcgtttgcaggcgtgtttacgggcaggcagcgtttgcaggcgtgtttaccggcaggcagcgtttgcaggcgtgtttacatgcaggcgtagcaccatgtgagaccactggtccagggtttcagaggtcctgctcag

SEQ ID NO: 5588 - DNA, 204 bp, Homo sapiens
  unsure (11): n=A,T,C or G
ctggaggccanctttgccagaactgtcaacaaagaatatccaggacttgcagacccagtgtttcgaaccctggtgtcccaaattctggaccgggctgagcctctgctttcctccagcctgtcctcggaagtcgtcactgttttccagtattacagttacttcaccagccacggcgtcagtgacctggagagttacctgagccag

SEQ ID NO: 5589 - DNA, 155 bp, Homo sapiens
  unsure (13): n=A,T,C or G
  unsure (14): n=A,T,C or G
cctcagtaggganngccttctctactatgataatgctcctgctcatccttctcatcaaacaagggcaattttgtgagagttttgatggaaaattattggcatcctccttgcagtcctcatttggctccttctgccttctttttatatccttattt

SEQ ID NO: 5590 - DNA, 467 bp, Homo sapiens
ctggtgccggacgtcaacatggaagagaacttggaccctttctttaactgagctcatgccccacggagacttagcaggttccaggagtgagcgagggcagcggaaaggagttcttccgggggacacgaattgcctggctgagtagcaagaaagacacactcttaagtttcttggttcagagcaggaaaaccttcaaggagctgactgaccacgtagcatgggggcaagaggcgtgggatggggattggggtgagatggatgggagcccgctggagcttgtcttccctaacatagcctgggagaccaccccttgccacttgggccacttccgcctaccccacttttcattttgttccaaaatagttgcagatcctgacagaatcaaaactctctgcctcaaacacacatcctggcatcgcactgttagcatttaacttcttgttaggattcagggaaggaacagttgg

SEQ ID NO: 5591 - DNA, 319 bp, Homo sapiens
ctgggggaaagggagaagacaggggtcccctgagagcctccagaaggagccaggcctgccgaccccttggttgagggcctctggcctgcagcactgtaagacagtaggtttctgtggtttaagccattcagtctgtggtcacatgttacagtagccctaggaagctaatgcgggggctgctggtaccctgcccactccttgactggtgcctactggcccagctcccacctgcggctctgctcgaaactgtccccactctgctgtgctcaaaaggtcagagtgccagggaatcaaggcccagccctttctcagggagcag

SEQ ID NO: 5592 - DNA, 278 bp, Homo sapiens
ctgctgagggggagcctggtaggacatgctctcatccatgccggggactgggggctggttcagagtcccttggtgttggggtgcggatggctgctggggtgtggctgagccataggagccggccatcccatactgggaaggggagccatagctctggtacatgctcatgggatagtagtagctgtaggggtaggcatagttgtactgctggtaccactggtagtactgctgctgctgcaaagctgaggcttctgcctgggacacgtactgtgcactgg

SEQ ID NO: 5593 - DNA, 313 bp, Homo sapiens
ctggaaaaaatgtacggacatggatgaagctggaaaccatcatcctcagcaaactatcgcaaggacaaaaaaccaaacaccgcatgttgtcactcagtactgccgtaaccctgatggtgacatcaatggtccctggtgctacagagtgaatccaagaaaactttttgactactgtgatatccctctctgtgcatcctcttcatttgattgtgggaagcctcaagtggagccaaagaaatgtcccagaagcattgtagggggttgtgtggcccacccacattcctggccctggcaagtcagtcttacaacaagg

SEQ ID NO: 5594 - DNA, 382 bp, Homo sapiens
ccatttcattctgttctccatggactaaaatcacatgaggcggtttcaaagcacgaataaattcactggtttgctggtaatccgtgtgagctgagaaagaaatgtaatcaacagacattttcagtggtaacttctgtccagacatagtagtgatttcttcaggttcagacatgatgtgcttggcaagtgtcccttctacacagtatcccgctataatgacaccattcctcttatcagtacaccagctttcaaataattctctggataagccactttgcatcatgcctggggaggccattacaacactgggaccaatgtcatcaaaatgatccatgctctaagagagaaaacagaatgggaaaagtatgttagctaccagcag

SEQ ID NO: 5595 - DNA, 548 bp, Homo sapiens
  unsure (482): n=A,T,C or G
  unsure (489): n=A,T,C or G
ctgaaaggaggtggatggggacagagcaccaaggggaaggggccctcggcccaaggggggaggaacctagcccccaccccgctacagctccccactgaattcacagcacagagaacacctctcgcccaacaactccacatggaggtataccaagtccaggggtcaaaggagcaggtggatgacagatgggcaggggcagtgaagatgacagcaggctcaggaggggaggtggcagaaacttcctcctacccatgggaggagacgatggggcgactgatattgctgttggtggtcatggcattcagctcccacctgatatcatgaggcaaacaggactggtctaggttatactgaatcacggccagtttgcacagagtcttcagactagggctaaagtccaaaatgtgtaagtcagaatgatctataaggtcaaattcatctcccaggacctgcccgagcggccgcccgggcaggtcctgaangacccanggccctctggctggatgcgtttgcctatcaggacccagaattacttacagacctgttta

SEQ ID NO: 5596 - DNA, 386 bp, Homo sapiens
cctaacttgggtggagagcccagcctgagcaccagaattagttgcttccacttgtgcagcctgctgaagagccggactcaggttgaagcagctttcctcccagtcttcactgatctccacagggagaaaacagaagtccccacaagtaccaagctcttcctgagactgcagccaccacacctcgggaaaggggaggctgggaggagaggagtacactgtcccggtgacccacaccaaggtggctccaagtgtaaacaaagccaataagagtgagcactggccctgagccccactatatgattgggtcaaaaggctcctttaattcaggagagttgggcccacagagtcttgttatcaggattttgctggttggcctgccttccagg

SEQ ID NO: 5597 - DNA, 184 bp, Homo sapiens
  unsure (8): n=A,T,C or G
attctgtnctccatggactaaaatcacatgaggcggtttcaaagcacgaataaattcactggtttgctggtaatccgtgtgagctgagaaagaaatgtaatcaacagacattttcagtggtaacttctgtccagacatagtagtgatttcttcaggttcagacatgatgtgcttggcaagtgtc

SEQ ID NO: 5598 - DNA, 266 bp, Homo sapiens
ctgctccgagggcctatcttcagccaggatgcccacagagagggacgccagtgcggttactgcctccacttcttctttgtcagcccctggcactctaggcacccaggagtctggacaggaggccaggcgctgcatgcagccccagtatttactgtgcacccggatcacggcctccagagagcggatggcattgaggttgggtttctgtttccagccttcttctgaaaggggatccaccctgttacccagaagagcagccacacagg

SEQ ID NO: 5599 - DNA, 237 bp, Homo sapiens
ccacattgacagtgtttccccagatgtcatactgaggttttcgggccccaatcactccagcaatcacaggcccatggtttatgccgacgcggaggcggaaggagttgaaggagtgcctgttgatgccgtccagcttactcatcagggcgatgctgaactccaccatgacaccaatgtgggcatgctgccgctccagctcctggttctcgtgccctgaggcgacgctgagccctgcag

SEQ ID NO: 5600 - DNA, 284 bp, Homo sapiens
cctccagtgtctacaatgttgatggtccccttttgttcagtcaagttttaataaaaataaaactgttctacagttaattgcactttgttcagtgtaaatttccaatgaccaagagcaggttaaacgatgtgtgtggtctattaaactgtggtcactcgtgctaaggcacacttggcctggagtgagttactgtttgggaagccaaagatagatcaagtgcaggagctgatcatacaatgttttctctctaacttacttacctgaactttaaccccaccccattt

SEQ ID NO: 5601 - DNA, 350 bp, Homo sapiens
gggaaaggaggtctcactgagcaccgtcccagcatccggacaccacagcggcccttcgctccacgcagaaaaccacacttctcaaaccttcactcaacacttccttccccaaagccagaagatgcacaaggaggaacatgaggtggctgtgctgggggcaccccccagcaccatccttccaaggtccaccgtgatcaacatccacagcgagacctccgtgcccgaccatgtcgtctggtccctgttcaacaccctcttcttgaactggtgctgtctgggcttcatagcattcgcctactccgtgaagtctagggacaggaagatggttggcgacgtgaccggggcccagg

SEQ ID NO: 5602 - DNA, 191 bp, Homo sapiens
  unsure (126): n=A,T,C or G
  unsure (142): n=A,T,C or G
  unsure (152): n=A,T,C or G
  unsure (158): n=A,T,C or G
  unsure (159): n=A,T,C or G
  unsure (169): n=A,T,C or G
  unsure (172): n=A,T,C or G
ctgcaatccacttaggatttcacacatgatcttcaaacactctgcatcggggatcatagggtcaaactgaccagcaatgtcaaaatcacactggcagaactccctataacggccttggactatggntgggctctctcgccgncacacctttncaacannataacgtttnatnttcttcaccttattcatgg

SEQ ID NO: 5603 - DNA, 343 bp, Homo sapiens
cctttgcactccgctctttccactcacatgtcacctcagggctgtccccggcctctcctttcccatctctcccagtacattatggtccctccttcctagcatctggtgctatctacggtaggcatgtttagctgctggtacgatccctcctccactgaaatatgggcttcatgtctggcccctgtgggactgccagagcctggtcctcagtcatgtttagttgggctagtgaatcaactcttggtcaaagggacaaaagcagatgaggagatgtggcttcaatcaggatcagtgtggaacagtgagacctgcgcatggcactgctaggagggatgggttccac

SEQ ID NO: 5604 - DNA, 115 bp, Homo sapiens
atctaggactgccggctaagtggacacactccttgacctcctaccaggaactttggtaaaagctagctttggggaaggggttgggtgtaaatatgagagggtggagggagaccag

SEQ ID NO: 5605 - DNA, 378 bp, Homo sapiens
ctgagagtagtcgactattacagagccggccatcttgcactgcgctgatatccaagctcattttgggattataagtatgtggataaagagattcaggaagatgtttacactcttgggcacaatctaaaagccagtgctcggaaacaatgtgtactcctctttcttttacagatttatactcccgattagtgtcatttggccgcccttgatagatgaaatgagtcactgtttcatcaaaactccacctgtaatctgctcctagagaggctgcgatcccatttagttcactctgcttcttactgagttttttactaacacataccactacttgtgaagtggctttggggcttcttccttctctgactgggcctctttcgg

SEQ ID NO: 5606 - DNA, 371 bp, Homo sapiens
aaaaggtagtataagaaatgaggaaaaagaggtaatatcagggcttctgctgttttttatttttaacatgttcataattaaaaagtattttccagcagtccaaagatgtaagttatcttacacataaaatgttttattttgttatttggttatgaaaatggaatccttgttcttgcacaactgtaaatgttttgttgctagataatacgatttgagacctgaattggtctttggtttccagtgcatcacagcatattttgtaaaatcatctactactgcacttgagcatgaatgggtagtagccaaactcacaaattggagtgatgaacctgcttatacctaagggcaggggcaagcccctcacaatgcag

SEQ ID NO: 5607 - DNA, 158 bp, Homo sapiens; identical to SEQ ID NO: 3737

SEQ ID NO: 5608 - DNA, 95 bp, Homo sapiens
  unsure (72): n=A,T,C or G
  unsure (77): n=A,T,C or G
  unsure (87): n=A,T,C or G
ctgaagacagcggcaatgctgacaaatgctaagaagataattgataaatacatattgatatagatgaggcangctgntacttggcantggaatat

SEQ ID NO: 5609 - DNA, 279 bp, Homo sapiens
  unsure (14): n=A,T,C or G
  unsure (19): n=A,T,C or G
ctgaattatctatncatcntctttattaatcactattgttccagcagttttcaagtcaaattaataatcttattagggagaaaattcaattgtaaattgaatcagtataaacaaagttactaggtaacttcatattgctgagagaaatatggaacttacattgttcaattagaatagtgttctgcaaaaatatttataaaacttctcaagatactgctactgtaattttatatgaagataagtgtatttttcaataaaacatttataaattaagaagaa

SEQ ID NO: 5610 - DNA, 152 bp, Homo sapiens
aaaaagctattagtatttattaatgaattttactgagacatttcttagaaatatgcacttctatactagcaagctctgtctctaaaatgcaagttggccttttgcttgccacatttctgcattaaacttctatattagcttcaaaggctttt

SEQ ID NO: 5611 - DNA, 273 bp, Homo sapiens
  unsure (19): n=A,T,C or G
  unsure (20): n=A,T,C or G
  unsure (213): n=A,T,C or G
  unsure (214): n=A,T,C or G
  unsure (228): n=A,T,C or G
  unsure (252): n=A,T,C or G
gtctgcaattcccattctnnatggtattgtttgtagcagttagagattttaattttgatggtatctaatttatcagtttttcttttttgtggcttgtgattctggctttctaattttacttaacctgggaaacacacacacactccagccaagttaaatacatttttatgtaagattctaaatcctgtgcatacttatttgtatacatattcnnatttttttctgtanaatatgtacctagaagtggaattnctggctcgaagaatgtatttt

SEQ ID NO: 5612 - DNA, 392 bp, Homo sapiens
aaaacttacgaattgtttatttccggaattttccatgtagtattttcagaccacggttgacctcaggtaactgaaacagcgggtaaggggggacaactgtacttccaggttctgcagcctgagaatgagagaagggactgtgcaggctgaaggcgtgggggaagagccagggccctggggagcagacgtcagggactaaactggaaggcaagcaggaagaaccgtgacccactccaaaccgccactgaagattgatcccaactgcaagccggtgccaagccccgcgtccacggaagtcacacagcctatgacgccttcctctccaaatggaagcaaagaggagaagaggctgctggagtcttcaattgcagccgtgagcaatctccaactgg

SEQ ID NO: 5613 - DNA, 354 bp, Homo sapiens
cctccttcgatggcactttcctgtggaagatcaccaatgtcaccaggcggtgccatgagtcggcctgtggcaggaccgtcagcctcttctccccagccttctacactgccaagtatggctacaagttgtgcctgcggctgtacctgaatggagatggcactggaaagagaacccatctgtcgctcttcatcgtgatcatgagaggggagtatgatgcgctgctgccgtggcccttccggaacaaggtcaccttcatgctgctggaccagaacaaccgtgagcacgccattgacgccttccggcctgacctaagctcagcgtccttccagaggccccagagtgaaaccaacgtgg

SEQ ID NO: 5614 - DNA, 266 bp, Homo sapiens
ctgtcaggtggagcctgcaagcctgggagcatctgcatgacccataccacaccctgcccaggagcatatattacctggtctctgggtctaccttaaccatccgatgccgattgcgttgccggtcccaatactcatctagccggtgggacgaaaggtgcatgacatggcaggcgaggcggcttggggtgctggggtccggagtaaccatgatgctgaagcagtgcatctcagcccgcccccccgcagacaccacatgggcagtcagg

SEQ ID NO: 5615 - DNA, 300 bp, Homo sapiens
  unsure (21): n=A,T,C or G
ccagcactggctatgtagtanagccctacaggaagtaccctactttgcttgaggtgctactgaattttctgaagactgagcagaaccagggtacacgcagagaggccatccgtgtgttagggcttttaggggctttggatccttacaagcacaaagtgaacattggcatgatagaccagtcccgggatgcctctgctgtcagcctgtcagaatccaagtcaagtcaggattcctctgactatagcactagtgaaatgctggtcaacatgggaaacttgcctctggatgagttctacccag

SEQ ID NO: 5616 - DNA, 231 bp, Homo sapiens; identical to SEQ ID NO: 257

SEQ ID NO: 5617 - DNA, 240 bp, Homo sapiens
ccagcctacaatggggatgttgtgtttctgttcaccttcgtttactatgcctgtgtcttctccaccacgctggggtctgggaggaatggacagacagaggatgagctctacccagggcctgcagggcctgcctgtagcccactctgctcgccttagcactaccactcctgccaaggaggattccatttggcagagcttcttccaggtgcccagctatacctgtgcctcggcttttctcag

SEQ ID NO: 5618 - DNA, 252 bp, Homo sapiens
ccagtttcttccctgtgcaccggagcccacggaccctcagcgactttcttcttctgaagagactgagagcactcagtgctgcccagggagccctgttgcacagactgaaagtccctgtgatttgtcaagcatagttgaggaggagaatacagaccgttcctgtaggaagaaaaataaaggcgtggaaagaaaaggggaagaggtggagccagcacctattgtggactctggaactgtatctgatcaagacag

SEQ ID NO: 5619 - DNA, 79 bp, Homo sapiens
  unsure (25): n=A,T,C or G
  unsure (26): n=A,T,C or G
  unsure (37): n=A,T,C or G
  unsure (38): n=A,T,C or G
cccccccccctttcctttttttttnnttttttttttnnttttttttttttttttttttttttttttttttttttttttt

SEQ ID NO: 5620 - DNA, 260 bp, Homo sapiens
atcgaggccgagctggggccgatgaagatgacaaggggcctagggcaccccgcccacctcagcctaagaagtccaagaaagcaagtggcagtgggggtggcagtgctgctttaggcccttccggctttggaccttctggaggaagtggcaccaagctccccaaaaaggccacaaagacagccccacctgccctgcctacaggttatgattcagaggaggaggaagagagcaggcccatgagttacgatgagaagcggcag

SEQ ID NO: 5621 - DNA, 269 bp, Homo sapiens
ctgcctcctgagggtgtggggttattagggtctcaatactttctcaaggggctacactccccatcaggcagcatcccaccagcctgcaccacaggctcccctgggaggacgagggaaacgctgatgagacgctgggcatctctcctctgtgacactaggacatctgtccaggaggctgggcggaggtgggcaggatgtgagaggtggggagtactggctgtgcgtggcaggacagaagcactgtaaagggctctccagccgcagctcag

SEQ ID NO: 5622 - DNA, 485 bp, Homo sapiens
ccactgcagtgaagttttacaggtctagtggttaggggcatccaggggtgtcccttccaatgtgaaagacaaactgttgcatcttgcatcctcatgcaaggaaggaagcacactgcctggtgagcctgtttgagttctgacatcacattctacatgtaggtgtattgctttgacccacactctaggtgacataggaggatgccagctttgagtggagcctccacaggaaaggacactgcagcagatccaggccatggcgcagtcaccatccttcagaccccctggtgctgaaagtgccagtggtggggtaagatttggggtggagctgaaccaagcaccagtaggagagtcacagtggagggcctgggattctggagtaaggccatgtcatccacagcacagaaatatgccccatccaaagcagagaaatatgttggaagcaacttttggcatgttactgtaggccctgataagatagaatgctt

SEQ ID NO: 5623 - DNA, 463 bp, Homo sapiens
  unsure (14): n=A,T,C or G
ctgaaaaccataantgtcagcggcaggagatcaatgtccccactcatgcagtgaggcagagagtgaatttcaccttcccctacttttttagtctattcaagccctaatggattgcatgaagcccaccaacactgagaagggcatgtgctttactcagtccatcaactcaaacactaatctcctccagaaacactttcacagacataccccgccatcatgtttaaccagctacctgggcatcccatggcctagtcaagtcgacacataaaattaaccatcacatagtgttccccacatacaatggccccacaaacaggaactaaacaattagcaaagctctatggctcaattctagaattgagggtgttaatctgttttctgttaaggaactctaggctctatgtaaactgaaactgtatcaaaatgctgacactaaaattagaaatgggaagaagtagctttt

SEQ ID NO: 5624 - DNA, 193 bp, Homo sapiens
ccttcatcgacctgcactctgctgggaatatgctgttcaggacgtggatcgccatggcctactgctcccccaagcagggtgtgtccctccaaatggactttggcttggacctggtgacggagcttaaagaaggtggagatgtcactgagctgctggcagccctctgcaggcagatggagcacttccttgacag

SEQ ID NO: 5625 - DNA, 308 bp, Homo sapiens
  unsure (14): n=A,T,C or G
  unsure (15): n=A,T,C or G
  unsure (189): n=A,T,C or G
  unsure (190): n=A,T,C or G
  unsure (228): n=A,T,C or G
  unsure (231): n=A,T,C or G
  unsure (235): n=A,T,C or G
  unsure (297): n=A,T,C or G
ctgacagttctccnnggcaactcagtcctccagcagacccctgcatacataaaggtgcaaaccaacaagatggtgatgctgtcctgcgaggctaaaatctccctcagtaacatgcgcatctactggctgagacagcgccaggcaccgagcagtgacagtcaccacgagttcctggccctctgggattcnncaaaagggactatccacggtgaagaggtggaacagganaanatancggtgtttcgggatgcaagccggttcattctcaatctcacaagcgtgaagccggaagacagnggcatctactt

SEQ ID NO: 5626 - DNA, 167 bp, Homo sapiens; identical to SEQ ID NO: 5425

SEQ ID NO: 5627 - DNA, 404 bp, Homo sapiens
ccataggaacgcactcaggcaggtggtttgttctggatgcagaaaccagagatctagtttctatccacacagacgggaatgaacagctctctgtgatgcgctactcaatagatggtaccttcctggctgtaggatctcatgacaactttatttacctctatgtagtctctgaaaatggaagaaaatatagcagatatggaaggtgcactggacattccagctacatcacacaccttgactggtccccagacaacaagtatataatgtctaactcgggagactatgaaatattgtactgggacattccaaatggctgcaaactaatcaggaatcgatcggattgtaaggacattgattggacgacatatacctgtgtgctaggatttcaagtatttggtgtctgg

SEQ ID NO: 5628 - DNA, 504 bp, Homo sapiens
  unsure (14): n=A,T,C or G
tgctctttcagctntgaacgtcctttcccattctccatcatccacattcacctatcctgcctgccccagttaaaatcctgtttcttctaggaagtccctcatcccacccgcttaccccagggagactgagcttgttccttctcctagtaagaccctcagcccatggagtcctgtgtgatgttgtgagcgtgggaggacagactgaactgctcggcccgtggagtcctgtgtgatgttgtgagcggggaggacagactgaactgcgtggtgcttcgcacatagacctcaacagggattggcattttgaagctgttggcgggggctgtggactgcttttcttcctttctagctcaacggcagctaaagccactgcatacaatgcaaggactggctcctgtttggccgcgactgattgcagcccctggtgaaatgagaaccctgtgggtcggaacaaagtttggattattttatgttgcaagtaaactaaaatctcaagtgaaactg

SEQ ID NO: 5629 - DNA, 517 bp, Homo sapiens
aaaaaagagccgtttgtccacttccagttcttttctgataatgaaaaacttaatccaatccaaaacagaattgctttgtcacgtatcaggttctgtgtgtgtatcaattcatccttatctcgaataagcagcaggctggattctttggtggaacaatcagctagactgttattccaagggttgacagtgtgagaaaataacaagcatttctctcggagttgctgccaatatattgggcagtttaagagacccggtctctctaaagtaaaaaacagaaataagaaataaatgttatatttctaacctatccctgacacaccacaaccaatcacacacacacaggtcattataaatgctcaaagtttttgattatcactgtgagaacaatgaatttgttataaagttgagatttttgagacctactgttcattctagtaccaagaattgggaattagtgaccagttatcttgagcataaatggaatcataaaatattaaaataggaaaacaccatcaga

SEQ ID NO: 5630 - DNA, 386 bp, Homo sapiens; identical to SEQ ID NO: 5435

SEQ ID NO: 5631 - DNA, 408 bp, Homo sapiens
  unsure (14): n=A,T,C or G
  unsure (15): n=A,T,C or G
  unsure (207): n=A,T,C or G
  unsure (281): n=A,T,C or G
  unsure (329): n=A,T,C or G
  unsure (336): n=A,T,C or G
  unsure (343): n=A,T,C or G
aaacattccacctnnttctcgcatgtgcaggtcaagtgtacagtagtgaaaacaacatgcaatgtcttcactgcagaatcataatacagctaggacattggtgttcttcccctcccaccccaaattaaaaactaattgctaaaaaaaattgcattgccaaacggcactggagtgaaagcttggcggtactctacgataaatgctcantttccagtgcatgaaataaaactatagcaaatgggaggctttggtggcatccaaagaagaaaaaggcaaaccanggggaaagagctgcagtctaaagtttggtctttacctgcccgggcggncgcccgngcaggtnctggtttagaggtgtggtgcttttggcagtgagtattgccttgaattcatggcaatgaattcaat

SEQ ID NO: 5632 - DNA, 374 bp, Homo sapiens
aaaatactgagcggtattgaatacttcgaagcagaacaggcaatgtgcagccctcatttatgagaaaaccctcaggaaactcccagggtgatgcttggagaagctgtgagttgagctgaagctggagaacttcctccagagcaaagggcttaagaaagaaagaagaactctaagctgggtctgctaacatcactccagtttagatggatcttggcagagagacatgcttgttcctctggattggaaagatgatttactctcgggaatcttctctgtcagcctgtacatctaaaggcatgaagcactcaattgggcaattaacattagtgtttgttctctgatggtatctctgagaatactggttgtaggactgg

SEQ ID NO: 5633 - DNA, 231 bp, Homo sapiens
  unsure (38): n=A,T,C or G
ttctctcttgtttcctctctatttcagcctagtatcanaaggccaggcgagactgcaacactgctcatcgccccgcggcgtgatccctgctcttaggtgctgggcagaggggaagggtggtcagggtgaggatggtgagggagggctggtgaggggctcagaggaatacttggaacaacagcagtgttattgtagtgtggcagtttcttttatacataggtgagagttttt

SEQ ID NO: 5634 - DNA, 284 bp, Homo sapiens
ctgtgtcctgccctcccttctggaggctggaggggagaggccaagcccttggaaaatgtagcaaatgtctggatgtcgcataagtgcgtgtatgtgcgggacaggccccgagaagctagtgactcctgcacacccccattgcacaaatgaaatcacagcccaggagggagggtagcttggcactggctgagaaatagagctctctccccgcccctccccctaaccacaagggattgtcctgacaacttgtggggatagaagggctcacagggcaggggtctcag

SEQ ID NO: 5635 - DNA, 279 bp, Homo sapiens
aaaaattaattaacaaatgaagtatacatttccttccccaaaatatcaacaaatgtaaaaaatataaaatatctgaggccatgttttatcatgtcaaggcaattgtcccagaatgtaataaaacatttgaactgaaaacatgcacatattagagttttttttaattaaagaaagaagaacttttacgtagttgtgcatgaacaccaaataataattacaggttgttttaccagatgactattgaataatattgcttataaaatttgttggtacactttt

SEQ ID NO: 5636 - DNA, 433 bp, Homo sapiens
ctgtccagtgagtactctcctagtactggatacaaaggaagaggccacggcccacgatcttctgaactcacaataggtggaggctggggctctggcgccacctctgcggaatcccaagcccgcttcacacagccaagaaaatgttgctccatccctcaagcctcagaccaacgtttgcgctgatcaaggagggagagtctctgcactaccatcagcctgagtatttatgctctgcagagcccgtgggcggaggccagtcagatattaagaaactcagtagtaacaaatgcacgaaaattagtagacaaatgaaaaacgataacattttagagagtacatagaaccaaaacgaaccgtaattccgacagaaaaacatggcgagaaaagaaaccgaaatgaaatgacactaagcaaatcttgaagagaactagcg

SEQ ID NO: 5637 - DNA, 175 bp, Homo sapiens
ctgagtgtggttgatttccttcccaccactccccagcccaccaagaagtccaccctcaagaagagagtgtgccggttacccaggccagagacccagaagggcccactttgtagccccatcacccttggcctgctggtggctggcgtcctggttctgctggtttccctgggagtgg

SEQ ID NO: 5638 - DNA, 315 bp, Homo sapiens
ccaagggtccctccaacgtggctggagaagcggtcagtgtcacgcagaaggagccggagcccctccccacggccatcccagaacaacaggccgatggtcactttgtctgggtcactgagcagcaggagacccgtcttgtccatggtcatcttcaggccgggcatcactgagaatagcgtctccttccacttgtacgcagagcttcttcggttccgagtcaccaccacgtgttcaggggatgcgtgaacccataccagggggttcttgaaggtcacttcgatccatgagaacccagccttctccctctcatactgg

SEQ ID NO: 5639 - DNA, 284 bp, Homo sapiens
aaattatttttgtgttaatagtacactttgagtatctttttccacattaaaaactttctgaattataaatgttttccttacattatttaacaatgtacactgttaaaaataaaaataaaaattcaaactttgggggtttctcagcagccgttaattgtacattttgcactaactctgggtgttgcgcttcttgtaagattgcgctttgtgcttcagtttgttacctttgtagacttatttaatgaaaccattcaaataaaccaaacttgcttttgttaaaaaaa

SEQ ID NO: 5640 - DNA, 342 bp, Homo sapiens
ccacttgtgtgggtcctcacaagcaaagagagcactaaacttgacattgggggtccaccactccaaccttgctttctgaaggttttggtgtacattgagccccagaaggaaaggagagtatctgtgagtgggggcctcccttgacccagtacgaagtctatgccctgaatccccagagtagcccttcctggtgcccaactggcctggggacaaacagcgtccactacatctaggactgccggctaagtggacacacttcttgacctcctaccaggaactttggtaaaagctagctttggggaaggggttgggtgtaaatatgagagggtggagggagaccag

SEQ ID NO: 5641 - DNA, 181 bp, Homo sapiens
ctggttggggagggcagcaaaacccacgtactccttgtccatgactccgccagccatcactgcacctgccgtctctccccacttcctctggtggggcaggaagctgagtgcggcttcaaccctccatccttcacacatctggattccaagtcccactgtagctccatcatcgtggtgagac

SEQ ID NO: 5642 - DNA, 551 bp, Homo sapiens; identical to SEQ ID NO: 258
  unsure (16): n=A,T,C or G

SEQ ID NO: 5643 - DNA, 71 bp, Homo sapiens
  unsure (22): n=A,T,C or G
aggtggaagccacagccattangtgtccccttgttggggggcggcgggagtgctggatttttgccctgtca

SEQ ID NO: 5644 - DNA, 231 bp, Homo sapiens; identical to SEQ ID NO: 259

SEQ ID NO: 5645 - DNA, 406 bp, Homo sapiens; identical to SEQ ID NO: 411

SEQ ID NO: 5646 - DNA, 296 bp, Homo sapiens
ctgggccacagacttgtccaggtcaacccgaaagctctcagcacaagaggttggttcctcaggggaagggtcttcctcttggatcaagtccaaggtcagcatcccatccgaggtagaggtggaagccacagccattaggtgtccccttgttggggggcggcgggagtgctggatttttgccctgtctcgagtgggatgggcaagatagctgtcctcctcaacggtgacctgaagagatgtactgtgaatcatgaatgctcttcagcgactcgctgtcccaacccagcatcccgagg

SEQ ID NO: 5647 - DNA, 238 bp, Homo sapiens
ctggcccctgcttcccctagggcacatgctggaagccctgggccgccaccagaggtcctcagccctcctgcctgggctatggctccttcctggtttgggagccatagtggagctttcctctctaagctcacccagctcaaactgtgacaggagaatcttcttcgactgccaagagcggtccaaggcaatggtcagccactgcagcctcctgagatatttttagagactggacctgagg

SEQ ID NO: 5648 - DNA, 470 bp, Homo sapiens
ctgctcctgcatctgtccaggattggtggctgtcagtgggagagacatgggaagatgctccctccaccttcctgggaccaccttgttgactcagcagccttcctcgccgcccaccatgctatgccttcctggatggaggccctgagggtggcttttggttttcctacccctgtacccctccaagaaagctctggcacactgcagaggccagcaactacttgtcaaatgaatcaaaggaaagtcaagccggagccaagggtcagaagcaggggcttgcttccccgaagtccagcccttctttgggctcccctttcctttttgacacctcctgcttggttggcagtgaggtctcccaggtctgggggatccttgccactgcttctgcacccagccctggctaagcggccttgttctcatcaaagctgccgagacctgcagggtactcagcttctacttccactcctacacag

SEQ ID NO: 5649 - DNA, 448 bp, Homo sapiens
tgcagctcagacacagcaaaagagcctagaacctgggtcctagtttgcacctagaatatgaggtactttgagccttgctaagaccacccagcccatctccatggactcatatgaaggacaagaagtgaacataacctgtagccacaacaacattgctacaaatgattatatcacgtggtaccaacagtttcccagccaaggaccacgatttattattcaaggatacaagacaaaagttacaaacgaagtggcctccctgtttatccctgccgacagaaagtccagcactctgagcctgccccgggtttccctgagcgacactgctgtgtactactgcctcgtgggtgacatggagtcttctggttctgcaaggcaactgacctttggatctgggacacaattgactgttttacctgatatccagaaccctgaccctgccgtgtaccag

SEQ ID NO: 5650 - DNA, 323 bp, Homo sapiens
aaataaccctgaccaccacatgcttgctatatcatgtgcatgatgagggaagccataaactatttcaaaggcaactttctagctatcgggtacgatgtcctctgggagagaccatggtgggtgacagggacagaggacgatccctgaggcaatggtaagtcaggtgttaggtagcaagggaagcagcctgggcatcaggtagagttgtgcaataaagtctgtgttttaagttcccccttcttcatttgccaacacaccaaccaggtgagcccacctttatgagtgactttggagaaagatgcttttcccattgctactgcagg

SEQ ID NO: 5651 - DNA, 163 bp, Homo sapiens; identical to SEQ ID NO: 3801

SEQ ID NO: 5652 - DNA, 165 bp, Homo sapiens
cctcagacaccaggatgttggccgcccgcaggtcgcggtggatggaattcatgcgctcaatgtatgccatcccttcagcaatctgcgccgacatgtcaatcagccttgggagtgacaatctgctcccttcatctgtcttcaggaaatccagcaggcatcctctgg

SEQ ID NO: 5653 - DNA, 561 bp, Homo sapiens
aaaaatgcattattccctcatccaaaagaccaccactttatcttaaagctacttggctttacaaaaaataaaaataaaatagaggattaggggaggaacagacaggaagaaaagaaattaaataaaaaatgaaagaaaaaaaaaggaccaatggaggatgaaggatggagaggaaacgcaggggaaggagagagaacgagatatggaaaggcaccaaatgtccaaatccctggacaggcagatgggctccttggtactgcagattcaccacagctacagacactgcagtgatggcactcagggcacgagccagaggggcagcctcagcagggagcagctcactgagcactgaagctggaatggcactaataacgtggtcagcctccagactgccgtcccttagagataccttccagcgcccttctgcctggaggctgagcccacagaccggctggcctctgagaacactgacccccctactagtcaggtgggtttcaagggcctgaggcaacatctctagacctccacgaagtgaccactggctccagcgctcagccaagg

SEQ ID NO: 5654 - DNA, 404 bp, Homo sapiens
  unsure (12): n=A,T,C or G
  unsure (372): n=A,T,C or G
aaaaagcatatnccaccttttttattaattattatataaaatgaagcatttaattatagtaataatttgaagtagtttgaagtaccacactgaggtgaggacttaaaaatgataagacgagttccctattttataagaaaaataagccaaaattaaatattcttttggatataaatttcaacagtgagatagctgcctagtggaaatgaataatatcccagccactagtgtacagggtgttttgtggcacaggattatgtaatatggaactgctcaagcaaataactagtcatcacaacagcagttctttgtaataactgaaaaagaatattgtttctcggagaaggatgtcaaaagatcggcccagctcanggagcagtttgccctactagctcctcggacag

SEQ ID NO: 5655 - DNA, 357 bp, Homo sapiens
ccaccacggtctcgtcccaaaggagaacgactacgagagcataagtgacttgcagcaaggcagagatattaccaggctctagcaacccagaagacaaccctgggtagcctgtgatcagtgtctggagacgtttcttctgtggaagagaagaagtgacacaaacctatacttcatatgctgctttagtcacctgaagatggttggagaggccctgtcgactgttctcccagttgttcagtttctgagacagagaggtacggactaggctgcacctgagtgtgcccctgcctgccagatggacaggtacacccaagcacatctccctgctgcaccctcaccacccacaaaagatcccag

SEQ ID NO: 5656 - DNA, 201 bp, Homo sapiens; identical to SEQ ID NO: 5564

SEQ ID NO: 5657 - DNA, 207 bp, Homo sapiens
ccagagggaaggcccaagagacgtctctgaagccaccgttcctgattattcagaggcagggtccacagtgagtgactcggtggggctggaggaacccagggtgacccagagggggctctggagcgggtccctaacatctgaaaaagtcctcccagggaactcggagctggaacttccaggcagcttcgggggtgacatttgtatccg

SEQ ID NO: 5658 - DNA, 265 bp, Homo sapiens
ctgtgaaacagaaggcactttgtgctagaattcagagggtctctcaagagagaacgccacagcagagagacccaatccgcctaagttgcaggcgaccctttagggtggggaggagtatcccccaggaaggcatctgcaaaggaaaaaattgtaatcatgattccaaggcaaaatggctaaagttgggagagaagaaataccaagagagaagacaaaacatggctgtgccaaggactgaggagtgagctttacaaggacttgtcag

SEQ ID NO: 5659 - DNA, 277 bp, Homo sapiens
ccacttgctgcctaaaccaatcacagcttcagttttgttttttgtcaagtgttggagttacaagtagacacctctctgtgcctggtattgctcaggttcagacttggctgggggtgagggggccaggcagaaatcagttaagaaggccattccaggtgtaaatgcctcccggctctacagggggtaatatttactgtcgtcttttcccttcccaggttgattactgacctgtttgttgtgaagatgctgctgcaataagcacaaacagaactcatgg

SEQ ID NO: 5660 - DNA, 269 bp, Homo sapiens
actgtgcagatgctcttggcaggacagcatcgcagggaggtgctgggattctgggcctcactgtctgggtcttggttcctctgaaagagatggatcttgtgcagaccagggttgttgagtgaggggagcgtgggatggggaccgtgggaaagaggacagctcagggagaagtgacctggagaggtcctgtttgcatctgacccatctcaactggcccagcatcccaacttctctgcagcgaaagggtggcgccccgcagcctcgggagg

SEQ ID NO: 5661 - DNA, 247 bp, Homo sapiens; identical to SEQ ID NO: 2583

SEQ ID NO: 5662 - DNA, 244 bp, Homo sapiens
cgcccagccaggagttaagctgaggtcgtctgagccctgcgacagcctggacagcaactcaggatggcatcaggcagggcacgctgcacccgaaaactccggaactgggtggtggagcaagtggagagtgggcagtttcccggagtgtgctgggatgatacagctaagaccatgttccggattccctggaaacatgcaggcaagcaggacttccgggaggaccaggatgctgccttcttcaagg

SEQ ID NO: 5663 - DNA, 448 bp, Homo sapiens; identical to SEQ ID NO: 5649

SEQ ID NO: 5664 - DNA, 365 bp, Homo sapiens
ctacagataacatacatgataatatctgatttcaggacaaaagagtaattctcaatagcaagggaatggagtagggtagacagctagtaattaaactcacttgtatgttaaaaataaattaaggaaaaaaagaaaatgagagaacatattactaaataaagaaagcatacattaaatatttactatagtttcacactaagggaataaaggaaatgcaatagagtggcctgaaagataaaggatgagatgtgtaaagagacagggaaagatgtgtcatttttttactatgagcagcagtctgagaagataaaggaatcgagttatgggcaaacatgatgtttgatcagtgctatttgttttgaagg

SEQ ID NO: 5665 - DNA, 303 bp, Homo sapiens
ctggagatggcagccattgtttgcggagcccaggctgactccggattcaacgttgctggggagagaaaagcagtatagactccaccttccaggatgtccatttcggggagaggagcaggtgggaccctcaagaaaatgacggagaacatcccagacagatgggactcaagcaggatgggtgctatatccaagaagccaagaagggagagtttcgtgcactgtggttaacaggagggctgcctggaggcagtggctgagccagaaagtaacacagagctcatgcttggagagagagagtcttgg

SEQ ID NO: 5666 - DNA, 396 bp, Homo sapiens
aaagctggctcaagactggcccaggcataatactgtcaatctaaaggtaaccggcaacatcaaaaagtacatctcaaaagaatcaggcttaaagataaacaggagaactggaaatatctaagagtaagaagtgtaaacaatagaaaagaggtagggtttagggttctcatcttgggatttccccaggtcttcaagcttctatccttcctgggttctgggtcatgggcctccagattccggccgttagtcttgagatacctttttcgcttgggtcctctatccatctaggtaggctttgtgacaggggccttccatccttgggttgtaggtcttccagctacaaccctgggctaatcttaggtcgttggccttgcgtcacaagtctcagttcttagg

SEQ ID NO: 5667 - DNA, 158 bp, Homo sapiens
ccttctagcatggcatcaattccgatataggttcctgtacgcccaacaccagcactgcagtgcaccacaatgggaccactgaagaaattgctgaaggcattcactctccttctcagtttgaggagcaagtgaggatcctcaggcaccccgtggtctgg

SEQ ID NO: 5668 - DNA, 151 bp, Homo sapiens
acataaaattaaagtgtgtctcaaaaccagacagccatcttgtctgccatcactgagcaaattacagatggactcaatacaaatttgcccacggggcttgcttgcaatactatttcacaaagctgactgtattcttcatcttcataaatgg

SEQ ID NO: 5669 - DNA, 364 bp, Homo sapiens
gtgtatgctcacttccccatcaacgttgttatccaggagaatgggtctcttgttgaaatccgaaatttcttgggtgaaaaatacatccgcagggttcggatgagaccaggtgttgcttgttcagtatctcaagcccagaaagatgaattaatccttgaaggaaatgacattgagcttgtttcaaattcagcggctttgattcagcaagccacaacagttaaaaacaaggatatcaggaaatttttggatggtatctatgtctctgaaaaaggaactgttcagcaggctgatgaataagatctaagagttacctggctacagaaagaagatgccagatgacacttaagacctacttgtgatattt

SEQ ID NO: 5670 - DNA, 115 bp, Homo sapiens
  unsure (4): n=A,T,C or G
  unsure (9): n=A,T,C or G
  unsure (61): n=A,T,C or G
  unsure (63): n=A,T,C or G
aaanccatntataatccaccaccacctgttttttgggggacctgggacacatgaaacacananaggaaatttcatgggtactggatgaaacaaggaaggaaatgtttttgctcac

SEQ ID NO: 5671 - DNA, 587 bp, Homo sapiens
ccacatccctaaatgtcaacggcccctgaaacaaacaaacacaaacacacacacacacacacacatttacacgtgggcaaaatttatcatttgaattaaggtcaaatgagaaagtaaagaaaattcgttctgacttacaggaatgactgaaattatccaacaattttcaacacagaaatattctctaatgtattctctaactctgagagaagagaatggtataagatctacaacaccactgtatatatacttttattaatagtaaagtataaagctaaaggcataaacacaaacatgtacattttttagtgctatatttgccacacaaagaatgagttgtgtatatttttcagacaaaagatatgttgagttagaaggcacctctcaagttttaatgtgaacaataaactggagatcttgtgcagattcttttttcccagaagatctgaaataaactctgagtttctgaatttctaacaagttcactagtaatgccaatgtgtttggcccagaaagaatattttgtcaatatccagtaagtggaagaacctgtgttttactcaatttttctgccctgtaaacaaaga

SEQ ID NO: 5672 - DNA, 334 bp, Homo sapiens
aaagccatagtctctcaactctattgattggggttaataagactcacaaaattgtcaagcagaccaattaactagggacaaatttcaaacctaaaatttagtttgcgtgtaacgtgggactgacacaagtttggaaatcatggcaaaacatcaattacctaggactacaaaacattaatttcttcttttaagcagagagaatatggatttaattgtttaccataagaaaagtgacatatccaaccaaccatccatccccacctgtgccctattctttccttgtgtttctttagagccttttcagctatttcctgtgaagcaaactgcacgaagg

SEQ ID NO: 5673 - DNA, 225 bp, Homo sapiens; identical to SEQ ID NO: 3741

SEQ ID NO: 5674 - DNA, 317 bp, Homo sapiens
cctgtattgccatgaactgagcattaggggcagttctgctgagggatcagaagagaagaccaagggaattctgtcccagttgtggctcaaactgcctcaggtgcagcttaacctgcgtctctggaaggtaaaatgcatctgatccttgaggcaagagctgtgggggcatggctccctcacctggatttcaaagcgtgttaccagcagcctggggacccaggctctgcctctggatttacctgcatcgtatttgcgcttcgtggtcaaagttgttaagaaaggggtgagcttctggctacctaataagttggtcttgg

SEQ ID NO: 5675 - DNA, 548 bp, Homo sapiens
ccagaaaatcaagagctagatcaagattccaaactaatagaaaagtatgtttcatccttaaatagatccttcaggggacagtacaagcgcatgtgcaggtccaagcaggcaagcacacttttctatctgggcaaaaggaagggtctaaacagtattgttcacaaggccaaaatagagcagtactttgataaagcacaaaatacaaattccctctggcacagtggggatgtgtggaaaaaaaatgaagtcaaagacctcctgcgtcgtctaactggtcaggctgaaggcaagctaatctctgtagaatatggaacagaggaaaaaataaaaataccagtaatatctgtttattcaggtccactcagaagtggtaggaacatagaaagagtgtctttctacctaggattttccattgaaggccctctggcatatgatatagaagtaatttaagacaatacatcacctgtagttcaaatatgtttatttatatctttatgattttattctctctctctattctcatggcactttcataacattatggctaa

SEQ ID NO: 5676 - DNA, 357 bp, Homo sapiens; identical to SEQ ID NO: 3776

SEQ ID NO: 5677 - DNA, 175 bp, Homo sapiens
  unsure (156): n=A,T,C or G
  unsure (163): n=A,T,C or G
  unsure (169): n=A,T,C or G
ctgagttcccttccccaaggtcagctcggggctcccgacgatcatgcagaagtagatgccactgtcttccggcttcacgcttgtgagattgagaatgaaccggcttgccatcccgaaacacagctatcttctcctgttccacctcttcaccgtggntagtccnttttgnggaatc

SEQ ID NO: 5678 - DNA, 346 bp, Homo sapiens
aaattaaaaagatataaacatgtcaaaggaatgaaacctagatgttttattatgtgtgaattatgagcgcttacctggccttgtgtataacgtataaaccttcacctgttgcatgtcattcagtctctgcagcaacattccttgtgtccatgtgggtgtttctatgtgtgactgtgaatatctgtatgtaaatggcttgtctcttgggtgcatttgtgggggtgggtatccaccgctattatcattgctttctttttcagaaagtgtttccaatctttgcttcattttactcaacagaaatgaggaggttggtttatatttcatgtcttttctctttcagatacag

SEQ ID NO: 5679 - DNA, 416 bp, Homo sapiens
  unsure (15): n=A,T,C or G
  unsure (17): n=A,T,C or G
  unsure (18): n=A,T,C or G
  unsure (330): n=A,T,C or G
gcagaataaaaccancnnagactccttttctcctaaccgtcccggccaccgctgcctcagcctctgcctcccagcctctttctgagggaaaggacaagatgaagtggaaggcgcttttcaccgcggccatcctgcaggcacagttgccgattacagaggcacagagctttggcctgctggatcccaaactctgctacctgctggatggaatcctcttcatctatggtgtcattctcactgccttgttcctgagagtgaagttcagcaggagcgcagacgcccccgcgtaccagcagggccagaaccagctctataacgagctcaatctangacgaagagaggagtacaatgttttggacaagagacgtggccgggaccctgagatggggggaaagccgcgtttagcttttgttgcc

SEQ ID NO: 5680 - DNA, 270 bp, Homo sapiens
aaaaatagctttggcttggaacttcagaagataggaaattttcgttattttatttattcttttttttttttttttttttttgagacagcgtctcactcccttgcccaggttggaatgcagtggcatgatcttggctcactgcaacctccatctcccatgttcaagtaattctcctaccttagcctcccaagtagctgggattacaggcatgcaccaccacgcccagctaatttttgtactttcagcagaaacagggtttcaccatgttgg

SEQ ID NO: 5681 - DNA, 278 bp, Homo sapiens; identical to SEQ ID NO: 260

SEQ ID NO: 5682 - DNA, 312 bp, Homo sapiens
  unsure (11): n=A,T,C or G
  unsure (57): n=A,T,C or G
  unsure (64): n=A,T,C or G
  unsure (90): n=A,T,C or G
  unsure (91): n=A,T,C or G
  unsure (99): n=A,T,C or G
  unsure (100): n=A,T,C or G
  unsure (115): n=A,T,C or G
  unsure (117): n=A,T,C or G
  unsure (134): n=A,T,C or G
  unsure (135): n=A,T,C or G
  unsure (164): n=A,T,C or G
  unsure (165): n=A,T,C or G
  unsure (231): n=A,T,C or G
  unsure (293): n=A,T,C or G
aaaatctcttnttcctcaggagtcagcttggctcccttcttgcggcccgggggcagngcatagngggactcgtaccactgtcggtacggnntgctgtcnnatgagcacgatgcantncttcaccagggtcttgnnacgaaccagctcgttattagatgcattgnngacaacatcgatgatccttgttttacgagtacaacactctgagccccaggagaaattccccacgtncaacctcagggcacggtatttcttgttacctccccgcacacggactgtgtggatgcggcggnggccaatcttggtgttggc

SEQ ID NO: 5683 - DNA, 220 bp, Homo sapiens
  unsure (35): n=A,T,C or G
  unsure (36): n=A,T,C or G
  unsure (70): n=A,T,C or G
  unsure (104): n=A,T,C or G
  unsure (123): n=A,T,C or G
  unsure (141): n=A,T,C or G
  unsure (162): n=A,T,C or G
  unsure (189): n=A,T,C or G
aaaagatactttggattcaattaagaagagttttnnagaacaaaagaggaaggttctggcatggggagcntctgcaacccactgctgggtgccagaagcgagcntgtggagcggaagatgaanatggcaccatgtgtctcntaaaccacaaatggaaccacntgatttctatgtgtatttgcatttgcntgtaatgtgtgggaaatcatgaaggttacac

SEQ ID NO: 5684 - DNA, 209 bp, Homo sapiens
tgagtttcttactcgggagctggctgaagatggctactctggagttgaggtgcgagttacaccaaccaggacagaaatcattatcttagccaccagaacacagaatgttcttggtgagaagggccggcggattcgggaactgactgctgtagttcagaagaggtttggctttccagagggcagtgtagagctttatgctgaaaaggtgg

SEQ ID NO: 5685 - DNA, 201 bp, Homo sapiens
ctgtttgagcgagagttctacagtgagatcctggacaagaagttcacagtgactgtgaccatgcggaccctggacctcatcgatgaggcttatgggctcgacttttacatcctcaagaccccgaaggaggacctgtgctccaagtttgggatggacctgaagcgagggatgctgctgcggcttgcccggcaggacccccag

SEQ ID NO: 5686 - DNA, 379 bp, Homo sapiens
ctgcagggcaaggacggttcaaaagtttgtgcgatttaattgctgtcatagcctgctccgccctgggatcgctggacaaggagcggccaaaggtcctgtgtgactttgtgacacacacatcatcagtcttgactgtgctggaacaagtcctccgcagcagcttatgcgttttggagattccgtcctgctcagatttcagtttggatttgcttttgccacaaccagggggaggataacttggcgacctgcgcaaagtagaaaataaatgcaggggagacttcactttcttctctgacaactttttattgtgcaggcaattggatttttctttgctctgtttccactgctgtgtaacaaatgtctgcatgatttttttcag

SEQ ID NO: 5687 - DNA, 225 bp, Homo sapiens; identical to SEQ ID NO: 3741

SEQ ID NO: 5688 - DNA, 357 bp, Homo sapiens
ctgacagttctccatggcaactcagtcctccagcagacccctgcatacataaaggtgcaaaccaacaagatggtgatgctgtcctgcgaggctaaaatctccctcagtaacatgcgcatctactggctgagacagcgccaggcaccgagcagtgacagtcaccacgagttcctggccctctgggattccgcaaaagggactatccacggtgaagaggtggaacaggagaagatagctgtgtttcgggatgcaagccggttcattctcaatctcacaagcgtgaagccggaagacagtggcatctacttctgcatgatcgtcgggagccccgagctgaccttcgggaagggaactcag

SEQ ID NO: 5689 - DNA, 236 bp, Homo sapiens
aaacagctctaagtgtcagtactcatagtggcatattacaaagtaataaacagtgcacacttgagggcaaaccgcatattgagctatggaagagctcactgtgattaagatgagatcaaacatcatagcagaacattagcaaattttatctgaattctgtaatgaacatccatgctgcaataacattaaaaaagcacgggagcctattccaaaccagcgagaacagttttgtgcaa

SEQ ID NO: 5690 - DNA, 270 bp, Homo sapiens; identical to SEQ ID NO: 2914

SEQ ID NO: 5691 - DNA, 289 bp, Homo sapiens
aaaattacattttatttctctttatgaatatttgctttttgttttttgtaaaaaaaaaaaaggttcattttacatcttcttcaagagtcttgtgcctcctggtaagtgcattggtttgtttcacagtactctccacgaccaaggacggttcttattgctggaaggagtgagtggatgtccacgccagggcggggctggaggacataagaagaatcggggccctggcaggaagcctggggcctgtgctccaacaagagcaaggaggctgaaggagcagaccggggctcag

SEQ ID NO: 5692 - DNA, 226 bp, Homo sapiens
  unsure (146): n=A,T,C or G
  unsure (147): n=A,T,C or G
  unsure (200): n=A,T,C or G
  unsure (204): n=A,T,C or G
  unsure (215): n=A,T,C or G
ctgggctgctcccgccccagcccggcccagggtgaaggaagaggcacgtgctcctcagagcagccggagggaggggggaggtcggaggtcgtggaggtggtttgtgtatcttactggtctgaagggaccaagtgtgtttgttgttnngttttgtatcttgtttttctgatcggagcatcactactgacctgttgtaggcngctntcttacagacncatgaatgtaa

SEQ ID NO: 5693 - DNA, 219 bp, Homo sapiens
ctgacaagaggcacagtcacagagctatgaggacagtcttatttaggcaaaccattcttatactcatgcataccagaaaaatgtctttgtctcttctgtgacactgctagatgctggagatataacacacatcgctgtccctaccctcacattaggggtagctgtaattatattctggtcaagaactgtgatgctaaatttcaattcttactagctttt

SEQ ID NO: 5694 - DNA, 315 bp, Homo sapiens
ccagagacatcctgatcgaccctattcgagtggtgcagggagatattggagaggcaaatgaagatgtgacacagattgtggagattctccattctggacctagtaaatggaactggcttacccggcgtctggtagaatttacctcttcagggagtgtcctcctctttgttactaaaaaagccaatgctgaagagctagcgaataaccttaaacaggagggtcataatcttgggctgctccatggggatatggatcagagtgagagaaacaaggtcatttcagactttaagaaaaaggacatcccagtcctggtgg

SEQ ID NO: 5695 - DNA, 269 bp, Homo sapiens
ctgcctcctgagggtgtggggttattagggtctcaatactttctcaaggggctacactccccatcaggcagcatcccaccagcctgcaccacaggctcccctgggaggacgagggaaacgctgatgagacgctgggcatctctcctctgtggctctaggacgtctgtccaggaggctgggcggaggtgggcaggatgtgagaggtggggagtactggctgtgcgtggcaggacagaagcactgtaaagggctctccagccgcagctcag

SEQ ID NO: 5696 - DNA, 293 bp, Homo sapiens
  unsure (168): n=A,T,C or G
  unsure (197): n=A,T,C or G
  unsure (198): n=A,T,C or G
  unsure (208): n=A,T,C or G
  unsure (220): n=A,T,C or G
  unsure (221): n=A,T,C or G
ccatgttcccccgtttgccctcacaaaaaccttgtgaataatacaagccatatggactctgatttacagtttagaagatgagcagaggtgggtgtgagttgcccagtcatgttgctagttgttgaagaaactaggattgttctcaggtcttgggctcctggcccatanaccagtggctctgtgttctgatggggtannggggaggatntttacaaatgcnnattcctgagattgttcctggaacatctccgagtgggtgtgggttgtggccctgcgtgtgtgattttgcctat

SEQ ID NO: 5697 - DNA, 341 bp, Homo sapiens
aaattccagccctctattatcacataccccctttaagatttatggttctagtcacagcaagctctctgtaacactcattggattaggcaaagattgagtcaatcatcttgcaaatgtgttaatcttcaaaaataggctataaaagtgcaaaaccatgaaaacaaaatctagattatgtacatatggctcagcttgtgaacaggaaaaaaggtcaatagtgtacactttcctgaaacaaagcacttcattgcaatgccaacagactgatctcaaatgagttctcccttgtaacacaggagctaagacttctatcaaggaggacatcttacgttgcataattt

SEQ ID NO: 5698 - DNA, 352 bp, Homo sapiens
ccacacagactcaccaagccacagacttgtcttccacaggcacgttcttaccttagccacgaagtgaccaagccacacgtactaaaggttgaactcaaagatatgtacagggtattaaacaaataccaaggggaacagttaacttcaatacaaggtcaaaatcagcaacaagttctacaatccagtgctgatatcagatacaagcttcaaggacaatttcttttcgaaggcttattccagtttcgtgaggctagcatgaggtgtgtgcatttgccaggggcaaatttctattctcaattaacccatgcagcaaatgctacgcatctgctgagtccgtttagaagcatttgcg

SEQ ID NO: 5699 - DNA, 307 bp, Homo sapiens
aaagttaaaaaaactccactacatgccatattgaaagaaaaggttgtttttttttaactgcagcacctttagacaacaaaagattgcatcctgttcaaccacactatataaattataacgtttgtggaaaatatgtacacacaaacataaagcaagtgctctaacagttaataagtgttgtcttggcaagcagtttccagaaacaatactaacaactggtaataagaactgccaccattttgagttttccgttgctatcttcatcaaacaggaagcctgtaaacataagatgttaaaaaaaaaattt

SEQ ID NO: 5700 - DNA, 555 bp, Homo sapiens
ctgaaaaaggacggctcctctaaccatgtttacaactatcaaccctgtgatcatccacggcagccttgtgacagttcgtgcccttgtgtgatagcacaaaatttttgtgaaaagttttgtcaatgtagttcagagtgtcaaaaccgctttccgggatgccgctgcaaagcacagtgcaacaccaagcagtgcccgtgctacctggctgtccgagagtgtgaccctgacctctgtcttacttgtggagccgctgaccattgggacagtaaaaatgtgtcctgcaagaactgcagtattcagcggggctccaaaaagcatctattgctggcaccatctgacgtggcaggctgggggatttttatcaaagatcctgtgcagaaaaatgaattcatctcagaatactgtggagagattatttctcaagatgaagctgacagaagagggaaagtgtatgataaatacatgtgcagctttctgttcaacttgaacaatgattttgtggtggatgcaacccgcaagggtaacaaaattcgttttgcaaatcattcggtaaat

SEQ ID NO: 5701 - DNA, 373 bp, Homo sapiens
cctgtctcctgaatgatagctgtaattatcaaacttctgaatgaagctttattgcaccatttacaaggattctccattatggtggtcctgagactactggggcatgctgagctatggctgaagcactgatgttatcttaaacaaatgttttccctcttccaagaatgggtgaaatttatcaccagcatggattcagagataaaatactcaaagggaagtgcttactatgtgcctcatattttaatgtgtctctcctttgtgaaccttcagatgagactgcattcatgaagactgagtgaagactttattgcaccatcacatcactaaggtttttctccaacatgaacattctgatgaagtcgaaggcttgagg

SEQ ID NO: 5702 - DNA, 354 bp, Homo sapiens
ccacgttggtttcactctggggcctctggaaggacgctgagcttaggtcgggccggaaggcgtcaatggcgtgctcacggttgttctggtccagcagcatgaaggtgaccttgttccggaagggccacggcagcagcgcatcatactcccctctcatgatcacgatgaagagcgacagatgggttctctttccagtgccatctccattcaggtacagccgcaggcacaacttgtagccatacttggcagtgtagaaggctggggagaagaggctgacggtcctgccacaggccgactcatggcaccgcctggtgacattggtgatcttccacaggaaagtgccatcgaaggagg

SEQ ID NO: 5703 - DNA, 495 bp, Homo sapiens
aaacggaatgaatgtggcttttgggggcaaaagaaaccaagacactacattgtctttattttctcctatcccagtgcatttgagaaccatgcataagggaatgctgtgctacaaagctgtacccaaatatgaaaacaaaataggaaacttaaaaagcaataccccctttagaaagtttttattttcttaaatgtcattgagttgctttgattctattggatttttggcattttttatgggatcatcagttggttccaagtatgttagatcagctaacatctgctactccagtaacagcctcgtacaactgcaggtaggttttctccagaccaattagttttaatagagcaaactaacaacagactgtagtagcatggttatggcaaccagaatcttcagaaaggttaggacattactttttaagctgtcagtggtatcaaataacttacctagttggaggcagataaaggatcccttacgttttttcctataagg

SEQ ID NO: 5704 - DNA, 212 bp, Homo sapiens
  unsure (12): n=A,T,C or G
  unsure (13): n=A,T,C or G
  unsure (14): n=A,T,C or G
  unsure (40): n=A,T,C or G
  unsure (42): n=A,T,C or G
  unsure (63): n=A,T,C or G
  unsure (64): n=A,T,C or G
  unsure (111): n=A,T,C or G
  unsure (117): n=A,T,C or G
  unsure (150): n=A,T,C or G
  unsure (164): n=A,T,C or G
  unsure (169): n=A,T,C or G
  unsure (175): n=A,T,C or G
tttttttttttnnntttttttttttttttttgggtacagnanattatttatttctgttatttnngaataaaatttattttatggcttaggatctatgacccctgccttganaggganaatgggataggggagtgaagggaagctggcggnggatggggcaacanaaaanatgcancaggcagggccctctcatacactggagggccacatgg

SEQ ID NO: 5705 - DNA, 322 bp, Homo sapiens
aaaaagcataatatgcctatagctgaaaaggaaacagggctgtttaagtcactgacttatgagaaagcaaagcactggtacagttatttaacaggcatacacaagcagggaaaagataatccatttagatctttaatgctttggaaatgcgtgtaacagtactgcaataatcacagctctgggaaaaacaacgaaactttcccttgtggagaggagggattttcctgctctatataagcaacatatttttagacattaaaatatatataattttgcaggtaattgttgacttttttaactatattaagtgttaagctgacaa

SEQ ID NO: 5706 - DNA, 270 bp, Homo sapiens; identical to SEQ ID NO: 2914

SEQ ID NO: 5707 - DNA, 274 bp, Homo sapiens
ccagagggaaggcccaagagacgtctctgaagccaccgttcctgattattcagaggcagggtccacagtgagtgactcggtggggctggaggaacccagggtgacccagagggggctctggagcgggtccctaacatctgaaaaagtcctcccagggaactcggagctggaacttccaggcagcttcgggggtgacatttgtatccggccagccgagcggggaaaggagaccttgtgtcctggcaacagggagagccgggactgggatggacct

SEQ ID NO: 5708 - DNA, 291 bp, Homo sapiens
  unsure (12): n=A,T,C or G
  unsure (13): n=A,T,C or G
aaaattctttanngagagagggatggtttctgaggggttctgaaagtatgattcaatgtgcaacatacaggtaggtcttcagcataagctgaaatatatgcatgtaaaaactttgacatctttttttttaattttccactttcttcttaactttacttctctttttgtccccccccatcttacagaagttgaggccaagggagaatggtaggcacagaagaaacgtggcaaactgctctgtgctttcaaaccaaagtgttccccccaaccccaaatttgtctaagcactgg

SEQ ID NO: 5709 - DNA, 219 bp, Homo sapiens
  unsure (12): n=A,T,C or G
  unsure (45): n=A,T,C or G
  unsure (60): n=A,T,C or G
  unsure (173): n=A,T,C or G
  unsure (174): n=A,T,C or G
  unsure (203): n=A,T,C or G
ccatgccacccntgtgcaaacagaggtgtacacacaggagtgcantgatacaggacacanataaacagaatgtacacagccttcaggaaggatctcaagggttccgagtctgaggaagacataaccttgtgcctgcctgcccacctctctctctggtcctgttcatctctcannctctgagacactgaccttcactgctcagntaaaggttccagggat

SEQ ID NO: 5710 - DNA, 284 bp, Homo sapiens; identical to SEQ ID NO: 413

SEQ ID NO: 5711 - DNA, 447 bp, Homo sapiens
  unsure (304): n=A,T,C or G
  unsure (346): n=A,T,C or G
ccagttctggtagttattaaaccatgcattggaagaccctgctggaatataagatgcagagcacagaaagaaaactaagtgaagaaagaattgtttcggagccttgtaaggaatactcacgtcctccttctccaagctgggctccctgaagttggcaatttcatcaaaacagtatccacttaaaagtacccttaactttttcttccaaagttacacagtagccccaagttctacaatgcccacttcatgttttcctgaggcaccctggagacgccaaaagcatttgagaatgaacgggcctttntttttttttttttttttgagcccaggctggagtgcagtggtncgatctcggctcactgcaacctccaccccctgggttcaggtgatttttctgcctcagcctcccaggtggctgggattgcaggctcccaccaccgtgcgcgg

SEQ ID NO: 5712 - DNA, 325 bp, Homo sapiens
ccaccgctgggaggaggtggatgacttctttacaaaggaaaatggtagcagcttcagtgagaaactgcccttacaaacagtcccttctctgctgtcaatccaatactgctcccaaatcctgttttcagtgttcatttccctcaaggcaggcgctgggctcccacgacccctcaggacagatctggccgtcagccgcgggccgctgggaactccactcggggaactcctttccaagctgacctcagttttctcacaagaacccagttagctgatgttttattgtaattgtcttaatttgctaagaacaagtaataagtaaattttt

SEQ ID NO: 5713 - DNA, 257 bp, Homo sapiens
cctaaaaagcaggggcttcatgcagatgcagcagggacactcccaccaagccatcctgggctttggtcatgggtcccacgccaagcacttggacaagtctgttaggaaagggggtggcacatgctcttccgccatctggaaaaacatggagatccaagggagggcggaaagggtccttgcaactcagtcagcttagagcctcttattgcttatttagtcagaaaagcctggctgggcctagacggcaaaagatttgg

SEQ ID NO: 5714 - DNA, 227 bp, Homo sapiens
cctgccttgggcagctcagtggctctgaactgcacggcttgggtagtctctgggccccactgctccctgccttcagtccagtggctgaaagacgggcttccattgggaattgggggccactacagcctccacgagtactcctgggtcaaggccaacctgtcagaggtgcttgtgtacagtgtcctgggggtcaacgtgaccagcactgaagtctatggggccttcac

SEQ ID NO: 5715 - DNA, 424 bp, Homo sapiens
aaaatgtcatcaccatctctcagatagcaaatattcttttacatcatctgcacacaaacacctgagaacaaagagtacgatgcttttccccatctaacaagaagccaaggtgccacgaagtacagcagaattgcagtcctagtacctcgctgcgacactgctactgtacttgtttccagatggctaagctgaattcaaggccactaccatattgagctgaatgctcgctcagcaactcccaatgaaagcaagaagcatgtatcattgcccccgtctctaagagacacaaattaaggactgcgaccactttacacccactaaaacctacaagatacaacacaacccaattaccaccttcccttgagaaaaacatagaccgttttcattctgccgtttgttacttaccaatgccaaaattcttagg

SEQ ID NO: 5716 - DNA, 474 bp, Homo sapiens
cggaattgctctcccagcccttgcattgcagaggggcccatgaaagaggacaggctacccctttacaaatagaatttgagcatcagtgaggttaaactaaggccctcttgaatctctgaatttgagatacaaacatgttcctgggatcactgatgactttttatactttgtaaagacaattgttggagagcccctcacacagccctggcctctgctcaactagcagatacagggatgaggcagacctgactctcttaaggaggctgagagcccaaactgctgtcccaaacatgcacttccttgcttaaggtatggtacaagcaatgcctgcccattggagagaaaaaacttaagtagataaggaaataagaaccactcataattcttcaccttaggaataatctcctgttaatatggtgtacattcttcctgattattttctacacatacatgtaaaatatgtctttctttttt

SEQ ID NO: 5717 - DNA, 373 bp, Homo sapiens
tttggtcctcctgcagatgctccagtggctttgaccgctatcgccaggagtggatggactatggctgtgcacaggaggcagagggcaggatgtgcgaggacttccaggatgaggaccacgactcagcctcccctgacacttccttcagcccctatgatggagacctcaccactacctcctcctccctcttcatcgacagcctcaccacagaagatgacaccaagttgaatccctatgcaggaggagacggccttcagaacaacctgtcccccaagacaaagggcactcctgtgcacctgggcaccatcgtgggcatcgtgctggcagtcctcctcgtggcggccatcatcctggctggaatttacatcaatgg

SEQ ID NO: 5718 - DNA, 274 bp, Homo sapiens
ctggaagccttgttggcccctaagcctttgtttcatgctacagtactgaggggtatgtgtccccaatgcacagccacccgcacacaactcaatgagcttcctgggaaacactattcccccacctccaccttaggtggctgcctcagttttccaaccacaggaatcagtccctcagctcctgcctctagtctccaccccaaaagttcagtcgtctctgtcttggagggcactgtcggccccctcaggttgaagttcaacactcctcaatgagcag

SEQ ID NO: 5719 - DNA, 198 bp, Homo sapiens
ccagctcttacatagttaggtgaggaaagattagagtactatctttaagatgtaagtctggcattgtggaaagatggttccagtttctatgacctaccttggggaagaggaattcaagtttctgtggcttgccttcagggagaatgaggctgagacaggagggcaggattacatcagagaaaaactttgcttctgagg

SEQ ID NO: 5720 - DNA, 165 bp, Homo sapiens
ctgaagtggttaatcatggtgttacaactagacatttagtcctgcttcaattcttgcagagctgaatcaactcaaggaactaaataaaaagaggaaggcaccgaggtaagggattttttttacctgcccgggcggcgctcgagccctatagtgagtcgtattaga

SEQ ID NO: 5721 - DNA, 252 bp, Homo sapiens
ctgagttttatgaccttgagtaaaagtttaatctccctgggtgttcaagctcttttgccagtaaaatgagacaaatagtacctatctcatagggttgtaagaattacatgagatagttgatgaaaagcacttagaacagggcatagtacaccatatgcctactccattcgtttattgaatgtatctttagaaatgtatctttttcaagggcctgacatgtctcagacattgttttgaaatattgaggtacta

SEQ ID NO: 5722 - DNA, 356 bp, Homo sapiens
ctgagaaacagattaaacatttagagattgaaaagaatgctgaaagtagcaaggctagtagcattaccagagagctccaggggagagagctaaagcttactaaccttcaggaaaatttgagtgaagtcagtcaagtgaaagagactttggaaaaagaacttcagattttgaaagaaaagtttgctgaagcttcagaggaggcagtctctgttcagagaagtatgcaagaaactgtaaataagttacaccaaaaggaggaacagtttaacatgctgtcttctgacttggagaagctgagagaaaacttagcagatatggaggcaaaatttagagagaaagatgagagagaagagcag

SEQ ID NO: 5723 - DNA, 154 bp, Homo sapiens
accacggggtgcctgaggatcctcacttgctcctcaaactgagaaggagagtgaatgccttcagcaatttcttcagtggtcccattgtggtgcactgcagtgctggtgttgggcgcacaggaacctatatcggaattgatgccatgctagaagg

SEQ ID NO: 5724 - DNA, 288 bp, Homo sapiens
  unsure (58): n=A,T,C or G
  unsure (59): n=A,T,C or G
ccattctttataggaataatcagtttaatcaagatgagctagcattgatggagaaatnncaagaagaaagttcatcagcttgctatgaccgtggtcagtttccatcaggtggattatacctttgaccggaatgtgttatccaggctgttaaatgaatgcagagagatgctgcaccaaatcattcagcgccacctcactgccaagtcacatggacgggttaataatgtgtttgatcatttttcagattgtgaatttttggctgccttgtataatccttttgggaatttt

SEQ ID NO: 5725 - DNA, 357 bp, Homo sapiens; identical to SEQ ID NO: 5688

SEQ ID NO: 5726 - DNA, 409 bp, Homo sapiens
ctgtgcccagaggacagccaggcaggccctgggagggagtttagaaagacagtcctggtgaatgggcttcaagtggtcacaaagagggtggctgtgaggtgaccccagacactgcagaacgatgtgcaccctctgcgttttggatgtccttggaatgtgggagcctagaaataaccctgtggatggaattggggcagcggctgctggagatctgtgtgccttgccttccttcagcaggaccgtctaggtgcgcagccacctatggatgcgtcccagccagccccgtcgctctcgtccatcctcagagacaaagaagagggcagggagtttgggcttggttttgaactttcctttcaatgtagcaaagcattcctagttaaccagagccttggaatctactgcctgctgg

SEQ ID NO: 5727 - DNA, 380 bp, Homo sapiens
ccatgatgtaatctgcaatctgctgtaatgctagtaatccagttgggttgtggcctttcttcatctgttcttgaataaggcattccaagtcttcccgaaaggcaggactttgcaggatctgagtaactcgtttcctctgctccatcatgttgaagtcttgtcgtagatcaggagacatgttcctctccctaatgtattctgggtcattttcattgatgcggtcaaaatatctctctttgtgaggcatgctgggaggaggaggagtggtaatcacgccttggctggcatccgagctcatgttttaagtctgtggattactcttgttataaaaaaattgaagtgctgtacatttcttaagctggtttttgtgtggcaattct

SEQ ID NO: 5728 - DNA, 443 bp, Homo sapiens
ctggtacacggcagggtcagggttctggatatcaggtaaaacagtcaattgtgtcccagatccaaaggtcagttgccttgcagaaccagaagactccatgtcacccacgaggcagtagtacacagcagtgtcgctcagggaaacccggggcaggctcagagtgctggactttctgtcggcagggataaacagggaggccacttcgtttgtaacttttgtcttgtatccttgaataataaatcgtggtccttggctgggaaactgttggtaccacgtgatgtaatcatttgtagcaatgttgttgtggctacaggttatgttcacttcttgtccttcatatgagtccatggagatgggctgggtggtctcagcaaggctcaaagtactcagggtcaggaacacgatcactctcgccacttgcctcatattctaggtgcaaacta

SEQ ID NO: 5729 - DNA, 328 bp, Homo sapiens
ctgagttcccttcccgaaggtcagctcggggctcccgacgatcatgcagaagtagatgccactgtcttccggcttcacgcttgtgagattgagaatgaaccggcttgcatcccgaaacacagctatcttctcctgttccacctcttcaccgtggatagtcccttttgcggaatcccagagggccaggaactcgtggtgactgtcactgctcggtgcctggcgctgtctcagccagtagatgcgcatgttactgagggagattttagcctcgcaggacagcatcaccatcttgttggtttgcacctttatgtatgcaggggtctgctgg

SEQ ID NO: 5730 - DNA, 368 bp, Homo sapiens
ccattgagcgccggggcgtagagattgaggaagggggtgtgaaagtgaagctgacccttgtggacacacctggctttggggactcagtggactgctctgactgctggcttccggtggtgaaattcatcgaggagcaatttgagcagtaccttagggatgagagtggcctgaaccggaagaacatccaggactcccgagtccactgctgcctctacttcatctcacccttcggccgggggctccggcccctagatgtggccttcctccgggcagtacacgagaaagtcaacatcatcccagtcattggcaaagcggatgctctgatgccccaggaaacccaggccctcaagcagaagatccgggatcag

SEQ ID NO: 5731 - DNA, 282 bp, Homo sapiens
  unsure (15): n=A,T,C or G
  unsure (17): n=A,T,C or G
  unsure (18): n=A,T,C or G
ctgtcagaactcatncnnatcccaaggttggggaatactcaaacctagaagtaaatgcatcttggacaaaagagagatggaaccaagagtttactaagcaccaggttctcattatgacttgctatgtcgccttgaatgttttgaaaaatggttacttatcactgtcagacattaaccttttggtgtttgatgagtgtcatcttgcaatcctagaccacccctatcgagaaattatgaagctctgtgaaaattgtccatcatgtcctcgcattttgggactaa

SEQ ID NO: 5732 - DNA, 229 bp, Homo sapiens
ctggctaccgactccaccttctccctggaccagcccggtggcacccgggatctgaccctgatccgtgcccgcctccaggagaagttgtcacctccctacagctccccacaggagtttgcccaggatgtgggccgcatgttcaagcaattcaacaagttaactgaggacaaggcagacgtgcagtccatcatcggcctgcagcgcttcttcgagacgcgcatgaacgagg

SEQ ID NO: 5733 - DNA, 358 bp, Homo sapiens
  unsure (14): n=A,T,C or G
  unsure (15): n=A,T,C or G
ctggaggctcccanncatactctttggtgagaaatgattaattttatattttcattttgatgagaatcttttcttgtttttaccagttataaaaacaaagctttttctttgttgtgatactgtgcactaagacttagtttcttgagctgatgctaaataaaatgagatcaataggaatattccaggaggtcgtgagaagtttttagaaaggatggcatctacatatatatggagctctgaaaactgttggagagtatgacctgggactgaaactgtggagcacatagccagtgtcacaggctccgagagcagagagagtttgctctgggacctggaatgagtgatggagaaatgtttt

SEQ ID NO: 5734 - DNA, 152 bp, Homo sapiens
  unsure (129): n=A,T,C or G
  unsure (130): n=A,T,C or G
  unsure (148): n=A,T,C or G
ctgcagcgcgtgggcgctggagtacatttatctctggaacttgtcattggctttgtttggctctggaaacaaagacttgcctgggcctttccgatgtaaacttccagcccttggtgggtgggggagttnnatgaaggtgccgcgtccnggtg

SEQ ID NO: 5735 - DNA, 496 bp, Homo sapiens
cctgtgctgggtgctgaggctacaggggcacagcaaggctcttcccttgagaagccactgatgtcactgggtcactcgaggtaagcatgtttgaaagggctgaatcaaagaacaaggcaggaagtccacaaggccaacggaaggtcccagagaacaagcagagctcagaggctccgaaggcatcgaggaggagggtcagtattggcaagcaggagcagcccctcagctctggcctgccctcaggccacaccctggcccatgggcttcttgcacacccactgatagggggtgtcacaggtcatgtcattccacttctgctgaatttggacacagtcttcagtctgcccattcttgtgccgccagttgtcagactgattcttttcccaaaacccgaagacaacagggctttatactgttagatgaaggcagcatcccttcctggtgctgtggctcctagggagctgacatgggatgagtctagggagctgacttgaga

SEQ ID NO: 5736 - DNA, 117 bp, Homo sapiens
cctttattctattacacagagtagggctggggccagggcaggtcattctcaggctgcgtcagaaggtgcagagcgttcgggggacacaggccgaaccccaaagtgataataagttac

SEQ ID NO: 5737 - DNA, 328 bp, Homo sapiens
ccaggcacagcaacgtgaatctcaccatcttcaccgcccgcctctgctacttctgggatacagattaccaggaggggctctgcagcctgagtcaggaaggggcctccgtgaagatcatgggctacaaagattttgtatcttgttggaaaaactttgtgtacagtgatgatgagccattcaagccttggaagggactacaaaccaactttcgacttctgaaaagaaggctacgggagattctccagtgaggggtctccctgggcctcatggtctgtctcttctagcctcctgctcatgctgcacgggcctcccctccatcctgcaccag

SEQ ID NO: 5738 - DNA, 432 bp, Homo sapiens
ggctgtgccgttggtcctgtgcggtcacttagccaagatgcctgaggaaacccagacccaagaccaaccgatggaggaggaggaggttgagacgttcgcctttcaggcagaaattgcccagttgatgtcattgatcatcaatactttctactcgaacaaagagatctttctgagagagctcatttcaaattcatcagatgcattggacaaaatccggtatgaaagcttgacagatcccagtaaattagactctgggaaagagctgcatattaaccttataccgaacaaacaagatcgaactctcactattgtggatactggaattggaatgaccaaggctgacttgatcaataaccttggtactatcgccaagtctgggaccaaagcgttcatggaagctttgcaggccggtgcagatatctctatgattgg

SEQ ID NO: 5739 - DNA, 359 bp, Homo sapiens
ctgtgtcccctctgagggtggcatggtgaagcctgactcccagattggagagtttgccccatagatctcctcctccagcatggacaggaatctgccatccccagactagtactagcaagttgcttctgggccatgggcaagtctgccaggtagacgcccagatcccaaaaggcccatggagggagaggagggaccaatccaggaagccttcctggaaaaaaggggacaacagggaggatgtgaacttggggccaaatcctggtaggccagaaggagccttacttggggaagtgagtgaggatgagggtcctcttctcgggcaccaatttgtccttctccactcggaacttttccagcag

SEQ ID NO: 5740 - DNA, 263 bp, Homo sapiens
aaaatgcatgtattataatcatataatcataactgttgttaattcttgattatatacctagggacaatgtgtaatgtaagattactaattggttcttcccaatctcctttcagattttattaggaaaaaaaaataaacctcctgatcggagacaatgtattaatcagaagtgtaaactgccagttctatatagcatgaaatgaaaagacagctaatttggtccaacaaacatgactgggtctagggcacccaggctgattcag

SEQ ID NO: 5741 - DNA, 288 bp, Homo sapiens
  unsure (220): n=A,T,C or G
  unsure (265): n=A,T,C or G
  unsure (281): n=A,T,C or G
ctgccaaatggtgtcacttaccacactggaacatatcaagaccggttaacaaagctacaggataatcttcgccaactttcagttctcttcaggaagctgagattggtatatgacaaatgcaatgaaaactgtggtgggatggatcccattccagtcgagcaacttattccatatgtggaagaagatggctcaaagaatgatgatcgggctggcccacctngttttgctagtgaagagaggcgagaaattgctgaagtaaataaanaactcaaacagaagantcaacag

SEQ ID NO: 5742 - DNA, 194 bp, Homo sapiens
  unsure (157): n=A,T,C or G
cctctgtgccgcaccattgaactgcaccatgtgctacaggggccagaagatgaacagactgaccttgatgagctgtgcacaaagtggcataaaaaacatgtggttacacagtgtgaataaagtgctgcggagcaagaggaggccgttgattcacttnacgctttcagcgaatgacaaaatcatctttgtgaagg

SEQ ID NO: 5743 - DNA, 198 bp, Homo sapiens
ctgggctaggtccaggtgctgggagcccacggtatcgtgaactcgtgatgtcagggttctggatgtccactgtcgccagccccagggagagcggacccactggagggcctccttggtctccacctggatgcaggggcaggggtgggagccctcctcttctctcttcattggctggtgttggtggtgggggtagctggc

SEQ ID NO: 5744 - DNA, 353 bp, Homo sapiens
  unsure (307): n=A,T,C or G
  unsure (326): n=A,T,C or G
ccacatccacactgagggcctgtgtgtgaccatgctcaccttgcctcaggtctgggaagatccgaggtatctcctggagaagccatctatgatgtcattggggaaatgccgctagcaggactgtacgaggaaatcatggaggccgaggctgtgctccaagatgaggaggacggaagtgtggtgaaggtggacacagaagccgcagtttcaggggaggtgtctaacctcctggagggacagtctatacgtgcggagggaggacacagcagacctgtttctcagggatatgacgaggctgcgtttcctntggaggagatgacgttgtnaagcaacctgaggatgagatacaccag

SEQ ID NO: 5745 - DNA, 286 bp, Homo sapiens
ctgagggtcctacacctaccattcagccatctgggcccaggtggggccctgagcctggcccaggccctggatggatccccccatttggaagagatcagcttggcggaaaacaacctggctggaggggtcctgcgtttctgtatggagctcccgctgctcagacagatagacctggtttcctgtaagattgacaaccagactgccaagctcctcacctccagcttcacgagctgccctgccctggaagtaatcttgctgtcctggaatctcctcggggatgaggcag

SEQ ID NO: 5746 - DNA, 317 bp, Homo sapiens
ctggtccagaccacacagagctccaaagggcaggagccagaaacattgggtgaatggacagtcacagttgtttatggatgcattttctaaaacaacctctttaccttctttttcttggtccaagtacttctttatgttttccgctctgtccatgtatttggaaattttttctctgagattacatctcttagtattatctttggtacctttcagaacctgcaggagcagatcaatcccctcttggtaacacaccagagcctgcggataccgcgactccgaatctagttctactgcccgctttagcacagtggctgcag

SEQ ID NO: 5747 - DNA, 322 bp, Homo sapiens
ccaaacccctgcacgtggctgccgcctgggttttccaaggagagcacgccggtgtcgcttgctcctgggtttcttttattttttcctgttgttctatttctgggttaaagacagaacattttaagataattttccaggtcaaatacactcatttgatgtttttctttgtgaaggttttagctcagtactacacagtgacagatgagcatcacagatccgaagaggaactcctggtcatctttaacaagaaaatcagcaagaaccctacctttaagttattaaaggacaaagtcaagcttgtgaaatgaacatttgtgtattt

SEQ ID NO: 5748 - DNA, 240 bp, Homo sapiens
aaattaaaattccatttaactaaagatggttaaccccaagaaattgtacagtagttgatttctgctatataatgccagtcctatgccatacaataagaactgcaacattagctgtcacttcctccattgctcttctggaccctaagggatgagggaggggactcagacacaaaacacaacccaaataaactgtgcagtgattcctaatagttataaacccaatctaagttgtccaaacag

SEQ ID NO: 5749 - DNA, 292 bp, Homo sapiens
aaaagaaatgaagtctaaaacctcacttttccttctagccttacaaaaattgcctgacctctcaagacttttaatcacttcagggattcttgtgacattcaactgagatatatgtgaacacaccctatacacagcaaagcactaagtagtagtagcagaagacagtaccaccgacttttcttgttcccacataagcatttccctttagggctctaagatgaggtcatcatcgtttttaatcctgaagaagggctactgagtgagtgcagattattcggtaaacactcttagg

SEQ ID NO: 5750 - DNA, 401 bp, Homo sapiens
  unsure (73): n=A,T,C or G
  unsure (292): n=A,T,C or G
  unsure (313): n=A,T,C or G
  unsure (322): n=A,T,C or G
  unsure (327): n=A,T,C or G
  unsure (329): n=A,T,C or G
  unsure (342): n=A,T,C or G
  unsure (371): n=A,T,C or G
  unsure (379): n=A,T,C or G
  unsure (380): n=A,T,C or G
  unsure (394): n=A,T,C or G
cgtggggttttggctcaggaggacctcgtgggactgctggagcccatcaacacccgcatcactgatccccagnacttcctggacacgccccagcaggcggcagccatcttacagaaggtaggaagacccaacctccaattacaaatggacatattccactggcagatcatggatgggaacctgacaggaaacatccgggagttcctgcccattgttgggcatgtgcaggtggcacaggtcccaggccgaggggagcccagcagccccggagagctgaatttcccctatctgnttcaactgctggaagatgaangctacaaangcttngngggctgagacacngtagagggcttgagttggctacgttcatnctgggatnngcggggccacccanaggctgg

SEQ ID NO: 5751 - DNA, 408 bp, Homo sapiens
  unsure (76): n=A,T,C or G
  unsure (338): n=A,T,C or G
  unsure (397): n=A,T,C or G
ccacagtaaaagagttaaaatttcataagtagaagtttagttatttaggcttgtaatttatggctctgtcacctangaattttaagactttgagtttttaccaacccaacttcacagttccaaaatcccaggatttataggaaaggcttcaaaactaactgtcaattctgatttgctaagcatttaagaatgtaaatattaaatcagcattcattttcatttaacatttaacatggaagtaaaaattctcactttttgcctaacaacaaaactagaaaactaagacatctttcaataagttcttaacactcactggacaatttctactgcaagtcatntcaactaatgggacaaagagatgtgggaaccttcccgtagtccaggataggaaccgctngactccttcac

SEQ ID NO: 5752 - DNA, 380 bp, Homo sapiens
  unsure (287): n=A,T,C or G
  unsure (300): n=A,T,C or G
  unsure (316): n=A,T,C or G
  unsure (339): n=A,T,C or G
ctgatatcaaacaccttgcacaccagctcctctccgctgtgcagatgcacggcacgaaaaacgtggtctccctccagaggttccaacaataagtatttcccgatacaagaaacgcaatgcgacaagttcggagtctcgggcgggctcggggagccgaggttcgggctgaaactctggctgggctccgcggaccttatagacgacaactcttcgaaatcctgggttttgttccgcgatctcccatatctcgctattgtgatgggggtagacctgtgtatgttcatgantgtgaggatcgcncacgacaaacaaaaanaaacccgctggagagatgagtcnctggcgagtgcggctgcaggcgcctcggtgccactgatttt

SEQ ID NO: 5753 - DNA, 156 bp, Homo sapiens
  unsure (87): n=A,T,C or G
  unsure (106): n=A,T,C or G
  unsure (116): n=A,T,C or G
  unsure (140): n=A,T,C or G
  unsure (144): n=A,T,C or G
  unsure (148): n=A,T,C or G
tattttattcttaaaacttaagcatggtaaaatgttaagctgttttcatccactgatattattctactataaaaagcccttcttgancagatttgatgataaaaangagaacattnctaaggtataattagagaagctgntgcntganaaatcatg

SEQ ID NO: 5754 - DNA, 339 bp, Homo sapiens
  unsure (300): n=A,T,C or G
ctgcgatatctactccagattccttgtaagtcaaactcctgggctgctggaggaaagctatggcacgaaagccgatgtctttcctataaattgctccctcaaactttatagcagctagtcctttcttggcttcctcaagggctgatatgaaattttcccggatggctgtgactgcaagaactctacccccatgagttactactttgccatttttgagggcagtgcctgcatggaacacctccagtcctagagcttgagcctcaggaaaccctagaagagagcatatttgacacatgattncaaatagcaacagtatttcacaccgtgaagtgatttacg

SEQ ID NO: 5755 - DNA, 186 bp, Homo sapiens
ccttcagcccctctcccggagatggaatcgcggggcagggaggggcagggtgttctagaggtgagaagagggcctggtggagattccctgtcttctgagcccgagcccctcattaccagtgaaggacatgcttgaggggttcgggaagctcctcatctgaggcaactggtcctgggggtgctcagg

SEQ ID NO: 5756 - DNA, 554 bp, Homo sapiens
  unsure (505): n=A,T,C or G
  unsure (524): n=A,T,C or G
  unsure (532): n=A,T,C or G
ccggaatgaggggattgatttgacgcacaatcctgagttcaccacctgtgagttctacatggcctatgcagactatcacgatctcatggaaatcacggagaagatggtttcagggatggtgaagcatattacaggcagttacaaggtcacctaccacccagatggcccagagggccaagcctgcgatgttgacttcaccccacccttccggcgaatcaacatggtagaagagcttgagaaagccctggggatgaagctgccagaaacgaacctctttgaaactgaagaaactcgcaaaattcttgatgatatctgtgtggcaaaagctgttgaatgccctccacctcggaccacagccaggctccttgacaagcttgttggggagttcctggaagtgacttgcatcaatcctacattcatctgtgatcacccacagataatgagccctttggctaaatggcaccgctctaaagagggtctgactgagcgctttgagctgtttgtnatgaagaaagagatatgcnaatgcgtntactgagctgaatgatcccatg

SEQ ID NO: 5757 - DNA, 230 bp, Homo sapiens
aaaaagggagattagaaatgtcagtcaagaagatcaacttttagtctagcattctgacatcaagtgaattcagtgtctgtggtcagggtgtgcaaacttatatgtttaggtggaaaatgtttgaatatcaccctgtggaagggctatagtctggaggtatctgaaaaggtctgacaagaacagcaacaatgtctttgcactaaaatctgaaaattcccaatgtaactttt

SEQ ID NO: 5758 - DNA, 217 bp, Homo sapiens
  unsure (33): n=A,T,C or G
  unsure (44): n=A,T,C or G
  unsure (60): n=A,T,C or G
  unsure (65): n=A,T,C or G
  unsure (75): n=A,T,C or G
  unsure (77): n=A,T,C or G
  unsure (91): n=A,T,C or G
  unsure (178): n=A,T,C or G
  unsure (200): n=A,T,C or G
  unsure (202): n=A,T,C or G
cttttttttttttttttttttttttttttttanacaggaagtanaatttattggtgagtnttaanaggggggcancncattggaagccctnatgagtgcagggcccgccacttgtccagagggccacgactggggatgtacttgaccccacagccatctgggatgagccgcttttcanccaccatgtcttcaaattcatnancattgagcttggtga

SEQ ID NO: 5759 - DNA, 357 bp, Homo sapiens; identical to SEQ ID NO: 3776

SEQ ID NO: 5760 - DNA, 405 bp, Homo sapiens
  unsure (260): n=A,T,C or G
  unsure (381): n=A,T,C or G
ctgtagctcatatttcatgttggggtcatgccgaacacccatgaagttgtagttccacgaggactgggcagggaccatgaagaagccaaggaaacggtccgacagcagcatctgcaccctctcatagtgtgaaggcaggtagcccttggggttgttgcccttgtctgtgttctggcggccccattcgtagccactgggggtcagcttgtaggccgtcagtgtacaggagcctggcgtgaagctgcatgtgatgataatgntcttctcgccatcccaagatgggttgtcagccatgatcttggcatgggtggtgacatcctggggtgataactgcggggactcattgggctgagtgtggatccaacctaagggttccatctncttgaggtactcatgctggggcag

SEQ ID NO: 5761 - DNA, 363 bp, Homo sapiens
  unsure (14): n=A,T,C or G
  unsure (15): n=A,T,C or G
  unsure (27): n=A,T,C or G
  unsure (37): n=A,T,C or G
  unsure (88): n=A,T,C or G
  unsure (158): n=A,T,C or G
  unsure (159): n=A,T,C or G
  unsure (160): n=A,T,C or G
  unsure (177): n=A,T,C or G
  unsure (227): n=A,T,C or G
  unsure (230): n=A,T,C or G
  unsure (241): n=A,T,C or G
  unsure (245): n=A,T,C or G
  unsure (279): n=A,T,C or G
  unsure (288): n=A,T,C or G
  unsure (307): n=A,T,C or G
aaacaaatccaacnngaaattcttgangcaccttctnatataaaacacaagatgaatgcaattatcaatccatctgagaaaagttttnaatctaaatgaacatcattttttccatttaagtatattttacagaactttaataaggcaagacaaatttnnngaaaaaagatgtagatncaaaaatgatgtaaactaataatttatattaaaaaaccccaaagggatancangtggagatggnacanctcaaacaatgcctttttttaacctaaaacaganttgtgcacnagctgaagatgacaaacancttctagactctgcacagttttggttttttttttaacatctttatattacatgttt

SEQ ID NO: 5762 - DNA, 396 bp, Homo sapiens
  unsure (354): n=A,T,C or G
ctgagaaaattgatggagtatttgctgcctgtcagagtggctcttttgacaaactagaagctgtggtcaaggtaaagtcagcttactaactttggggaaaggaatattaagtcatcataccaaaagttttttttattataggatttaatagatgagggtcatgcagcaactcagctcgtcaatcaactccatgatgtggttgtagaaaataacttatctgataaacagaagtctattatcacagaaaaacttgccgtaagtaggtactttgcacatgtcaatggaacatttaactacctgaaggatgctaatttcttaaatttttctcgtaggaagttgacaaatgcctagcanatggtgctgatgaacatttgcaactcatcagcctttgtgcaa

SEQ ID NO: 5763 - DNA, 288 bp, Homo sapiens; identical to SEQ ID NO: 414

SEQ ID NO: 5764 - DNA, 442 bp, Homo sapiens
cctacagtgagattgggatgaaaggcgagcgccggaggggcaaggggcacgatggcctttaccagggtctcagtacagccaccaaggacacctacgacgcccttcacatgcaggccctgccccctcgctaacagccaggggatttcaccactcaaaggccagacctgcagacgcccagattatgagacacaggatgaagcatttacaacccggttcacccttctcagccactgaagtattcccctttatgtacaggatgctttggttatatttagctccaaaccttcacacacagactgttgtccctgcactctttaagggagtgtactcccagggcttacggccctggccttgggccctctggtttgccggtggtgcaggtagacctgtctcctggcggttcctcgttctccctgggaggcgggcgcactgcctctcacag

SEQ ID NO: 5765 - DNA, 382 bp, Homo sapiens
cctgcaaaggctgcgttgtagaggaacacaatgtagaaattgcccagccagttgaagcgtccaaagccacccagcaggtcaaagcgagtgagccccagggttcgagagaagacaggaagtgctgagcttaggaccaggagacagacacagttcccaattatctgcgtcatggcagtgtcgtgccatctgggccgcaggctccggaagagtggagagctatagaagcccacaactgaggacaccattaggtaaaagatgagtacaacctgaatgacggcaccaaaggagcccagcttggagaaggagacctggcctaaggaggtaccctgcatgcctcggggcatggcagcctcatcgatgagcagctccaggatgtggatgg

SEQ ID NO: 5766 - DNA, 259 bp, Homo sapiens
ctgtacaaacagcgagcttcccgccttgtccaaagacgacaagatgatattaaagatgaatcttcggagttttcaagccattcaagtcagtccatcttgaagacaaagctctgatggcaccaaatcttgactcctttggacgcgatcgggcactgtatcaagagcatgcaaaacgtcgcattgcagagcgggaggccaggaggactcgtcgtagacaagccagagaacaaaccggtaagatggcagatcaccttgaagg

SEQ ID NO: 5767 - DNA, 333 bp, Homo sapiens
ctgtggagctaggccctgagaacacgaccaccctccctcttccctcagcctcaagccgctgaagccactgctgcttcgccgcctcgtaagcccaatggtcagagctggaggctagacccttcagtgcttgggttgagggccagggtgttagattggttcttggagaaggaacgagggcccaggattcttcagcttcttagtttttgacaaattgagctgaggccccatagtcctcgggagggacagggttgagtgccataagtcggcaaaccagggtaaaggtgacaggcagctcagccaagctgcagggggtggcatatacagaggacctgg

SEQ ID NO: 5768 - DNA, 261 bp, Homo sapiens
ccagtggaaagtctcttggagagactttgaggtttgtgatgacaaatcatgctatcgttaaagttaaatacatatatatacacacctagaatataagcagaatggaaaagttggcagggatgaattcaagaacattagagtgaatttttttcattacagaattgttagttcctttaggaacttagtctcgtagatgtatatatttaattagcataacttggacagcacaagattaatgctttaacttgtttgcaggagttt

SEQ ID NO: 5769 - DNA, 151 bp, Homo sapiens
  unsure (43): n=A,T,C or G
accacggggtgcctgaggatcctcacttgctcctcaaactganaaggagagtgaatgccttcagcaatttcttcagtggtcccattgtggtgcactgcagtgctggtgttgggcgcacaggaacctatatcggaattgatgccatgctaga

SEQ ID NO: 5770 - DNA, 303 bp, Homo sapiens
  unsure (255): n=A,T,C or G
aaatgattatggaataacataatatttagagcagggcagataaatcagttgaacctgcttattttttatttattgtactctttttcctgttgctgttcctttctgcaggagggaaaacccctgatcctaaaatgaatgctaggacttacatggatgtaatgcgagaacaacacttgactaaagaagaacgagaaattaggcaacagctagcagaaaaagctaaagctggagaactaaaagtcgtcaatggagcancagcgtcccagcctccatcaaaacgaaaacggcgttgggatcaaacag

SEQ ID NO: 5771 - DNA, 357 bp, Homo sapiens
  unsure (348): n=A,T,C or G
ctgagttcccttcccgaaggtcagctcggggctcccgacgatcatgcagaagtagatgccactgtcttccggcttcacgcttgtgagattgagaatgaaccggcttgcatcccgaaacacagctatcttctcctgttccacctcttcaccgtggatagtcccttttgcggaatcccagagggccaggaactcgtggtgactgtcactgctcggtgcctggcgctgtctcagccagtagatgcgcatgttactgagggagattttagcctcgcaggacagcatcaccatcttgttggtttgcacctttatgtatgcaggggtctgctggaggactgagttgccatgganaacagtcag

SEQ ID NO: 5772 - DNA, 207 bp, Homo sapiens
ccaggctgtagtaacaggctcgcatgcgctgctccacggtcaggaagtcggggcgatcctcccacttgtagatccagcagtcactcatgagtgcgtacagttcgggtggacactctggtgggcactccatccgcttgccctgctcgatgaaggccatgacctccggccctttcatcttcttgtagggcttctggccgtaggacaagg

SEQ ID NO: 5773 - DNA, 275 bp, Homo sapiens
  unsure (223): n=A,T,C or G
  unsure (227): n=A,T,C or G
  unsure (239): n=A,T,C or G
ctggtggggtcagtggaagttctgtcactggatctggtttcagtgtctcagaccttgccccaccacggaaagcccttttcacctaccccaaaggagctggagagatgttagaagatggctctgagagattcctctgcgaatctgtttttagctatcaagtggcatccacgcttaaacaggtgaaacatgatcagcaagttgctcggatggaaaaactagctgntttngtagaagagctngagactgacgagtggcggtttaagcccatcgagcag

SEQ ID NO: 5774 - DNA, 280 bp, Homo sapiens
ccttcatgcacttttgacagctcagtacctgtgagaacagaagtgatgcagggactttttaacccacaatgcatgaggtatatggaaatgtctgtgaaagaaccaccagcagctagagggaccaggcaaagttttctcacagcaactgctgatgaaggatttcccacaccatcttcttccggaagagaggcatctggtgctgagtaaatgtgataggtttgtccctagaaatataatctgcatatttacaagtaaacattccacaatcactcccattcag

SEQ ID NO: 5775 - DNA, 302 bp, Homo sapiens
  unsure (240): n=A,T,C or G
ctgcccggccccagacccatctcttggattgagggtgtgtgggctggaaccagtgggtcactgtggcagcttcatctgagccgaaggtgtgggtcctctgtggctgtgcgattgacctcgatgggagggagcgttcggcccattttccttgttttcagtgctgcggtatcagtcagtgatctgaggaaatcctgtaggggaaggcaggctgcagtgaaaacaggagctggtgaaaccganccctctgcatctgcgaatgtgccctaggtgctgctgctggggacatggatgccgagcggagg

SEQ ID NO: 5776 - DNA, 129 bp, Homo sapiens
  unsure (60): n=A,T,C or G
  unsure (104): n=A,T,C or G
  unsure (114): n=A,T,C or G
  unsure (119): n=A,T,C or G
aaagtgctattcattgatcttaaatgttccatgaactgttaaatttcttaagttacatanttactacaccacatttatgtgtatgttatgtcttaatagtcaangataggtatntacanttgataatat

SEQ ID NO: 5777 - DNA, 466 bp, Homo sapiens
aaataacaggctagatctgttttcccttaccactcattttgcaaaactcaactggcctaaacatttcgctcaatcttgagttctgcaggttggtccctgagagctaggttggccttgggaatttctgctcaattttaagttctcaagaatctgagggcagccgatttagactgaattagagtcatcctataggtcagaaagaaagaatgctagacaggtcaagagggccagaggttggttctgataatgccatatgacctcaggcacatctttttgagttttagtttccccatctctaaaaacggatgattggacaacagcaagcttaacagactttccaccttgaaaatacggcacttctctgacgcttagaccttaagtcctgaagcgttgttttctcagcaaaaacagtgcaaagtccttacaggaatctaaggtacaagccctgggcaaccatgaaaacttt

SEQ ID NO: 5778 - DNA, 255 bp, Homo sapiens
  unsure (192): n=A,T,C or G
  unsure (195): n=A,T,C or G
  unsure (209): n=A,T,C or G
ccatggatctcaaggaccccaaccgcccccggttcaccctgcaggagctgcgggacgtgctgcacgagaggaacgagctcaagtccaaggtgttcttgctgcaggaggagctggcttactataagagtgaagaaatggaagaggaaaaccgaataccccaacccccacccatcgcccacccgaggacgtccnccnagccggagtcgggnatcaagcgactgtttagcttcttctcccgagataagaagcgcctgg

SEQ ID NO: 5779 - DNA, 445 bp, Homo sapiens
ccacagttgtggggcagccaaacactccttcagggaaatgggaagagaactggtggctgctagggggtggggcaagtttcctggcagggaggtgtgtcccagggtcctgcacccatggcagagcccctgctctaatatccccttatcattcttatccctgctggaccccaaactccagagatgcccattaccttgttcaccccatgcccttagcctcagaacaggcactgtgaaggtggagccacagagcagcactggtgcggcggggaccgaggcaggaggagggacagcaggcggccctgggggagcctgtgtgttgttgccagcctactctctatctggccccagccgggaagccactcagaaatccctaagaacaatccaaagggagcctagccagatcccgggtgtcacaggacacagtctgacccagggttacgccagg

SEQ ID NO: 5780 - DNA, 338 bp, Homo sapiens
cctccaagttccggaccacggtcacctttttattagacgctctttgtgctagggtgatgtcaattggacagattctccctttcttcacaatgggctcttgtccgggaagggtcacttgataggcaggctgtaatttttccaaacacctggtcagaagactgtcccatggaagcttcatgactgtatgctgttcatttttctctaagatgcagtcacataggatgggatccaatctcacaagatttttgttgtctgcatcaaccaggtcatttttcttggcgtagttaatgacgatcgttcggacctcactgccctccagaaagctccccttcttgtgg

SEQ ID NO: 5781 - DNA, 508 bp, Homo sapiens
ctgcttgtaaccactgtgtttatgtcaaagcattcattttttttaggatatctggaaaaatgccatataagagaaaactctataaaacatctataattttcgaacccaagtacactcttgcattctatgctttaagttaaatgcaaactcctttttccttcttcctgctgcaagtactatctcatcctgatgctcaagagtgtcagggcctgggtttccaaacagagactaccctaaaattatttggggagtagtactttacacaattgcctctcccccacaaatcataattgtttcagtaaaatggttacttggtttttccaagaaaaaactcgtttttactcacttttggcctgtttgtttatttagaaactaatctggattcactccctctggttgatacccactcaaaaaggacacttctgattaagacggttgaaactagagatggacaggttggtatcttttaaggaaaaaatagggtaatctcagacaggagttgatatat

SEQ ID NO: 5782 - DNA, 188 bp, Homo sapiens
  unsure (37): n=A,T,C or G
  unsure (69): n=A,T,C or G
  unsure (81): n=A,T,C or G
  unsure (126): n=A,T,C or G
  unsure (135): n=A,T,C or G
  unsure (165): n=A,T,C or G
  unsure (174): n=A,T,C or G
ccacagttgtttgatgcattaaaagaaaataaaaaanagaaaaaagagaaaagaaaaaaaaaaagaaanaagttgtaggcnaatcatttgttcaaagctgttggcctctgcaaaggaaataccagntctgggcantcagtgttaccgttcaccagttgccattgngggtttcanagagcctttttcta

SEQ ID NO: 5783 - DNA, 372 bp, Homo sapiens
ctgttccttctgtgttttctccagtgtcctcacatcaaatccaggagaattaggagagaggagagcactgacttcagaaagatagcagatgaaaatgtgattcatttttattatgtgaggatgtagagatgtattctgtaatttgacttgatatcaaatattgtcacagagggtgtgtttcgttatagggataattatgtgctgaaagggaaactcttcaaggctattgctgagttctatgttttctccttcccatagcccttattgccttctaacataccatgtaatctagttatttattgttttttgtttgttaactgtttccccctgctgggatataagtctccagagggcaggaatctttgtcatttt

SEQ ID NO: 5784 - DNA, 330 bp, Homo sapiens
ccagacacacgtttgttgagtacctactatgtgtcagtcacgttccgaggtcactgtgtgtatgagccaccgaaccctcctgacatgccttatgaagtggctatggtgattaacctcactttacagatgagagagggaggggtctgtctatggggatgtgaggcagtggtagaggcgggatgtgaacccacgatgggccccagagctcacattcctaaaatggtctgctgcgggtgctcctgtttctcatgggtgggcccagacctgaacatgtgtatgcacagagaagacacatagttacatgtgcacctagaggctcgcttttggagg

SEQ ID NO: 5785 - DNA, 339 bp, Homo sapiens
ctggaagaagaaaagaaagcaaacaatgagaaacagaaagctgaaagggagctagagggtcaaatccagagattgaacacagagaaaaagaaactaaatacggacctgtatcacatgaaacattctctcagatactttgaagaagagtccaaggatctggccggccgcctgcaacgttcatcgcagcgtataggagagttagagtggtctctctgtgctgtcgccgccacacagaagaagaagccggatgggttctcgagccgcagtaaagcacttctcaagcggcagttagagcagtccatacgggagcagatactgctgaaaggacacgtgacacag

SEQ ID NO: 5786 - DNA, 429 bp, Homo sapiens
  unsure (342): n=A,T,C or G
cctggttgctgttcatcctaaatctgttaatgtggagcaaacagactttcactacaactggcttatctatcacctaaagatgagaacaagcagtatatacttgtatgactgcacagaggtttccccatactgtctcttgttttttggaggtgacatttccatccagaaggataacgatcaggaaactattgctgtagatgagtggattgtatttcagtctccagcaagaattgcccatcttgttaaggaattaagaaaggaactagatattcttctgcaagagaagattgaaagtcctcatcctgtagactggaatgacactaaatccagagactgtgcagnactgtcagctattatagacttgatcaaaacacaggaaaaggcaactcccaggaactttccgccacgattccaggatggatattacag

SEQ ID NO: 5787 - DNA, 141 bp, Homo sapiens
  unsure (4): n=A,T,C or G
  unsure (13): n=A,T,C or G
  unsure (99): n=A,T,C or G
  unsure (105): n=A,T,C or G
ggtncacaattgngccctcagctccatggcccaggacatccttgggacagaaggaaattttcccaactatcaccacgctggtttcctcatctgggacanaatagngaaaaagagattgtttcaaacagatatcacctaaag

SEQ ID NO: 5788 - DNA, 486 bp, Homo sapiens
  unsure (315): n=A,T,C or G
  unsure (446): n=A,T,C or G
  unsure (463): n=A,T,C or G
ctgcatttttgaacaccatggaaccccaagcctttcattttgcctgggccacccgttacctccggtccagtgaactctccaggctggagaaggatctccctttggggggccgcagtccccagatcccctccgttcccgtgcctgggtcctctgcatctcctagttcccaggttgggcgctgccactgggtgctaccgctgggtacatgccagtagtaagtacctgcagcatcgtggatcttcctccagccaggaggcaggccagcctccacctccagactgtggtccccccacaagtcatctacaggaacaccgnattagagaggagggagcatatgatttgtgagttcagaataacatgctgtcataatcccctctccatccccaaaatgggtcagttcttaggctgaagatccaggctcctcaatcttgaagacatcacatgtnaagaccgggttcattcnccccctggtccctacacagagag

SEQ ID NO: 5789 - DNA, 323 bp, Homo sapiens
  unsure (53): n=A,T,C or G
  unsure (64): n=A,T,C or G
  unsure (117): n=A,T,C or G
  unsure (125): n=A,T,C or G
  unsure (139): n=A,T,C or G
  unsure (205): n=A,T,C or G
  unsure (270): n=A,T,C or G
  unsure (271): n=A,T,C or G
  unsure (274): n=A,T,C or G
  unsure (311): n=A,T,C or G
  unsure (314): n=A,T,C or G
ctggagcgagaggaggaagtcacaggccctgtcattgcgcctctcttcccgcngaaacgtgaanagggctggtgggtggtgattggagatgccaagtccaatagcctcatctccatnaagaggcntgaccttgcagcanaaggccaaggtgaagttggactttgtggccccagccgctggtgcccacaactacactctgtacttnatgagtgacgcttacatgggatgtgaccaggagtacaaattcagcgtggatgtgaaagaagctgnnacngacagtgattcagattgagtcctgaggcatttacttnttnggtaaagga

SEQ ID NO: 5790 - DNA, 146 bp, Homo sapiens
  unsure (18): n=A,T,C or G
  unsure (45): n=A,T,C or G
  unsure (76): n=A,T,C or G
  unsure (112): n=A,T,C or G
  unsure (124): n=A,T,C or G
  unsure (135): n=A,T,C or G
  unsure (145): n=A,T,C or G
tctaatcttggggcctcngacaccccaaatctatatattgaccantggaagttgatgaatttgttatcaaaattcnaagcccccatgggaaaccccctttctttcttgtggnagaatttccagntcctttacagntatttgaaant

SEQ ID NO: 5791 - DNA, 255 bp, Homo sapiens
  unsure (143): n=A,T,C or G
  unsure (156): n=A,T,C or G
  unsure (226): n=A,T,C or G
aaacattagtgttcatagcttccaagagacatgctgactttcatttcttgaggtactctgcacatacgcaccacatctctatctggcctttgcatggagtgaccatagctccttctctcttacattgaatgtagagaatgtanccattggtagcangcttgtgttgtcacgcttcttcttttgagcaactttcttacactgaagaaaggcagaatgagtgcttcanaatgtgatttcctactaacctgttccttg

SEQ ID NO: 5792 - DNA, 268 bp, Homo sapiens
ctgttcctgagagatgcaatatagtagtcatcgacatcatccttatcaacagcatcatcactcagacagtggtgaaagtctttcttcacaaggaaaaacaaagataaagaaatacatgagcattaatcagaaattttcaaagcttggattctaatgatatgcattatcattagacattcaaatgctatacatcttctgatgaagcctccttgacagcagtctacacttatttcacattagaatgcctagagaaatcctgactgcccag

SEQ ID NO: 5793 - DNA, 482 bp, Homo sapiens
  unsure (441): n=A,T,C or G
ctgcattgaggtgaccccaggggacaggagttggcaccaaatggtagtgagagccctatcctcccaggagtccaagccagagcaccagggcttggcagagcctgagaacgaccagctcccggaggagtaccaacaaccgccaccctttgcccctgggtactgctagagaacaggtccaccctggctctgggactcgctgccaggggctgccacactcctgaatgccttaacatttcttccatggccccacaccatggcatccgggggtcttcgggaacccgggaaatggaataaagatgtttttggggtctgttcctgcactcacccatggggtgagctggttattttagcaacaatcatcagagtgacgctgatggtttggggcaccagctatacatcagccccagtgccagaccttctattcattattttacgcctcanagcaaggccctcagggagggtcatcctccatgttttgaaga

SEQ ID NO: 5794 - DNA, 254 bp, Homo sapiens
cctgccagatatttgtgagaaatctgccattcgatttcacatggaagatgctaaaggacaaattcaacgagtgcggccacatgctgtacgccgacatcaagatggagaatgggaagtccaaggggtgtggtgtggttaagttcgagtcgccagaggtggccgagagagcctgccggatgatgaatggcatgaagctgagtggccgagagattgacgttcgaattgatagaaacgcttaagcagttgcctttttt

SEQ ID NO: 5795 - DNA, 135 bp, Homo sapiens
ctgaagtgtggcttgcgtaaataactgtttattccaaaatatttacatagttactatcagtagttattagactctaaaattggcatatttgaggaccatagtttcttgttaacatatggataactatcttctaat

SEQ ID NO: 5796 - DNA, 205 bp, Homo sapiens
ctgccatcacatcggacatattggaggcccttggaagagacggtcacttcacactctttgctcccaccaatgaggcttttgagaaacttccacgaggtgtcctagaaaggatcatgggagacaaagtggcttccgaagctcttatgaagtaccacatcttaaatactctccagtgttctgagtctattatgggaggagcagtctt

SEQ ID NO: 5797 - DNA, 141 bp, Homo sapiens
  unsure (110): n=A,T,C or G
  unsure (113): n=A,T,C or G
aaaagtttgaagactctcacaggtaagtgcagctcaggatcctgtgagtgcagcagaaagtcttaagaaatggcaggggctggttgaacccagattttccattggctgancanatatccccagtaggtgtaaaaaatttca

SEQ ID NO: 5798 - DNA, 312 bp, Homo sapiens
  unsure (221): n=A,T,C or G
  unsure (233): n=A,T,C or G
  unsure (238): n=A,T,C or G
  unsure (276): n=A,T,C or G
  unsure (296): n=A,T,C or G
  unsure (306): n=A,T,C or G
tttatttggttacagtgaataacctggacaaaatgttgagaagagttgttaaaacaagtttacattaaatatactaacaattacgtttggttacatatttgtaagtgatggttatttagaaaaactgcatagaaatccaaaccttaaatattctgcaaatcaaatcattagcttttctcttctctaataaagtagggtgactagttcttggattaatctanctataacattantgtancactctgattatcttatggaataattctctatctcatntaaccctcacaacaaccctngtaaagtatnatcccc

SEQ ID NO: 5799 - DNA, 131 bp, Homo sapiens
  unsure (92): n=A,T,C or G
ctgctagttgtgcttgctgggataaatcttcgatcttggcttccccaaaaactatgtaagtatctgaagcagggctcttgtagacatctggntttgtgatgacaaagaggatattcttagatttccggata

SEQ ID NO: 5800 - DNA, 504 bp, Homo sapiens
  unsure (435): n=A,T,C or G
  unsure (468): n=A,T,C or G
  unsure (470): n=A,T,C or G
  unsure (488): n=A,T,C or G
aaaagaaattcagaaactaagcggttggagaggagcattggaaatagagggggatgctatgagatgggggttgggagcagagaagaaactgcaggagggcaaagtgtaactagcaatataccttctgtgatgctccagaaacacatgtctgctaagattaacttgattggagtttcttatgaaacaggctgatcatcaagatttttaactcaggtttcagtgaaaaaattggaaacttttacaagaaagatttgagaagtagaaggcaggcagcaaattttccagatattatgcttgcatttcaaattcctgtttcaggcttttcaagtaggcatgcacattcccaaagccatgatatttggctaaatacacaaggaccccagtcgcacaccgccatctcgctgcccggcagaaactgcagttgcagattcctcnacaaggcgggcaatgcccagttcggatccacanancttcccttgacctcttcncccttaacggtttcaa

SEQ ID NO: 5801 - DNA, 252 bp, Homo sapiens
gaaagatggcggctaccttactagctgctcggggagccgggccagcaccggcttgggggccggaggcattcactccagactgggaaagccgagaagtttccactgggaccactatcatggccgtgcagtttgacgggggcgtggttctgggggcggactccagaacaaccactgggtcctacatcgccaatcgagtgactgacaagctgacacctattcacgaccgcattttctgctgtcgctcaggctcag

SEQ ID NO: 5802 - DNA, 420 bp, Homo sapiens
  unsure (315): n=A,T,C or G
  unsure (371): n=A,T,C or G
  unsure (373): n=A,T,C or G
  unsure (403): n=A,T,C or G
ccatgagtgacaggtggcctcttggtgggagaggtggggcagggggaaggcagctcccactagaccagggcagtatttaggggaaggaggcagattggagcagttggctgccaacacctggcctcactcagggagaggggccttgggcctggaagatatctgggtgaggtacccacaccatctgctgcaacctctgtgtatccattatgggctcgcgccattcacaggcatgaattgagcacctagtatgtgggaaaacaggggaaacagagatggcacagacatggtctccatccttcgggggctccagtctanttgggggagatcagagaagttccatttgccactctaggccaagctaggtaagcggnanagccatgaacattgtgggagcttggagganggagttgaccccttgca

SEQ ID NO: 5803 - DNA, 400 bp, Homo sapiens
  unsure (367): n=A,T,C or G
aaactagccacagaccaaactagatctgcattcatccagcgctggaattttatgctaaatactaaggtcctttatcttcttggtcagaagtaggcaacagtaaaagtggtgctttgttgcgccactgaaaccgctccctgggtgggtcttccccgtatcatgtgttggtagcacatgcaaacccctgcttttacggaaaggactgcttggaactttgggacctgtccagggctcatgtgctgtgcctccggataggatgaagctacagatgataaaacagctacgtataaaagcagatggattttgtatagggacatataaataggaaaggtcctggaggaagggacttatgcctgggccccaaagnccagtttacagtcacattcctgaccatacatcg

SEQ ID NO: 5804 - DNA, 265 bp, Homo sapiens
  unsure (255): n=A,T,C or G
aaagatttagtgcttaacattttcccaagtgtgggaacattatttttagattgagtaggtaccttgtagcagtgtgctttgcattttctgatgtattacatgactgtttcttttgtaaagagaatcaactaggtatttaagactgataattatacaatttatatgcttcacatagcatgtcaacttttgactaagaattttgttttacttttttaacatgtgttaaacagagaaagggtccatgaaggaaagtgnatgagttgca

SEQ ID NO: 5805 - DNA, 223 bp, Homo sapiens
  unsure (175): n=A,T,C or G
  unsure (190): n=A,T,C or G
cctcggtgggtcttgcggggcagcttcttggtgtgccaacgactggtgacccctttgtagcctttgcccttggtcaccccgatgacgtcgatcatctcatcctgcccaaacacttggttcacaggtacctgctgctcaagcctctcgcggcccatccagcttctcggccacagtncctccgttcacctgnatctccatcaggtgggccttcttctggcgcaga

SEQ ID NO: 5806 - DNA, 430 bp, Homo sapiens
  unsure (2): n=A,T,C or G
anaatatttacacttaaagacaaaacatttccacaattattacaattggtttcactaaatcagaagtgactacacattatctctacttttataccagaaaacaaaatgaagaaatcaacaaaatataattactaaaactccactgtggatcagggataaaatgtgtccaatattaactcacactttcccaataagtataaaaatgaatataacattgcttggacaacttgtttcaacagcgaatcctctattactatttgttcaataacatatataaattcaaaactggcaggtatgaaaaaaggttactttgttttttgcagatactgtacttgtaaaataaagccaaataaagcatatgtcacacataccaaagtcttacattttgcctttctaatacaagcaagtgaaatattaacacatagcattt

SEQ ID NO: 5807 - DNA, 518 bp, Homo sapiens
gataaatgctggtcagatgtaagtgtgttgtctgcaattcatcaggattaaattatgtagataacttaagggatatctctgcaaggagaaacacctttttagatcttttagatgctgcttcttcaatgcaaggaaaggaaataaccccagcgaggtactcttcagggacacaggtctagtacaagagaactcttgacggctactaagttcagccagtcttaaaaaactgtgctgtttctacaaaactttaactacagtagtttataaggatgccaacgaaagctgagggtgtagagcaaaatagttctaagcttcagttaaacttctttaggtaagatcttatttacttttcctttcttaattttcctccctaaaagataaactaatactcttaaatggtctttcagtaaagtggttcttacgtagtttaacatagctataaattgagtttaacaatttataaactcaagagaataatttttataaaccctgttttccaatctgtcatttacttaaat

SEQ ID NO: 5808 - DNA, 388 bp, Homo sapiens
ccaagcgctcagatcggcaaggggcaccagtcttgatctgcccagtgcacagccccacaaccaggtcagcgatgaaggtatcttcagtctcccccgaacgatgagacaccatgacgccccaaccattggcctgggccagcttgcacgcctgaagagactcggtcacggagccaatctggttgactttgagcaggaggcagttgcaggacttctcgttcacggccttggcgatcctctttgggttggtcactgtgagatcatcccccactacctggattcctgcactggctgtaaacttctgccaagctccccagtcatcctggtcaaagggatcttcgatagacaccactgggtagtccttgatgaaggacttgtacaggtcagccag

SEQ ID NO: 5809 - DNA, 501 bp, Homo sapiens
cctgtaagcaaaattccttccaaatttccagcctctttcatttcattggtcaacttttcgatgtatctatttaactgagtatcactaaggaatttacaagcaaatgccactctgtcacgtactgcaactttgttttcatacaaaactccatcgtaagatcctgtttcacttgtcagaaatgcaaacatgacacacaaatacgggttatttagctgtaatcgcagtgtgctacacatttctctccaaagggagttcttctcatccgtataacccgataaagccattgctaccacattgagattcagatctcctttttcagaagatgccccttcattcaggatttggattgctcggcgaatatccaagttgaacaatgccacagcagcagctctttcccattccccttcttgtacaagggagttcaaaaatggccccacgtctacatccgttcctttctttatccacccacaaagctgtaaagctaagattctctcttcattt

SEQ ID NO: 5810 - DNA, 404 bp, Homo sapiens
  unsure (197): n=A,T,C or G
  unsure (339): n=A,T,C or G
  unsure (340): n=A,T,C or G
  unsure (361): n=A,T,C or G
  unsure (396): n=A,T,C or G
aaaaaattaactaataaaagcttttatatttaagaactgcaagtgtttcaaaactatgctgttttgtgttgttatagttgtaacatatttctcaattttcctgtttttcttttagtttattgacaagactacctggtcggcctaaattccattttcattcagtttttgggcatttgagatcaaagagtaagtatggnttctacagttacttcatttttctacttatctttttaagttttttctccaaattttgacttcttttatatgtatcatctatactcagcatgaagtccagttttttctattatatacatgttttcaattcgctccctgaagcanncttttaatttcttcatcttcnaataaatgaccatcaccaccttcaatgaatctggngacccttg

SEQ ID NO: 5811 - DNA, 375 bp, Homo sapiens
  unsure (280): n=A,T,C or G
  unsure (298): n=A,T,C or G
  unsure (306): n=A,T,C or G
cctgaggtgggtgtggggagagacagcacgttcccgtactggttctggggcccgcttcctgggggaggcgtcactttgaagaatctggcgggagaagaggaagtgcacggtgagggccgacttggaatggaatggcggacccactcaagattctgtccaggccttcagaagttaaacgtgatcacttgtgctgggacagccaatagaggagtctgagatgatcatttccaaggagttcttcacagaggaggtagctttggagctgggctttgaggttggncagtatttgaaacagtanagacggancaaagaacccctgggcagaggaaacagtaagtgcaaggcataaagtgaacgtggagggtgttaccgccg

SEQ ID NO: 5812 - DNA, 90 bp, Homo sapiens
  unsure (13): n=A,T,C or G
ccaggcacaccantgtggccttttgggtgtgggagatctctgcttctgatggctcaaacacagcgacctcgggtgggaacaccttgttca

SEQ ID NO: 5813 - DNA, 222 bp, Homo sapiens
  unsure (112): n=A,T,C or G
  unsure (171): n=A,T,C or G
  unsure (209): n=A,T,C or G
ctgacgcagctctgcctctttccgttttgccttcatctgctctttcagctcctctgtcaagcgctccttcttctctttcaacttgtctactgctttctcatcccagcgccgngccttggccttcaggtcactggccccaccagagatcactcctgacttctggaatagggntccatccagtgccactgtcttgtggcgctggtggtctncaaaggcaatgcg

SEQ ID NO: 5814 - DNA, 419 bp, Homo sapiens
  unsure (371): n=A,T,C or G
  unsure (395): n=A,T,C or G
  unsure (397): n=A,T,C or G
cctgttcattttttttgtctttcccaaatcttggtagtctccttatagttgaagataaaatgttgagtgcacttattttagaatatcctagacataactgtctaagtaaaagcgctctattaatctaaaacactacaagagaatttaacaccatctctcaaatgcttttttggagagcttaatgggattctgaatatttgcaatgtggagtttccgccccgatctcacgtcagtgagggtctcctgtctctcaagtgtgtttcctttggctgttccctaatacaaaacacggacatatttttactcgtagcactcaatttagtaacttctagatgctaccgttgacctgagttaaattcatttagtcgtgnacgtaaaaactctccttttagtgngntattttcttggccttccctttt

SEQ ID NO: 5815 - DNA, 306 bp, Homo sapiens
aaaataatgcttatagtatcagtgaaggcttatggtaatgaataaaagaattctcatgagacagaaacaatgccccaatatctattatcatcaatctatctgtatttttttttataaaaatgcaatctacaactaaccaaaactcaacaggctctcaagtttcaatgagcccctttatattatcaattgtacatacctatcattgactattaaaacataacatacacataaatgtggtgtagtaaccatgtaacttaagaaatttaacagttcatggaacatttaagatcaagtgaatagcacttt

SEQ ID NO: 5816 - DNA, 444 bp, Homo sapiens
aaacaagaacttgctaaagaaacctcatcacaacaacgttttagggcctgatcactttaagtccatggggccattaatgaatatcaaccaaatgtctctttataatctgcaagccgtttttcctacaacaagaaggcgtaacatgtttccttgactcaggtgataacattagaaaagaaatcatgatttgtttcttttgctgtaacaggcagacactgcatttcttgctataatcaggaaagatggaacgactgctgcccttctcttgctgctatcaacagtttttcacgcattatctcaatgcttgaatagtccggcaacttaagatagttcacacaagtcattacagagggcaagaagtcatctgggttttctgttgattcaaacgtctttcggacaattgtcaaaggtggattcaaactccggaatcctccaacaggcaat

SEQ ID NO: 5817 - DNA, 314 bp, Homo sapiens
ctgctcggatcaggcagttctggagccataggagcgggatagaaaagccttcctgatgcaggctttgaccaaggttttcatttgaaaggactaagctaccctggacttgttctgcttctgagcccccttcttcttcctcttcgctgcttcctcaggcaggttttcctcttcttccagatcttcctggcaaaaatctttcagggactccgctccatttggcaagatggaggatgccaactttttctgccgtttccttgtacagctcccgccgctcagccaccagccccagagccaagagtttatccactattcgg

SEQ ID NO: 5818 - DNA, 246 bp, Homo sapiens
  unsure (151): n=A,T,C or G
  unsure (168): n=A,T,C or G
  unsure (193): n=A,T,C or G
  unsure (208): n=A,T,C or G
  unsure (214): n=A,T,C or G
  unsure (218): n=A,T,C or G
cctggaagtatttcactgttggaagaagtaaacaagaatgacattccagatggaaatagaattctctctcttgcctttgaccaacatggtactaaggggtttcttctttcccaatgtatgtacgtgccctgctgggggccttactttatanaatgagagcatccgagnttccctaatgaatctggctagttcntgtgtctgggctgangatacnggantgggacatccactctcggatccctcaga

SEQ ID NO: 5819 - DNA, 286 bp, Homo sapiens
  unsure (248): n=A,T,C or G
  unsure (264): n=A,T,C or G
ccacaagatatgttctagagacgtccatgagtcctcttgctgtgtgggagcggcatccacagacttctggaataattggcctgtgaggaagctcatcaaagctgcaaacagtacaatgaatgcaatagagagccagagggccttattagcctttctgatggaggacttgagatttgttgcccaggaagctattgtgtcataaactgaagagacatcccactttgatggattatttttcttttcagaangacttggcttccttgncctttctactgtttcttctcca

SEQ ID NO: 5820 - DNA, 438 bp, Homo sapiens
gttctgaaaccgttcttccaccactgattaagagtggggtggcaggtattagggataatattcatttagccttctgagctttctgggcagacttggtgaccttgccagctccagcagccttcttgtccactgctttgatgacacccaccgcaactgtctgtctcatatcacgaacagcaaagcgacccaaaggtggatagtctgagaagctctcaacacacatgggcttgccaggaaccatatcaacaatggcagcatcaccagacttcaagaatttagggccatcttccagctttttaccagaacggcgatcaatcttttccttcagctcagcaaacttgcatgcaatgtgagccgtgtggcaatccaatacaggggcatagccggcgcttatttggcctggatggttcaggataatcacctgagcagtgaagccag

SEQ ID NO: 5821 - DNA, 341 bp, Homo sapiens
ccttaggacaatgggggctgtggcatgcgtcaggttacctgccttgatatgggatcgtgacaggcccctccctatgtgcaggagacaagcagcccaagaaacaggagaaaaacccagtgttggtgtccccatagtttgtggatgaagctctgtgtgcgtgcgaggagtaccttagcaacttggcccacatggacatcgacaaggacctggaggccccgctgtacctcacccccgagggctggtccctcttcctccagcgctactaccaagtggtccacgaaggggcagaactcaggcacctcgacactcaggtccagcgctgtgaggacatcctgcagcag

SEQ ID NO: 5822 - DNA, 443 bp, Homo sapiens
ccaaaaacttcagcataaaaactatcctgtctgtgtattatatatatttattaccaaatttaataaacaaaaaccacttttgaaccaggtaattttatctagtgtgaaaagaaattaatcacatggtcatatactggctagtgctctctaaaagtagacattaaaatatttcataattggagggaatctttggagattagtggcatctaatcttggggcctcagacacccaaaatctatatattgaccagtggaagttgatgatttgttatcaaatttcaaagcacctaatggaaaccccacttcatctctgtgaagattttcagttcctttacagttatttgaaattatttcaattctgtggagccacttcagaaactccaatgggcctttgcaatattaaaatgtggagaatgcattaatcattatttaatcaatgagttt

SEQ ID NO: 5823 - DNA, 178 bp, Homo sapiens
  unsure (156): n=A,T,C or G
ctggcgctcctcccagcagccactcagggaaagaaagtggtgctgggcaaaaaaggggatacagtggaactgacctgtacagcttcccagaagaagagcatacaattccactggaaaaactccaaccagataaagattctggggaaatcatggctncttcttaactaaaaggtctcat

SEQ ID NO: 5824 - DNA, 502 bp, Homo sapiens
  unsure (473): n=A,T,C or G
  unsure (486): n=A,T,C or G
ctgttgactcagattcggcattttaattacattgtttccaagtatgatattctgagagtgtctatagcacttagtgtctgcttcatataaactaccagttattatatatttatgatgcaagtagttttccaaatgtggtgaaagtctgagtctttttatccccatgggtaaaatctgaatctggctctctgtgtctctcagtgcttgtttattgctggtcagagagtaaattcttgataaaagctgttgacttggctctcacagtttatgcagacattggagagacaatttggttatttcaaacatcacaggatttgagtaagaagacctggttatgaaacaaggctctcataattactagttatgactgttgacaagttaccttttcttgtttacaagttatttggcctctttgaattacttgtaaaatagagatagggattctttcttgatcatggaacatcaaatgaagntatttgatgaaanactttgtcatctggaa

SEQ ID NO: 5825 - DNA, 503 bp, Homo sapiens
  unsure (304): n=A,T,C or G
  unsure (466): n=A,T,C or G
ctgaagagtcctgtagagtagagtgatttttgtatctccaaccctcctcccaacttgaaacaaattctcaagcttctctggagcatcttttggtcacatgaccctcgatcatggtaacccttttgctaagacacatgtgacaccaaggtttcctctgacactgcttctctagggttcagatgacagcataaaacatcactggtcaaaaatattagatattaagaatgtgggcgtttatgttcgtaacagcaaatactttgtagggtgtgtcacccaaaggagcatttttgtcatttaatatggnccccggggagttagcccaaaatcatacaaataagcctttttctaaagacaggtcaaagttggttaatttaacagttgaggaaccgtctcatgccaattaaaaaattcttacttcccaactattcaatggtccaaaaagcaattaaatgtgaccattcagttntacacacatgcacacacacacacggagacgcgcacac

SEQ ID NO: 5826 - DNA, 333 bp, Homo sapiens
  unsure (308): n=A,T,C or G
cctggcctcttcagagtaccccccattccactttccctgcctccttccttaaatagctgacaatcaaattcatgctatggtgtgaaagactacctttgacttggtattataagctggagttatatatgtatttgaaaacagagtaaatacttaagaggccaaatagatgaatggaagaattttaggaactgtgagagggggacaaggtgaagctttcctggccctgggaggaagctggctgtggtagcgtagcgctctctctctctgtctgtggcaggaggcaaagagtagggtgtaattgagtgaangaatcctgcgtagagaccattctca

SEQ ID NO: 5827 - DNA, 502 bp, Homo sapiens
  unsure (491): n=A,T,C or G
  unsure (502): n=A,T,C or G
aaaatagcatcagtaacttttgagctcatgtcaatcaagcattggcagtcagagattttatagggaagactaagtaaatccagtttccaagaacctaaactgattgaggctccaagagtcagaccaacaaaagttttattctgtgttgtttactggtaagaatattattatcttgatactacctctcaagggtattgttacaaaatgccacttatggttaaagagatagatacaaagagttctatttgacagaagcttgaaactctggcatctatctgcccaacgatgggggctttcgttctgtaatttaatcctttgtagatacattatttgtgtgtaattttatacgtgttcatatttttctcattttgcattgtgtaaagtgtacaaaatctcaaagtataaaatactgcttatattgcttgtaatttacagtgtgtaaatattttctaattgtgtacattgatgggggggacaagtgggttattcangtttttttttn

SEQ ID NO: 5828 - DNA, 112 bp, Homo sapiens
  unsure (89): n=A,T,C or G
  unsure (104): n=A,T,C or G
ctgtgtagtaaagatgccttctggtgaatttgcacgtatatgccgagatctcagccatattggagatgctgttgtaatttcctgtgcanaagacggagtgaaantttctgca

SEQ ID NO: 5829 - DNA, 101 bp, Homo sapiens
  unsure (45): n=A,T,C or G
ttccatttatctttctacagggctgacattgtggcacattcttanagttaccacaccccatgagggaagctctaaatagccaacacccatctgttttttgt

SEQ ID NO: 5830 - DNA, 442 bp, Homo sapiens
  unsure (427): n=A,T,C or G
ccaaggcatcatggtgcgtggtccccttgagagacttgccgttgatggaaagaacctcattgcccttctgaatagtcccttcctgggaggccagcccatttggaaacactctgtgaaccgtaatcaccttgttttctagatctgctcctcctgccaagctgaacccaagaccagcaccttcctccttgtgtaagatggtgacatggatgccgcctaattgctttaatgttgtttcatccagaaccttcacctcctcgatgagtttttttaattcttctgagctcagcagggagataacggactgaccagactgaagggaactgtggtccccatcatcgtcttccttggcttccgtgagaccctctgtatattctctcagctctgaaaggttgagcgagaaccctgtgtccaaggcagatgtttcagnaagaaccatttgcag

SEQ ID NO: 5831 - DNA, 123 bp, Homo sapiens
tacagttgtcctgatttcttattgaatttgttagactagttctcttgtcctgtgatctgtgtacaattttagtcactaagactttcctccaagaactaagccaacttgatgtgaaaagcacag

SEQ ID NO: 5832 - DNA, 285 bp, Homo sapiens; identical to SEQ ID NO: 321

SEQ ID NO: 5833 - DNA, 160 bp, Homo sapiens
catttttaggctcgaacttaacactgttaagaaataactgaaatatgatggtatttacattaatttttgaaattcaatggtgggatagaattaggtcaggaaatggaagttgttccaatggtgtgagaactaggagacaagatgattcactttattattt

SEQ ID NO: 5834 - DNA, 523 bp, Homo sapiens
ctgtgcttttcacatcaagttggcttagttcttggaggaaagtcttagtgactaaaattgtacacagatcacaagacaagagaactagtctaacaaattcaataagaaatcaggacaactgtagactatataaaaactgtcttagaaaattatttacaactttatcatagtgtaaatactctaaatgtaaaataaatctatggattttatacaaaaatactctaaagtacaaatgtaagttaaatgctgaataaaacattttcaccttttccagtggatgctattactaagactataatctaggtgtcaaaacttaaagtgataaccacaaagcaatgttttcttaatcactcataattttacatttgttagtagtcatcacaaggtttagagttccactgaaaaagtctcatttttacaaatgcaactcataccactttccttcatggaccctttctctgtttaacacatgttaaaaaagtaaaacaaaaattcttagtcaaaagttgacatgctatgtgaa

SEQ ID NO: 5835 - DNA, 315 bp, Homo sapiens
aaattgaatttcatcactattctgtgtattctatttatcactattctaaatgactcatggttggctaattgattatcatgtaagcaagctatttgaagaaattgattacatatatttatatatagggggtaactaattaatgattacttgattaaattgctatgtgaactgacaactatttataaatcaatgcaatagactgttgtttgaccaaattattttactgaactgacaagtgggtttttgatttgtcagttgcttggctgaactgatcaagtcgatagttgcttgacaaactcaccaactttagaatgg

SEQ ID NO: 5836 - DNA, 527 bp, Homo sapiens
cctccatgtgggtggctatcctttatcaagatcccccccagggggaggaggattattagtcacattatcaaactcccctccaacccctttctctgcttagaggtatgtgtaatgtgtagtagaaagaccgaatccccacccaaaagtccttactgctactcatgtttttaaccttctgttctttaccctactccctaataatgaccgccatcatttatctactgcttaatggatactaggcactgtgctaagggttttatgttttacttcaatcttttcatcggctttattttgatagtttgttttatagaggaggaaacagacttaggtaagttacaagatgacaaggttactaccttgttcagttagtagtcagcagctagtatatccaaagatagtacgggtcagaactaggattataaactcagggctacctgaaactcacaacttcaggcatctttgatttcttcttttcacccacagccaaattctttcaacctaaaattgtatccattctgttttcaccg

SEQ ID NO: 5837 - DNA, 491 bp, Homo sapiens
cggatcagtacaactcccggtggctgaacgacccgtcgttcatccatgctgagctcattcctgacagtgcggagcgcaatgatgataagctttacttcttcttccgtgagcggtcggcagaggcgccgcagagccccgcggtgtacgcccgcatcgggcgcatttgcctgaacgatgacggtggtcactgttgcctggtcaacaagtggagcacattcctgaaggcgcggctcgtctgctctgtcccgggcgaggatggcattgagactcactttgatgagctccaggacgtgtttgtccagcagacccaggacgtgaggaaccctgtcatttacgctgtctttacctcctctggctccgtgttccgaggctctgccgtgtgtgtctactccatggctgatattcgcatggtcttcaacgggccctttgcccacaaagagggggccccaactaccagtggatgcccttctcagggaagatgccctacccac

SEQ ID NO: 5838 - DNA, 452 bp, Homo sapiens
  unsure (311): n=A,T,C or G
  unsure (313): n=A,T,C or G
  unsure (393): n=A,T,C or G
cctggccggcttgatgggactcctggagaaagggcttgggggtcccgagcttctcgatcctcttggaggaatgggggtagtctttcctttgatgctgctgtggccctagcccgggaccgccaaaggactgaggctcaaggagttcggcgaacccagacctgtactgagggtggggattactgcctcatccccagaacctccccttgtagcatgatctctgcccattctcctcggccccttagctgcctggagctcccatctgaaggtgcagaagggtctggatcccggagtcgtcttagtctgccccccananaaccccaggttcctgaccccctgttgtcctctcagcgcaggtcatatgcatttgaaacacaggctaaccctgggaaaggngaaggactgtgattaggaccacagccctgggcaaaagggggacccagcaaagttgtctt

SEQ ID NO: 5839 - DNA, 574 bp, Homo sapiens
ctgggaccataatttgtacagaaacactggatgtgattaatagggagtaggcgagattatagcaaaccagcagaaatggaactctgctaaatgtgcatccgtgaatgctcccttgaatgtggctgtgcaggattcagggtttgcagaaattctcaggacctcagacctctgtcctatgactaatgttactggcagagcaaataatctaaaggttttggttttgtggattaccatctccgtgctgtgcatctgaaggccagtgctgtgctggcaggaaaatagggactgagaaaaagcagatcctatactatagggactgtagtatctatgacgtagccagccattctttgctcccaaggcaagaagaaagagatgacggagtcaatatagggttgccaaatcggattttctaaaatgagtaggaagttggatttttatgtgcaacagtttcttttaatgctttgttgatatgtgattgtcatgcaataattattcatatttggtaagttttgtacatatattatgtacactcagggaaccaataccataatcatgataatgaacgtatccatcc

SEQ ID NO: 5840 - DNA, 577 bp, Homo sapiens
ttggtattgatcttggcaccacctactcttgtgtgggtgttttccagcacggaaaagtcgagataattgccaatgatcagggaaaccgaaccactccaagctatgtcgcctttacggacactgaacggttgatcggtgatgccgcaaagaatcaagttgcaatgaaccccaccaacgcagtttttgatgccaaacgtctgattggacgcagatttgatgatgctgttgtccagtctgatatgaaacattggccctttatggtggtgaatgatgctggcaggcccaaggtccaagtagaatacaagggagagaccaaaagcttctatccagaggaggtgtcttctatggttctgacaaagatgaaggaaattgcagaagcctaccttgggaagactgttaccaatgctgtggtcacagtgccagcttactttaatgactctcagcgtcaggctaccaaagatgctggaactattgctggtctcaatgtacttagaattattaatgagccaactgctgctgctattgcttacggcttagacaaaaaggttggagcagaaagaaacgtgctcatctttga

SEQ ID NO: 5841 - DNA, 560 bp, Homo sapiens
  unsure (556): n=A,T,C or G
taaactgtggcgggatagttttcgggtccttgtccagtgaaacaccctcggccgggaagtcagttcgttctctcctctcctctcttcttgtttgaacatggtgcggactaaagcagacagtgttccaggcacttacagaaaagtggtggctgctcgagcccccagaaaggtgcttggttcttccacctctgccactaattcgacatcagtttcatcgaggaaagctgaaaataaatatgcaggagggaaccccgtttgcgtgcgcccaactcccaagtggcaaaaaggaattggagaattctttaggttgtcccctaaagattctgaaaaagagaatcagattcctgaagaggcaggaagcagtggcttaggaaaagcaaagagaaaagcatgtcctttgcaacctgatcacacaaatgatgaaaaagaatagaactttctcattcatctttgaataacgtctccttgtttaccctggtattctagaatgtaaatttacataaatgtggttgttccaattagctttgttgaacaggcatttaattaaaaaatttangttt

SEQ ID NO: 5842 - DNA, 443 bp, Homo sapiens
ccatcaccatgtcacccacaccagcagcgggaagtctgttcagccgtcccttgatccccttcacggagatgatatacaggtttttggctcctgtgttgtcagcacaattgattacagctcctaccggaagacccaaggaaatccggaatttcgcaccagaggacccaccacgtcctgtggatataaagggaagggaaacaggataaagagatcacaatctagacatggttcggagttccccctcatactcaagctgtaattcaccgcacatgctttgatagactgtacgctatagattagctcgctcggattttacttatgccgtccccgtgtgccacccgattctcacggaaagtagcctatttcttactattaacactctgacatcgaaattaagaaacctagacgactcaacccttgctctaactttcgcaaaacgcaat

SEQ ID NO: 5843 - DNA, 197 bp, Homo sapiens
  unsure (15): n=A,T,C or G
ctgctggggattctngtccatctcctgcttccagagccagctcacattgccggaggcgctgttcatgtagcagtgcattttcaccgtgaagccccgtttcctggctatgaaacgtgggctctgccagatccgcgaacaagcactacctttgggattccggtaccggtcctccgatctggctgctggtactggctcag

SEQ ID NO: 5844 - DNA, 605 bp, Homo sapiens
  unsure (556): n=A,T,C or G
  unsure (571): n=A,T,C or G
ctgttgactcagattcggcattttaattacattgtttccaagtatgatattctgagagtgtctatagcacttagtgtctgcttcatataaactaccagttattatatatttatgatgcaagtagttttccaaatgtggtgaaagtctgagtctttttatccccatgggtaaaatctgaatctggctctctgtgtctctcagtgcttgtttattgctggtcagagagtaaattcttgataaaagctgttgacttggctctcacagtttatgcagacattggagagacaatttggttatttcaaacatcacaggatttgagtaagaagacctggttatgaaacaaggctctcataattactagttatgactgttgacaagttaccttttcttgtttacaagttatttggcctctttgaattacttgtaaaatagagatagggattctttcttgatcatggaacatcaaatgaagttatttgatgaaatactttgtcatctggaaattataaatataactaaatgttaattattatttgaaatttgggcacctcatggnggcattttctatggncatttttttcttttctcgcataatggctaaaagt

SEQ ID NO: 5845 - DNA, 99 bp, Homo sapiens
ttggagatctaggcagtgggttaagccagacccctaaagtgaccctttcctcttctgccctattcttctcagaccctcagaaagacatccaattttttt

SEQ ID NO: 5846 - DNA, 621 bp, Homo sapiens
  unsure (1): n=A,T,C or G
  unsure (5): n=A,T,C or G
  unsure (17): n=A,T,C or G
  unsure (36): n=A,T,C or G
  unsure (550): n=A,T,C or G
nctgntggttaacaagnggatcgtcatgttcagtantttatacattatgtgagaagtaacgttctgattctttttcttacacagaattggcagagggggtcgatttgggaggaaaggtgtggctataaactttgttactgaagaagacaagaggattcttcgtgacattgagactttctacaatactacagtggaggagatgcccatgaatgtggctgaccttatttaattcctgggatgagagttttggatgcagtgctcgctgttgctgaataggcgatcacaacgtgcattgtgcttctttctttgggaatatttgaatcttgtctcaatgctcataacggatcagaaatacagattttgatagcaaagcgacgttagtcgtgagctcttgtgaggaaagtcattggctttatcctctttagagttagactgttggggtgggtataaaagatggggtctgtaaaatctttctttcttagaaatttatttcctagttctgtagaaatggttggattagatgttctctatcatttaataatatacttgnggactaaaagatacaagtgctgtataaaatcagccaattatgttaaactagccatatctgcctttattggg

SEQ ID NO: 5847 - DNA, 591 bp, Homo sapiens
  unsure (576): n=A,T,C or G
ctgcatctgtctgaatggtgcgtgaaggctctcagaccttacacaccattttgtaagttatgttttacatgccccgtttttgagactgatctcgatgcaggtggatctccttgagatcctgatagcctgttacaggaatgaagtaaaggtcagtttttttttgtattgattttcacagctttgaggaacatgcataagaaatgtagctgaagtagaggggacgtgagagaagggccaggccggcaggccaaccctcctccaatggaaattcccgtgttgcttcaaactgagacagatgggacttaacaggcaatggggtccacttccccctcttcagcatcccccgtaccccactttctgctgaaagaactgccagcaggtaggaccccagaggcccccaaatgaaagcttgaatttcccctactggctctgcgttttgctgagatctgtaggaaaggatgctccacaaactgaggtagataatgctatgctgtcgttggtatacatcatgaatttttatgtaaattgctctgcaaagcaaaattgatatgtttggataaatttatgtttttaggnaaaataaaaactttt

SEQ ID NO: 5848 - DNA, 643 bp, Homo sapiens
  unsure (621): n=A,T,C or G
agtgagcgctggtggcggagttaaagtcaaagcaggagagtaattatgaatagcgcagcgggattctcacacctagaccgtcgcgagcgggttctcaagttaggggagagtttcgagaagcagccgcgctgcgccttccacactgtgcgctatgacttcaaacctgcttctattgacacttcttctgaaggataccttgaggttggtgaaggtgaacaggtgaccataactctgccaaatatagaaggttcaactccaccagtaactgttttcaaaggttcaaaaaaaccttacttaaaagaatgcattttgattattaaccatgatactggagaatgtcggctagaaaaactcagcagcaacatcactgtaaaaaaaacaagagttgaaggaagcagtaaaattcagtatcgtaaagaacaacagcaacaacaaatgtggaattcagccaggactcccaatcttgtaaaacattctccatctgaagataagatgtccccagcatctccaatagatgatatcgaaagagaactgaaggcagaagctagtctaatggaccagatgagtaagttgtgatagttcatcagattccaaaagttcatcatcttcaagtaggtgganggatagttcttagtggacttca

SEQ ID NO: 5849 - DNA, 313 bp, Homo sapiens
ctgccctacttttcaattcagatatactagtaccttacctagaaataatgttaacctagggtgaagtcactataatctgtagtctattatttgggcatttgctacatgatgagtgctgccagattgtggcaggtaaagagacaatgtaatttgcactccctatgatatttctacatttttagcgaccactagtggaagacattccccaaaattagaaaaaaaggagatagaagatttctgtctatgtaaagttctcaaaatttgttctaaattaataaaactatctttgtgttcttttctgcaacagacgaaa

SEQ ID NO: 5850 - DNA, 354 bp, Homo sapiens
acaatatttaaaatttattgcttgatacttttgacaacaaattaggttttgtacaattgaacttaaataaatgtcattaaaataaataaatgcaatatgtattaatattcattgtataaaaatagaagaatacaaacatatttgttaaatatttacatatgaaatttaatatagctatttttatggaatttttcattgatatgaaaaatatgatattgcatatgcatagttcccatgttaaatcccattcataactttcattaaagcatttactttgaatttctccaatgcttagaatgtttttaccaggaatggatgtcgctaatcataataaaattcaaccattatttataa

SEQ ID NO: 5851 - DNA, 414 bp, Homo sapiens
ccatccattttgagcacctctgccaggctgcagacctggaggcgaagggagtgtggaagaggagggtgtaagggtcgacgcgtgctgaatgggaggtgcaggtcctcggtgcgttggcagaagaggcttctggagtttcgaggccatacctcctttcaagagctttggatttggggcgacttccctgggtctaggggagtgttcctgtcccctgtcaggtcagccctgcggagccactccacccctcttccccttcccctggatttcctgacatagatggtgtgttcatgtgcaggtgtgagtgtgctgtccttctgatctctgttgatcccgctttcctactgagagggtggtggagagggtgtggtctcttctcacctcagtttttctgacacagcgaatcgagggctttgg

SEQ ID NO: 5852 - DNA, 513 bp, Homo sapiens
aaaccataagaaaaacacaacagttttgggctgctgataaattaattcctctctgttgtaaacctaaaactaaacaaaaacaaaaatacccagagcagatggggagagggtgggaggcggaacacacactcatacacacacacacactcacgcacacacacaagcagtacacgttaagctctgcattcccactataggggttggtcctccagccacggagccagatcctactgaaggcaggggggaggcgggaagggatgtgtgtctgtgtgtgggatcttcataaagtctttggtgctaataaaggctgactgaagcagcaagtcctgaagccccagatccagaaagcaactcagggcgaagagagtagtatttttgctcatcctcataggagggggcttgcctcaccccagagctagggtcaaactgacccaggacccagggagtatttaatttgatttcagtacttgcttcattcccataaatcatgagaacatgatgcttttcaaattt

SEQ ID NO: 5853 - DNA, 581 bp, Homo sapiens
  unsure (13): n=A,T,C or G
gtggcctcttggngggagaggtggggcagggggaaggcagctcccactagaccagggcagtatttaggggaaggaggcagattggagcagttggctgccaacacctggcctcactcagggagaggggccttgggcctggaagatatctgggtgaggtacccacaccatctgccgcaacctctgtgtatccattatgggctcacgccattcacaggcatgaattgagcacctagtatgtgggaaaacaggggaaacagagatggcacagacatggtctccatccttcgggggctccagtctagttggggagatcagagaagttccatttgccactctaggccaagctaggtaagcggcagagccatgaagcattgtgggagcttggaggggggagtgagcccttgcagtcagggagaaggagtcagcctggggagacttccagaaagtagccctttgaccctgaggaggtggggatcagtcgtgatgaaagtaatagccattcagtagccccttgtaattcaccctgagccaatgcctggaggcaggagaaagtactcaaggctctggtgcctggaccacaa

SEQ ID NO: 5854 - DNA, 267 bp, Homo sapiens
taatcgtcccattccccagtggattcggatgaaaactggaaataaaatcaggtacaactccaaaaggagacattggagaagaaccaagctgggtctataaggaattgcacatgagatggcacacatatttatgctgtctgaaggtcacgatcatgttaccatatcaagctgaaaatgtcaccactatctggagatttcgacgtgttttcctctctgaatctgttgtgaacacgttggttggctggattcagtaataaatatgtaagg

SEQ ID NO: 5855 - DNA, 615 bp, Homo sapiens
  unsure (26): n=A,T,C or G
  unsure (44): n=A,T,C or G
  unsure (53): n=A,T,C or G
  unsure (119): n=A,T,C or G
  unsure (165): n=A,T,C or G
  unsure (170): n=A,T,C or G
  unsure (215): n=A,T,C or G
  unsure (559): n=A,T,C or G
  unsure (566): n=A,T,C or G
  unsure (609): n=A,T,C or G
acatctctgcttctcatgctgctggncagcagcctctctccagnccaaggtgntctggaggtctattacacaagcttgaggtgtagatgtgtccaagagagctcagtctttatccctanacgcttcattgatcgaattcaaatcttgccccgtgggaatggttgnccaanaaaagaaatcatagtctggaagaagaacaagtcaattgtgtgtgnggaccctcaagctgaatggatacaaagaatgatggaagtattgagaaaaagaagttcttcaactctaccagttccagtgtttaagagaaagattccctgatgctgatatttccactaagaacacctgcattcttcccttatccctgctctggattttagttttgtgcttagttaaatcttttccaggaaaaagaacttccccatacaaataagcatgagactatgtaaaaataaccttgcagaagctgatggggcaaactcaagcttcttcactcacagcaccctatatacacttggaggttgcattcttattcatcagggaggaaagtttctttgaaaatagntattcanttataaggaatacaggattattttgattatatcttggtggttnaaggtt

SEQ ID NO: 5856 - DNA, 396 bp, Homo sapiens
ctgggattcctctgccagcagccctgccgatccctgggcccccggcagctccagcaagtggaactcgagcaataccagtatctttgggaggaggtccctctactgtcattgagaccagattctcccctcgcagcagcaccagaccgaggactcgcttctcttccctttctgcttgtttggagttctttggcttgatctttctgaactcatcacagtcacagaggatcaaattcatgtgcttgtcaaaagccttgaaggtgccaatgaagatccggccgtcctgcaggatgcacctcatcctgtaatcaatatgctgcagcatcttgctgctcttgcccaccgtcatggtggcggttctgatggctctgatacccgccggattcgcctcctcagagg

SEQ ID NO: 5857 - DNA, 361 bp, Homo sapiens
ctgtctgcattgaaaattcatgcatggagaaagggagtaagcaagggagaaacggtgcgattcacatattccgcgagatcatcaagccagcagagaaatccctccatgaaaagttaaaacaagataagcgctttagcaccttcctcagcctacttgaagctgcggacttgaaagagctcctgacacaacctggagactggacattatttgtgccaaccaatgatgcttttaagggaatgactagtgaagaaaaagaaattctgatacgggacaaaaatgctcttcaaaacatcattctttatcacctgacaccaggagttttcattggaaaaggatttgaacctggtgttactaacatttt

SEQ ID NO: 5858 - DNA, 321 bp, Homo sapiens
ctggcttccgagaggcaattctgtccttggaagccaggtttgaccatctgtaatcagccttgtgagaagtctcgtttgagggggccagggatggaacgggagggcgcatatcgtatgaggtatgggcattgtgttaagctgggggaagttgcagcttgtcctgaattacatggagaggaataaagtgggtgagtaggaggagccatttcatctgaaagcctgaggtccctctggtcccctcgataaaccccactggtgtcccaggccacaggtaacaggagaatagacatttaatgtcacagaatgtcagagcaggcaagg

SEQ ID NO: 5859 - DNA, 298 bp, Homo sapiens
  unsure (46): n=A,T,C or G
ctgtggtggcgccttctggagaagagcagagatacacgtgccatgngcagcacgaggggctgccagagcccctcaccctgagatgggagccatcttcccagcccaccatccccatcgtgggcatcgttgctggcctggctgtcctggctgtcctagctgtcctaggagctgtgatggctgttgtgatgtgtaggaggaagagctcaggtggaaaaggagggagctgctctcaggctgcgtccagcaacagtgcccagggctctgatgagtctctcatcgcttgtaaagcctgagacag

SEQ ID NO: 5860 - DNA, 317 bp, Homo sapiens
cctcaatgtcgtgctagaggggccgaagaaggccgtgaacgacgtgaatggcctgaagcaatgtttggcagaattcaagcgggatctggaatgggttgaaaggctcgatgtgacactgggtccggtaccggagatcggtggatctgaggcgccagcacctcagaacaaggaccagaaagctgttgatccagaagacgacttccagcgagagatgagtttctatcgccaagcccaggccgcagtgcttgcagtcttaccccgcctccatcagctcaaagtccctacgaagcgacccactgattattttgcggaaatgg

SEQ ID NO: 5861 - DNA, 551 bp, Homo sapiens
  unsure (353): n=A,T,C or G
  unsure (385): n=A,T,C or G
  unsure (460): n=A,T,C or G
  unsure (535): n=A,T,C or G
ctcagagctcaagtctgaactctacctccagacagaatgaagttcatctcgacatctctgcttctcatgctgctggtcagcagcctctctccagtccaaggtgttctggaggtctattacacaagcttgaggtgtagatgtgtccaagagagctcagtctttatccctagacgcttcattgatcgaattcaaatcttgccccgtgggaatggttgtccaagaaaagaaatcatagtctggaagaagaacaagtcaattgtgtgtgtggaccctcaagctgaatggatacaaagaatgatggaagtattgagaaaaagaagttcttcaactctaccagttccagtgtttaaganaaagattccccgatgctgatatttccactaanaacacctgcattcttcccttatccctgctctggattttagttttgggcttaattaaaatcttttccaggaaaaanaacttccccatacaaataagcatgagactatgtaaaaataccttgcagaagctgatgggggcaaactcaagcttnttcactccaggaccct

SEQ ID NO: 5862 - DNA, 349 bp, Homo sapiens
aaagaatttctttataaaatttactgtctaagattaatagcattcgaagatccccagacttcatagaatactcagggaaagcatttaatcttagacagtaaattttataaagaaattctttaaaagtaggacttaattctcctccgtagtgagtttttaagcagaggatatctactacatggattcctttgcctcttgacaggctcaagttccatctgcctcccaggcagctttttgagtctttcatagaagcctgcttttaatatatgccataattttcttcttaattcaagccacatgttcaaatttaaggcttaaattctcattccattgttttctaagaaatttt

SEQ ID NO: 5863 - DNA, 504 bp, Homo sapiens
cctgaaaataattttcagataaagagactccaaggttggctttagtttgtgagttactcatgtgactatttgaggattttgaaaacatcagatttgctgtggtatgggagaaaaggttatgtacttattattttagctctttctgtaatatttacattttttaccatatgtacatttgtacttttattttacacataagggaaaaaataagaccactttgagcagttgcctggaaggctgggcatttccatcatatagacctctgcccttcagagtagcctcaccattagtggcagcatcatgtaactgagtggactgtgcttgtcaacggatgtgtagcttttcagaaacttaattggggatgaatagaaaacctgtaagctttgatgttctggttacttctagtaaattcctgtcaaaatcaattcagaaattctaacttggagaatttaacattttactcttgtaaatcatagaagatgtatcataacagttcagaatttt

SEQ ID NO: 5864 - DNA, 462 bp, Homo sapiens
  unsure (369): n=A,T,C or G
aaacaaattgcagagaatagagaaaaaaataggttatttacagaaaacaatatctacatatgtacttagaggtacaaatttggtgacagaaaagacttcagtatatgctggcatcttagaagcagttctcaaagagcttagttttattttcttgaattttaagaatgcctaagatccttcttcatcctcgatcttgggagccaagtagtattttaagtgtcccatatccgcaattttatactctacaacaaggggtacatctgcagacatactgagtgtcaccgttgaagagagtggagtggcttttgtaaagaagttcaggtacctcagtgcaaaagttagttgaactggttcattcatctctatggnaacagcttcctcctctttatcgacattacttgtcttgtgacaatttaatgtttccatttccaagttctccacttgcagaaaatttcactccgt

SEQ ID NO: 5865 - DNA, 342 bp, Homo sapiens
cttaattgcctctcctcccagtttgccagtcccgccccccgccccccgggaaaacagccaggccactgttgctgtcacattctggagcctgggccagggccatttcccatcgatgtgagctcttctcatctcacagcattccctgcgctgcttccacccccttctccccttccagatacccagcatcgcagcagggatttcacaatcccatactgtgtcgcctcccatccaagcgccagggagggtggggggtaggagctaagacttcctctggacagatgggcagggcagagttcactgaggtgaaggaagaccacaggttaacaccaaagtattgtacag

SEQ ID NO: 5866 - DNA, 395 bp, Homo sapiens
  unsure (143): n=A,T,C or G
  unsure (338): n=A,T,C or G
  unsure (381): n=A,T,C or G
ccatgtgaccctctccccaggcaagctctgaagtccctgcaggtggaggccatgcctgtcttaaactcagttgcatccctggtgcccaaagcaacaccagaaccaagaaggagctccataaatccttcttgggtgaagcctanacaaagccgccaggtcttgtggctccaggcaccagagccttgagtactttctcctgcctccaggcattggctcagggtgaattacaaggggctactgaatggctattactttcatcacgactgatccccacctcctcagggtcaaagggctactttctggaagtctccccaggctgactccttctccctgactgnaagggctcactccctcctccaagctcccacaatgcttcatggntctgcgcttaccta

SEQ ID NO: 5867 - DNA, 494 bp, Homo sapiens
  unsure (390): n=A,T,C or G
  unsure (433): n=A,T,C or G
  unsure (443): n=A,T,C or G
  unsure (462): n=A,T,C or G
aaacgcttcatgacagggtaattcatgtccaacatatcaaaaacatatttatagataactttagaaagaaaatacatactttttttgataatcacaagtagcaatgagattttctatattattttcagtctcactttagaaatgttttaattgtctaaatttaatcaattcatcgattaaaggaaagacaataaaatagtaaaattacatgtgtttatatataagtgtgtgtgtttcaaataacaaaacacaggttgtaaactaaaatcactggaaggcaaattgaagacaaaagtgatgctggtttaagttgtttggttcttcacataaattccagtttccaagttgtggtttacaactctagtaatatccagatagataattcaaccngcacttttttcttctattcctggttttctcttggtcacactgnaattttttgnctttttaccggaactggantaaataaaataaggacttcccagtcttaatac

SEQ ID NO: 5868 - DNA, 366 bp, Homo sapiens
ctggaagagggaacttccgagcccccaggggcggggtaaggcaaaaagggaacagcagtgttgaaagtgggaggccaggactgatggggaggagggttcccaaactccagagcagcctgaccagggctgggggtcttgggcaaatatctgaggctgcccatcctcacccaggacacccccactgagccctgaggatgaggggtgcccgtgggcagaagaagctctggacagcagcttcttggggtctggagaagaactggatttgttgagcgagattctggacagtcttagcgtgggagccaagagcgcaggcagcctgagaccgagccagagtttagactgctggcacagaggagacctggacag

SEQ ID NO: 5869 - DNA, 462 bp, Homo sapiens
ggcctacacgccgccgcttgtgctgcagccatgtctctagtgatccctgaaaagttccagcatattttgcgagtactcaacaccaacatcgatgggcggcggaaaatagcctttgccatcactgccattaagggtgtgggccgaagatatgctcatgtggtgttgaggaaagcagacattgacctcaccaagagggcgggagaactcactgaggatgaggtggaacgtgtgatcaccattatgcagaatccacgccagtacaagatcccagactggttcttgaacagacagaaggatgtaaaggatggaaaatacagccaggtcctagccaatggtctggacaacaagctccgtgaagacctggagcgactgaagaagattcgggcccatagagggctgcgtcacttctggggccttcgtgtccgaggccagcacaccaagaccactggcccgccgtggccg

SEQ ID NO: 5870 - DNA, 518 bp, Homo sapiens
ctggacgctggcctcctccagtccatcccaaagtctccacccgccgggagctgtcacagcccctggctccgctgcctgcccacgccgggctcagagcctggagtttctcgtctctctgccaaggcaccagggctcagcagtattcagaataatcttcctccacgtagttggcagggaaccagccaacccggccatagatctcccctcgccaccagccttgctgtcccttcttgttaaggatcttgatgatgtcaccctccttgagcgacagctctgatcggtctcgggcgcagaagtcatagcgggctttggctgtaccaaaatactttatgcttcccactgctggcctgctgatggttctcttttcaggctccttgaaggggaactgcaaggtggtgtccagagacttgaagcaatcctttagagagttctgctggtaaaactccaccagctccgtaagcccccggaaagcctttttctctgtgatccggtgcagtccttctgctgtcatgatttta

SEQ ID NO: 5871 - DNA, 494 bp, Homo sapiens
ccttttgggttaagccttacattcatgaagaacctcaagggtagatttttgagagcattccaaatgaatggtctctggtcaaatgaatgaatggtcaaatgaataaatctgccctcacagagatacaaaaggaaaaggaatataattcataccatttggtttaagccttacattcatgaagtacctcaagggtagatttttgagatcattccaaatgaagtcgaatctgccctcacagagacacaagaaaggaatataattcatacactattgcatttttaataaatcttttgaaatttgcagaattagattgtattgtgtattttcggttaaatgataattgaatgtaaatatttagatgcagcaccatattttataacccagctttagcatttcttcatattttaaggaaaccccccacctccttcttttaagggcgcttcttgctctctgaaatgccctgctaaatgcttctcttaattatttgaataagg

SEQ ID NO: 5872 - DNA, 418 bp, Homo sapiens
  unsure (416): n=A,T,C or G
ctgccttgtgtgggactgagaggcaagagttgttcctgcccttccctttgtgacttgaagaaccctgactttgtttctgcaaaggcacctgcatgtgtctgtgttcatgtaggcataatgtgaggaggtggggagaccaccccacccccatgtccaccatgaccctcttcccacgctgacctgtgctccctccccaatcatctttcctgttgcagagaggtggggctgaggtgtctccatctctgtctcaacttcatggtgcactgagctgtaacttcttccttccctattaaaattagaacctgagtataaatttactttctcaaattcttgccatgagaggttgatgagttaattaaaggagaagattcctaaaatttgagagacaaaataaatggaacacatgagaaccttcnaa

SEQ ID NO: 5873 - DNA, 225 bp, Homo sapiens
ctgagccgctgagcgggcggctacttctggctctgttgagttttggaagacctttgagaaatcaacagcatcaccgggcaggtcctgagtccatggcctgatatgttaggatcacctgtgggctgctaaaagcccacagtcctagccccatctgcagagttagttggcttctgaaggctgggagaagccctagaacctgcatttctaaagctgctcaaatccagg

SEQ ID NO: 5874 - DNA, 340 bp, Homo sapiens
  unsure (292): n=A,T,C or G
  unsure (327): n=A,T,C or G
ctggggggtccgggaaaggggttgggccatgagccaggcagctccgaagcagtcactgaggccagggagcctgcacccaggtcatggggcgacctggctctcactcctggcctgggtgctcacctacagaccacttcacttcccctgtccgcagcgtcactatgtcctcataggtggctgtctggtcaatgtccaggccctcgtaggcgtgatcttcctccatgccagccttgctgtcatccttgtccagcagcaggaagataggcacgatgatgaagaggatgatcagcancgtctggatcatgatgataccatccttcagcgtgntcctctgcttcag

SEQ ID NO: 5875 - DNA, 592 bp, Homo sapiens
  unsure (523): n=A,T,C or G
  unsure (556): n=A,T,C or G
  unsure (571): n=A,T,C or G
ctgttgactcagattcggcattttaattacattgtttccaagtatgatattctgagagtgtctatagcacttagtgtctgcttcatataaactaccagttattatatatttatgatgcaagtagttttccaaatgtggtgaaagtctgagtctttttatccccatgggtaaaatctgaatctggctctctgtgtctctcagtgcttgtttattgctggtcagagagtaaattcttgataaaagctgttgacttggctctcacagtttatgcagacattggagagacaatttggttatttcaaacatcacaggatttgagtaagaagacctggttatgaaacaaggctctcataattactagttatgactgttgacaagttaccttttcttgtttacaagttatttggcctctttgaattacttgtaaaatagagatagggattctttcttgatcatggaacatcaaatgaagttatttgatgaaatactttgtcatctggaaattataaatataactaaatgntaattattatttgaaatttgggcacctcatggnggcattttctatggncatttttttcttttctccata

SEQ ID NO: 5876 - DNA, 392 bp, Homo sapiens; identical to SEQ ID NO: 67
  unsure (1): n=A,T,C or G
  unsure (287): n=A,T,C or G
  unsure (326): n=A,T,C or G
  unsure (327): n=A,T,C or G
  unsure (343): n=A,T,C or G
  unsure (353): n=A,T,C or G
  unsure (374): n=A,T,C or G

SEQ ID NO: 5877 - DNA, 118 bp, Homo sapiens; identical to SEQ ID NO: 311
  unsure (1): n=A,T,C or G
  unsure (112): n=A,T,C or G

SEQ ID NO: 5878 - DNA, 496 bp, Homo sapiens
  unsure (14): n=A,T,C or G
  unsure (29): n=A,T,C or G
  unsure (122): n=A,T,C or G
  unsure (308): n=A,T,C or G
  unsure (410): n=A,T,C or G
  unsure (434): n=A,T,C or G
  unsure (488): n=A,T,C or G
atgggaagcccganaattggttcctatanacccggttcctgatgaattcccaggccaaaagaaccaccctgacaaattttgggttctgaaagtcttattattggacaagtatttgcatagcntagaagaaggaaaagggatttactcatcctgtagggcagcttagttgtcttgggcaaaagctgtataatggtaccacaaaaacagttacatggtggagttccaattacacagaaaaaaatccattcagtaaatttccaaagttgcagactgtttgggcccacccagaattgcactgggactggacngcccccactgggttatactggatatgtggacacagagcttatgctaagctgcctgatcagtggacaggtagctgtgtaattggcaccattaagccatctttnttcttagtgcccataaaaacaggnaaacttctgggcttcccagtctgtgcttcctgtgaaaaatgaagcatagccatnggtgattg

SEQ ID NO: 5879 - DNA, 310 bp, Homo sapiens; identical to SEQ ID NO: 462
  unsure (67): n=A,T,C or G
  unsure (94): n=A,T,C or G
  unsure (255): n=A,T,C or G
  unsure (309): n=A,T,C or G
  unsure (310): n=A,T,C or G

SEQ ID NO: 5880 - DNA, 356 bp, Homo sapiens
  unsure (115): n=A,T,C or G
  unsure (120): n=A,T,C or G
  unsure (122): n=A,T,C or G
  unsure (216): n=A,T,C or G
  unsure (243): n=A,T,C or G
  unsure (326): n=A,T,C or G
  unsure (332): n=A,T,C or G
gtagcaggtggtcagtatgcgtccacagaggtctcggggatcctggggggtgtagctgatctggttcacgatggtgcggacatcagccagcacttcctcatttccactcctcacngcttngnagacctggcagcacatggagtagatgaggcaggcggtggctgcgctgtccaccccgccactcaagggcagcaaaaaccctgcctgttgacttcntcttaaaaaatcccagagccagcaggnaggtccaaggcttatctcctcctcagggctgtggtatttccactcgatgggctcagagatgggtgccagcaagtcctcgtggnaccganagggcaaagtccaccttcactctg

SEQ ID NO: 5881 - DNA, 368 bp, Homo sapiens
  unsure (111): n=A,T,C or G
  unsure (116): n=A,T,C or G
  unsure (122): n=A,T,C or G
  unsure (218): n=A,T,C or G
  unsure (232): n=A,T,C or G
  unsure (254): n=A,T,C or G
  unsure (312): n=A,T,C or G
  unsure (324): n=A,T,C or G
  unsure (329): n=A,T,C or G
  unsure (345): n=A,T,C or G
ttcagtagatgggactttcccggcagagccaatgaaaggccctattgctatgcaatctggtccaaaaccactcttcaggaggatgtcttcactggtgggccccacgcaaangtttnttcatngaggggaatctaagactttgggggctgtccagattatgaatgggctcttccacattgccctggggggtcttctgatgatcccagcagggatctatncacccatctgtgtnactgtgtggtaccctctctggngaggcattatgtatattatttccggatcactcctggcagcaacggagaaaaactccangaagtgtttggncaaangaaaaatgataatganttcattgagcctctttgctggca

SEQ ID NO: 5882 - DNA, 454 bp, Homo sapiens
  unsure (429): n=A,T,C or G
ccttgcctcagatccaaggtcactcggaagaggccatgtctaccctcaatgacactcatggagggaatgctgagagaagcattcagatgcatgacacaaggtaagactgccaaaaatctttgtcttgctctcctcattttgttatttgttttatttttaggagttttgagagcaaaatgacaacacccagaaattcagtaaatgggactttcccggcagagccaatgaaaggccctattgctatgcaatctggtccaaaaccactcttcaggaggatgtcttcactggtgggccccacgcaaagcttcttcatgagggaatctaagactttgggggctgtccagattatgaatgggctcttccacattgccctggggggtcttctgatgatcccagcagggatctatgcacccatctgtgtgactgtgnggtaccctctctggggaggcattat

SEQ ID NO: 5883 - DNA, 221 bp, Homo sapiens; identical to SEQ ID NO: 310
  unsure (1): n=A,T,C or G
  unsure (125): n=A,T,C or G

SEQ ID NO: 5884 - DNA, 294 bp, Homo sapiens; identical to SEQ ID NO: 3020

SEQ ID NO: 5885 - DNA, 412 bp, Homo sapiens
ctggggcttccattcacgactttctggtccctggcaggacagagcgggatgccaccagcttgtccaaagggaagttccaggagctcctggtgggcatcgttgtggagaatgacgcttgccccgggcgagatcaacgagttgaagcaggtggaaggggaggcttcgtgcagcagccgcaaaggaaagctgattttcttctatgagtggaacatcaaactgggctggaaaggcatcgttaaagaatctggagtgaagcacaagggattgattgaaatacccaatctttctgaggaaaatgaagtagatgacactgagaatttacaacgggaatgattttaccaacgaaagctatggcaacccaggaattgactgccaaaagaaaactgagtggggaataccctgcaggttcagg

SEQ ID NO: 5886 - DNA, 127 bp, Homo sapiens
  unsure (106): n=A,T,C or G
  unsure (125): n=A,T,C or G
ccttgcctgtgaagctcattgggatgaattgcactctaatgaagcaatacattgagtttgtggcagacagacttatgctggaactgggttttaccaaggttttcanagtacagaacccattttgnct

SEQ ID NO: 5887 - DNA, 464 bp, Homo sapiens
ctgcatacaaaaggaaatggcaacaattgaactggtagcccaggacaaccatgagcgggccaggcgcctgatgaaggagctcaaccagatgcagtatgagtacacggagctcaagaaacagatggcaaaccaaaaagatttggagagaagacaaatggaaatcagtgatgcaatgaggacacttaaatctgaggtgaaggatgaaatcagaaccagcttgaagaatcttaatcagtttcttccagaactaccagcagatctagaagctattttggaaagaaacgaaaacctagaaggagaattggaaagcttgaaagagaaccttccatttaccatgaatgagggaccttttgaagaaaaactgaacttttcccaagttcacataatggatgaacactggcgtggagaaagcactccgggagaaactgcgcaccgggaagaccgactcaagggccaacttccga

SEQ ID NO: 5888 - DNA, 410 bp, Homo sapiens
  unsure (125): n=A,T,C or G
  unsure (331): n=A,T,C or G
  unsure (333): n=A,T,C or G
  unsure (336): n=A,T,C or G
ctgccaccaactcaggactcaggggctcaattctcttctttggagcatattctgtagctcttcgaagcctgccaagtgtagcttccaaacttttaagtggtcttcttttggggggctttggttgntcgtacatttactgtgcttaattcaactttcatgcccttaataatgcctaacaagtctttttcgtattttccttttcactgtcttggctctctgaagtctccttggaagtctcctcagttcgaacagactgcttatctttcttgctacagatcacactgttagtgccaaaatatctttggatgttattttttgtccgggccaacancnctnaactgcggtacctgactgttccgtgccgaacagtgagtagcataatcgcagccgctgatgtctccgggcttcca

SEQ ID NO: 5889 - DNA, 262 bp, Homo sapiens
  unsure (121): n=A,T,C or G
  unsure (137): n=A,T,C or G
  unsure (145): n=A,T,C or G
  unsure (251): n=A,T,C or G
  unsure (262): n=A,T,C or G
aactggatgatggtcttcagcctctttctgtcccttctgtccctcacagcactagtatttcatgttgcacacccactcagctccgtgaacttgtgagaacacagccgattcacctgagcangacctcttgaaccctnggaccagnggtctcacatggtgctacgcctgcatgtaaacacgcctgcaaacgctgcctgccggtaaacacgcctgcaaacgctgcctgcccgtaaacacgcctgcaaacgctnctgcccacacn

SEQ ID NO: 5890 - DNA, 446 bp, Homo sapiens; identical to SEQ ID NO: 68
  unsure (1): n=A,T,C or G
  unsure (110): n=A,T,C or G
  unsure (186): n=A,T,C or G
  unsure (275): n=A,T,C or G
  unsure (342): n=A,T,C or G
  unsure (362): n=A,T,C or G
  unsure (387): n=A,T,C or G
  unsure (410): n=A,T,C or G

SEQ ID NO: 5891 - DNA, 544 bp, Homo sapiens; identical to SEQ ID NO: 633
  unsure (507): n=A,T,C or G
  unsure (534): n=A,T,C or G

SEQ ID NO: 5892 - DNA, 106 bp, Homo sapiens
  unsure (41): n=A,T,C or G
  unsure (91): n=A,T,C or G
  unsure (106): n=A,T,C or G
aaagtaagaaaatagttgctaccgatagggactttgccaantccaattatcttctaggattgaaaggtgcattttccccataaaaaaggcnaggaaaacccactgn

SEQ ID NO: 5893 - DNA, 270 bp, Homo sapiens
  unsure (188): n=A,T,C or G
  unsure (206): n=A,T,C or G
  unsure (224): n=A,T,C or G
atgcccgaatttcagtttggcacttacagcgaatctgagaggaaaaccgaggagtacgatactcaggccatgaagtacttgtcatacctgctgtaccctctctgtgtcgggggtctgtctattcactcctgaatatcaaatataagagctggtactcctggttaatcaacagcttcgtcaacggggtntatgcctttggtttcctnttcatgctgccccagctntttgtgaactacaagttgaagtcagtggcacatctgccctggaagg

SEQ ID NO: 5894 - DNA, 130 bp, Homo sapiens
  unsure (108): n=A,T,C or G
  unsure (111): n=A,T,C or G
  unsure (127): n=A,T,C or G
ctggagagagatcaatatgctgaacaaataaaaggagagagggcccagtggcagcagaggatgaggaaaatgtcgcaggagggccctttccccctgtgctttgggcangtnctgccattgaaaggangga

SEQ ID NO: 5895 - DNA, 329 bp, Homo sapiens
  unsure (59): n=A,T,C or G
  unsure (247): n=A,T,C or G
  unsure (263): n=A,T,C or G
  unsure (281): n=A,T,C or G
cctacgtaggccaggaggcaccaagtgagtatgtgtatgtcggctgattaaaaatgaanacagcggctgagcacagtggctcacagcagcactttgggaggccgagctgggtgggtcacctgaaggtcaggagtttgagaccagcctgggcagcactggtggtgcctcagccatggcctggaccgttctcctcctcggcctcctctctcactgcacagattctgtgacttcctatgtgttgactcanacaccctcagtgtcantggcccccaggaaagacngccaagattacctgtgggggaaacaatattgggagtaacaatgtacac

SEQ ID NO: 5896 - DNA, 240 bp, Homo sapiens
  unsure (240): n=A,T,C or G
ccagcctacaatggggatgttgtgtttctgttcaccttcgtttactatgcctgtgtcttctccaccacgctggggtctgggaggaatggacagacagaggatgagctctacccagggcctgcaggacctgcctgtaacccactctgctcgccttagcactaccactcctgccaaggaggattccatttggcagagcttcttccaggtgcccagctatacctgtgcctcggcttttctcan

SEQ ID NO: 5897 - DNA, 278 bp, Homo sapiens
  unsure (121): n=A,T,C or G
  unsure (188): n=A,T,C or G
aaatatgctgcatagactactggaccatattttgtagccattaaattttcaaaagactgggcccactgtaatacttcctccaaagtaaggtttgaagggggcctcttagattcatctctgnacattttacaactccaacaattccgcctgctcatttttctctaaaatgagaagagaaaaggcagcgntagaatatcatcaagcttcaaataaacaatgatcatttttttctcatgttggtggtataatatgtggaaacattccattgacaaatatat

SEQ ID NO: 5898 - DNA, 307 bp, Homo sapiens
  unsure (117): n=A,T,C or G
  unsure (118): n=A,T,C or G
  unsure (181): n=A,T,C or G
  unsure (194): n=A,T,C or G
  unsure (232): n=A,T,C or G
  unsure (240): n=A,T,C or G
tgggaaattttaatattaagtatgtccatgattgaaagaatcattccaggaagtgtttggtcaaaggaaaaatgataatgaattcattgaccaaacacttcctggagtttttctccnntgctgccaggagtgatccggaaataatatacataatgcctccccagagagggtaccacacagncacacagatgggngcatagatccctgctgggatcatcagaagaccccccanggcaatgnggaagagcccattcataatctggacagcccccaaaggcttagattccctcatgaagaactttgcgtg

SEQ ID NO: 5899 - DNA, 400 bp, Homo sapiens
  unsure (122): n=A,T,C or G
  unsure (385): n=A,T,C or G
ccactcggatcagctcctcgctcacctgaagccaagagaagaaggagagaagcaccaagaatcagctaacctcagaaaggtctgttttggagacacaggaggtactatttccagcagtcagnaggaagtgcacagcaccaatgcgaggaagaaaaacaatcccacttgcgcccaccagctaagggaccagggtctatgaagccccacagtggctccgacccaccatcatggcctgctggaccagggtgttgctgtgctcacacatgttcttcagaatcttgttggctgcattgtgccgggctgtcgtggtagacttagaagccactgtcagtgggtagatgagggcctgggggtggtacccgaccaatgtctgtgagaagctggngaatgaaacgtccca

SEQ ID NO: 5900 - DNA, 297 bp, Homo sapiens
  unsure (261): n=A,T,C or G
ccataggaaaaggatacagagtagagtttcatgaacctgaaacttggtggaaatttgatcctgaagaattagaaaagaggaataaacatggtgtgtctcgaaagaagattgctcagatgtttggatcgttatgaatatcaaatgtccatttctattgtaatgaattcagtggaaccatcacacaaaagcacacaaagacctcctcctccacaggggagacagaggtggggaggctctcttggctcacataatcgtgtctgngtcacaaataatcattaaattagctattttcagcta

SEQ ID NO: 5901 - DNA, 180 bp, Homo sapiens; identical to SEQ ID NO: 69
  unsure (117): n=A,T,C or G
  unsure (125): n=A,T,C or G
  unsure (160): n=A,T,C or G
  unsure (168): n=A,T,C or G

SEQ ID NO: 5902 - DNA, 113 bp, Homo sapiens
  unsure (48): n=A,T,C or G
  unsure (102): n=A,T,C or G
  unsure (108): n=A,T,C or G
ccaccctaagcccgacagtggagctccttttccagattcagagctggnatcggagcggggagacctgggatagcaagttcagcaccatcgcctccagctacnaagagngcggc

SEQ ID NO: 5903 - DNA, 113 bp, Homo sapiens
  unsure (113): n=A,T,C or G
cctgaggctggctcatcggaggcgtgagtgttcggccctgccatgcctcacatccccaggatgccgcggcgggaactgggctgtggctttcctgccctggcactgcttgttan

SEQ ID NO: 5904 - DNA, 117 bp, Homo sapiens; identical to SEQ ID NO: 71
  unsure (1): n=A,T,C or G

SEQ ID NO: 5905 - DNA, 278 bp, Homo sapiens
  unsure (104): n=A,T,C or G
  unsure (111): n=A,T,C or G
  unsure (117): n=A,T,C or G
  unsure (122): n=A,T,C or G
  unsure (126): n=A,T,C or G
  unsure (153): n=A,T,C or G
  unsure (197): n=A,T,C or G
  unsure (200): n=A,T,C or G
  unsure (242): n=A,T,C or G
  unsure (249): n=A,T,C or G
  unsure (259): n=A,T,C or G
tctgagagtagacacttgtggtatgtggagtacagataagccaggggcaggccacggcacgctccatgaaagctaggagggagtgaaatatcagtgatcatcgnaaggaangaggcncacangagnaaggcccaccctgactcttaggactancagtcagaaccaggaggaaaggttttattgctatgcgggtaggnaanaacagattttacttacatccatatagttacttaaagcccagntttctgntaaacatttntcttaatatattgagccaa

SEQ ID NO: 5906 - DNA, 113 bp, Homo sapiens; identical to SEQ ID NO: 70
  unsure (1): n=A,T,C or G
  unsure (37): n=A,T,C or G

SEQ ID NO: 5907 - DNA, 372 bp, Homo sapiens
  unsure (324): n=A,T,C or G
  unsure (347): n=A,T,C or G
  unsure (359): n=A,T,C or G
  unsure (371): n=A,T,C or G
ccaggccgcaccccttgctgtctcagcagatgggatataggaagctcctgggcttagctgtgggaagccaagtaccctcaccggcatgggacatgaggggcagctagacttcacccccttcccgcagacctgcctccagagcaaggagaattctgccttaatctgttgggctccagtctccgggttgaattccagtgtatcccactgggagtgaatggatcatgaggtgggatggccccatctggatgttctgcagatccccacatgggaggagattcccaagtagaggcagccagaattctgactccctggcagcagcagggntttcaggcaccagtgtctgtgtngttagaactcanaggaagaggcang

SEQ ID NO: 5908 - DNA, 247 bp, Homo sapiens; identical to SEQ ID NO: 72

SEQ ID NO: 5909 - DNA, 222 bp, Homo sapiens
  unsure (203): n=A,T,C or G
  unsure (213): n=A,T,C or G
aaagaccaatttgttctacctagcattttaactagtttttctgccggctatgttgaatgcacaaattctgtcacgcatgttcattcattgctacataatttggttcttctggaatatttttatgaagctctttggagtacagctatgaaaattaacaactgttaaaggaaataccttttttttttgtaattttttccttgaanaaccaaagtnttttttcaa

SEQ ID NO: 5910 - DNA, 442 bp, Homo sapiens
cctcagcatcgcctggacctgttcttgcttggggcatcccgtcggtcaccaaccatgacagcgaggcgggcctggcctgtgctccaccggagggggcttcttgcacagatgacctgctcatttcaaccccctccagaatcttctggcaggcgcagagcaacaggacgtccattttacagacgaggaaaccgagacacagggaaggttgccatctgcaacccagcccggtttttatcttgtttttctgtgttttaactttttatttagacttacagtttgaaacagtgctagaatcggaagcatgtaaagaaacctgtggaccttttatgcagatacacttaagtttttaacccatgtgccttatcactggggacctcttgcactctctctcatgatttttttcccgaactagatgaggatattgacaaagattcttgcttgg

SEQ ID NO: 5911 - DNA, 133 bp, Homo sapiens; identical to SEQ ID NO: 312
  unsure (6): n=A,T,C or G
  unsure (128): n=A,T,C or G

SEQ ID NO: 5912 - DNA, 303 bp, Homo sapiens; identical to SEQ ID NO: 631
  unsure (9): n=A,T,C or G
  unsure (13): n=A,T,C or G
  unsure (15): n=A,T,C or G
  unsure (17): n=A,T,C or G
  unsure (112): n=A,T,C or G
  unsure (117): n=A,T,C or G
  unsure (119): n=A,T,C or G
  unsure (120): n=A,T,C or G
  unsure (123): n=A,T,C or G
  unsure (145): n=A,T,C or G
  unsure (268): n=A,T,C or G

SEQ ID NO: 5913 - DNA, 165 bp, Homo sapiens
  unsure (17): n=A,T,C or G
  unsure (116): n=A,T,C or G
  unsure (147): n=A,T,C or G
aggaaaaatcagcagancacaagatccatgggtcttacagaagtctccctggagaagggaaatttgagctggcatgaagaatgggcagaatttggtgatttggaggtcaaggaagntctaaaaaaaccaaaaggaagaaagaggagngggtcactgggaagctca

SEQ ID NO: 5914 - DNA, 150 bp, Homo sapiens
ctgtgttttgggaaaggtgcaacgagctccaggacatagagaagattatggctcagattgaaaggggagaggcgagaattcaaagaagaataagcatcaagaaagcacttgacacaaagaatggaccggtacaaagcaccttttcatcag

SEQ ID NO: 5915 - DNA, 290 bp, Homo sapiens
  unsure (146): n=A,T,C or G
ccacttacctgcacacctgtcctcttgagactgactcagatcctccagaaccttcaaaatggcctgctgctccagcccctatcagctctccttcccctgtgacccttttgtggaaaggagtgcttccttcctgatttcatatttgngaatctttactcttccctgctgaggtgacagaaagaatcagaatgtctcgagtgcctgtgctgtgtcatcacccacagtggggagagacaggcaggaaaacaagctccgacatccccggtagccatgggatggcgatgcacagg

SEQ ID NO: 5916 - DNA, 438 bp, Homo sapiens
aaaactctcacatggcaacaatcatggattattacgttttatatctcctcaggaaaacatagcaccaaacattaggagtgctatggcttcctatagagaacttccatctttggtcacagcgttaagagctctgggtttcacagcctcataagccctctttgaaatgacccatacaaatgtcttttctaatgcatacatacctttttaatgaaactgatccagttgtcctgtcagccctacataacaatagtataaaagtaaattttacatttccagagatgagtgtacagtgagtgaacatgaatgagtccctagaacgagcctgagttaactctactacaaactgcttggttattagcaacccacaagggttacaatataaaggcaaagcaaatttgcatgattcaagaagatctaggagaattttcaaatcttcac

SEQ ID NO: 5917 - DNA, 373 bp, Homo sapiens; identical to SEQ ID NO: 6

SEQ ID NO: 5918 - DNA, 361 bp, Homo sapiens
atcatggccgcagccgctctggggcagatctgggcacgaaagcttctctctgtcccttggcttctgtgtggtcccagaagatatgcctcctccagtttcaaggctgcagacctgcagccttcacttgggttcatgtaggaacaccaagtccctttcaaagcaccacatcttcctctaatcaatatttcttggagtccctagggaatgtcttacatgcattcaaacaatcaccatttctggagatacactacagggtcaccataaactctgctacccttaggttccatcactatggaagctgagtttcaccagaaggcacttttgtcctccattacgaccagcaaagccagctaagccacag

SEQ ID NO: 5919 - DNA, 203 bp, Homo sapiens
ctgctccaggaactgctcctgaggaggcccctgggcctctgcctccgccgccaaccccatcttctgaggatccaggcttttcttctcctctggggatgccagatcctcatctgtatcaccagatgggcctttcttctcaaacacatgcaggatgtgagagtcctcctcggtcacctgctcatggagttgagggaattatctgg

SEQ ID NO: 5920 - DNA, 425 bp, Homo sapiens
aaaataggtgatcttgggcatgtaacaaggatctccagtccacaagttgaagagggcgatagtcgttttcttgcaaatgaagttttacaggagaattatacccatctaccaaaagcagatatttttgcgcttgccctcacagtggtatgtgctgctggtgctgaacctcttccgagaaatggagatcaatggcatgaaatcagacagggtagattacctcggataccacaagtgctttcccaagaatttacagagttgctaaaagttatgattcatccagatccagagagaagaccttcagcaatggcactggtaaagcattcagtattgctgtcccgcttctagaaagagtgcagaacaattacgaatagaattgaatgcccgaaaagttcaaaaattcctttacaaaaagaactcaagaaaca

SEQ ID NO: 5921 - DNA, 399 bp, Homo sapiens
  unsure (392): n=A,T,C or G
aaaagcatcagcagtttatctcatgcccactaaactatcctgcctcggtaccctttgttcatactttctgctctgtgtggaatgcccttctttcttcccctgttctttctcttagacccaaggggttctcagccttatttctgcctctcccatctctgatttactttcattttctgtatcgatttctcaaaaaatactttcttgattctttcatcatcccttttcccaccctacccccggttcctctttccacattataatctatgactgcctctctcacctaactgccagtattagcttttcaggacaggaactggttttacacattttggtattccagcatctagcataatgcctgacacttagctgaataaagggagtaaataaaacanatttggt

SEQ ID NO: 5922 - DNA, 334 bp, Homo sapiens
  unsure (134): n=A,T,C or G
  unsure (203): n=A,T,C or G
  unsure (204): n=A,T,C or G
ctgctgccagtggaatgctgggataaccccagtgtcgggggtcctggggcagcctgtgtactgctggatgcttgctttcaagtactctgctggggtaagactctggggcagtttccatccctttcttgggcttnagcttgctggactggccctgagaactgggaggggatggcttcatgaagtcattttgatgggggatgagnnatagttgctgtagaggaagaggatgagagagctgcttggcctctggaaggtgggaggagctgtcgcaggctgcacaggggctctgaggtcgagttcgtttagttcattgattaagcagtctaccaggtgg

SEQ ID NO: 5923 - DNA, 177 bp, Homo sapiens
cctccccaaccacgtggaactgttcagccggaacttgaggcactggacaactgtctcgatgtcagtgacgagccgggccagatggatatacagccggtcacccatgggaaagatcttctggaaagtccgtggtcaccatctgggcctggatcccgaagcgcctgtctgcagcgatgg

SEQ ID NO: 5924 - DNA, 372 bp, Homo sapiens
  unsure (364): n=A,T,C or G
cgcgggttcctcttgtgcaaaacggggtggcactccaatcgcctgcttggtgattgtggcccccacacacctgtttctacagcgcttaggttcgaacagtaaccctgtaaactaggcactgcttgtcccccgctttactggtgggaaacgggctcggagagaataaatgagctgccctaagcgactgggacagaaccacagttctcagccgggctttctgagcccacgctgccgccccagcagggatcaaatcacacagtgtgagataagcctcaagagcgggtggccttatgctgccactgagaactgattgggttcagttgcctcatcaaaatccctaagcatggttttgttttgtttttgnttttgttt

SEQ ID NO: 5925 - DNA, 424 bp, Homo sapiens
ccttttcaggagagtttagaatctcatagtaaaagactgagaaatttagtgccagaccaagacgaattgggtgtgtaggctgcatttctttcttactaatttcaaatgcttcctggtaagcctgctgggagttcgacacagtggtttgtttgttgtctccagatgccacttcagaaagatacctaaaataatctcctttcattttcaagtagaacaccttactttctggttgtgtagcattgggaataagatatttgtccaacagctccagaacatcattgcagatgtcctgcagttctgcctctatcttctcacggtactctttgcccatctgctgcttcttctcattcctctctgttttctgctcaatgctggagatgacacgccaggaagagcggcgggcgcctaccacattcttgtaggc

SEQ ID NO: 5926 - DNA, 371 bp, Homo sapiens; identical to SEQ ID NO: 74

SEQ ID NO: 5927 - DNA, 314 bp, Homo sapiens
  unsure (131): n=A,T,C or G
  unsure (139): n=A,T,C or G
  unsure (241): n=A,T,C or G
  unsure (249): n=A,T,C or G
  unsure (266): n=A,T,C or G
  unsure (306): n=A,T,C or G
  unsure (310): n=A,T,C or G
aaaaaaggaaacagaaaacagaagaaatcacttaaggagagctgtcattttctattggtgaggattcctgatcttggggaggttctggaaagttcgtctctgtttcttcttcttcctcttcttggattggnaataattncaatgcttcttcattctttggttgggaagatgtttcagttagcccaaccacttcttcttttatttcaatagtctgttcttttttttcttctgctgacagganaactatgntagatttgggtctggancacgttcttttccattcattctcaacgatgccagctattncaanttcc

SEQ ID NO: 5928 - DNA, 310 bp, Homo sapiens
  unsure (122): n=A,T,C or G
  unsure (137): n=A,T,C or G
  unsure (266): n=A,T,C or G
  unsure (310): n=A,T,C or G
gaaaaagccagagaggagagctggggtccacctcgagaatcaaggccatcagaagaacgtgaatgggacagagaaaaagaaagggacagagataatcaagatcgggaggagaatgacaaggnaccctgagagagaangggacagagagagagatgtggatcgagaggatcgcttcagaagacctaggtgtgatgctctaattaaattatttgtagaggccgggcgcagtggctcatgcctgtaatcccagcactttgggagggcanatcacctgagctcaggagttcgagaccagcctggacctccgccn

SEQ ID NO: 5929 - DNA, 352 bp, Homo sapiens
ccatggtcacctgggtggcagcactgttacctggaaactgccactgcctgctcttctgtccctttgcccctttcgtggagcttttctgccagacgccactgagacagatcacaaggtattagaaaggtcatacccaaaggtaggccatatgcatctagaacttcagcccagattttgtggatgggtggaagtgtttcttcctgtgctgaggctagctattgcagagattcttttccacttgccccacgtctctgcctctggacttactgttcagggccagggtgggaggcaggggcacgtgggaaagcactgttccggttttgttctcatgccgagtctgagcacgtgccag

SEQ ID NO: 5930 - DNA, 315 bp, Homo sapiens
aaaaaaccatcatcagagatcagtgtattctagattaagtaaatctggaaagagatgagccctttctaagagagaagaatctcatagctgctttgattgctaggggcatggtggaaaaaggagtgaacctaccatgaaagaggtaatgagaagccagtctatttattaatgaacttttcaaggctacatgtggactgtcatgacaggccagaatttggaagccctaattagtcataggagagtctgtacgcacccactaactcttcccatggacctgcaccgagtgtacctgggcactgtcctaaaaaggtgtgg

SEQ ID NO: 5931 - DNA, 293 bp, Homo sapiens; identical to SEQ ID NO: 75

SEQ ID NO: 5932 - DNA, 162 bp, Homo sapiens
  unsure (105): n=A,T,C or G
  unsure (117): n=A,T,C or G
  unsure (140): n=A,T,C or G
ctgacataatggtaaccagtcagaggagggcataactatgaaactggacaccttggttgtcaggttagaaggatggggtgtagggttggtaagaaaagaattcanggaagagcatcnatcaggattatgaagaatttcgncttgagaaattacagaggattt

SEQ ID NO: 5933 - DNA, 157 bp, Homo sapiens
aaattagtattggttaacagatttaacgtagaaaatggacatataaagaatacaaggataaatgtctacatgtaataatggatggtagtgatataatgcatttttgtcatcccatgctgaattcagtaaaaaataaagctaatgacttggagctttt

SEQ ID NO: 5934 - DNA, 228 bp, Homo sapiens
cttgaagcaagtggagactataaatattcaggaagagatagtttgatttttttggttgatgcctccaaggctatgtttgaatctcagagtgaagatgagttgacaccttttgacatgagcatccagtgtatccaaagtgtgtacatcagtaagatcataagcagtgatcgagatctcttggctgtggtgttctatggtaccgagaaagacaaaaattcagtgaatttt

SEQ ID NO: 5935 - DNA, 354 bp, Homo sapiens
ctggcactgactgctcgacttttccggccacggctcatcatagctggcaccagcgcctatgctcgcctcattgactacgcccgcatgagagaggtgtgtgatgaagtcaaagcacacctgctggcagacatggcccacatcagtggcctggtggctgccaaggtgattccctcgcctttcaagcacgcggacatcgtcaccaccactactcacaagactcttcgaggggccaggtcagggctcatcttctaccggaaaggggtgaaggctgtggaccccaagactggccgggagatcccttacacatttgaggaccgaatcaactttgccgtgttcccatccctgcaggggggc

SEQ ID NO: 5936 - DNA, 265 bp, Homo sapiens
  unsure (1): n=A,T,C or G
  unsure (204): n=A,T,C or G
ngtccacgctggtctcaagcaatcccgcccaccttggcctcccagagtgcttggattacaggcgagagccaccacgcctggcccccacctttcttttaggtcttaaagccatttgtataggcagtgagcctgttcccatcatcacacagtattttgcatggatggtggcacagagcctttataggaatatggatttttttttgnttttttgttccctcagcataggagtcatttgggaacctggcattatacgtaatgatttttt

SEQ ID NO: 5937 - DNA, 132 bp, Homo sapiens
ccatatgtgtaacctgtaccaaactaagctgttttaaatttacagactacaagcaactgaacccaaatgtctaaatgtacattcttttctgtactacatttcagctaatattgcagaactaatgacaatttt

SEQ ID NO: 5938 - DNA, 244 bp, Homo sapiens
cctgcagagccatggtgaccaaagtcttcccgcttctgccacgtcccttctgcctaccccacctccccatcaagtccctcaaaaagaagtgctcactggggtagcatgctccttgctgtccaggacagtcaccgtggcttcacagcactcttcctgggaggccctggctgaaccatcccgaataaccccagcaggggccacctgccgatggggctgggctgccaggagcagtgagacaggtcag

SEQ ID NO: 5939 - DNA, 339 bp, Homo sapiens
  unsure (1): n=A,T,C or G
  unsure (93): n=A,T,C or G
ntttttctttaagagacagggtctcactctgttgctcaggctggagtgtagtggcgcgatcatagctcgctgcagcctcaaactcctgggctncagtgatcctccctcaccctcccgagtagctgggactacagtcacctgctaccacacccagctaatttttgtattttttgtagagacggggttcaccacattgcccggctggttgcaaactcctgggctcaaaccatctgcctggcttggcctccaaaggctaggattacaggcatgagccactgtgcctggccataaagcattatactttgtacctatactaaaaggcatctgagatactttcac

SEQ ID NO: 5940 - DNA, 111 bp, Homo sapiens; identical to SEQ ID NO: 630
  unsure (74): n=A,T,C or G

SEQ ID NO: 5941 - DNA, 195 bp, Homo sapiens
  unsure (45): n=A,T,C or G
  unsure (117): n=A,T,C or G
  unsure (162): n=A,T,C or G
  unsure (190): n=A,T,C or G
aaacttttgagttgtagtcagaactgttgttggactgcatagttntcaaaagttttggtacatttctgactttagaaatctggggtaggaatccctttcatatgcatatagactatnttctgagcttttcaacatgttaagtggttctaatgtctgtatagntctttgccactgcatgtattgaaaggantacat

SEQ ID NO: 5942 - DNA, 374 bp, Homo sapiens
  unsure (1): n=A,T,C or G
  unsure (229): n=A,T,C or G
  unsure (277): n=A,T,C or G
  unsure (295): n=A,T,C or G
nggccgatgtctgcaccaacaaaaacctgtccaaggtgcctgggaaccttttcagactgattaagagactggacctgagttataacagaattgggcttctggattctgagtggattccagtatcggttgcaaagctgaacaccctaattcttcgtcataacaacatcaccagcatttccacgggcagtttttccacaactccaaatttgaagtgtcttgacttatcgtncaataagctgaagacggtgaaaaatgctgtattccaagagttgaaggnctggaagtgcttctgctntacaacaatcacatatcctatctcgatccttcagcgtttggagggtcttccagttgcagaactctacttaagtggaaat

SEQ ID NO: 5943 - DNA, 274 bp, Homo sapiens; identical to SEQ ID NO: 313
  unsure (1): n=A,T,C or G
  unsure (243): n=A,T,C or G

SEQ ID NO: 5944 - DNA, 425 bp, Homo sapiens
  unsure (17): n=A,T,C or G
  unsure (283): n=A,T,C or G
  unsure (374): n=A,T,C or G
  unsure (399): n=A,T,C or G
aaagcagtaagtcttangtatacttacagtatgtctgtaagtcttatatactcagagaactccagccctgcctccttctagctgtgtgaccttgggcaagtgtctcaaattctctgtgcctcgaattatctgtgtctcaaattatctactctgtgagataaggagaataccacctaactcccagcatgttgggaggattaaagctttcttacatgctctactgcatgaacagggcccagaagggcatctgtgttaggccccatccaagtgtttctgatctggntgacccccagaccccactgagaagcaccacagtgtgctatcaggtacctgtctaaaccagggcagaggaacgagcacacccctaccacagncatcaaagggagcggcgactgaagnaagaagcatcttctagagactgatat

SEQ ID NO: 5945 - DNA, 359 bp, Homo sapiens
  unsure (161): n=A,T,C or G
  unsure (296): n=A,T,C or G
ctggaagaggtgggagcccgcacggtcacaatacatgcagacacagagcagcaatacgaaacagaacagctcagagcggtcagctcctcagcagaagctgcgtgggccgccacttcccctttctgcaatcaccccatgatgtctccaccccacctcacatncagatggggctggatggcagagcagatgaagcctgctctgtggcggggcagcctaactgaaatgcacacctttatgggggaagtggacggacacctcacctcctcatgtttcacaccgtggactgcacttgagtnccagctcttcaccacatccctaggagtcttaagaggaaatcagtctgatttcttcagacagga

SEQ ID NO: 5946 - DNA, 179 bp, Homo sapiens
cctccagggtatctgcggtttccaattcacagcactacccacaccgtgggagtgggggtgtgcaccagtaccgactccagccactgcaagggtcaggagtcaagactcagacgggactttcctagggcttctggatttgggcaaacagaactgaatgagcccatagctgcttcttccag

SEQ ID NO: 5947 - DNA, 175 bp, Homo sapiens
  unsure (91): n=A,T,C or G
ccagtgagctggacctcatgccctacacacccccacagtctaccctaaagtctgccaaaggcagtgcaaagaaggaaggctccaaacgganaatcaacatgagtggctacatcctgttcagcagtgagatgagggtgtgattaagcccaacacccacactctcttcggggagcta

SEQ ID NO: 5948 - DNA, 300 bp, Homo sapiens
  unsure (139): n=A,T,C or G
  unsure (144): n=A,T,C or G
  unsure (218): n=A,T,C or G
  unsure (287): n=A,T,C or G
aaaacaacacaagaagaagaagtcacaaagcaattgaaatgggagcatccgcttggagaattaagacagggtgctcctgagacagacttccaagacagcttctttgaagtgctgtgtgggggtaaatattcttcagcanaaganggcacaggtaagggccccgtgaaacacagttcttaatatcatctttatcttcccttaggataatataccccaanatactttgcatctataagatgtatacatcactgcagttcacgaaacacagtctgctgccaatacatatncatgttgcatggc

SEQ ID NO: 5949 - DNA, 256 bp, Homo sapiens
  unsure (182): n=A,T,C or G
  unsure (250): n=A,T,C or G
  unsure (255): n=A,T,C or G
tcgatgtaaaatgctcaagtttctgatgtttgacatggggctgcggaaacagtatcggccagacatgattattttacagatccagatgtaccagctctcgaggttgcttcatgattaccacagagacctctacaatcacctggaggagcacgagatcggcccacctctacgctgcccctggncctcacctggtgctacagtccctggatcgaccaagcttattattttttagacaagattactgcgcgcntactng

SEQ ID NO: 5950 - DNA, 179 bp, Homo sapiens
cctcctttgggagcacacgaggctaccatggctgcagcaagaagccctggtcttcctgtttacgttcttgtcagaactcgtgccttttgagtctccccggtacctgcaggtgcacattcttcacccacccctggttcccggcaagtaccgctccctcctcacagactacatctcattgg

SEQ ID NO: 5951 - DNA, 246 bp, Homo sapiens; identical to SEQ ID NO: 632
  unsure (1): n=A,T,C or G
  unsure (5): n=A,T,C or G
  unsure (198): n=A,T,C or G

SEQ ID NO: 5952 - DNA, 308 bp, Homo sapiens
  unsure (255): n=A,T,C or G
aaacagctctaaatgtcagtactcacagtggcatattacaaagtaataaacagtgcacacttgagggcaaaccgcatattgagctatagaagagctcactgtgattaagatgagatcaaacatcatagcagaacattagcaaattttatctgaattctgtaatggacatccatgctgcaataacattagaaaagcacgggagcctattccaaaccagcgagaacagttttgtgcaaagagtgggtctttgtgtgnttgaactcccaccacgtaagggcaaactcgatatgcatgctaatgacctacaa

SEQ ID NO: 5953 - DNA, 263 bp, Homo sapiens
  unsure (165): n=A,T,C or G
  unsure (179): n=A,T,C or G
  unsure (198): n=A,T,C or G
  unsure (233): n=A,T,C or G
  unsure (243): n=A,T,C or G
  unsure (258): n=A,T,C or G
  unsure (261): n=A,T,C or G
ccacaaagtcttctcaagtgaaagtaggggagaagcggaaagctgctgatgagacgctgtgccaaacaaaggtattgctggacatcttcactggggtgcggctttacttgccaccctccacaccagacttcactcgtctcaaacgctactttgtggcattcgacngggacctggtacangaatttgatatgacttcgnccccacgtgctgggtagcagggacaagaaccctgnggccagaggntccagatgatttggnatnat

SEQ ID NO: 5954 - DNA, 194 bp, Homo sapiens
  unsure (146): n=A,T,C or G
aaaggagcatctcagttacgtgtggcggacaaaaaaaaggagcagattgtgacagaccattcccatcggccaagtggtcgaacccgacatccaagacccagcgagcagccaagctcagcgcaacctccggcttctcgctctgactncaaaagggtgagcacgtcgccctcgcgcacgggccttttacattgcgg

SEQ ID NO: 5955 - DNA, 274 bp, Homo sapiens
  unsure (1): n=A,T,C or G
  unsure (2): n=A,T,C or G
  unsure (145): n=A,T,C or G
nncgaggtctggcttgcctgctggcctgcttcctggagataggatgctcagacccaccgctgctcttcaggggtcgtggaaggaattaatgcacttccttctgtcccccaatctctgtcctttacgtgtctctggagctgagcangtattctttttctttcttcatctcagtagagcttttacttttatccagcatttcttagctcggttggcaaactggatatttatgcacctgcatttcacaatccatctccaccgattattcctggacctg

SEQ ID NO: 5956 - DNA, 184 bp, Homo sapiens
gtccaggaaagaaagcaatggagtgctcactcttatgatgcaggcaaaactgaaaatgtgtttttcttctcagggaagtgataagcctctcctgaacttctgcaattctgtgtttgcatgggcttggtatgcctgagctatttctacagcggttaaagtcctgatatgtcaagttgcctctttc

SEQ ID NO: 5957 - DNA, 201 bp, Homo sapiens
  unsure (95): n=A,T,C or G
  unsure (113): n=A,T,C or G
  unsure (142): n=A,T,C or G
  unsure (161): n=A,T,C or G
  unsure (166): n=A,T,C or G
ccaatttggggtatggtcctgtatgtttttgtaatgtcataatgggagctgcagtgttgtgcaggtatcaaagagcttcccagttttcatgttantaaacttggaaataattntctcatgcacctgatttttagcttctatnttaacaccgattattcttnaactntatgggagtaaatacccatctgtcattaactaaaa

SEQ ID NO: 5958 - DNA, 192 bp, Homo sapiens
gtctggggcccgtggggtcagagccaagcttccatgatcatttgatgacttccaggcaggtgggggtcggagatctccagtaatgagtgacacgtctggggtttccacagctctgactcaggtggtgggagagccacgtggaagggagagccaggcaataagtccgcataatgtgtgaggtggggagccagg

SEQ ID NO: 5959 - DNA, 272 bp, Homo sapiens
  unsure (1): n=A,T,C or G
  unsure (8): n=A,T,C or G
  unsure (152): n=A,T,C or G
  unsure (172): n=A,T,C or G
  unsure (191): n=A,T,C or G
  unsure (217): n=A,T,C or G
  unsure (233): n=A,T,C or G
nggccgangtctgactctagcccaaaagggaacaggagattctggagctgaggggagacccagcaaaggaacaacctggaagccttaccccacagccacaaaacctccccaatggaggaacaatctctaaaacttgattctttagagcccangctgcagcgggagctggacnggctacaggcagccctganacagacagaagccagggagattgagnggagggagaaggccangacttggactctcctagcgcagaccaagccagtgcagag

SEQ ID NO: 5960 - DNA, 235 bp, Homo sapiens
  unsure (94): n=A,T,C or G
  unsure (148): n=A,T,C or G
  unsure (169): n=A,T,C or G
  unsure (218): n=A,T,C or G
  unsure (230): n=A,T,C or G
gtctggagcagcagatagaagggacagggttgcacttataacaccactatcctcccagccctggttttatcatcatcatcgagaaaaatacaantaatcagcagtgatcaaaggtaagctaaacattccatttaactaacttaaatgngacctggcgtgccgtgccatnctataaatgacataacagaataagactcacttttaattccacctctggncaattcaagaanaaaac

SEQ ID NO: 5961 - DNA, 278 bp, Homo sapiens
  unsure (143): n=A,T,C or G
  unsure (248): n=A,T,C or G
ctggcggtagaagcgcccggttctcctcggtgttctcggtgccaatggactgcagcccgcttggcaatgctcccagtggactcatctgcagccaggatgcccttgccaggtgccacgatgcggtgagcgatgtcagacagctncttcttctgctccggggtcagtgctggatattggtagggcatggtgctggtagtagcaagttccggtgcttcagaggaaattcttcttggaaatccagacggagnccttggttgtcaagagaaataaatctttgg

SEQ ID NO: 5962 - DNA, 268 bp, Homo sapiens; identical to SEQ ID NO: 314
  unsure (154): n=A,T,C or G
  unsure (193): n=A,T,C or G
  unsure (249): n=A,T,C or G
  unsure (256): n=A,T,C or G

SEQ ID NO: 5963 - DNA, 212 bp, Homo sapiens
cctcctcatcaggacacattccccatcccagaggggggtcggcactcacgattgtgatgttggctacatccttgacaaagccgatggcctttccaggttggaacttgcaataaccatccttgccctggtaggggtaggtgtcttcacccatgatccccttgttgtacaggatatactcgaaagcctggctggggagacccccttggcagccg

SEQ ID NO: 5964 - DNA, 207 bp, Homo sapiens
  unsure (190): n=A,T,C or G
  unsure (197): n=A,T,C or G
ctgagggtctaggctgaggactggatgccaatccagcctgggagggccacacggcctggtgacacagaggtcaccccaaggggagaccaatggagggcacagagagggctctgggtctaggctgcagctctgtggcctgtgctgggtcatgaggacatggggacacagagggacgggtgaactgggtgangtgccanaatccaccct

SEQ ID NO: 5965 - DNA, 221 bp, Homo sapiens
aaacttttgagttgtagtcagaaactgttgttggactgcatagttttcaaaagtttttggtacatttctgactttagaaatctggggtaggaatccctttccatatgcatatagactattttctgagcttcttcaaaacatgtttcagtgggttcctgaatgttcctgatgatagtctctcttgtcgaactgtcaatgttaatctctctaggggactggtg

SEQ ID NO: 5966 - DNA, 211 bp, Homo sapiens
ccaccagaagcctgggaccacaaaggctactgctgaatagaagtaaacagttcatccatgatctcacttaaccaccccaataaatccgattctttattttctcttcctgtcctgcacatatgcataagtacttttacaagttgtcccagtgttttgttagaataatgtagttaggtgagtgtaaataaatttatataaagtgagaattaaa

SEQ ID NO: 5967 - DNA, 206 bp, Homo sapiens
  unsure (169): n=A,T,C or G
ctaggctgccatcgggccggtgcagatacggggttgctcttttgctcataagaggggcttcgctggcagtctgaacggcaagcttgagtcaggacccttaattaagatcctcaattggctggagggcagatctcgcgagtagggtacaaggcactatgaaatgatctantttcgtgggtgaggggctgaagggcctatgatgcacg

SEQ ID NO: 5968 - DNA, 212 bp, Homo sapiens
cctgggatgcagggagaaaggctgaccacaagttgagacaagatacagaaacaaacaaaaacagcagaaagtccgatcgatggtgtaagtgttgtgttcactgcttagggtgcaggtgagcttgatcgaggctcccagtaaggcagatgtagacgggggctgagtcagcacaggcagagcacagagacctgtggagaaaatgaagggcaata

SEQ ID NO: 5969 - DNA, 224 bp, Homo sapiens; identical to SEQ ID NO: 635
  unsure (201): n=A,T,C or G
  unsure (216): n=A,T,C or G

SEQ ID NO: 5970 - DNA, 209 bp, Homo sapiens; identical to SEQ ID NO: 76

SEQ ID NO: 5971 - DNA, 220 bp, Homo sapiens; identical to SEQ ID NO: 634

SEQ ID NO: 5972 - DNA, 202 bp, Homo sapiens
  unsure (113): n=A,T,C or G
gaaggaggggaggaaagggagagaggaagagggagagtgaaggaggggaggaaagggagagaggcagagagggggaaggagagagggaaggaaggagagattgagagacaganaaattcctaaggggagctgtcaggtgggctggacatgggccccaggctgcactgctttatccctttgctgtaggaaagtcaagccagtt

SEQ ID NO: 5973 - DNA, 200 bp, Homo sapiens
  unsure (118): n=A,T,C or G
  unsure (190): n=A,T,C or G
  unsure (199): n=A,T,C or G
ccacccagttgctggtggacctggcagagggctgccacacacaccacttcaacagcctgctggacatcatcgagaaggtgagagccgttgtacccggggccgggtgctagcgtgccanagctccgtgggcagcaatggcctctgggccctctgtcctcctcttcgagtgaccggatggctgtgttcgtangtgaggctnc

SEQ ID NO: 5974 - DNA, 200 bp, Homo sapiens
ccatgtcattgtcccacttataccgggatggggaaggccgcattgatgatgatgatgacgagcgggagaactttgagatcactgactgggatctccagaatgagttcaaccccaaccgacagcgccactggcagaccaaggaagaagccacctacggggtgtgggcagagcgagactcggatgatgagaggcccagcttt

SEQ ID NO: 5975 - DNA, 181 bp, Homo sapiens
  unsure (181): n=A,T,C or G
aaacagtgtttctgaaattggatggctggctaatagacactgaatcacccggagtgcttatcttaaaattgcagatttagggagcctgccaatttaacagtctcatcaggtgattcttttcaacagtaatgtttgagaattactgggttaaattgtgggaaagggtccagattttacctcn

SEQ ID NO: 5976 - DNA, 213 bp, Homo sapiens
  unsure (209): n=A,T,C or G
ccaggctggtcttgaacttctgacctcaggtgatcccaccttggcctcccaaagtgctgggattacaggcatgagccactgtgcccagcttaagatctctgttttaatgttaatgctggtcagttgtgtctggattccagagggaggaaggtagaatgaggcatgttgacacctccccttcccatcatggcctaagctggtctttttangtta

SEQ ID NO: 5977 - DNA, 105 bp, Homo sapiens
  unsure (18): n=A,T,C or G
aagagaaccaaacatcangggaaccaaagggtcacaatccccgtggcactggagaatacaaatatctttattagaccaccgataggaccctgagaaaacccttcc

SEQ ID NO: 5978 - DNA, 217 bp, Homo sapiens
  unsure (103): n=A,T,C or G
ttccgcgccgccacaatggtgcgcatgaatgtcctggcagatgctctcaagagtatcaacaatgccgaaaagagaggcaaacgccaggtgcttattaggccgngctccaaagtcatcgtccggtttctcactgtgatgatgaagcatggttacattggcgaatttgaaatcattgatgaccacagagctgggaaaattgttgtgaacctccaagcag

SEQ ID NO: 5979 - DNA, 226 bp, Homo sapiens
aaagaacttgcccaacatctcagaacaaatggaggaatcactattgaaacctaggcaatctgactcaggaggccacagtcttatatactgcattagaaagctttagagagccttttctttttctttgagaccgagtctcactctgttacccaggctggaatgcagtggcatgatctcagctcactgcaacctctgcctcctgggttcaagcaaattttctgcctta

SEQ ID NO: 5980 - DNA, 201 bp, Homo sapiens; identical to SEQ ID NO: 315

SEQ ID NO: 5981 - DNA, 396 bp, Homo sapiens; identical to SEQ ID NO: 77
  unsure (211): n=A,T,C or G
  unsure (213): n=A,T,C or G
  unsure (231): n=A,T,C or G
  unsure (244): n=A,T,C or G
  unsure (325): n=A,T,C or G
  unsure (334): n=A,T,C or G
  unsure (393): n=A,T,C or G

SEQ ID NO: 5982 - DNA, 202 bp, Homo sapiens; identical to SEQ ID NO: 78
  unsure (168): n=A,T,C or G
  unsure (178): n=A,T,C or G
  unsure (199): n=A,T,C or G

SEQ ID NO: 5983 - DNA, 183 bp, Homo sapiens
  unsure (160): n=A,T,C or G
  unsure (166): n=A,T,C or G
  unsure (180): n=A,T,C or G
ctgatttctgttgaaaaagtaaaaggtgatccctctaagaaagaaatgaagaaagaaaatgatgaaaagagtagttcaagaagttctggagataaaaaaaatacgagtgatagaagtagcaagacacaagcctctgtcaaaaaagaagagaaaagatcgncctganaaatctgaaaaaanaag

SEQ ID NO: 5984 - DNA, 219 bp, Homo sapiens
  unsure (205): n=A,T,C or G
ctgccagacccgccaacgatcacagcgtccccctgctgcaacactgtggtgctgcccagtggcactccttctccaggacccacaacgtctgtgaactctgtgtcaaccagacctccgggggcatgaagccgagctcggtcagcgtgccacagtgcagcttttttgaaatggcagcagctctggattctttctacctcaaggagcnaaacttttattaat

SEQ ID NO: 5985 - DNA, 202 bp, Homo sapiens
  unsure (182): n=A,T,C or G
cctaacacccaagctcttccttgcagaagagctgagatgctaaggagaccatctggagtgtcataataagcccttgggatttgctgagctcccacatggctttcttcaaccacctggcccactttcttcaaccacattccactttggaatgcggtgtctttaaggcaccaagtgatcttaanaatgggctctgtttttgaat

SEQ ID NO: 5986 - DNA, 220 bp, Homo sapiens
  unsure (218): n=A,T,C or G
aaatttcccctttcctactacttccacagtgactctgaccttcccgtcgtaagttctctcagccgggctaaatttggcagtttctggttccatttcaagcaattctcgcacaggggaacggggtacatttgcagaaaacttttctattagtggccgcatcatgggatagtacacctgccagactgtctccagtgacatcccactatccatgtaatggnac

SEQ ID NO: 5987 - DNA, 209 bp, Homo sapiens
  unsure (199): n=A,T,C or G
ctggaaaagaaacctatctcagggatatatgacattatgccgagaccgggttcatgcactgattgatttgacaggtgaactgctccatgttgtgggaccagggatgtgaagcaagtacatcaaccttgaaacgcgcgcagttggtttgggagagccggcctgaggaagcccctgccccaaggctgcccacagagggaangattgtgtgt

SEQ ID NO: 5988 - DNA, 118 bp, Homo sapiens
aaaaaaataattcgtaaatgttacagtgttggtgttaaaacacaatatattatgatactcaagtaagaactcagtacctgaaaacaatgacaaaacatgccatgggatgtttatgctt

SEQ ID NO: 5989 - DNA, 182 bp, Homo sapiens; identical to SEQ ID NO: 317
  unsure (152): n=A,T,C or G
  unsure (174): n=A,T,C or G
  unsure (180): n=A,T,C or G

SEQ ID NO: 5990 - DNA, 127 bp, Homo sapiens
ctgtcaccttattgggggaaaaatgcctgaaaattagggggcacttcaagtagatagcttctatttcctatatttgtcttatatacaagtatttgcttttatcaaaataattccaataaagcatttt

SEQ ID NO: 5991 - DNA, 241 bp, Homo sapiens
  unsure (226): n=A,T,C or G
aaaaaattaattacttatttttggtggagaccagggtcttgctttgttgcccaggctggttttaactcatggcttcaagtgatccgatcctcctgcctgggcctccaaagcgttgggattacaggcaaaggcccagcccctaaggtcatgtacttaccaggtctggctcctggtctcaggagcccgagctgttctcttcctccccttccccgtcttcactctcagnctgaggccacgcccc

SEQ ID NO: 5992 - DNA, 356 bp, Homo sapiens; identical to SEQ ID NO: 79
  unsure (337): n=A,T,C or G

SEQ ID NO: 5993 - DNA, 149 bp, Homo sapiens; identical to SEQ ID NO: 80
  unsure (5): n=A,T,C or G
  unsure (8): n=A,T,C or G
  unsure (17): n=A,T,C or G
  unsure (26): n=A,T,C or G
  unsure (37): n=A,T,C or G
  unsure (114): n=A,T,C or G

SEQ ID NO: 5994 - DNA, 140 bp, Homo sapiens
  unsure (111): n=A,T,C or G
aaatacacattacagtgttttatattatgtaatgctaagttgtaattcagcttttaacaaatctttttttaggtagtaaaaaaaaaaatactcaacaactaataggcccanagtttatttccaaatgagacactaaattt

SEQ ID NO: 5995 - DNA, 292 bp, Homo sapiens; identical to SEQ ID NO: 81
  unsure (244): n=A,T,C or G
  unsure (250): n=A,T,C or G

SEQ ID NO: 5996 - DNA, 218 bp, Homo sapiens
  unsure (161): n=A,T,C or G
  unsure (169): n=A,T,C or G
  unsure (170): n=A,T,C or G
  unsure (196): n=A,T,C or G
  unsure (216): n=A,T,C or G
ccacagcccatgcgaaggcccgcatgagcaagactgtggacctgcaggatgcagaggaagctgtggagttggtccagtatgcttactttaagaaggttctggagaaggagaagaaacgtaagaagcgaagtgaggatgaatcagagacagaaaatgaagangagaaaanncaagaggaccaggagcataagaggangagaaggaagactcgccagnca

SEQ ID NO: 5997 - DNA, 110 bp, Homo sapiens
  unsure (86): n=A,T,C or G
  unsure (93): n=A,T,C or G
  unsure (108): n=A,T,C or G
ccaagaggtaccatggttgccattagtcagatatggaactgtggaggatttgcttgcttttgcaaaccatatatccaacactgcanagcattnttatggacaaagacnac

SEQ ID NO: 5998 - DNA, 240 bp, Homo sapiens; identical to SEQ ID NO: 319
  unsure (239): n=A,T,C or G

SEQ ID NO: 5999 - DNA, 215 bp, Homo sapiens
  unsure (201): n=A,T,C or G
cctcgagctcccttcagcgaggcaccttacgcatggaataggaggtttcacccacctgaaaccttctaaatacaatatcaatggtgaaaaaccaaaaacaagagagaaaataaaaacaagatcattagtaaaagttcaacaaagcaattgaaattctttggatgtctattacatatgggaatgaggacagtctcaagtctntaatatgggaaaca

SEQ ID NO: 6000 - DNA, 630 bp, Homo sapiens
  unsure (462): n=A,T,C or G
  unsure (515): n=A,T,C or G
  unsure (529): n=A,T,C or G
  unsure (583): n=A,T,C or G
  unsure (590): n=A,T,C or G
  unsure (607): n=A,T,C or G
  unsure (626): n=A,T,C or G
ctggccgatttacaccttgataacaagaagcttggagagatgcgcctgaaggaggcaggcacagtggggagaggaggtgggcaggaggaacggccctttgtggcccggtttggatttgacgtggtgacgtgctgtggatacctcccccaggtgaatgactggcaggaggactgggtcgtgttctatgcccggcagcgcattcagccccagatggacatggtggagaaggagtctggggacagggaggccctccactttggtctgctctgcagttaaagatcctgacctgttccgtgacctggagatcatcccagccttactccacggggacctctggggtggaaacgtagcagaggattcctctgggccggtgatttttgacccacttctttctacggccactcggaatatgagctggcaatagctggcatgtttgggggctttacagcttcttttactccnctaccacggcaaaatcccaagccccaggattcgaaacgcttcagtgatagctnttactcttgaaccntgaatatttgatcgggtcaaagactcctgactatgagaattggcaatacggctnttgaagngactcgcgaccctaggnatcaccattggctctatgntcac

SEQ ID NO: 6001 - DNA, 341 bp, Homo sapiens
aaaaaaatctcaaaacatgttcaaacacattcagtagcaaagatccaccattggcacacacattaagaaagcacacacactaggcttctagttgggctaattaaaatctctatggctggaaaggtggttggttgtacttaattaagcttttttgaagtgcaaagctatgcataacagatgagcttgaaagctgcagagtttaagatagacttaatttttcatgattttcccaaagccaggtgatgatatttatttaatttgtggcttcagggtgcacctggaagaaacataagatacagaggcagagaccttaatgtaacttagtcagaaatacatttttt

SEQ ID NO: 6002 - DNA, 212 bp, Homo sapiens
aaaacacatcaattctatgaggtaggtattaaccctttcttacagaagaaggaactgaaccccatgaaggctacacataataagtggcagaggtgaaatttgaacccagatctaccaactccaagtttcttttcaatttgactataactgcatttgtgattgcttgtgacataagacatacgagagagtagatttgaattatgtataagcag

SEQ ID NO: 6003 - DNA, 335 bp, Homo sapiens
ccaggtacatgggccggatggcaaagagtgggaaggtgtgcaccttgatcatgatggtcatgaaggccatgtacagcagaaccttgatgaagcctgaggggaggggatgcagaaagcagcaggtcacagggccaggaggcagagtggaggatgctggtccagatcaggagaggcccaggcccctctcacctgtaaacagctctgtgtagagcatgtacacagccttgttgtcccaggggttctcactcttggaggtccacggagtgcagcacatacttgatgaagatggtgagcaccatcgtcatcaggatggcatactcaaagccaaacaccag

SEQ ID NO: 6004 - DNA, 247 bp, Homo sapiens
  unsure (186): n=A,T,C or G
  unsure (227): n=A,T,C or G
ccaggatggtcttgatctcctggcctcgtgatccgcccgcctcagcctcccaaagtactgggattacaggcgtgagccaccgtgcccaaccatttgtcattttttattgtgggtacactagtgggtgttaagtcatatctgcttgtggttttgattttgcattttcttgatggcttgtgatgttangcttttcttcaaacacttattggatgctcttatatctttcnttacaaaaaggttattttcc

SEQ ID NO: 6005 - DNA, 187 bp, Homo sapiens; identical to SEQ ID NO: 545
  unsure (116): n=A,T,C or G
  unsure (168): n=A,T,C or G
  unsure (184): n=A,T,C or G

SEQ ID NO: 6006 - DNA, 367 bp, Homo sapiens
  unsure (240): n=A,T,C or G
  unsure (244): n=A,T,C or G
  unsure (281): n=A,T,C or G
  unsure (301): n=A,T,C or G
  unsure (302): n=A,T,C or G
  unsure (331): n=A,T,C or G
  unsure (353): n=A,T,C or G
  unsure (363): n=A,T,C or G
ccaacaggacccgcaaaaaaccctgaaaattgagtgcctctgtatgacaggatgggaggtgagacaggtctccttataccctctcccacacattcatgtaaaaatagatagaatggaaaaacagactgcttgtgacaagaagatactaacttacaaacaaaacctaaggccacgcaaggcaaaagtaaagtcacgcctcaaaattcataatatctagagaaacaggtctgttttcttggntggnatggaatcaaagtgcagatagcagacccccttccttnctacctcctccaaactttanncaaactttcacactctcaaccagacctgnccgggcggccgcttcgaagggngaaattccanccac

SEQ ID NO: 6007 - DNA, 496 bp, Homo sapiens
ccagtgcagaatgctccagagccttaatgacagaggcataggagtctgagaacttcgtgtatttgcccacaagggcaatagagcaggtctccagcaagcgatcatatctgtcagccatctctttccatttcatcagcatttttcttggctgcctctcaataggaaggtcaagtcttcgaagaaaataatctacaaccccttgctcctctaacaacaaggggactcggtagatggatgaaacatcgtggacacagatcactttgttcaggctcaacatggcagaacattgatattttctccttcactgatgtgtcaagtggatttgagcacctgcatacaaccagatctggggaaagcccaagtcctctaagttcccgaacactattctgggtaggtttagtcttctgttcccctgttgaacttggctggggaactagactgacgtggatgttacaaaagttctctcttttgaccttgaattggaactgacggaagg

SEQ ID NO: 6008 - DNA, 264 bp, Homo sapiens
ctgtgacactactgagtataatttgcctaattcagcatactggtatttgattggaggacctggaccttcatctaaagacacaagcataaaagtagcaggtacactcaatttcagaagctgtgtcttctctgccacacctaaattggcatacattacaaacaggttgaaatactgctgtaaatgacgcccatgctctgaaacttcccttctcaagagatttagtactgctcttaataaagtggatcactcaagctttaagttgtc

SEQ ID NO: 6009 - DNA, 101 bp, Homo sapiens
tgaaaaaggaactgttcagcaggctgatgaataagatctaagagttacctggctacagaaagaagatgccagatgacacttaagacctacttgtgatattt

SEQ ID NO: 6010 - DNA, 227 bp, Homo sapiens
  unsure (18): n=A,T,C or G
  unsure (143): n=A,T,C or G
  unsure (182): n=A,T,C or G
  unsure (216): n=A,T,C or G
ccagaggaagcacctggngctgaactaggcttgccctgctgtgaacttgcacttggagccctgacgctgctgttctccccgaagaacccgaccgacctccgcgatctccgtcccgcccccagggagacacagcagtgactcanagctggtcgcacactgtgcctccctcctcaccgcccatngtaatgaattattttgaaaattaattcccccatnctttcaaaatc

SEQ ID NO: 6011 - DNA, 132 bp, Homo sapiens
cctgaacaaggacctctgccctccctattcagacccttcgttgcctcacctggtcaatacaaccacttcacctctgaccgcaggggcaggggactagatagaatgacctactgagcctcgtctgtctgtctg

SEQ ID NO: 6012 - DNA, 181 bp, Homo sapiens; identical to SEQ ID NO: 3071

SEQ ID NO: 6013 - DNA, 166 bp, Homo sapiens
  unsure (32): n=A,T,C or G
  unsure (52): n=A,T,C or G
  unsure (56): n=A,T,C or G
  unsure (74): n=A,T,C or G
  unsure (78): n=A,T,C or G
aaaaggcccacttgccgtaacctcttttggtntattttgcttcccattcagnccanagtttatatgataaaggngttnacttttacttcccagtctccaagtgctaacacataaacacatacatgtctgactgttgcagaactgttcgagctcctaattcagtgtt

SEQ ID NO: 6014 - DNA, 219 bp, Homo sapiens
aaaggaggttatgggctgagagtagattgctgaaagtcatgatttaggaagtgtaaggttactggtaatgacacaccgcaagtgcagctaagggagttgacagttgggatgagtgaaagaaaagattattagtatgaggatttcaaggaatcgagaaagtagggctttggatgagttgtttttgtagaagtcaccaatgatgacaatgggatgctgata

SEQ ID NO: 6015 - DNA, 244 bp, Homo sapiens
  unsure (202): n=A,T,C or G
ccttcagaagttaaacgtgatcacttgtgctgggacagccaatagaggagtctgagatgatcatttccaaggagttcttcacagaggaggtagctttggagctgggctttgaggttgggcagtatttgaaacagtagagacggagcaaagaacccctcctggtggggtcagtcattcgctttcttttcctcctcaggaccanggctctttgaagaagaaaaaaggcccacaaggggaccccagg

SEQ ID NO: 6016 - DNA, 102 bp, Homo sapiens
ctatagggctcgagcggccgcccgggcaggtctgtggcagcgcattagttttggcgcaagcgagcctatgctgcagggtcacttttggctggtcagagaagg

SEQ ID NO: 6017 - DNA, 475 bp, Homo sapiens
  unsure (219): n=A,T,C or G
  unsure (459): n=A,T,C or G
aaaaaaggtgacttggattaaagtatgcaaactcaaggagtagtacgagcccacttgagtcaagttagcttagttgctaaagagcttgataccaaaattacttttgtttacttgatgaatgggatagttgttgcacagggccactgatctagattactgtcttatttgtcaagtacttatagttgtagaagtagcagtgtgaaaattatcggaatgganaaagggccaatgataaaccaatttattttcaggtaccagcaacttcaaggtttctgccacccactgttgtatacacttattgagaaaacaatgcaaaatgtgaagcatccggttactggacaatttctatatcaggacagcaactgggccagcaaagttgagaaactcactttagacaatgctgctttccctttccttgcatattctggaatcccagcagtttctttctgtttttgcgangtaagtctgttcattt

SEQ ID NO: 6018 - DNA, 270 bp, Homo sapiens
ccttgcctcagatccaaggtcactcggaagaggccatgtctaccctcaatgacactcatggaggaaatgctgagagaagcattcagatgcatgacacaaggtaagactgccaaaaatcttgttcttgctctcctcattttgttatttgttttatttttaggagttttgagagcaaaatgacaacacccagaaattcagtaaatgggacttttcccgcaaaagccaatgaaaggccctattgctatgcaatctggtccaaaaccactcttc

SEQ ID NO: 6019 - DNA, 224 bp, Homo sapiens
  unsure (210): n=A,T,C or G
aaaacagatttcatctagagcttcatttccctgttgagctttcttaaagagttctcttaggactgactgtcggaactggacaggtaaactcaaggttaagttgtcttcaatgaaaatctgtattacctcctgatagttgccagatctcaaacaaatatggacttgactatatggagtcaactgttgagatgtactatcagaagaaggtcnaaaacattccctgc

SEQ ID NO: 6020 - DNA, 214 bp, Homo sapiens
ctgcactgggagagctgagagcctccatgacagaccccagccagcgtgatgttatatcggcacaggtggcagtgatttctgaaagactgagggctgtcctgggccacaatgaggatgacagcagcgttgagatatcaaagattcagctcagcatcaacacgccgagactggagccacgggaacacatggctgtggacctcctgcttacgtcttt

SEQ ID NO: 6021 - DNA, 173 bp, Homo sapiens; identical to SEQ ID NO: 3082

SEQ ID NO: 6022 - DNA, 391 bp, Homo sapiens
cctcctccctcacacacacgtcgccctgtcagaaggccaggcacactactgcagccaggatgctgggatagcaaggggataggtgctccaaccttcaccttccagaaaggcagggtgatctgaagtgacgtgtagctgagagctggatggggagaatttcactttcccagttgatccagaaaggaaagaaaccccagagcattctcttggaagaacttaaactggctttgggctccagtgcgagcgaatgacttgtggaaaggggcaccatgatgagaggccggggccggtgggtgttgctgtctgggtgaacatctcgtcatctgtctgttctttctccccggcatcatatcccttatagtctggctccaggtaaacagtgtctctgcca

SEQ ID NO: 6023 - DNA, 582 bp, Homo sapiens
  unsure (205): n=A,T,C or G
  unsure (259): n=A,T,C or G
aaaacagcaaatagcagatttacgggaagatttgaaaagaaaggaaaccaaatggtcaagtacacacagccgtctcagaagccagatacaaatgttagtcagagagaacacagacctccgggaagaaataaaagtgatggaaagattccgactggatgcctggaagagagcagaagccatagagagcagcctcgaggtggagaanaaagacaagcttgcgaacacatctgttcgatttcaaaacagtcagatttcttcnggaacccaggtagaaaaatacaagaaaaattatcttccaatgcaaggcaatccacctcgaagatccaagtctgcacctcctcgtgatttaggcaatttggataagggacaagctgctctcccagggagccacttgaaccactgaacttcccagatcctgaatataaagaggaggaggaagaccaagacatacagggagaaatcagtcatcctgatggaaaggtggaaaaggttataagaatgggtgccgtgttatctgtttcccaatggactcgaaaggaatgattgcagatgggaagacatcctgtccttttttatggtgac

SEQ ID NO: 6024 - DNA, 284 bp, Homo sapiens; identical to SEQ ID NO: 82
  unsure (261): n=A,T,C or G

SEQ ID NO: 6025 - DNA, 190 bp, Homo sapiens; identical to SEQ ID NO: 3088

SEQ ID NO: 6026 - DNA, 184 bp, Homo sapiens; identical to SEQ ID NO: 3690

SEQ ID NO: 6027 - DNA, 138 bp, Homo sapiens
cctcaggcacttggcctttgttttcacaccaacttgatgggttctactataagatgctaaaaaggtgggttgtgtgtggttcagattggttgatttgtaaccctagttgtgcataagaattgcccagatatttttttt

SEQ ID NO: 6028 - DNA, 434 bp, Homo sapiens
aaacatctggctcgcaagctgactcacggtgttatgaataaggagctgaagtactgtaagaatcctgaggacctggagtgcaatgagaatgtgaaacacaaaaccaaggagtacattaagaagtacatgcagaagtttggggctgtttacaaacccaaagaggacactgaattagagtgactgttgggccagggtgggaggatgggtggtcaaggtaaagacagactctagggagaggaaatcctgtgggcctttctgtcccacccctgtcagcactgtgctactgatgatacatcaccctggggaattcaaccctgcagatgtcaactgaaggccacaaaaatgagctccatctacaagtgattacctagttgtgagctgttggcatgtggttagaagccatcagaggtgcaagggcttagaaaagaccctgg

SEQ ID NO: 6029 - DNA, 130 bp, Homo sapiens
aaaagtcgacctgttttgcagaaagtctgctgtttttgtactaaaggctttggaatttggcatttagctaggaatgcacattctttcacctcattcatactttaagaaccacagaagtgactctgcttgg

SEQ ID NO: 6030 - DNA, 232 bp, Homo sapiens
ctggcaagatctggaccctgcaaaccagtagcccctctggaccccccagtgaatgctgagatggagctgacagcaccgtccctcatccagcccctgggaatggttcccctgatccccagccccttgtcatcagcagtgcccctgatcctacctcaggccccttcaggcccatcctatgccatctacctgcagcccactcaagcccaccaaaagtgggaacgccaccccaagg

SEQ ID NO: 6031 - DNA, 214 bp, Homo sapiens
  unsure (214): n=A,T,C or G
ccttgcgggaagacctcatgggacgcaaggactccctgggcagagggtgggcccctggtcctggaggcacagaatcctcgacccacacgactatgtgacctctttataactggggaagacttcgatgatgatgtgtgatctgggactggcaggttattaatcgagatacacttgttaggagggacagggttcccctaaggcacttttacctcgn

SEQ ID NO: 6032 - DNA, 212 bp, Homo sapiens
  unsure (163): n=A,T,C or G
  unsure (205): n=A,T,C or G
  unsure (206): n=A,T,C or G
ccatgggaagcccgagaattggttcctatagacccggttcctgatgaattcccaggccaaaagaaccaccctgacaaattttgggttctgaaagtcttattattggacagtattgcatagctagagaaggaaaaggatttactcatcctgtagggcagcttanttgtcttgggcaaaagctgtataatggtaccacaaaaacagnnacatgg

SEQ ID NO: 6033 - DNA, 181 bp, Homo sapiens
  unsure (11): n=A,T,C or G
  unsure (31): n=A,T,C or G
  unsure (41): n=A,T,C or G
  unsure (157): n=A,T,C or G
  unsure (168): n=A,T,C or G
aaaaaaaaaanccttcaaaaataaaaataanagttatttanccttgtgaatattttgaagtaaagtttcttgaatttccgtgatgaactcttcaagcaattcaacttctcagagtcatcactcaaaagttcctttgacatgggacctatcccacggngacaaagcggnttccccctttgtt

SEQ ID NO: 6034 - DNA, 252 bp, Homo sapiens
aaagctcaaacttacagagtctgttgtaaggttaatacatagaatgctagctttttagtcacctgagaatcaggaaattcacatgaacataattccctatactgacaaagaactatagctacctatgggcttgtcaagttcctacgcttcattcagcatgaaattgcacttttcttgatatgtataaattaaaatctatgcaactgtctgtgcttggggttgcctcatatcacatctataaaaacagcattt

SEQ ID NO: 6035 - DNA, 398 bp, Homo sapiens
gaagagaaagacagctctcagtctgagtaaaaccgtattgagagaagaaaagaggttgaaagaatcttaaagacaaattcagattacatgtaacattggtcaaattgaccagaaaatattcttccaaagaagttcttctctaaacaccaaaagtgcacagctactctcagcatgagaaatacaagtattatgagaaagagggcttattctgacaagaaattcctctctgctgctctcccatctgccggccgttggattgggaatctatactggaacacacctgacaacctccaccagcactttttgatgaagaattggaattcactctattcacatagtagaattatatcagagattgcaagatagctaactgaagagctactatgattcttgggtgg

SEQ ID NO: 6036 - DNA, 226 bp, Homo sapiens
gtggaattggtgattctgaattgtcctttactaatggtgttgagttgctctgtccctattatttgccctaggctttctcctaatgaaggttttcatttgccattcatgtcctgtaatacttcacctccaggaactgtcatggatgtccaaatggctttgcagaaaggaaatgagatgacagtatttaatcgcagcagtagcaaacttttcacatgctaatgtgcag

SEQ ID NO: 6037 - DNA, 157 bp, Homo sapiens
ggtatgttgtctggttctgattggtatcacatgagctgctgagctgaaatcacagtggtttatttggtgtcttgcaggacccagcctttatatgttaatgtttttccctcattggtatgggatacctacaggatgaagttcagacttcatagcaagg

SEQ ID NO: 6038 - DNA, 375 bp, Homo sapiens
  unsure (213): n=A,T,C or G
  unsure (227): n=A,T,C or G
cctgaaggacccagggccctctggctggatgcgtttgcctatcaggacccagaattacttacagacctgtttagggctaggcttggcctctttcttgagctcatctggaggggtgtggcaacactcattcttcatccttattctccctggctgtgggcaacactggtcctcagtgtcaccagatggtcctcctctgtgcccatgacccctcancaaccaaggctggncctgcagaataaatgtgtgtgcccatgatcacacccaggggcacaggccacatacgtttccctgaaaccttgggctccacctccatcccgtccatgtgggagggaacttgggtcccagcagtgtgtctttcagcaccaagtcatgttt

SEQ ID NO: 6039 - DNA, 298 bp, Homo sapiens
caggtcctccatcctgtggaacgtgggaaaactatcttgagtgttggcgtgttctaagtatgacataatagtttaatgtatgataaatcatgggtgtttagacgaaagatttacacatataaattggaggctttagcggtcttagtgtaactaacttttcgtccccttaacccttgatgcctgttctatgggtctctagagcggaaggagcattatactccggaaacattgctggaaaggggttatgagaaattcctctctgtatgctaactccgtaatacaagcgtttgtgtatttt

SEQ ID NO: 6040 - DNA, 216 bp, Homo sapiens
agtgacccgagacccacgtgcccaagactcccggggtctgaacctaaactttgtacacgttactaacataccagttcgcttacctaaaagggctaggtcatatcttaccacgtagacaaacatttcctctagaaaaaaggagcagcagtgatcctcttggcttccttcagccagtgctttaggacatgcaagtccctgtagtaagggaagtctatg

SEQ ID NO: 6041 - DNA, 224 bp, Homo sapiens
  unsure (122): n=A,T,C or G
  unsure (193): n=A,T,C or G
  unsure (223): n=A,T,C or G
gttgttgcctgggctggacgtggttttgtctgctgcgcccgctcttcgcgctctcgtttcattttctgcagcgcgccagcaggatggcccacaagcagatctactactcggacaagtacttngacgaacactacgagtaccggcatgttatgttacccagagaactttccaaacaagtacctaaaactcatcngatgtctgaagaagagtggaggagacttgnc

SEQ ID NO: 6042 - DNA, 558 bp, Homo sapiens; identical to SEQ ID NO: 546
  unsure (488): n=A,T,C or G
  unsure (518): n=A,T,C or G

SEQ ID NO: 6043 - DNA, 374 bp, Homo sapiens; identical to SEQ ID NO: 83

SEQ ID NO: 6044 - DNA, 307 bp, Homo sapiens
  unsure (107): n=A,T,C or G
  unsure (223): n=A,T,C or G
  unsure (285): n=A,T,C or G
ccatttaccagactccgacacaatgggccaccaccagtgtgacagcaggacatcctaatatatggatcttgatttttaagtttcagtatctgaacttcctaaattantaacttttagctgggaaagtatagcatgaaaccagaggttctcagaatgactgtaagatagcttacatttcctctttttgcctttatctccccaactaaaatcaatggggaagaantctgcctatgatctttgaatgagctttttaaggaagaaatattatatattgtttgttaaagnttattgaaataaagaatcattt

SEQ ID NO: 6045 - DNA, 223 bp, Homo sapiens
  unsure (219): n=A,T,C or G
ctgaacgtctgtgggtgagccggggtcccctgggagggtcttcttgcactctgactgcagtcggtaggcactggacgtcagtaaacgaagggaagtcctcaccatatcagacttgggttttttggggaataatgctgccatttctgtaacagctacgtgtatcctctctgagcagggaatataactgtcatgtttattttcttgggctgctcttaaaanctcc

SEQ ID NO: 6046 - DNA, 329 bp, Homo sapiens
  unsure (40): n=A,T,C or G
  unsure (115): n=A,T,C or G
  unsure (123): n=A,T,C or G
  unsure (148): n=A,T,C or G
  unsure (200): n=A,T,C or G
  unsure (255): n=A,T,C or G
  unsure (276): n=A,T,C or G
  unsure (292): n=A,T,C or G
  unsure (313): n=A,T,C or G
  unsure (321): n=A,T,C or G
ccttgcctcagatccaaggtcactcggaagaggccatgtntaccctcaatgacactcatggaggaaatgctgagagaagcattcagatgcatgacacaaggtaagactgccaaanaatcttgntcttgctctcctcattttgttattnggttttatttttaggagttttgagagcaaaatgacaacacccagaaattcantaaatgggactttcccggcagagccaatgaaaggccctattgctatgcaatctgntccaaaaccactcttcaggangatgtcttcactggtnggccccacgcaaagcttcttntgacggantctaagac

SEQ ID NO: 6047 - DNA, 357 bp, Homo sapiens; identical to SEQ ID NO: 84

SEQ ID NO: 6048 - DNA, 202 bp, Homo sapiens
  unsure (132): n=A,T,C or G
  unsure (155): n=A,T,C or G
  unsure (156): n=A,T,C or G
  unsure (166): n=A,T,C or G
  unsure (185): n=A,T,C or G
  unsure (195): n=A,T,C or G
aaaatcagattttctaaactacaattgttttagaacactgtatgaagaacttatctagtcatagttatttgtagtcaggattttaacagcttgcaacaggtaatgttttgaatataaatatctttccaaagngttactaatggcaaagagataannttctaggctnctattcttgctgcttgaantcagaactgntgatgga

SEQ ID NO: 6049 - DNA, 437 bp, Homo sapiens
  unsure (273): n=A,T,C or G
  unsure (353): n=A,T,C or G
  unsure (374): n=A,T,C or G
  unsure (381): n=A,T,C or G
  unsure (408): n=A,T,C or G
ccatgagtgacaggtggcctcttggtgggagaggtggggcagggggaaggcagctcccactagaccagggcagtatttaggggaaggaggcagattggagcagttggctgccaacacctggcctcactcagggagaggggccttgggcctggaagatatctgggtgaggtacccacaccatctgctgcaacctctgttgtatccattatgggctcacgccattcacaggcatgaattgagcacctagtatgtgggaaaacaggggaaacaganatggtacagacatggtctccatccttcgggggctccagtctagttgggggagatcagagaagttccatttgccactctangccaagctaggtaagcggcanagccatnaagcattgtgggagctttcaaggaggnagtgagcccttgcattcacggaagaagga

SEQ ID NO: 6050 - DNA, 130 bp, Homo sapiens
  unsure (101): n=A,T,C or G
aaaatcttgagggattgatctcgcctcatgacagcaagttcaatgtttttgccacctgactgaaccacttccaggagtgccttgatcaccagcttaatggncagatcatctgtttcaatggcttcgtcag

SEQ ID NO: 6051 - DNA, 355 bp, Homo sapiens
  unsure (226): n=A,T,C or G
  unsure (259): n=A,T,C or G
  unsure (312): n=A,T,C or G
  unsure (341): n=A,T,C or G
aaagtcaataaattgttattcgaggaattccatgttgtgatttcttccactgtccatcaaggtcactttagatcctctaaagagctggagtcaaaagatttatcttcaagtttgccctttttaatgaaactgatccagttgtcctgtcagcccataattactttggcttctgcatctcgttttaatatggatatactgatgaagacttcaaaattcaccaagaatntttgggatctaatttcttcaaccaatttacttnaggggcctttttactgtaggtggtggggatctacctggttctcaattttgacncccctctcaacatgaatgagtgtcaaatnacattcattcctaa

SEQ ID NO: 6052 - DNA, 129 bp, Homo sapiens
  unsure (99): n=A,T,C or G
  unsure (125): n=A,T,C or G
  unsure (128): n=A,T,C or G
ccttgccgtccttctcgtggaacccttcgggaccaaagaaggctccacactgtgcacataagaagtgttcagggtgccacgtccggtcaagggctgtcnccactttattccaaagatggggccgntgna

SEQ ID NO: 6053 - DNA, 102 bp, Homo sapiens
  unsure (88): n=A,T,C or G
ccagcccgaagtcgatgatgtggatggcatgctgccgcttggtccccgggcggcccaccaggaagttctcgggcttcacgtcccggtngattaggctcttgg

SEQ ID NO: 6054 - DNA, 118 bp, Homo sapiens
  unsure (104): n=A,T,C or G
  unsure (107): n=A,T,C or G
ctgttgatctacctcctgaatttattcacctttatatatcaaattgcatctctacttgtgaacagattaaggataaatatatgcagaatcggttggtgcgtctngtntgtgagtctct

SEQ ID NO: 6055 - DNA, 372 bp, Homo sapiens; identical to SEQ ID NO: 85

SEQ ID NO: 6056 - DNA, 268 bp, Homo sapiens
aataagtagaaaccaaagcacagctaaaaattccactgctcagtttatacactaacagttctagcgtttgcagtgttaaatactttaggctccagatattatcacctttgatataatcgccttggatgattagttttctgttggagaaacttagtatcttttactcttcattactctgtattgctgaattgaatcctatcctttgtgctcaacttttgtgtgatcttaaagtgagctttatcattctaaacgaatctgtgtctacttt

SEQ ID NO: 6057 - DNA, 202 bp, Homo sapiens
ccttctttagctctggaaagaataaggctgccttggaggccatcgagcgtgccgctttcttcgtggccctggatgaggaatcctactcctatgaccccgaagatgaggccagcctcagcctctatggcaaggccctgctacatggcaactgctacaacaggtggtttgacaaatccttcactctcatttccttcaagaatgg

SEQ ID NO: 6058 - DNA, 125 bp, Homo sapiens
cctcaatgcctacctggaaggttcatggcatgaagctttgctgtattatgttttagcagcagaaactggaattgaagtgtcacagacaaatttagcacacatctgtgaggagaggccagacctgg

SEQ ID NO: 6059 - DNA, 250 bp, Homo sapiens
  unsure (177): n=A,T,C or G
  unsure (223): n=A,T,C or G
ccttccttgccaggacctcgagtttgttcagttccaccccacaggcacatatggtgctggttgtctcattacggaaggatgtcgtggagagggaggcattctcattaacagtcaaggcgaaaggtttatggagcgatacgcccccaccgcgaaggacctggcgtctagagatgtggngtctcggtggatgactctggagatccgcgaaggaagaggctgtggncctgagaaagatcacgtctacctgcag

SEQ ID NO: 6060 - DNA, 116 bp, Homo sapiens
  unsure (1): n=A,T,C or G
  unsure (7): n=A,T,C or G
  unsure (112): n=A,T,C or G
ncgcggncgaggtccagccgcacatactgtcatgaactaggtagatctgccccaagggagatggctgcatttgaaattttctgtaacaccctaatgcttagcccattaaaanctca

SEQ ID NO: 6061 - DNA, 129 bp, Homo sapiens
  unsure (6): n=A,T,C or G
  unsure (10): n=A,T,C or G
  unsure (14): n=A,T,C or G
  unsure (47): n=A,T,C or G
  unsure (95): n=A,T,C or G
  unsure (98): n=A,T,C or G
  unsure (118): n=A,T,C or G
gcgccngggnaggncctgcatggctgccagccgggctccgtgtctgnggataagaagggctacatctttctgacccttcgagaagtcaacaaggnggngatcctggacccgaaggggnccctccttgga

SEQ ID NO: 6062 - DNA, 111 bp, Homo sapiens; identical to SEQ ID NO: 86
  unsure (26): n=A,T,C or G
  unsure (38): n=A,T,C or G
  unsure (42): n=A,T,C or G
  unsure (60): n=A,T,C or G
  unsure (62): n=A,T,C or G
  unsure (67): n=A,T,C or G
  unsure (82): n=A,T,C or G
  unsure (90): n=A,T,C or G
  unsure (92): n=A,T,C or G
  unsure (106): n=A,T,C or G
  unsure (111): n=A,T,C or G

SEQ ID NO: 6063 - DNA, 419 bp, Homo sapiens
aaattattatcttcttaacagtttagtcccacctcttacttcctgcctcagtctgctttctctactgtctggattaattaggcagcctgctataaagttaaagtcacacatttctattttgcaaacactgtgattactctttgctttgtagtttgctttgctttgtagggttctgcttttaagtttttctctttttcagacaaattactgataaaaatgatattgctctatatgtaatatatcctgaaagcattattttttgttgaataggaaataaaattaatgaagacagaggctagaaagcatccattaattaatgagacacacttaactacttatctctaaaccatctatgtgaatatttgtaaaaataatgaatggactcatcttagttctgtatataaatatattttctttct

SEQ ID NO: 6064 - DNA, 228 bp, Homo sapiens
  unsure (219): n=A,T,C or G
aaaatttcttagaaaacaatggaatgagaatttaagcctcaaatttgaacatgtggcttgaattaagaagaaaattatggcatatattaaaagcaggcttctatgaaagactcaaaaagctgcctgggaggcagatggaacttgagcctgtcaagaggcaaaggaatccatgtagtagatatcctctgcttaaaaactcactacggaggagaattaagncctactttt

SEQ ID NO: 6065 - DNA, 193 bp, Homo sapiens
ccaactggagacttactttaccttaaccatgtaaagtatccttaccgtattttttatgtgtacagtgttgtagaatatcagccacctcttaaaagtatcaatcttaaaaagagccatggaaggtaaaagtatgaaaatcttgataacaaaagctttcaatacaaaaacacttattgtacacttatttttattt

SEQ ID NO: 6066 - DNA, 298 bp, Homo sapiens
ctgagacttgaaccttcctttcaccgcgggactgggccaactctgtctgtccgagggtgagtagcacaggacagcactcttccatctgtgcacggccgggaactgatgggggtcgacgtctgcacattcaagagcggccaaaacatcctgatcgagttttgatggctcctctccaaaaaggaagagccgcctggccggttccctggtgacctcgagctgatcctcgtgcctggggctgctgggactcaaggacattttagcgatcctggctgacatttcactttctgtcctcctgtgg

SEQ ID NO: 6067 - DNA, 167 bp, Homo sapiens
aaagatgctcccttgctttttataattcctaactgtaaaatataattttagtacagaacaaacaaattctccttggttggtcacatcattcattattgaaagggaaacttagtatcaaaagaaacaaaacactgaaataaataactaagtaatttactgaaaggcag

SEQ ID NO: 6068 - DNA, 241 bp, Homo sapiens
  unsure (155): n=A,T,C or G
  unsure (156): n=A,T,C or G
  unsure (189): n=A,T,C or G
  unsure (215): n=A,T,C or G
  unsure (220): n=A,T,C or G
ccttaaaaattatgcacgaccaaaaagaatgatttggtgagagatgtgtagctgattgacaattttagtgtgaattcatattcatttaacccagcagcaatctacataagctatgctttttcccgcctgtatttatgtttcttagcttataaagnnccaatatattatatcttttgttgctttggcagntttaatttagagctctgcgttcacanagatnccacctatagcaaaaactatc

SEQ ID NO: 6069 - DNA, 364 bp, Homo sapiens
ttgatgtatctgagcaggttgctccacaggtagctctaggagggctggcgacttagaggtggggagcagagaattctcttatccaacatcaacatcttggtcagatttgaactcttcaatctcttgcactcaaagcttgttaagatagttaagcgtgcataagttaacttccaatttacatactctgcttagaatttgggggaaaatttagaaatataattgacaggattattggaaatttgttataatgaatgaaacattttgtcatataagattcatatttacttcttatacatttgataaagtaaggcatggttgtggttaatctggtttatttttgttccacaagttaaataaatcataa

SEQ ID NO: 6070 - DNA, 178 bp, Homo sapiens
  unsure (117): n=A,T,C or G
  unsure (129): n=A,T,C or G
  unsure (131): n=A,T,C or G
  unsure (174): n=A,T,C or G
aaaatgtttaattattttgaaatgtatagggtattaaatacaagcttctaaaattttcagtatctatattggctttctctaacagctctacagcaaagtttgacatgttttttgtgngtgtcatgtatngnaagctgtaatatctgtaggagtgagtcggacattctaaattancagt

SEQ ID NO: 6071 - DNA, 320 bp, Homo sapiens
  unsure (206): n=A,T,C or G
  unsure (208): n=A,T,C or G
  unsure (210): n=A,T,C or G
  unsure (240): n=A,T,C or G
ccttattgccaggagggagggttttggttgctggcgcttgtgtataaaggggcaagagcagctcctttggactattcctgggaggactctgatgcagggcgtctgttgctcccctgggtcacctcctccctgctcgctgacatctggggctttgaccctttcttttttaatctacttttgctaagatgcatttaataaaaaaaaanananagagagagaggtgtgagggacaaaatgcanacccatttcccttgcctcataggcttctgggatgtcatcacctccagtttgttggttttgtttccaactgttaataaagc

SEQ ID NO: 6072 - DNA, 362 bp, Homo sapiens
aaaaatgttttcccgtgggtaattttctattatatattttcatatgggcaaagggaaaaaatgataaatcctctgtaatcacaaaccccaatttcgttttgtttattcagcttctaaaatattgaacacccagacttttaattcaacctttaagaaccttatcatttatgtttcagtagatatcaaagtaatccatgtttgtgtcaaatgatcatagaaaataaatagaagagacagtgaagcaagtaaaaagaaaagcattgttttaatttgtttgcattaatttttttcatttgtcaaaatgcttcttttgttgccacagtaaagaacagtttttattgttttgtaagtaaaattacgta

SEQ ID NO: 6073 - DNA, 385 bp, Homo sapiens
  unsure (354): n=A,T,C or G
ccattacatcctctttttaatttacataatacagatacttgagaaagttgttgtggtgttgtatgccaagaaaattctttttattggtgcctatattgtaacaattatttttaatgcattgtattttgaagtaacggttcagttaaatttttcacctgctgtgtaactgaaacacaattacagtttataatcatctgtagaagtctggagataattttgcaactcatgttatgggttaaatgaatatttttgtaaaagtaaaagcaacaaatttataaattgattatttgaaactttacaacacaattgcatcccaaatacaaattgtattgcttattcattatagctattcgncctgtaatctgtttctaggtgaagcatactc

SEQ ID NO: 6074 - DNA, 357 bp, Homo sapiens
aaattagcacagaatttataattacccaatcagcattgacatagatgccatcaggtatgcaaagattaacaaaattctattaccaaccttagaggaaaaaaacttaatgacatacagaaatactggcaaatttaagctagaattagctccaggacattttatcttattttcacattaaaagaatagattactagatatcagcagaaatgctgttaaagctattttttactaatagttgttcatattaatgaaacaaaagatcaatagtctctgagctaaatttcacaaaatgaaatcagtgtcttctgatttaactttcaggagtaagaaagggcaaaacccaagcaccatactttc

SEQ ID NO: 6075 - DNA, 226 bp, Homo sapiens
aaataacaaactatacaaataaaaaggagcagaaataatatggaatgtttttgacgaaaacaaacttatggattcaataaataatataaaatgcctttgtgctaaaatagaactcttgtttcttatatatatatagttcagtgatctttatgctatccagaaaaagccagatctattataattaaacatagaaaaataccatttaacaataaaactaaaaaaatgg

SEQ ID NO: 6076 - DNA, 254 bp, Homo sapiens; identical to SEQ ID NO: 4835

SEQ ID NO: 6077 - DNA, 410 bp, Homo sapiens
aaagtatttacccaaagaactcataaaaaggtcaatttggtaaaaggacgttttgacccaagagcatctaatatttaagcttattttattggataagcatatctcttgtccatcacaagttatagaaaagttatatacgactaaaagaaaaagttatctactgtaattataggaagttgtcacaacaggaattcagctcaagaacttcttgcaattactgctacaacgtctataaatgggaaaagcaagcattaaaatagattaataaaatataaaattaagactggaaaatccagagacaagctgtatccttagaagaataaatagttaaaattattcagtaagctgacgtatttaaccattactgggcctgtaaaaaatgcattaaaattacattacaaatagttttt

SEQ ID NO: 6078 - DNA, 143 bp, Homo sapiens
  unsure (127): n=A,T,C or G
aaaatgtgtctttctttgggagagaatcattttgttctttactaacaataatttgaaaattggtaatttaatatcttgtgaatatgaaaatattatggtatagatcagcttctaggagaagttaagngtagcatgatttcttg

SEQ ID NO: 6079 - DNA, 101 bp, Homo sapiens
  unsure (93): n=A,T,C or G
  unsure (96): n=A,T,C or G
aaatctataatctggttcaagtgcaaatcaggtgctttctgttagtccttccaaaaaaggcatttttaatatttttggcacaaatgaaatgtnatnatgcc

SEQ ID NO: 6080 - DNA, 399 bp, Homo sapiens
  unsure (219): n=A,T,C or G
  unsure (354): n=A,T,C or G
  unsure (376): n=A,T,C or G
ccaaaatgatggatcctagggttcttcatcacatgggtggtatggcaggacttcagtcaatgatgaggcagtttcaacagggtgctgctggcaacatgaaaggcatgatgggattcaataatatgtaaagaaaatgccttaatataaactgactcagttgaatacctaatttgctgagacctcagcgtttcccttctttttgcgaattggggggaaagngtatttttcttgcttatcatgcactctttccttttcttctcgcccgcttttcccctccttttctttttccttccttctttcctccctttaatataagggagaaatacatggttttttgtggaaatcattatatgnttgctttagattttcttctgtntttaccatcataacacttaagtt

SEQ ID NO: 6081 - DNA, 260 bp, Homo sapiens
  unsure (172): n=A,T,C or G
  unsure (255): n=A,T,C or G
ccttttatctacttctttgcatgtaaagggtataagagaaaggttatgaggatgctgaaacggcaagtcagtgtatcgatttctagtgctgtgaagtcagcccctgaagaaaattcacgtgaaatgacagaaacgcagatgatgatacattccaagtcttcaaatggaaagngaaatggattgtattttggtttatagtgacgtaaactgtatgacaaactttgcaggacttcccttataaagcaaaataattgntcagc

SEQ ID NO: 6082 - DNA, 352 bp, Homo sapiens
  unsure (1): n=A,T,C or G
  unsure (7): n=A,T,C or G
  unsure (10): n=A,T,C or G
nctgaantgnggcttgcataaataactgtttattccaaaatatttacatagttactatcagtagttattagactctaaaattggcatatttgaggaccatagtttcttgttaacatatggataactatttctaatatgaaatatgcttatattggctataagcacttggaattgtactgggttttctgtaaagttttagaaactagctacataagtactttgatactgctcatgctgacttaaaacactagcagtaaaacgctgtaaactgtaacattaaattgaatgaccattacttttattaatgatctttcttaaatattctatattttaatggatctactgacattag

SEQ ID NO: 6083 - DNA, 213 bp, Homo sapiens
  unsure (128): n=A,T,C or G
  unsure (176): n=A,T,C or G
cctagataggggattgtgcggtgtgtgatgctagggtagaatccgagtatgttggagaaataaaatgtgcatagtggggattttattttaagtttgttggttaggtagttgaggtctagggctgttanaagtcctatgaaagtgacagcgagggctgtgagttttaggtagagggngattgttgtttggaagggggatgctgggggaaatgtt

SEQ ID NO: 6084 - DNA, 359 bp, Homo sapiens
  unsure (327): n=A,T,C or G
aaataactttcttaaccccgcccattaagatcacagtaaacatacaataatttttattatggaaattaatctttacatacaaaatcagctacgtaattttacttacaaaacaataaaaactgttctttactgtggcaacaaaagaagcattttgacaaatgaaaaaaattaatgcaaacaaattaaaacaatgcttttctttttacttgcttcactgtctcttctatttattttccatgatcatttgacacaaacatggattactttgatatctactgaaacataaatgataaggttcttaaaggttgaattaaaagtctgggtgcncaatattttacaagctgaataaacaaaacgaa

SEQ ID NO: 6085 - DNA, 275 bp, Homo sapiens
aaatagaaaacagtatattgaaagtggtgggtttgatctttttatttagaaacccacaaaatcagaaacacagtacaaataaaacagaaatcaaactataagttgacctttagttcctaaaaagaaacatatttcaaaagcaatggaatctagaattcttataacatgaataacaaaatgtacagcaagcctatgtagttcaattaatatataaggaaaagggaagggtctttctttatgaaaccaagcattataaagtttttactgtaggtagt

SEQ ID NO: 6086 - DNA, 310 bp, Homo sapiens
  unsure (184): n=A,T,C or G
  unsure (201): n=A,T,C or G
  unsure (213): n=A,T,C or G
  unsure (217): n=A,T,C or G
  unsure (260): n=A,T,C or G
  unsure (281): n=A,T,C or G
  unsure (308): n=A,T,C or G
ctgtgcaagaaaaattaaatgaaatagtagatcagataaaaactagaagagaagaagaaaagaaacaaaaagaaaaagaagcagaagaagctgaaaagcaattattccatggtactccagttacaattgagaatttcttaaattggaaagccaagtttgatgcagaactcttggaaattaaaangaaaaggatgaaagaanaagaacatgcangaanaaataggattagtgtgggaaactctatttgaaacagatcatantcttgacacatctgatatccngttcttggaggatgctggaaacaacgngg

SEQ ID NO: 6087 - DNA, 332 bp, Homo sapiens
  unsure (328): n=A,T,C or G
aaaaaaagaaaaataaaataaagtgttttgattatttagggctgacttacatttcagtatgtgacaaaaattcaaacccaaatgcatctagctcactcagtttcagacaggtcctatgttcagcccctaaacgaatggcacaatgccaccaattttgggattcctgagtttggttcccttaagttctcagagttttcccaactctcaaaaccaaagcatcatgggagtgacagggccactggcaagactttttgccagtcagcctagttcttcttttaagatgcagtagtctcaaagcttaaagtcagaaaatcttgcaataccagantaac

SEQ ID NO: 6088 - DNA, 459 bp, Homo sapiens
aaatgcattcttcacaagtaattcagcatatatttttatatcatgtttacttatgcttaagaattaaagcaagtatatttattactctgatggaaatatgggaaatctctcattcatgcaatatacagggataatattcaagcgaagggaaaattcccgctttttatttttgtaaatgtatccatatataatcatcgacatgacagatgaggaaacccatgaagtttcccactagtcagatatacattttcacttcatcagaagcacctgatatctacagctaatttataattagatactgtttcaatgaaaccaaaatgagccctacaagttcctataaacaaaagcttccaatgtactaggacagtcagtaattaatgcatcattcagaggattatggctgttccttaagaagtgcaagttcaaactgtcaacaccagaggtaatcattttatatta

SEQ ID NO: 6089 - DNA, 242 bp, Homo sapiens
  unsure (206): n=A,T,C or G
  unsure (229): n=A,T,C or G
cccaacttgcccttcaagttctacttcagtttgataaggctataaatgcagcactggctcagagggtcaggaacagagtcaatttcaggggctctctaaatacgtacagattctgcgataatgtgtggacttttgtactgaatgatgttgaattcagagaggtgacagaacttattaaagtggataaagtgaaaattgtagcctgngatggtaaaaatactgggctccnatactacagaatg

SEQ ID NO: 6090 - DNA, 204 bp, Homo sapiens
  unsure (192): n=A,T,C or G
  unsure (198): n=A,T,C or G
  unsure (201): n=A,T,C or G
aaataaataaatagctagactggcgactgattcttcagcaaaaatattttatgatccagcagattattcactgatttgacatagtctggctgtacccaggaatggagcctgcacggtgaatggctttgtatagaacctctttgtctacaccattatgtgcgctgataagcgttcatggaacgcgttgaaatngtaatnatncct

SEQ ID NO: 6091 - DNA, 342 bp, Homo sapiens
gtatcactctaatataatatggatcagagcatttattttggggaggaaaacagtggtgattaccggcattttattaaacttaaaactttgtagaaagcaaacaaaattgttcttgggagaaaatcaacttttagattaaaaaaattttaagtatctaggagtatttaaatccttttcccataaataaaagtacagttttcttggtggcagaatgaaaatcagcaacttctagcatatagactatataatcagattgacagcatatagaatatattatcagacaagatgaggaggtcaaaagttactattgctcataatgacttacaggctaaaattagtttt

SEQ ID NO: 6092 - DNA, 294 bp, Homo sapiens
  unsure (230): n=A,T,C or G
gtacaaaactttttatatcaaaaggctttgcacatttctatatgagtgggtttactggtaaattatgttattttttacaactaattttgtactctcagaatgtttgtcatatgcttcttgcaatgcatattttttaatctcaaacgtttcaataaaaccatttttcagatataaagagaattacttcaaattgagtaattcagaaaaactcaagatttaagttaaaaagnggtttggacttgggaacaggactttatacctcttttactgtaacaagtactcattaaaggaaat

SEQ ID NO: 6093 - DNA, 232 bp, Homo sapiens
  unsure (170): n=A,T,C or G
  unsure (229): n=A,T,C or G
caggtaaagtaattcgtttaataatagatgtgtttttagaggaaatgctgttacttggaattaattttccagttatacagtcttctataacttactaataatattctatatgtactttatgtaatttccctaaaaagaatgaactaccactacactatggtgttaaaccnaaatatacggaaaataaacactaactgctgcttatggataaatgctgcaactacttgtnatg

SEQ ID NO: 6094 - DNA, 295 bp, Homo sapiens
  unsure (217): n=A,T,C or G
  unsure (234): n=A,T,C or G
  unsure (235): n=A,T,C or G
ctgtaaggaggcggcagacggctaccagtgctgtatgatggcgcagtacaaccggcacgacagccccgaagatgtgaagcgacgagccatggccgaccctgaggtgcagcagatcatgagtgacccagtcatgcgccttatcctggaacagatgcagaaggacccccaggcactcagcgaacacttaaagaatcctgtaatagcacagaagatccanaagctgatggatgtggnnctgattgcaattcggtgatgacttgttcatccccccttcccttcgccctcatgtggaaag

SEQ ID NO: 6095 - DNA, 234 bp, Homo sapiens
  unsure (208): n=A,T,C or G
aaaaaattaactaataaaagcttttatatttaagaactgcaagtgtttcaaaactatgctgttttgtgttgttatagttgtaacatatttctcaattttcctgtttttcttttagtttattgacaagactacctggtcggcctaaattcacattttcattcagtttttgggcatttgagatcaaagagtaagtatggtttctacaagntacttcatttttctacttatcttttt

SEQ ID NO: 6096 - DNA, 396 bp, Homo sapiens
ctgcgctgcacagcctgggcagcaggctgagtatgggctcctcactcccacctcctggccttcaaggccctacttgttgccccagacagccatctttgagaacacaggtcttgggaggaagcggctggacttcatgtaggcagagatcttctccaagccctcaaagcgggagatgaagtccttcagatttgggaaggcgtccaagcagttgggctcaaatatacggtggaggtcaaggacatcatagacgagaaaatctacaaaagtgatcttgtttcctgcaaaccatggccgcttccccagaaactctgagtagagctttagcttttcagggagttcctccaagtactttggcttcagtttctcaaattctggattgtagcagatcatgcccag

SEQ ID NO: 6097 - DNA, 147 bp, Homo sapiens
  unsure (78): n=A,T,C or G
  unsure (82): n=A,T,C or G
  unsure (89): n=A,T,C or G
  unsure (122): n=A,T,C or G
  unsure (137): n=A,T,C or G
  unsure (139): n=A,T,C or G
aaaaaaattaaatagtattaatttactaaatatttaggagataacagtgcattaagggttttttttttttatataatncatncatatcncccctttgcagggatagcataaaaaagtaagtntggccttaggtccancncgtttttt

SEQ ID NO: 6098 - DNA, 198 bp, Homo sapiens
  unsure (193): n=A,T,C or G
ccatttaccagactccgacacaatgggccaccaccagtgtgacagcaggacatcctaatatatggatcttgatttttaagtttcagtatctgaacttcgtaaattagtaacttttagctgggaaagtatagcatgaaaccagaggttctcagaatgactgtaagatagcttacatttcctctttttgcctttntctcc

SEQ ID NO: 6099 - DNA, 162 bp, Homo sapiens
  unsure (128): n=A,T,C or G
  unsure (132): n=A,T,C or G
  unsure (136): n=A,T,C or G
  unsure (154): n=A,T,C or G
  unsure (157): n=A,T,C or G
aaagaaaccaccaccaacaacaaaacaaccaaaaaccatgttttatgtcaaagctctgtagcacagagaatgtggtgtcacagatacatcgccgagagaggtttctttctttcttttttttttttganacanagtntggttttgtttcccaggntgnagtgc

SEQ ID NO: 6100 - DNA, 271 bp, Homo sapiens
  unsure (232): n=A,T,C or G
  unsure (245): n=A,T,C or G
  unsure (260): n=A,T,C or G
aaacttgtgataggcatatctatgaaacctttgtaaatttagtttattgctttaccattattttactaggtaaaattagagaacagattttgttctctaatttttaagccttatttacatatgcagaaacagcttaaatattttgactagattagacaaacagttaatagatccaccattaggaatcaatatattatgcataataaacatcctttttctttcctgaaatttnttttagaaataancttatttttgcttgntatgttctgaa

SEQ ID NO: 6101 - DNA, 169 bp, Homo sapiens
gaggttgaggttgcagtgaaccatgatcacaccactgcattctagcctgggtgacagagtgagaccctctccctcctaaaaaaatccttaagaaatatattgatgcttggttcctttggtcagaattttgatttaaggtgttgggagtgtagcacagatgttggaataa

SEQ ID NO: 6102 - DNA, 265 bp, Homo sapiens
aaaggttattcactatatgaaaacagaaagggaacaattacaacaatgaaattgttttaacttttttaaatctgattctaatgtgtattgacatatatttaattatataaaagactgtgggaaaggggcattaacagtactctagaagagtaaaggataaaaatccctctttttcccctagcttccagtttgacaagagggaatacttaatcgaatcctgtccacaaaaacagctaacagtactgtgctttgaaaaaaaaaaaaa

SEQ ID NO: 6103 - DNA, 317 bp, Homo sapiens
ccaaggaatagaagctctagacctcccttatttctatcgtgaaaacagaggtatatccaagtgagggactacaacagtaataaagggaaaaaagtatttaattccaaaataaaattgaaaataacctcctgtctcagcctctttttgggaatatctagaaggagtggaaaaccatctctggctatgagacttgtatcactacccctttctccctggggcgacaggtagaggctgttgtaaccattttgaaccttgtcctggagtagcttgttgcttttcagttaaagagcttgagtgagcctgtctgggcctctggc

SEQ ID NO: 6104 - DNA, 381 bp, Homo sapiens
  unsure (275): n=A,T,C or G
  unsure (309): n=A,T,C or G
  unsure (330): n=A,T,C or G
  unsure (359): n=A,T,C or G
ccacttgtgtgggtcctcacaagcaaagagagcactaaacttgacattgggggtccaccactccaactttgctttctgaaggttttggtgtacattgagccccagaaggaaaggagagtatctgtgagtgggggcctcccttgaccccagtacgaagtctatgccctgaatccccagagtagcccttcctggtgcccaactggcctggggacaaacagcgtccactacatctaggactgccggctaagtggacacacttcttgacctcctaccangaactttggtaaaagctagctttggggaaggggntgggtgtaaatatgagagggnggagggagaccatacctgcccgggcgggncaagggcgaattccacacactg

SEQ ID NO: 6105 - DNA, 212 bp, Homo sapiens; identical to SEQ ID NO: 4977

SEQ ID NO: 6106 - DNA, 183 bp, Homo sapiens
  unsure (179): n=A,T,C or G
  unsure (180): n=A,T,C or G
  unsure (183): n=A,T,C or G
ccattattccatgtgcttaaatgataatttccttattcagtttcagaagaaaaagaatgaaattgggtaactgtcattgcgttagctttatgttgaattgggaaattgtggcataaagcttaaattcgtgtttatcaaatgtgaaccatagtagtataatgctgctttgtatataatgnnagn

SEQ ID NO: 6107 - DNA, 262 bp, Homo sapiens
ccactgtctgcagcatgggcagaaagtgctcaaagtccagcaccttcacattcatctcatcactcttggggttccccaggaccttgagcacctcggcgttggtagggttctggcccagggccctcatcacatccccacactggctgtacaggatcttgccatcacctgttcggtcaaacagctggaagcctccttgaactctgcggtctggtcttcggtgaagtcacacatcttgactgctcagctctccgggaccttttcc

SEQ ID NO: 6108 - DNA, 243 bp, Homo sapiens
ccatcttgttgctgcttggttagatcatatagctaatgaattaggcaggggagctattttttgaagatgatgaactaaatgttgaagacaagtttgagatctgtaaaatgtgattttttacttccacttataatacttgtgattggggaggtttgtggaaattcaattatgatgaaaaacctatcttttttgtaatgttggcatacttggggaatttagtgggcaaatacattccccagcagg

SEQ ID NO: 6109 - DNA, 362 bp, Homo sapiens
  unsure (362): n=A,T,C or G
aaatatatgcttttctagaatttgatgtttgaccatttatgacttaattaccagagagccagtaaattaggacagtgtttcaacaagcctaggctatctcgtaagttgaaaaatatcccactatagttgcttcatgagtatgaagtaagatggcctctgatttacactggttcaatttacaaattttcaactttatgataggtttatcagggtactaaatgcatttcaacttgatagtttcaacttatgataggtttaccaggatgtagtcccactgttgaggagcatctatttaggggttaattactttagtaataagtggaaagtaagataccttgagtaatgtttgcctataaaattgn

SEQ ID NO: 6110 - DNA, 134 bp, Homo sapiens
  unsure (26): n=A,T,C or G
  unsure (119): n=A,T,C or G
  unsure (123): n=A,T,C or G
  unsure (128): n=A,T,C or G
aaaaattactaaaaggtttactttgntcattaataaaacatttaacaattcaaattatatgcaccttttacctagttgaaaaaaatacacattcctggtttcacattataccaactgantaanctgantcctgt

SEQ ID NO: 6111 - DNA, 362 bp, Homo sapiens
ctgttctcatacagaaagtaaatcaagacgaaatatggaaaacatttatttcctttccttcaaaatttaacttacattccactttaatagctgttgaaggttaattaaaatgcagcaaagtataactacgttacgcaagtgacttcagttattttaatgtgagaaaaatcagactatggtatcttacgagtcattatagaaatgttcatcattaaaaagcatttattaggcactgaactgcatgatgttaccttaagtcatttacaaaagaattcctggtccatgtgatgtgaatgggcttggcactttctccataaattttgtagatgactatttgtaagattatacacttaataggtttt

SEQ ID NO: 6112 - DNA, 443 bp, Homo sapiens
  unsure (308): n=A,T,C or G
  unsure (342): n=A,T,C or G
  unsure (362): n=A,T,C or G
  unsure (381): n=A,T,C or G
  unsure (429): n=A,T,C or G
  unsure (442): n=A,T,C or G
cctccgtggcagcagaagatcttttcgtccactatggccgcgatgggcaggcagttgaagcagtcagtgaaggttttccacagtttgatgttgtagcgtctcttgcactcatcgtagaaaccatagatgcggttgatgctggcacactcgtggttcccacggagcaggaagaagttctcggggtacttgatcttataggccagcagcaggcagatggtctccaaggactgcttgcccctgtccacatagtcccccagaaagaggtagttgctctcgggagggaaaccgccatactcaaatagtcgcanaaggtcgtagtactggccgtgtatgtcaccgcanatcttgaggggtgcctccanctccagaagaatgggctgnctcacaaaaatctcccgggatttcaggcacagaccgcggatctcgttntctgtagacctcng

SEQ ID NO: 6113 - DNA, 466 bp, Homo sapiens
  unsure (364): n=A,T,C or G
  unsure (461): n=A,T,C or G
ctgctgacagttctttggtggaaaagtaagttgcgtacttacccaagctgcccaaatgattatcaagccaagtttgtttttcaaaaataggttttaagatacaccaaagaaactatacaatacaaaaatttaacaatgaagttaaagtatatagcaaaagccaaatatgacaacacacatgtataatgtagaaaagaatcctttcagtcctagaaaactaaaatggggagaacttactgaagggtaacatacataaaatgagtactaatagcaaggaataatcctaaacattttcccaataaactgactaagcctcaaaaggacagcttaggaaaatgattaacatgcagtttttctttttttnctagccaattcagttctacttagataaatctgggttgccaatcaatacatatataaattaatttttttctgctcaattctaccattttttctttttnacctt

SEQ ID NO: 6114 - DNA, 231 bp, Homo sapiens
ctgcttgcctgcaaagatgagcctctgctggtcgggggggatgccttctttatcttggatcttggccttcacattttcgatggtgtcactgggctccacctccagagtgatggtcttgccggtcagggtcttcacgaagatctgcataccacctctcagacgcaggaccaggtgcaggggtcgactccttcttggatgttgtaagtcagaaagagtgcggccatcttccag

SEQ ID NO: 6115 - DNA, 296 bp, Homo sapiens
  unsure (292): n=A,T,C or G
aaattttctcacttaggacttttcaaagccatctcaaaggagcttcctcaaaacatttaatgttggcatcaccccacaagtactcagaaataagtgttaaaatagaaatccaatccagtaatgggaaactgacttagattatcttatttgtttgtatatttatttggcatctatctctcttattcactgccctattttcaacatctacaatagtgcttagtaatgaatacacatgcagtacacaaaggtgctaacacaatacatgactaatgatgagggctatgcacatttntaca

SEQ ID NO: 6116 - DNA, 357 bp, Homo sapiens; identical to SEQ ID NO: 5688

SEQ ID NO: 6117 - DNA, 413 bp, Homo sapiens
  unsure (248): n=A,T,C or G
gatcaaaacccaccatgccccaggctcagcagggagctgctggatgagaaagggcctgaagtcttgcaggactcactggatagatgttattcaactccttcaggttgtcttgaactgactgactcatgccagccctacagaagtgccttttacatattggagcaacagtgtgttggcttggctgttgacatggatgaaattgaaaagtaccaagaagtggaagaagaccaggacccatcatgccccangctcagcagggagctgctggctgagaaagagcctgaagtcttgcaggacccactggatagatgttattcgactccttcaggttatcttgaactgcccgacttaggccagccctacagcagtgcttgtttactcattggaggaacagtaccttggcttggctcttg

SEQ ID NO: 6118 - DNA, 403 bp, Homo sapiens
  unsure (9): n=A,T,C or G
  unsure (11): n=A,T,C or G
  unsure (29): n=A,T,C or G
  unsure (59): n=A,T,C or G
  unsure (103): n=A,T,C or G
  unsure (117): n=A,T,C or G
  unsure (136): n=A,T,C or G
  unsure (141): n=A,T,C or G
  unsure (146): n=A,T,C or G
  unsure (174): n=A,T,C or G
  unsure (226): n=A,T,C or G
  unsure (258): n=A,T,C or G
  unsure (271): n=A,T,C or G
  unsure (273): n=A,T,C or G
gatatctgngntaccagccttgtctcggncacctcaaggataatcactaaattctgccnaaaggactgaggaacggtgcctggaaaagggcaagaatatcacngcatgggcatgagnagcttgaaactgctgaagnatgtnctgtntttcttcaacttgctcttttggatctgnggctgctgcattttgggctttgggatctacctgctgatccacaacaacttcngagtgctcttccataacctcccctccctcacnctgggcaatgtgntngtcatcgtgggctctattatcatggtagatgccttcccgggctgcatgggctctatcaaggaaaacaagagtctgcttatgtcgctcttcatcctgctgctgattatcctccctgctgaggtgaccttgg

SEQ ID NO: 6119 - DNA, 294 bp, Homo sapiens
aagctgctccacatctaccaacaatcccggaaggacaactccaattccctgcaggtgaaaacgtaccacctggtcaggtactggatctccgccttcccagcggagtttgacttgaacccggagttggctgagcagatcaaggagctgaaggctctgctagaccaagaagggaaccgacggcacagcagcctaatcgacatagacagcgtccctacctacaagtggaagcggcaggtgactcagcggaaccctgtgggacagaaaaagcgcaagatgtccctgttgtttgaccac

SEQ ID NO: 6120 - DNA, 297 bp, Homo sapiens
ctgcgaatggctgggctccaggcgcttgaagacattatcaagaagtttgcgtctgtgcctgagccagaatttccaggtcatgtgatactggagcagtatcaggctaatgtgggagctgctctaagaccagccttttcacaagatacaccatcagatataatagcgaaagcttgccaggtatgtagtacatggataggaagtggagttgtcagtgatctcaatgatctccgtcgagtacacaatcttcttgtttcttctctggacaaagttcaggctggaaaaggatcttccagccag

SEQ ID NO: 6121 - DNA, 173 bp, Homo sapiens
ctggcttgcctgctggcctgcttcctggagataggatgctcagacccaccgctgctcttcaggggtcgtgggaggaattaatgcacttccttctgtcccccaatctctgtccctttacgtgtctctggagctgagcaggtattctttttctttcttcatctcagtagagctgg

SEQ ID NO: 6122 - DNA, 309 bp, Homo sapiens
tttttttgttctaattttaatagggaaggaagaagttacagctcagtgcaccatgaagttgagacagagatggagacacctcagccccacctctctgcaacaggaaagatgattggggagggagcacaggtcagcgtgggaagagggtcatggtggacatgggggtggggtggtctccccacctcctcacattatgcctacatgaacacagacacatgcaggtgcctttgcagaaacaaagtcagggttcttcaagtcacaaagggaagggcaggaacaactcttgcctctcagtcccacacaaggcag

SEQ ID NO: 6123 - DNA, 235 bp, Homo sapiens
cctcagggggcaggtacacaccatcaccaactcggtacaggatgccgttcttagtggctgagtagtagaggacccggctatccaggtcctcgagctgctccaggaccctggggatttctttttgcctcatctcagccagacgggcacagctcacacagaatttgaacttgttgtcctctgttggctgggtttttggaggggactcgaatctcgcgtagtcttgatcataccacag

SEQ ID NO: 6124 - DNA, 348 bp, Homo sapiens
gaggtctggagaggatgcctgatgacttcctgccaggagaagccaaagccaggacatagtcaaccaaaataactccaggttggtgagggaagggacaaggaaaagaaacactgggaaattcaaagaaaggcaatctcagacactaaaagagcagagagagaaagcgacatgggggacttaaagaggctccttccagggcgctgggcttctcttccagcacagaaggctgcaaaagtggaactggcccccagttcccagaggatcacaaggccaaggatccaatgggcacaccatgaggacccaaggaaaggacagagaaaggaacggctctgggaaagccaaacctgg

SEQ ID NO: 6125 - DNA, 440 bp, Homo sapiens
aaaataaaattccagttagccctaattaactacaaccattcctgaactctccctaatgcttctttacctgttagaaaaaagcagtaggacaaaaacatgtaataaacatgcaacctaatcaaatagcctgtgctttctaaactaaatgctcaaatttgaagattaataggaacaacagtttccctttctaatattctatttactagtgtcctctaaggtttactgattctataaattactgtaacaatactaactactttaccatgcaatctctaaatagttaaatgtcttctgcctagtgatacaaaatatatgaaatattaaaaaattgaaaaagaggaaaaaataggaattaaaaaggcatacatggcctgttaacagatttctttatttttcttgggcaattctctaccatcattttggagtttgggcagacctcg

SEQ ID NO: 6126 - DNA, 280 bp, Homo sapiens
ccagatttcataaaactatgttaagggatcaggactttatctcacaggtatagagaattaaggagatattgaaataaagggagatacatgatacaaggagtactttagaattattagattcattttgacatagtgaaaacattcatattacttattttactacaaaatgtcacttgagttgagggggagttaagggaaagaaggcgaggcaaaaaggaagggctatttgaacaaaaatactcactgttaagctgtattggtgacagccttctcttactgg

SEQ ID NO: 6127 - DNA, 212 bp, Homo sapiens
ccaacacgcttatcaatgttatcgtgcctctagcaaaaagggtggacaagttccggcagttcatgcagaatttcagggagatgtgcattgagcaggatgggagagtccatctcactgttgtttactttgggaaagaagaaataaatgaagtcaaaggaatacttgaaaacacttccaaagctgccaacttcaggaactttaccttcatccag

SEQ ID NO: 6128 - DNA, 285 bp, Homo sapiens
aaaaccatttgacctctataatggctttctgtgggctttatatatcgctgtactagtaattaataggcatactttgtttaatattacttaattgatcttttttacaaagcttgtattgatgaattttatccatcattcctttctcccctgttactctttctttttttcttaaagaacatcgatatattgaactcttcttgaattctactcctggaggcggctctggcatgggaggttctggaatgggaggctacggaagagatggaatgggtatgtaaagttttt

SEQ ID NO: 6129 - DNA, 415 bp, Homo sapiens
cctaccctgtcaagagcaaacaataacatgtaacttgcttattcatttgtacaattaaatactagcttttgctcagagacaatgctataaagtattttaatgtcagtaacaatatacactacgaagtgcacttccattacaaattaacatggtgatatacagatgaacaccaccacccaaaacaaaccataaatgagcaacagttaaaacattaaatttataaatagcaaaaccacaaaataaagtatatacattttatagatttacccttgaacaaatatatagtgtatctgggaaagccaaaaaaaatgtgttttatcacataacatctgaataccagaaatgaagatctgataatattctaaaagccttgtaggctttctcccacttaatattcctttaactgtcgtccttt

SEQ ID NO: 6130 - DNA, 300 bp, Homo sapiens
ctgaagatgacatggttgttgccccagtcacccatgtgtccgtcacattagatgggattcctgaagtgatggaaacacagcaggtgcaagaaaaatatgcagactcaccgggagcctcatcaccagaacagcctaagaggaaaaaaggtaggtgggttactttgtttagggcgcatagtcaagtcttggtgtgaaatctagatatcacttttattctacatagttctttcctgctgcagttaaaacttatgtaagaaaaacattgaaggcacaaaatggaaattatgagttatttcttgg

SEQ ID NO: 6131 - DNA, 282 bp, Homo sapiens
aaatttcttctttatttcttgttctttcttttctttctctttctgttcctttttctccagctctaacctcttcttttcttccttttcccttttcttctctctttctttggatgcttctctgtgagtaaaaattgttaggttgttttcacatctgcaggtgttgatgcgtcggaactccctacctagaagtttctactcacaacagaaaaggtggtatctgaagtacagttgaaggtaaaaagcgaaaggttgtcaaaatccggaatgtgtgagattattttt

SEQ ID NO: 6132 - DNA, 286 bp, Homo sapiens
ccacttcaagtcacacaggtagataaaaacaggtccttttaggggccaaaggagaggttatcacagcagcagtttggttctcagcagaaatgcccagggcccctgttccacatcaaagctacaagcactgttgtcagggcatggagagcgacgggaccagagccctcctcgtctcagggcagcctgcctggcttcaaggtggagatcacagcgtcctctggggtcataggttcccccactgttccacaggagggaactggtccacctcgcccacctctgtgctcag

SEQ ID NO: 6133 - DNA, 196 bp, Homo sapiens
ccttagccctgctcctctctattccatcctgtagaggtcaggagtcaggagtcgctggcaggagacagcatgtcacccaggactctgccggtgcagaatatgaacaatgccatgttcttgcagaaaacgcttggcctgagtttcataggaggtaatcaccagacaactgcagaatgtggaacactgagcaggacag

SEQ ID NO: 6134 - DNA, 150 bp, Homo sapiens
ccatgctggatgttctgctgcttagacctgatctgctgccaattaccaggggcgggtcaaggatgaccttcttggatccaggaacgctaacatagatctagaaaggaagatggcagtttattacaccagaggtctggagaaacaagacag

SEQ ID NO: 6135 - DNA, 286 bp, Homo sapiens
ccagcagggattcagccggatcaacatctaccacaacactgccagcaacaccttcagagtcgttggagtcaagttgcaggatcagcgggttgtgatcaattattcaatcgtgaaagggctgaagtacaatcaggccacgccaaccttccaccagtggcgagatgcccgccaggtctacggcttaaactttgcaagtaaagaagaggcaaccacgttctccaatgcaatgctgtttgccctgaacaccatgaattcccaagaaggaggcccctccagccagcgtcag

SEQ ID NO: 6136 - DNA, 305 bp, Homo sapiens
ccacctacagcaaaatatcaaaatgggtaagtccttccttcctcttcctcctgattatatacaacatatctcctttcaagactattatttccatcatgcttattccttcacaaatctaaaccttgaggtgatatgaaggaaaccaacatcaagaaaagaaaactcaattcagaaatgaagaaaactggcaggtatacaatacacccccagagcatctcaatatccctggcacagtacaattcagtgtactgctacagcccatagataaatattggcagcttgaataagctcattttttccctcag

SEQ ID NO: 6137 - DNA, 255 bp, Homo sapiens
ccattgcagaagttttcggaaggatcggagctggttttgtcctcaacagggagcccattcgtaagatttacattgagctcatctgcgtcatcttattgactgtgtctctgtttgcctttacttttgctactgaattctggggtctaatgtcatgcagcatattttttgggtttatggttggaacaataggagggactcacattccactgcttgctgaggatgatgtcgtgggcattgagaagatgtcttctgcag

SEQ ID NO: 6138 - DNA, 309 bp, Homo sapiens
ccagtaggtgtgggtgcttttgatgtttgcttctgttggttgaaagaagcgcagggaagagactgggtgtagagtgatgtaccccaaggctgcagctaagatcaaattcttctggagagctgtgtgagctggatgctgatgcagaggagggtgggggagctggtgagaccaaggctgggctctgtgcccatcccactgggtgtgaaggaaggaaatgaccacagacagccatgttctgggtcggccgtctgcaagccaggctgactcctcctctcccccagagttcaggatggtcaacggcagcagcag

SEQ ID NO: 6139 - DNA, 306 bp, Homo sapiens; identical to SEQ ID NO: 2659

SEQ ID NO: 6140 - DNA, 331 bp, Homo sapiens
ctgccgtagcccatccagggttagttctggctgacgtaaatcaagctgctcagaaggtcgatcctggaacactggtggagcgcctgggccagcttccccaccgtggctccctttatgccttccctcatcacccacttttggagcatctggtaaaccttttctttcagtccatctcgctcatagtcatggtcaatttcatcaatctgagactgtgtgaagcccagtttacgggcacagtttttccagtgctttcccagattttccctgattgggtccaggtgtttatccgtcagactagtggtattatcaaagatagcttggtacttagcag

SEQ ID NO: 6141 - DNA, 255 bp, Homo sapiens
ctggcctgtgggtgatcccagctcttactaggagagggagctgaggtcctggtgccaggggcccaggccctccaaccataaacagtccaggatggaacctggttcacccttcataccagctccaagccccagaccatgggagctgtctgggatgttgatccttgagaacttggccctgtgctttagacccaaggacccgattcctgggctaggaaagagagaacaagcaagccggggctacctgcccccaggtgg

SEQ ID NO: 6142 - DNA, 263 bp, Homo sapiens
ctgaatcagcctgggtgccctagacccagtcatgtttgttggaccaaattagctgtcttttcatttcatgctatatagaactggcagtttacacttctgattaatacattgtctccgatcaggaggtttatttttttttcctaataaaatctgaaaggagattgggcagaaccaattagtaatcttacattacacattgtccctaggtatataatcaagaattaacagcagttatgattatatgattataatacatgcatttt

SEQ ID NO: 6143 - DNA, 206 bp, Homo sapiens
caggattcctttctccacattcctaaaactgggtaccacggtccgcaataatagtcaccagacccatcatcacaggctatgtcactaaaactgaccgaagcgttttccagttcacattttcctaaagattttataatgtgacaacccttctctccttagaaagttatacttctggcacttgaaatgctggatttgttgtccagttt

SEQ ID NO: 6144 - DNA, 284 bp, Homo sapiens
ctgctttggcaagagaatgagaggctccagaccatggtacagaacaccaaagccgaactcacgcactcccgggagaaggtccgtcaattggaatccaatcttcttcccaagcaccaaaaacatctaaacccatcaggtaccatgaatcccacagagcaagaaaagttgagcttaaagagagagtgtgatcagtttcagaaagaacaatctcctgctaacaggaaggtcagtcagatgaattcccttgaacaagaattagaaacaattcatttggaaaatgaagg

SEQ ID NO: 6145 - DNA, 366 bp, Homo sapiens
cgcagtgtgcactaaggggcccggccagccatgtctgcatttcggtggctggtcaagctcctcctccctgcatctgaccagcagcgcctttcccaactctagctgggggtgggccaggctgatgggacagaattggatacatacgccagcattccttttgaacgcccccccccacccctgggggctctcatgttttcaactgccaaaatgctctagtgccttctaaaggtgttgtcccttctagggttattgcatttggattggggtccctctaaaatttaatgcatgatagacacatatgagggggaatagtctagatggctcctctcagtactttggaggctcctatgtagtccgtgctgacag

SEQ ID NO: 6146 - DNA, 311 bp, Homo sapiens
ctccaaccagcctcacaagaacatcaacatcacatttgaggaagacaaagtcaactcaactctggttgtagacagagaatcctctcatgatgaatgtcaggatgctgtaaacattctcccagtccctggccccacctcttctgccacaaacgtcagcatggtggtatcagccggccctttgtccagcgagaaggcagagatgaacattctagaaatcaacgagaaattgcatccccagctggcagagaagaaacagcagttcagaagcctcaaagagaaatgttttgtaactcaactggccggcttcctgg

SEQ ID NO: 6147 - DNA, 348 bp, Homo sapiens
  unsure (165): n=A,T,C or G
aaaggtaaaaggatgggagaaaagtacacagaaagatattctggagaaaaggcacagagtgagccaaggcacaaggtaaaatgtttgactggttagagacgctagattattttgtgtggctaagacaaaacaaagctggtggggagtggcaggaggtaagtctanaatggcacaatggggccagactgcgaatggcaaactgaagtatgtgatcttttattctaaagaaaatgtagtatgattagcacaaaaaaagaaaaattattggccgggcgcagtggcccatgcctgtaatcccagcactttgggaggccgaggagggtggatcatgaggtcaggagatcaaga

SEQ ID NO: 6148 - DNA, 419 bp, Homo sapiens
ccagtggaagaatgaaacttataacagtcacccacttttagtaaaagttaaagctcaaacaatagacagagccaaatatatcatgaagcgcctaaccaaggaaaatgtgaagccttctggaagacaaattgggaagttgagccacagcaatccaaccattttgtttgattatatcttgtcacaactacagaagtatgataacttaataacacctgtagtagattcattgaaatacctcacttcactgaattatgatgtcttggcctattgtatcattgaagctttagctaatccagaaaaggaaagaatgaaacatgatgacacgaccatctcaagctggcttcagacagccagttccttttctttcaacttattgtatctgatagccggaatcttgcagtggctccccattgtccttt

SEQ ID NO: 6149 - DNA, 270 bp, Homo sapiens; identical to SEQ ID NO: 2914

SEQ ID NO: 6150 - DNA, 224 bp, Homo sapiens
cctctggacctttgatggaaggggctgccatgaagacctgtgacatgccctggagacattttccccattgtcttggggattcacatttgactcctcgttacttaaacaaacttctgcagccagatcgaatttttcttgagaaaatgggattttcttttctattgcattgtcaggctgcagattttccaaactttcatgctctgcttccctcataaaactgaagg

SEQ ID NO: 6151 - DNA, 389 bp, Homo sapiens
ctgtcaggggcggcgtgcctggtgatgcggcatcttaccttcatccccatctcagaatgggcagccagtctcagattcaaggaggaggaatcctgaggtgtggcgttcagtcctgaggtagacctgaggtcccctggaaattgtgttgatgctgagatggatgaggggtgctcattctctcaggtagacagtgaggagtcctggttcagccgagcctccatgtctgcatggatggttatgaccctgattgtttttggaaacagccaagctctctaggtgtactcagcaaatgcaaggtatagtgggtcctgcatacccagggtattatttgagccatggaagcaaaacagagactgcttagcctccctaagagtagttggtgggagtgg

SEQ ID NO: 6152 - DNA, 212 bp, Homo sapiens
ctgacactagaaaaccttcagatgctgccagagagtgaggatggggagagctatgacacagagtcagagttcacggagttcacagaggacgagctgccctatgatgactgtgtgtttggaggccagcgtctgacgttatgagcgcaaaggggctgaaagaacatggacttgtatatttgtacaaaaaaaaagttttatttttctaaaaaaaa

SEQ ID NO: 6153 - DNA, 351 bp, Homo sapiens
  unsure (301): n=A,T,C or G
  unsure (324): n=A,T,C or G
cctctggaggctcgggactggaggcaaagcccaggagaggtgggagacaggagctcccgactgtcagaggcatggaaatggaggctgagtcctggagaaactccagagcggagtctgagactagcagagtctcgagagcaaagccccaggagaaaagaggtggaaagtagactgagcccaggggaatctgcctaccagaagttgggcctgacagaggcccataaatggagacctgactccagagagtctcaggaacagagtttggtacaactggaggcaacagagtggaggctgaggtcangagaagaaagacaagactactcngaagaatgtgggagaaaagaagagtgg

SEQ ID NO: 6154 - DNA, 410 bp, Homo sapiens
  unsure (9): n=A,T,C or G
gtgaatcanaaaactgatttattctggggcgtgatcctaatcttgacttgcacaagtgtaacttgacctagctcaccaatttcagtaacattgttctgttctcagttcctggcatgggatattccaaattcctgtgtctggagggaaatgatagcttttgtcttgccatcctgagtgaccagtcacaaagcagttgaagggggctggaagccaccctatgaggacacgccattagtatgtaagcagaatgtgtgtctacctgtcaaagtaatttccagtaacctgagttcacaattctggtcctaggtgagtttttctaggagtgaaaatgcagaaaaggatgttgaaagctattggctaatgtatcatttgaactgctgataacctgagaaggggctcaggcatggttt

SEQ ID NO: 6155 - DNA, 571 bp, Homo sapiens
  unsure (422): n=A,T,C or G
  unsure (471): n=A,T,C or G
  unsure (520): n=A,T,C or G
cctacagcccagagaagacattttttcttcatttacattagcttatgaaaaataaagggaaaacaaccctcttcaatacaaaaacaaaaaaacaaaacaaagcaattccattacaataaaaatgaaagcaataacaatttggagatcaaagctgcctagctcttggcaataatgagctatctggatttcacatcttccgctagcatggttctgcccggctttggtaacaccacatgtgggtaaaacggtataaagaattgaagaactgtgggcacagaatcacccttactgcagattctcattcttaatatttccctttaacagcattttgctgttctcaagtctcagaaactttatgtggtgggatgggagggaaccaccataaccgcctgcctgcctttttttttcttaactgttattgntcataatagagatggggctcactatgttacccaggttggtctcaaactnctgagctcaacaatcctcccccttggctccaaagtgctaggatacaggngtgagccaccgcgcccggcatctgcttttgccacctaagagagtgctcaac

SEQ ID NO: 6156 - DNA, 577 bp, Homo sapiens
  unsure (514): n=A,T,C or G
  unsure (533): n=A,T,C or G
  unsure (571): n=A,T,C or G
ccatggagagcaggcgggtttgtgtatggctgatgttgaagccctggatgtgcagctccaaggggacgggacgcacattgggatggaagttgaaggtggaggtggcactgcagcccagccagtgggccacatccttggcattggagagcgaagagctgagtgccacaatgcgaatgggccgctcaatctgggaggagatgtagcgcattcgggagcagatcacttctaagacaggcccattctcgcccccgataaggtggacctcatccaccacgaagaggttgatgttctgcacgttcttgcgctgcttccatcgccgggaaagtatgtcccacttctcaggggtgctgatgataatgttccctttgcccagcagcttcaggtctgtgctggtctcgcctgtcaggagtaccaccttcttgttgagcctgtcctggaacttctcgtaccagtccatgtatacctgctctgccagggccttcatgggggtgatgtacacacagcgcccttccanctctgcagcagcattccangaagggaaactctgcacaatagtcttccccttgcccgnggggcc

SEQ ID NO: 6157 - DNA, 233 bp, Homo sapiens
aaatgccgattcacattactctgttcaagctgcgttgagatgttaaactggcttactatagacttcgtaaaaatggctccagaagagtaacaaactgaaatctttgagatcacacaggttggaaatatgtacataactgcacaaggtgtcaattctgctctacagtgcagttttagtcagttttagttgcataggtttccattgtatttatagtctgtttatgctaaatctgg

SEQ ID NO: 6158 - DNA, 376 bp, Homo sapiens
aaacatgacttggtgctgaaagacacactgctgggacccaagttccctcccacatggacgggatggaggctggagcccaaggtttcagggaaacgtatgtggcctgtgcccctgggtgtgatcatgggcacacacatttatctggcagggccagccttggctgctgaggggtcatgggcacagaggaggaccatctggtgacactgaggaccagtgttgcccacagccagggagaataaggatgaagaatgagtgttgccacacccctccagatgagctcaagaaagaggccaagcctagccctaaacaggtctgtaagtaattctgggtcctgataggcaaacgcatccagccagagggccctgggtccttcagg

SEQ ID NO: 6159 - DNA, 499 bp, Homo sapiens
ccaaggggatgatgccctgtagcactttgctttgcaggaagggaacaactgtgctgtgaataccaggatccaggagggagggagggtatatctgtgtcccccagctagggacaaggcttccttaaccttaggtcctcatgcttatattagttcttctccaacaaagtttgactttgagaagaagctggcacatggctgaaatgcgctcacgcggttgggggaagagtgttcttccagtcctcctccccacagggcctcctgcttctcctaagtacctgtcatcaaaggagatgaagatgaatcccccttcagcccccacacctcaatgagttgtcaagtactctccctcccacttgaataggaagcaggagcagcaggccaggttgcaggttgaggaagtcagaagttaacttgagctgagtttgcagctctggagagattgaggagcagacttttctcttgtcactttggaaggaaaggattgtgaggctgccccttt

SEQ ID NO: 6160 - DNA, 359 bp, Homo sapiens
ctgtcgccgccgctctcagggtgaagagggaacagaaatctttgccccctgactttggaaatctcgtttaaccttcaaactggccatgtcaagggttccaagtcctccacctccggcagaaatgtcgagtggcccgtagctgagagttggtgctacacacagatcaaggtagtgaaattctcctacatgtggaccatcaataactttagcttttgccgggaggaaatgggtgaagtcattaaaagttctacattttcatcaggagcaaatgataaactgaaatggtgtttgcgagtaaaccccaaagggttagatgaagaaagcaaagattacctgtcactttacctgttactggtcag

SEQ ID NO: 6161 - DNA, 201 bp, Homo sapiens
acgcacacgagaacatgcctgtgagtgctttggcccaggtttcggcggagatctcgctgttctgtccgaactctcccctcacgctgatttcggatcgtagagggtcctcatttaccctctgcacttcttaggacattaactccagggaccgcagcggcccacgggccacccgcatagacgggagcggagaggagataagat

SEQ ID NO: 6162 - DNA, 231 bp, Homo sapiens
ccaaaagaagtaagacagcttgctgaagatttcctgaaagactatattcatataaacattggtgcacttgaactgagtgcaaaccacaacattcttcagattgtggatgtgtgtcatgacgtagaaaaggatgaaaagtaagttttattaactctgttatatttgcttcctaacaactttgctgtaaaattgagggatcattgtttggtgagttgttttaggttatttcag

SEQ ID NO: 6163 - DNA, 343 bp, Homo sapiens
aaatcaactaacagggaattcatatccaacaattcactgatattttcttggtatgttcttaagaacaaaacaaaacaaaaatctcaatttgaactaacagtgggtggcatacagagagcttgcatacaatactcttacaagaattacgtactatactgaacttctatgaaattatttacctggtccgtaatgttattcagggcaacccatcccaaaaagagcaaattctgcaaccctcaatggcaaaaacgctgcccagcattgcttcccaaaaatgtccttgcaaagtttcccattgtaagtatacaatgtggcaaaagttcaaagatcagaaaaagtcttt

SEQ ID NO: 6164 - DNA, 334 bp, Homo sapiens; identical to SEQ ID NO: 5578

SEQ ID NO: 6165 - DNA, 308 bp, Homo sapiens
cctggataacagtatcaccatccttatttacagaagggtaaaactgactcttaatgagaaaagctttataagttcaagggctgtaaaatatgaactacttagggtcgtttgccttccatgggaacttggctagacttagaaaaagctgtttgttgtgctaatgtaaaagtgtcatacaatttagaagatttttgaagatggtaaacttagaagaattctatgttctgaaatgcacacttttagaatgtttttctttgaaaacaggctaatagttttttctttttttgacaaagtttcagctcctcttt

SEQ ID NO: 6166 - DNA, 383 bp, Homo sapiens
  unsure (376): n=A,T,C or G
  unsure (377): n=A,T,C or G
  unsure (383): n=A,T,C or G
aaaaatagccatctttgtacttttttgcaagtttctctataagcttgaaatagtcatgtgatacttcgacaaacatcatatgccttgcagtttttctcggtcgtgttctcagggttgagtagtccccttagctacctaactttactttcaatacaaagcacaaaaaagaatatcttcaaataaaagtttgcctgcagaacctggcaaaatgacccattaggagagtttagatgttttaattttatgtgctcccagctactctggagtctgaggtgggaggatcacttgaggcagaggttgcagtaagctgagattacactactgcactccagcccatgcgacagaggaatgagagccagtctcaaaaaaaaaaaannaaaaan

SEQ ID NO: 6167 - DNA, 217 bp, Homo sapiens
gggtgtttctggttttgccttagcaatgcatcggtctctgaggtgacactctggagcggttgaagggccacaaggtgcagggttaatactcttgccagttttgaaatatagatgctatggttcagattgtttttaatagaaaactaaaggggcaggggaagtgaaaggaaagatggaggttttgtgcggctcgatggggcatttggaacttcttttt

SEQ ID NO: 6168 - DNA, 263 bp, Homo sapiens
ccactcacccactgtgaggtcctctaggaaaatacacaaagagaggaccagaccaggcagaggaacattttgtttcatatgaactgtggctttgacccccaaactgcaaggaggaacttgctgggccaagctgcagcggcgctgtcttgctggagtggggacctagagtcagagaaaacccacaggctcctctgcccattctcctccatctgcacacgtctcagcctcggaccctcaccactccatggtgaggaaggccatgg

SEQ ID NO: 6169 - DNA, 330 bp, Homo sapiens
ccttgcccacgttctccttgtaggagacgaagttgtggaaggtgaggtccaccatgtccgggccggacaccaccgtgagtgtcttcagcaggaaactgttatcaggaaagtccatgttgaagacgtcccggagcttctggctcttgggcatcttggcaaacttcccaaagcgagtatcccggatgctggtgatatccagaaactccatctccttactttgatacgtccagtataagtagtagcccttaggatccacacggaggataactggagaggcaactgtagtttcatcatcccatttgatgaagcgctccccttggctcagatagg

SEQ ID NO: 6170 - DNA, 488 bp, Homo sapiens
  unsure (4): n=A,T,C or G
  unsure (204): n=A,T,C or G
  unsure (209): n=A,T,C or G
  unsure (243): n=A,T,C or G
  unsure (245): n=A,T,C or G
ccanaggcagagattactatcctggcactccagtgacccactgggtgactcactgatgccacagcacccgctaggaagctctgctgaaccttagtatttggtcctaaattttatgactccatggagttcccgtagtccatggctagttaggaagaaaggaggtgggataagggtcaggcccaggtgacccctaagaaccagganatggntaaaagtttttttttatattctgcttttatgatntntgagtacctgtttgtctccaggccaaacctttgggcttaaatatctttttcctagacaggtttttgctagtgttgaattttcttcttcctctggcctccttctgtgcccctttccccaagcccaagactgcttaacttccaaagcaaattctagatagacactgtatttattggtatgggagtgggctctatggggtggtctgcacccatctgggactctttttcctaaatcctgcaccaaat

SEQ ID NO: 6171 - DNA, 278 bp, Homo sapiens
  unsure (5): n=A,T,C or G
gaggnccaacaccttaagcctgtgtccacgggttaaaaaggtggatctcaggtccctgcaccatgcaactttgcacttcagatccaacgaggaggaggaaggcgtgtgctgtggtctctcagcaaacctgctgggcgacagcggactcagatgccttctggaatgtctgccgcaggtgcccatctccggtttgcttgatctgagtcacaacagcatttctcaggaaagtgccctgtacctgctggagacactgccctcctgcccacgtgtccgggagg

SEQ ID NO: 6172 - DNA, 177 bp, Homo sapiens
ccaggctggtcttgaactcctgacctcaagtgatccgcctgggtcagcctcccaaagtgctgagattacaggcatgagccaccgtgtcggtcctgttttgtgtaactttagtttggctacatcttttcttgcacctctccttagacaaactgtacactaattggaaatgtaaacttt

SEQ ID NO: 6173 - DNA, 459 bp, Homo sapiens
aaaaacaactaagaaagcagcactgaaaattgggaggctaacaaaaatcaaaagaccctttctttctctaccaccgagctcatgctctaattttaacgtgaagaaatttttacagttcattatggacaaatgttaaaatagtatacacattctatctatccacagaaatttccaccaaggccagaactaggcttttactagaacaattttatctgaatcctagagtttgggaaattacttggtcctggatattacaagaaaaaatggctttgggacttaggtagaggcagaaggggaagatgacactgggcagaatgacaaagggcagtaattttcaaaaggggtgtgtgtgtgagtggttgtgttcatcagaatcacgtgttacttttaataagtgtggtaactgaggctaataagcaccactgagacctgttgagtacaacaagggcatcttcgttt

SEQ ID NO: 6174 - DNA, 286 bp, Homo sapiens
aaactgtcttgcaaagagaagatatcttctgatatcatcgagggaatagacacgatcaattgattcctcaattcttgaatgcaaatctactatgcgcctggcaatggcataatctgtaacctaattcaaaacaaaaaaatcactttgatagtcacagcaatatcttctccagactatcccaggcaataagaaatgatttatcgccaaaaacaagctctaatataccacttaaagaagtattaatgggtaccaagtttctgatgaaagtttgggaacaggtggattt

SEQ ID NO: 6175 - DNA, 336 bp, Homo sapiens
cctctggtgcggaaactgagtcacagccagacctcagggcacggcctagacgcttacgagccaaagttaggggtagagagcagagacctccggggggtctcagggagtagggggcttcagggcctcccagtctagagcccggattggcgagttagacgcttgtagatccaaggttggattggggtggggtctctgggacgttggatcgctacgcaaggattggggggattcaagtgcttagagatcgaagtctgccctgggtagggggagtcagacaattggaaagcctaggtagttatttggggaggggtctctacgccttggcgaagcgcacag

SEQ ID NO: 6176 - DNA, 199 bp, Homo sapiens
aaaccagctttaagacaaaaaatcgtcaccaagttccatatgacaaaaaagggtctttcagtttgaattactttccatttctatttgatcaaataaaccaaaatattactaaggaagagcatccaatgatttgtaaagctgataaaactgccctgtttcaaggaaagctctttaatagatacaagtcaagctctcgttt

SEQ ID NO: 6177 - DNA, 384 bp, Homo sapiens
aaatttactggaggacttttttgttctcttcttttttctttttttaatagcatcccgctcttatttcagaataaaaaaatttttaaggtatgttgagtaagaatctatagagcaatgaaaatgcaagagcaatagctatgggcaccaaatggtcaatcttcttatcataatgttgagtggaagaagccaggtccaccagacacatgctgctcatttatgcaaagtttggacacaggcaaaacaaaactagtttgatcgtgatgggaaacattagagaaatgcaaagacatgaccatcataattgttaggagaaggcattggttaggattgggaagcggcaagcagaagcatttagggattggctggcaatgttttacttctcag

SEQ ID NO: 6178 - DNA, 606 bp, Homo sapiens
  unsure (508): n=A,T,C or G
  unsure (603): n=A,T,C or G
ctggcctctcctgacgtgttcctctttaggagcaacaggtgaaaaaatgatacggttctggggcaggcccatgttttgtgcatactgttgaatattaggttctcctactgctggaaaacgcaacagtcagagtacactattggggaacacgcttcagaatgtttgcccacatctgcaaagtagaagggtcaattttatacaactgattaaagttacagtatacgatggcatcttctggtaacccgtactgagaacgggtggttacaataatggtacggggaacctcctctccagttgcagccttattgttgatctgagtagttgccagtccattgctaatactgaatccattaattgttatttgaatctgtcctcggttaatcatttcaataactgcttctgcaatagtattcataggaataacaggcatattaagagctgtgttactgctatctgcattgtctcctccatcaggacacttcatcttgacaattttcacatctggtangactatcaagaaatgctttgaggtcgatgcccttcagaactatccgattgtcataaatgtgcccattggactcaaaatcgatgactgcttttttnttt

SEQ ID NO: 6179 - DNA, 253 bp, Homo sapiens
cctggacatacctgcggatatggacgggaaatccatcctcaagctgctggacacggagcggccggtgaatcggtttcacttgaaaaagaagatgagggtctggcgggactccttcttggtggagaagaggcaaagctgctacacaagagagacaatgacaagggtggacgcccaggaggagaactttctgcccaagtaccagcgtgtgaaggacctgtgtcagcgtgctgagtaccagacggcgtgtgagcag

SEQ ID NO: 6180 - DNA, 600 bp, Homo sapiens
  unsure (455): n=A,T,C or G
  unsure (537): n=A,T,C or G
  unsure (564): n=A,T,C or G
  unsure (598): n=A,T,C or G
  unsure (599): n=A,T,C or G
aaacttacttttcttgcccttgccaccaacactaatttcaggagtctcaaggttcagctctgcctcaggaacagtgacatccagtgaaggtgacttgatgtcagctttggggctttttgccccaaatccaaacttgggtttcttaaattgggggattttaacatctggcccttcgatgttaatatctgggctgtccatgtgtacatctaagcttggagcttcaactttgggtcccttgaggtccacttcaccaccttctaacttcggacctgaaaatccaatttttggtgccttgagatgcaaatcaacatcaggagcagctactttaggagcagatatctccagcgatggcatcttcaaagatgggccactgagtttggcatcagggccttcgaaatccagacgtggacctttaagatctacttctgggcctttcaaagtcccttcaaccttanggacagacacatcaaaatctcctttactttgggtcctttcaaatccacgggaacatcaggtattggagatcttggggagctntgattttatttcaggcatcttggaacntgggggcccttcaattttgcggcctggaccttcnna

SEQ ID NO: 6181 - DNA, 326 bp, Homo sapiens
ctgaatacacgtcttttgtggaaaatttcttcctgctgagaaaattttgggattaagaactgtattaaagactgttacggcaaagacaagaacatcaattttatttatacgatactgttaaagaagaacagttaaagagtttggtttttgtttttttcaaatcccagtctgccctcaaaagctgggaaaattctttgtggctctatatataaactatcctgaggtcctctcagaacgcaaagactcctgtttttccaatccactgggtactgtcaagataatatcagaaagagtgagtataaaaaaatgaatgggagtaaattttt

SEQ ID NO: 6182 - DNA, 507 bp, Homo sapiens
  unsure (480): n=A,T,C or G
  unsure (481): n=A,T,C or G
ctgtcatatgaataattgaatgagtatcagtaaagtgcttcagtgcgtgcttgtagctttatggttgtgattggttgctgtggagggggaggccctcagctctgagctgggcagggagaagcagagaaaagttacttcagcctgaggctccccactttcgttagctaagcccggggttactggtgtctctagggaatgatcagcactcggtcagaattggaggaactctcttcttcttttcacgctggacaaatagtcagggccgtgggctccaaggtcaaaattctgaaaacaggatatagagcctcagagaaggagacgtccaggaaagtatgaatatgcgatccatccacagcattgtagaatgagatatctccagtctcatagtccaggaagacccccactttcttagggggcttaggaagtttcaggttggttctgggctcagttagagtcccgatacttattcccatcagtcanncccatagtccagaatccattcttcag

SEQ ID NO: 6183 - DNA, 271 bp, Homo sapiens
  unsure (137): n=A,T,C or G
  unsure (228): n=A,T,C or G
ccagcctacaatggggatgttgtgtttctgttcaccttcgtttactatgcctgtgtcttctccaccacgctggggtctgggaggaatggacagacagaggatgagctctacccagggcctgcaggacctgcctgtancccactctgctcgccttagcactaccactcctgccaaggaggattccatttggcagagcttcttccaggtgcccagctatactagtgccgngagggacagaagggacagaaagaggctgaagaccatcatccag

SEQ ID NO: 6184 - DNA, 389 bp, Homo sapiens
ctgagagactctaaatccagtgacaagtctgtctgcctattcaccgattttgattctcaaacaaatgtgtcacaaagtaaggattctgatgtgtatatcacagacaaaactgtgctagacatgaggtctatggacttcaagagcaacagtgctgtggcctggagcaacaaatctgactttgcatgtgcaaacgccttcaacaacagcattattccagaagacaccttcttccccagcccagaaagttcctgtgatgtcaagctggtcgagaaaagctttgaaacagatacgaacctaaactttcaaaacctgtcagtgattgggttccgaatcctcctcctgaaagtggccgggtttaatctgctcatgacgctgcggctgtggtccag

SEQ ID NO: 6185 - DNA, 262 bp, Homo sapiens
ctgaaggagtatcacatcaagcacaacattctctacttcctcacctacgccgacgaggtttctccaaggacatcaaggtgcccaagagccgctacctgggctacatcaaggactacgagggagcgacgctgatggagtgtgagctgaatccccgcatcccctacacggagctgtcccacatcatcaagaagcagaaagagatcatcaagaagctgattgagcgcaaacaggcccagatccgcaaggtctacccggggctcag

SEQ ID NO: 6186 - DNA, 261 bp, Homo sapiens
ctggacataccaattggtatcaaatagaataaaatcaaatataaatgtttgagtcttaggttaaaaaggaaggttatttgtatagtttatagataatgaaggaaaaatttctttttcattgcaggaaatcttgtttactggaagatagagtcactcttttcatataagacaaatagtgctttaatgccaacttctttttatctcaacatttcaggatcatgctaggcacactgcccccttgaatagacattatatgcacag

SEQ ID NO: 6187 - DNA, 247 bp, Homo sapiens; identical to SEQ ID NO: 2583

SEQ ID NO: 6188 - DNA, 337 bp, Homo sapiens
ttggtgaaaattactgatggctctccttccaaagaggatttgttggtattgaggaaaacggtgaaatcctttttggctgtttgccagcagtgcctgtctaatgttaatactccagtgaaagaacaggctttcatgttactctgtgatcttctgatgattttcagccaccaattaatgacaggtggcagagagggccttcagcctttggtgttcaatccagatactggactccaatctgaactcctcagttttgtgatggatcacgtttttattgaccaagacgaggagaaccagagcatggagggtgatgaagaagatgaagctaataaaattgagg

SEQ ID NO: 6189 - DNA, 181 bp, Homo sapiens
gaggtctgggtttttctgagaaataacaccagacatctttctcaccccctgcagaatgagtccctggaacgccagatgcgtgaaatggaagagaactttgccgttgaagctgctaactaccaagacactattggccgcctgcaggatgagattcagaatatgaaggaggaaatggctcgtc

SEQ ID NO: 6190 - DNA, 327 bp, Homo sapiens
cctgcggctgctgctgccgccttctggaatatctaaagtgctttcacttggctcatcagggtctggaggattactgagtagattgtgaacatctcctcgacgacgttgtctgtgcctcctccgatactgaaattcagcatattcctctggtgatgcaaatcctaaatattcccaatcccatgttccaccagcaaagctgcgccttggagcttctggtgagtctgcaggagctactccccgagccacagatgccaggaattcttgcctcttctgctgtacaaggcatgctgctttgatgatcttgtggcggggtgtgcgaaggtaagg

SEQ ID NO: 6191 - DNA, 337 bp, Homo sapiens
ctggctgatgtctgcttggacactccactctgtaatgggcacaccacagggatggatgtcctctgggcagggacccccatggtgactatgccaggagagactcttgcttctcgagttgcagcatcccagctcacttgcttaggttgtcttgagcttattgctaaaaacagacaagaatatgaagacatagctgtgaagctgggaactgatctagaatacctgaagaaagttcgtggcaaagtctggaagcaaagaatatctagccctctgttcaacaccaaacaatacacaatggaactagagcggctctatctacagatgtgggagcattatgcag

SEQ ID NO: 6192 - DNA, 349 bp, Homo sapiens
ctgaatccctgggccagttactactcttccatttgaactccaagtctgctttacagaggattagtgtagctttggtaatctgtgaatgggctgctttacaaaaggagtgtaaagctgttaccttagctgtgcagccgcgtttacttgatatcctttcagaacatttatattatgacgaaattgccgttccattcacacgaatgcagaatgaatgtaaacaacttatatcatcattagctgatgtacatattgaagttggtaatcgagtaaacaacaatgttttaacaatagatcaagctagtgacttggtcactactgtttttaatgaagccacatcatctttcgattt

SEQ ID NO: 6193 - DNA, 441 bp, Homo sapiens
aaatgtaaataaattggcaccacctttaatcagactgatgtcctgacttgcacaggaaacacgcacctaacctcaccaacctcaagccctccctcctcaagtctccatgcaaagactgtgccagtcagagtggagctgtccccccgacgagcccccagaagcgcccggccggccacggctgtcattttgagggcggaaaataactggatttctggttaattggtgacatcctcaagagctgtggcaagccatgtctcggccgcgtgatggggcagacatggtgggtcctggcggccttgtcttcaccaagtgctcctaactctcagcaaacttggggttcatgaccgtcgtggtggcgctcttgaaaaggggattatcattgttccactgggacttgagcttctccttctcaaagcgcctgtactcccggaggtcgctcag

SEQ ID NO: 6194 - DNA, 207 bp, Homo sapiens; identical to SEQ ID NO: 5458

SEQ ID NO: 6195 - DNA, 311 bp, Homo sapiens
cctccacgaagaatatttttggccgatactcttcacagcggatgaaggattggcaggagattatagctctgtatgagaaggacaacacctacttaggtaaagtggcccggcctgggagccctggtatccatggggaagcccactctcagagttctgagataccaggcttataggaggcacagtctgtgagtgggaagagactggagtgtagatgttgcccatttgtaggtggtaaaatcaattgtttttgatggaattgattttccctgagtggagtgctgggggaaggaggaggtccaggccggtagtgg

SEQ ID NO: 6196 - DNA, 373 bp, Homo sapiens
  unsure (316): n=A,T,C or G
cctactgtatttattttagtaatgtgctacattagagtagaaaaaataagaacgtgaagaagaaatagcaaaaggagaaaattaccacagatttacagaacaatatgttttaagagagacgttgagaaagattcacgtggccgtcctcagcgtctcaaactcctttgaagggagatttgagcttaggctgttgatgacataagatgcaaagcaaaataatatactctctttattacccagaaaatcaagttgccagtcaaaactgagaaatgagaaagaaaatcagatttctttattcatctctgttgaagcctanaaaaccaaaacaagctggttgtggttcagcatcatggtttaggaatcaagctgtcag

SEQ ID NO: 6197 - DNA, 290 bp, Homo sapiens
  unsure (45): n=A,T,C or G
gaggtcctttccttgagctgcacgtgaacctgtgtgggcaggcancgtttgcaggcgtgtttacgggcaggcagcgtttgcaggcgtgtttaccggcaggcagcgtttgcaggcgtgtttacatgcaggcgtagcaccatgtgagaccactggtccagggtttcagaggtcctgctcaggtgaatcggctgtgttctcacaagttcacggagctgagtgggtgtgcaacatgaaatactagtgctgtgagggacagaagggacagaaagaggctgaagaccatcatccag

SEQ ID NO: 6198 - DNA, 303 bp, Homo sapiens
  unsure (1): n=A,T,C or G
  unsure (3): n=A,T,C or G
  unsure (10): n=A,T,C or G
  unsure (22): n=A,T,C or G
  unsure (41): n=A,T,C or G
  unsure (45): n=A,T,C or G
  unsure (49): n=A,T,C or G
  unsure (249): n=A,T,C or G
nangtaaaancatggaagaganggaaaaaaaaccagcttangaanaatnaactgataaactgcaagaaaaaatgcaacttacatcacaaaagctaattgctttattatttagagagtacttaaaaattaaagaccaaacttctctccacccaacaaaaatgggcaaaggacatacagctaggtcaccaagaaagaagggcaaataggtggtgagtatatgtaaagatacttgataggacttttgcttanttgaatctttagcaaatctcttttatttcttgggattttgaagaagtaattttt

SEQ ID NO: 6199 - DNA, 446 bp, Homo sapiens
cctgtccatcatgtattgtctgaggctgcttcctgctgtcatgggagaaacttttgggcggatgctgctgggagccggtcagactgggcagactggatgagaacaggaggatgagaatgagcaaaggcacccacgaggagaacaggaggaaaacccacgcgtttgggggcgactagaaatgcgcagtgagccttggggtcccctgtgctgccctcaggctgcgtttgccttgagtgaaatattttctccaaaaggcagaggagaggacaaagcccctgtgcatctccattctccacagcatccccaggatggcaggaggaggtccccgagaactgcacaagctgtgtttgacccaaggggactttttcctcttgaggaggtttgctgggtcatgtcagtgatgaggtttaaggacagagcccaggaccctcacagcctggatatgg

SEQ ID NO: 6200 - DNA, 376 bp, Homo sapiens
cctcaacctaatatgccccaaagttgatacaaattttattagaaaaacaaactttttgtaagtctaacaggtaaaggaacaaagaatcagatctatttttcttatagcttccttactcttcccttccctcttttattctttatcacctaaaagcttggtcaccagtaagttgaaaaggttaaaatatggctatgaaagtagaaaatatagaaaaatatttaagatgttcaacagtaatttttagagtaaagttagttaagcactagagtttatgcaacactgtaaaatacaagtattttactaactacactggaaaaaacacctacttgcaattttaattaatcattataattcaaaaacaggtttatataactgg

SEQ ID NO: 6201 - DNA, 435 bp, Homo sapiens
ccaggtggccctccgtgtgaggtcatggtcacagcatagtttggagctagggagggactgtcagcctggaggtttggagactcattctggaatctagtgtgggtcaagccaacttcagggagaggctgagccagggtaggagtcacaggagcagacgaggatgtggggtgccgtgcacagagctccatgaccagcttgggaagttagaaggaaggggaggcaggaggctgcttagtctgctgccatgatgggccccatgaatggtggctctcaagcttctgtgctacacaggggtgtgtggttgggcgagtgtccttgttaattgatacctaattggccttggttgggaacatagccatgagtgcccctcgtgggtggggcgccagtctgtcattgacctcattgtgtcagcaccttccccccaaggaggctgac

SEQ ID NO: 6202 - DNA, 158 bp, Homo sapiens
  misc_feature (1)...(158): n = A,T,C or G
gtccctgaacgctcncttgtctnctggacaacccatactaggactncacnttgacactaaggtgagctcgcagntgtgtacgctgggacctgtaggtgaaccantnccatgcttgcacttgccctttcttncgactgcctgctttaacagactctgcg

SEQ ID NO: 6203 - DNA, 135 bp, Homo sapiens
  misc_feature (1)...(135): n = A,T,C or G
tctnaaatagtctcacctctggctctgatactcacgcttacacggttgatatctcacaggacaacaactcggacgagctcggacttacgtaagtggggactcacccangcctctggatagcgcagaacctngggg

SEQ ID NO: 6204 - DNA, 221 bp, Homo sapiens
agagtggggagccacagcagcacaagcggccacctgccaccacggccacacaggtctcccagcagctctgcctcatccaggtggtgggtggagaggatcagccgtgcgaccttctcggtatttgagcagcagctcccaaataccgcggcgggaagcaggatccacgccagccgtaggctcgtccaggataacaacttgggagccgcccacaaaggcaatgg

SEQ ID NO: 6205 - DNA, 190 bp, Homo sapiens
  misc_feature (1)...(190): n = A,T,C or G
agctgggnactgcagggcagatgccatgcattcgcttgttgaangccaccangatttgtgtgacgggcaaaancaacttccanntctanacacctccgccaccaccacnctnagggngaattccaccacactggcggccnntactagnggatacctagctcggnaccaatcttggcgtaatcatngtcat

SEQ ID NO: 6206 - DNA, 35 bp, Homo sapiens
  misc_feature (1)...(35): n = A,T,C or G
cctggacacctgtnaagacnactnttatgacncat

SEQ ID NO: 6207 - DNA, 393 bp, Homo sapiens
  misc_feature (1)...(393): n = A,T,C or G
aaaccctgccttgctcaactccggagttggtgggtttttttctctttagaaatagcgtctctgtctgtaaggctgtgagggtgtagtgcagtggcacaatcacagttcactgcagcctagaattccttcgcttaggcgatgctcccaccccagcctcctgagtagctgggagtacaggtgcatgccacacctggctaattaaaaaaaagnttnttagagatacggtctctgtatgttgcccaangctgatctcaaactcctgtcctcaagnaatcctcctgcctttgcctcccaaagtgcttgggatcacaagtatgagccaccacatccaacccagagttcgtgctcttaaccaggggatgacatgttgcaacttcactcntcacanntgtg

SEQ ID NO: 6208 - DNA, 395 bp, Homo sapiens
  misc_feature (1)...(395): n = A,T,C or G
aaacctggtcaagtggtaatgttctgatgaatttgtttctctgcaagaacaaggaagaaaacattactttgaccaggtattcaacatgatttgatccaaagctacttttagatgctacatttacctgataaaaagagggataacattatgcccaaatggatgcattgtaaagaaaatccagaacagttaacaactacagaaacaaaagagatatcttccgcttactttatttacttgttttacaaaggcagtgaacaccaaaggatatcaccaacaactaaaaggagttcaaaatgcaggggaaggaaaactagctgaaacttgagtaaaggctcctgtgcggngtgagcccttgggcccttttcctccacccatcattgagtatataaaggcgc

SEQ ID NO: 6209 - DNA, 461 bp, Homo sapiens
  misc_feature (1)...(461): n = A,T,C or G
ccaggaggctgaaggctgagtctgcttcttctgggttcacgccacagtcacgtgtggtggctgctgtagcctgcagccaggtgccattcttcctcatgccctctgtgagtggcttcattccactctggggtctggcatggccctccccatcgttatcctctctgcattcatgacagggtgttggcaactcgcttgcacccttcaggtctgccgtcttggttcctaggttgctaggaaaggaccacgagggggcccgctgcagagaacggaagagcagccaggaccagtcggctccatacaccagcgagtcgggcaatgtgtgagatgtcaggaccgtcgcctcctgcctctcctccattgccttttggcagttgaggatcttaaagccacttgtgcatgcaggcggccangagcangtggtggtggaaanggtgccacttgattctccataccccacccct

SEQ ID NO: 6210 - DNA, 205 bp, Homo sapiens
  misc_feature (1)...(205): n = A,T,C or G
ctgttaccgacccacgtcctgctgtctctgtgtggtcctacaaaaactgtccattcccacccctttgctttgccatttgcaagagtctggaattgtcaggtctcagcttcnaaaagtcctggttccactgacaggacacattctttagtggggaattaagacctacaaagtctagtttgtatgtagggtatgaagggaatttttt

SEQ ID NO: 6211 - DNA, 178 bp, Homo sapiens
  misc_feature (1)...(178): n = A,T,C or G
ctgagagtagacacttgtggtatgtggagtacagataagccaggggcatagccacggctcgctccatgaaagctaggagggagtgaaatatcagtgatcatcgcaaggaaggaggcagacaagagtaaggcacacctgactcttaggactagcagtcagaaccaggaggaacccccnc

SEQ ID NO: 6212 - DNA, 328 bp, Homo sapiens
cctatgcctttgctgtcatgtgattctgcagtaccacaggaataaccaccttcctcttcttctgtcgcctggtctcctgaattgttgccactgtctctgatgtaatagccttttaatcccaaattgtacaattttcgatcctccacaaatgccctggagcaaaggcacagtatcttacaatcctcccgctcctcagtgaagagaaacatttccgccacgcggctccacttctcgcagcacattttaccacttcggaggcagctctgacgtacgcagcccgggtcgcgcctgccgggcctccgctcggttactggagacttaaaacagg

SEQ ID NO: 6213 - DNA, 361 bp, Homo sapiens
  misc_feature (1)...(361): n = A,T,C or G
ccacagatttccagaatgaaagtgcagcagccctggctgctgcagccactcgacatttacaagaagctgagcaaaccaaaaacagtggcactgagcactggtggaagatccatgaggcatgcatgcttgccctaggctcagtgaaggccatcatcactgacangtgtgaaaaaatggcaggattnattttggcatgcatgggtncctgaccaatgtnatccttgcngacctcaacctctnagtgtctcctttcctcttgggccngggcactttgggctgccagtngagttcactngttgctattgtcccctgaactgatccangcagttccttacaggcnanagttagtggtctttcactc

SEQ ID NO: 6214 - DNA, 323 bp, Homo sapiens
  misc_feature (1)...(323): n = A,T,C or G
ccatgtgttacgggatcacgcagcaccgtggttccagggctcatccacactggagtctttccttcatatggctgagtgacatcccacggtacagacagtgcattgcatctgcccgtttgtccactgatggacgtttggggtgtttccgcctttggccgtcttgagtcacgctgctgtgtaaggatgagtttgcaggggatggatgctttcattcctctggggcagatgcctaggagtgtcatggctgggttttgggctcaccatgtctagtcggttgaagaactactttccagacttttctacggtggctgcacgcgttnnnn

SEQ ID NO: 6215 - DNA, 155 bp, Homo sapiens
ccattaaatgctggagttgctgaaagcttggccctgtccttgtctcgcctagcacgttccttctctgggtgatcttacccacatctggagctttatgactcagacatttatgtttccaacctagattgcttctgagtcatggtgcagagggtcag

SEQ ID NO: 6216 - DNA, 252 bp, Homo sapiens
attttcctcacagcaaatataacaggatggaacagttagtgttttgttttcacaagtgtccaccactccatctgccctgcatggagagggctctctcactgctagatctaggctgagccatctggaaggatcaaagggtgtgggagtatcaccccctctcaggctgcagaaggtctcgagggtggcgtcacagcaggatttccgccttctgcattgcactgcacagccccatggaacatgaggcacttgagg

SEQ ID NO: 6217 - DNA, 390 bp, Homo sapiens
  misc_feature (1)...(390): n = A,T,C or G
aaaattctgataaaaatttactcaattacattttatacattaatatttagtgaatttgtccaaaaaggctatgtttaatttatgtgtaaaaataacaaaagatgtatcagtcagtctctgggcaataagaaaggaagaaagccttgctanaaataataaataatctcacgcaaaaggccaggtgacataagaatactacaataatcaatatgttttctttgnatttacaataaaatccatctgttaacactgngatagaaaaaanaatcagtccacatcatgtaataaaaacaggctttgaggatgattatacctcttataatanaaacatacaanggatttctccagctaaaggctnttcaacttgngacaacttgatgaccagncntg

SEQ ID NO: 6218 - DNA, 316 bp, Homo sapiens
aaaacaacagaatgttgctatcagtttgtcttacgttaaaacagttcttaaaccacctactatattaaatacattctaatttggtcactgatgataaagatttttacctagacgttttgcacttaaaaaatgctattaaaagtctttggcaaagccacggtcggggagaaacacgtcgggtgccgcttcccactcgtgtgccctcaccacccacgtggcccgcggagagccaggtcgctgtaaaccacagatgcctgttcctgctcaactcctagggacagtcccagccctgagcagaagggtcaggtcatcgcgg

SEQ ID NO: 6219 - DNA, 97 bp, Homo sapiens
  misc_feature (1)...(97): n = A,T,C or G
tggaccttactcatgcaggngaagatggaatttttgatnctgganattttggtacctttcctagtgaatatctanggttctcttccctagtnntgna

SEQ ID NO: 6220 - DNA, 318 bp, Homo sapiens
  misc_feature (1)...(318): n = A,T,C or G
tngaggtaaagtcatttatataaccaattgnaaagctttgnttaaaaagaaagataacagggtttactggcaagaacaatgaatctttncatgaacttctacccctcccttttctttactgttgtttctagaagcagggagatcacttgtttagtaaggacacctnttactgaaaatnatncnaaaagagagccagttaagaagatgactgtgaataactagagataattagctcttcccgaacgtggggatgctggttntgaaaacagtnttangatgttnagtgggaggnctcccccccccccccccccccgactt

SEQ ID NO: 6221 - DNA, 95 bp, Homo sapiens
aaaaaaatatgtcaaatgacacagataagacaagcagaaaggaaaaaactacatttgttctttcagcattacatatatgagtacttgctccttgg

SEQ ID NO: 6222 - DNA, 397 bp, Homo sapiens
  misc_feature (1)...(397): n = A,T,C or G
ctngtgctgntnagcctggncgcactgagcangancgccnaacccnganagncgancgtncaatgngnctttgaaactgggccatctccacannggatgctacnacntgatctaatncctggnagacttgagggacctccnacncaacctgttacaactagtgtngaaacaggggactattnnatnatgatgaatgtaagctgggnactgcagggcagatgccatgcattcgcttgttgaangccaccangatttgtgtgacgggcaaaancaacttccanntctanacacctccgccaccaccacnctnagggngaattccaccacactggcggccnntactagnggatacctagctcggnaccaatcttggcgtaatcatngtcatagcttgctc

SEQ ID NO: 6223 - DNA, 418 bp, Homo sapiens
  unsure (1): n=A,T,C or G
ncgaggtctggagaagggtgaccgactcagcgctgagatcaatcggcccgactatctcgactttgccgagtctgggcaggtctactttgggatcattgccctgtgaggaggacgaacatccaaccttcccaaacgcctcccctgccccaatccctttattaccccctccttcagacaccctcaacctcttctggctcaaaaagagaattgggggcttagggtcggaacccaagctttagaactttaagcaacaagaccaccacttcgaaacctggggattcaggaatgtgtggccttgcacagtgaagtgcttggcaaccactaagaattcaaactgggggcttccagactcactggggcctacagctttgatcctgcatctgaatctggagccaggagctttggttttgactgccgg

SEQ ID NO: 6224 - DNA, 162 bp, Homo sapiens
  unsure (1): n=A,T,C or G
  unsure (144): n=A,T,C or G
ncgaggtccacaccctcacccctgagcagcccggggggccacagcaagaggtacacatgctgtggacaccagcacccccagacctgacccttggggaaggtgaggaggctaggacgtgggacttcctgacagccgtgggcggcngccacgctgaggctcagg

SEQ ID NO: 6225 - DNA, 326 bp, Homo sapiens
  unsure (1): n=A,T,C or G
  unsure (97): n=A,T,C or G
  unsure (111): n=A,T,C or G
  unsure (165): n=A,T,C or G
  unsure (246): n=A,T,C or G
  unsure (253): n=A,T,C or G
  unsure (281): n=A,T,C or G
  unsure (325): n=A,T,C or G
naggtctgcagttgctccctcatcatgtcactctgtgggctagtagttacagatgttttcatcacaggttcaatagtgtgagaaagagacactagantctgaggaagatanaggggaagggaagttaaatccctaaatgctcctgagtcttcagacaaccattgntgaagctgatcttcaaacctcttggtctcttctttctccagcagcagactgctcgacaaacactgcgccaagagctcctcngcagaanctcctcgcatcagatctctctgtgctgngaatactcccctcttgagcacactctgtgctcctcttcccgttnc

SEQ ID NO: 6226 - DNA, 351 bp, Homo sapiens
  unsure (97): n=A,T,C or G
  unsure (259): n=A,T,C or G
  unsure (338): n=A,T,C or G
aaaacttgcctattactgccctcttttccagaaagaaaaggcaagttcaggcttgcagcttaatatatttcatgttctactatttgtcttaagtggnggaagattcactggctcgggatggactggaatggcttaaattgttaagttgcatggcttatggattgtcattctgttccaatggtgcactgccacgttaaatccataagttgaacgaacaaaacttatttgaaggaataagtgcagtataaggatttttagnttggaggtcttcaagtttactatattcaagaagcatctttttcaacttcatggctggacctggggcatgcctgcctcangttttggcttttt

SEQ ID NO: 6227 - DNA, 493 bp, Homo sapiens
  unsure (118): n=A,T,C or G
  unsure (270): n=A,T,C or G
  unsure (308): n=A,T,C or G
  unsure (347): n=A,T,C or G
  unsure (446): n=A,T,C or G
  unsure (463): n=A,T,C or G
  unsure (479): n=A,T,C or G
aaatttgtgttaagaaagggaaaaaaatcacaggtttgtctaactcagtagaaaaatcgacaaagcatttgcagacaacttggcaagggtacagagaaacggatgtactgtttttcantatttggggagggtggtttgagcagcatttattgacaatttcattagtggggatgtttctattgaaaacagagttaggaagtcataaaatgttcctgcaatataaggtaataataccaccagcgtttatcttactgttttcatgttctaagngcatgcatctgagtaaaaggatctgggctgcagtccantctgagagatgccagcaaaggcttcctaggccagttcangtccagtaaatccctcttcgatcttctcttccacacagacagcaagtgatgagcatgcccatgaactcacatgattattttggggaaaaatgaaagagntgtattctttttgaggnaggaatttccctttcnggggccaatacatt

SEQ ID NO: 6228 - DNA, 187 bp, Homo sapiens
gcgaggtcctttgagaagctaagcttggttaaaaggagttttaggatggaattgaaaactgagtctagttctgtttgaagggggcagctttttactcagctttgtgcactttggggtgctcgctcggggtgtccgcatttctcagaccttggtttggttccctgcacagtaagtactaatggttagg

SEQ ID NO: 6229 - DNA, 474 bp, Homo sapiens
  unsure (2): n=A,T,C or G
  unsure (353): n=A,T,C or G
  unsure (386): n=A,T,C or G
  unsure (413): n=A,T,C or G
gngaggtaaaaaacaagttttcctaaaaagtcattgtatttggggcatgtttctcttaaaataacacatgtagtttcaaactaaattttaagaaaggaatatatctgactgaaataaatgctctcgaaataatgcctacgcattttactaaatgcagttttcatctaatactttgaggcatttctgtactagtatattgttttggttcacatgaaaataacttgggaaaaactacaagtaattccctatattaacaataaaagaagaactattaagaataaaagaagaaacactaaagagatacatttactgcttaataaacatttattgagaaactattttgtggtactcancaagaagtgagagttggatgggctcaaatatcngcctataacttacttttctatcctccnattactataaaagcccaagaaactcttctatggctttctttcttttcttttcttttttttt

SEQ ID NO: 6230 - DNA, 277 bp, Homo sapiens
gcgaggtccagagggaaggcccaagagacgtctctgaagccaccgttcctgattattcagaggcagggtccacagtgagtgactcggtggggctggaggaacccagggtgacccagagggggctctggagcgggtccctaacatctgaaaaagtcctcccagggaactcggagctggaacttccaggcagcttcgggggtgacatttgtatccggccagccgagcggggaaaggagaccttgtgtcctggcaacagggagggccgggactgggatgg

SEQ ID NO: 6231 - DNA, 290 bp, Homo sapiens
  unsure (22): n=A,T,C or G
gaggtaaacttggctgtattgngtacaactattataccatcttttataaacacagttttttaagaaatttctttttgtaagttacaacattccactggatccttatattgcctgtagtggaagagggtcttgtgtgtctgccccttctagttttcactcatgcagaagcaacataaccttctgatatgcacaataaattacatatatttagcaggatttttatttgccgtgatatataggataatttagtctttggcatgtggcattatatttattttggtttttttttt

SEQ ID NO: 6232 - DNA, 271 bp, Homo sapiens
gcgaggtcctgcaagaccccccaaagccagcagtcagcctacttcctgttaacactgtttagagaggtggctattttgtacagatcccacaatgcaagcctccaccccacgccagagcaatgtgaagctgtgagcaaattcattggcgaatgcaagatcctttcacctcctgatatcagccgttttgcaacatcgctcgtggacaattctgtgccattgttgagggcggggcctagtgacagcaaccttgatggaacggtgacagaaatgg

SEQ ID NO: 6233 - DNA, 302 bp, Homo sapiens
ccatgggggtcttagtgggcccccccttcgggagtgtgctctatgagtttgtggggaagacggccccgttcctggtgctggccgccctggtactcttggatggagctattcagctctttgtgctccagccgtcccgggtgcagccagagagtcagaaggggacacccctaaccacgctgctgaaggacccgtacatcctcattgctgcaggctccatctgctttgcaaacatgggcatcgccatgctggagccagccctgcccatctggatgatggagaccatgtgttcccgaaagtggcag

SEQ ID NO: 6234 - DNA, 187 bp, Homo sapiens
gcgaggtccagtactcgggacagactaagggcgcttgtcccatcctggacttttcctctcatgtctttgctgcagaactgaagagactaggcgctggggctcagcttccctcttaagctaagactgatgtcagaggccccatggcgaggccccttggggccactgcctgaggctcacggtacagagg

SEQ ID NO: 6235 - DNA, 378 bp, Homo sapiens
  unsure (334): n=A,T,C or G
gcgaggtaaaagatactttggattcaattaagaagagtttttaagaaaaaagaggaaggttctggcatggggagctctgcaacccactgctgggtgccagaagcgagctgtggaacggaagatgaagatggcaccatgtgtctctaaaccacaaatggaaccactgatttctatgtgtatttgcatttgctgtaatgtgtgggaaatctgaaggttacacagcacaactgtccacagcagatggccctcgaaggggatgaggtttagagccaggcagggcctggaaggactggattttacatggacatggaggacattgcaagagaaaggcatncaaggtgttctcacgaaatccactacaattgtacaagaaaatga

SEQ ID NO: 6236 - DNA, 366 bp, Homo sapiens
ctggtttccatgtattctaggccaggtaggcaacacagagccaaggcgggtgctggaagccagacggaacagtgttggggcaggaaggtggatgctgttgtcatggagctgtgggagttggcactctgtctgctggtggccctctcggctcacatgttcacagtgcagctcctggcagacttgggttttctctttggtggtttctaaagtgccttatctgcaaacaacttcttttctccttcaggaactgtgaatggctagaagaaggagctcagtaaactagaagtccagggttgcttggtttactggtttataagaaatctgaaagcacctctgacattccttttattaactcacctctcagac

SEQ ID NO: 6237 - DNA, 219 bp, Homo sapiens
ctgggaatcgtggcttcatcgacatcatggacatgcctaacaccaacaagtactcctttgatggagccaaccctgtgtggctggatcccttctgtcggaacctggagccggccgcccaggcggagcatgaggatgacctaccggagaacctgagtgagatcgccgacctgtggaacagccccacgcgcacccatggaacttttgggcgtgagccagcag

SEQ ID NO: 6238 - DNA, 201 bp, Homo sapiens; identical to SEQ ID NO: 5066

SEQ ID NO: 6239 - DNA, 333 bp, Homo sapiens
aaaaaagaacagtgaccaccttacaaaccagaaattccaggcaacaccttattcctttaagtaatccaaactattttctatctcctaaatgcagtcttttcccctgactagatactgtgtgcgtttagcacgaggcagaagggtgggggtttcacagtgacgcacacaaagaggcaggagctttgctaggtaccagggaaggggcagcatcttcaagtgcacatgtctgcgtctctgtgaagtcacttcaaagactttatgaagctcagatctgattctgttgaaatcaattggctcctttcccaccaaaattgtattcgagatgttcttcag

SEQ ID NO: 6240 - DNA, 166 bp, Homo sapiens
ctgaggcactttccagagcgtggggaggggcctccaccaaggcgagaagggctgcaggtccagatcaccagcgtttgtagacagtagtgtggcgcttggagtttacctgagggccagtggagctccagggacctatcaggacggggacctgtggggactgggaagg

SEQ ID NO: 6241 - DNA, 170 bp, Homo sapiens
aaaaagatttaacaagttaacataaaattaaagtgtgtctcaaaaccagacagccatcttgtctgccatcactgagcaaattacagatggactcaatacaaatttgcccacggggcttgcttgcaatactatttcacaaagctgactgtattcttcatcttcataaatgg

SEQ ID NO: 6242 - DNA, 236 bp, Homo sapiens
gcgaggtcctctgccttccttcactgtgcaccctgggctcatgcaccaaggcagagaacaggaagaagtgaggggacaagaagaaggcagaatgtccagatggaggataagaccaaagagccagcacctacaggacttgggctgcttcaggctgaacgctgggagaccacttcctgtgctgacacacagagctcccatctccatgaagaccgcacagcgcgtgtaagccagcccag

SEQ ID NO: 6243 - DNA, 158 bp, Homo sapiens
  unsure (1): n=A,T,C or G
ncgaggtgattttgaaggcagtgttcccttctctccattgactatgagagagttgggggacacacatgcagaagaagcccgtggggagaaggtggattcctggtgtgctggctggtttttcagggctgttagaggttttttttttctttttttttttt

SEQ ID NO: 6244 - DNA, 212 bp, Homo sapiens
cctccacggcacccacggcggtggcttctgtggggtcgctggtaatgggcgccaggcggcggagttcctcaaataattgcaagtggtagatggcagcctctgcctcacgggcaatctaggggagcaacatccgtccagagggacgagagggggacagagctttgtcagagctttgtcacaaaaggagagggaggggaagagtcaccggacag

SEQ ID NO: 6245 - DNA, 262 bp, Homo sapiens
  unsure (260): n=A,T,C or G
  unsure (262): n=A,T,C or G
gcgaggtaaaatcaaccagtaaataaagcatgaaaaagtcaattacggttatagaaaaggatgctaatgtactagattatgcaaagaaaaagttggtaatggaaattaggaagtagaagcagcagagggaacagtggtagaatgaagggttaaattgcttatgtccttatttctagcagatcaagaaatagtatttggaatggcacaaagaaagacttgttattttttaattataaaaggcgagtgaaataatttttttncn

SEQ ID NO: 6246 - DNA, 370 bp, Homo sapiens
  unsure (270): n=A,T,C or G
ctgagaagaaccataccataccaggcttccagcaggcttcataatcctcggttccccagactcaccggacaccatctcctatgccttggagaccttctgtcacttggctcccttcttaccaccaccaagactgtcccactgggcctgacccacctatgagggaagaagtcccacctgggccagagggagttcatgtgttactcataacatgcatttcaataaaaacatctctgcggtgggccttgggtaggagagatgaacccttccggngccaagctagtcccctctggtgtcctcgactgccctgctccctgtgtatctggcaaacctctgttctcccttctccattcatcaggaagggatctgctgt

SEQ ID NO: 6247 - DNA, 377 bp, Homo sapiens
ggcgaggtaaaggcttctggagtgaatggagtccaagttattacttcagaactccagagatcaataatagctcaggtaaggaatggtggtagagtttttgttccctcagagtgctttgcatgtcaaagtgtgggagcaagtgagaggaagattgttgaaactaacctgcaaaacaggacacccttggagggcactcttacactttctttggagaatgacttgcctgctgtctttgcgccttttgtgaagaacaaggaagcagagggagtggggtccttattagctgagaattagtacaagccatctgtattcctggaagctgccatacattttgaacaaaatccccacccactacgtccagttaaccaatttagccc

SEQ ID NO: 6248 - DNA, 264 bp, Homo sapiens
gcgaggtcaatatcaaaaagccttgttagtctatctggatcatatcaaggaaactaagataaatatatttgcttatatttgctatagttttgtgtgtgtgtgtttgcttacttgtggaaaccataatgaccaatattataccatggctgagagtgtagatttggaggttttaatttctgatccctcagttcattgactttgtgacactgattatctaatagttctctgtctcaatttcattagataagttgggaaggctttcag

SEQ ID NO: 6249 - DNA, 371 bp, Homo sapiens
aaagcaaatcctggctggcaggaaattctgaggaatatagctcttaggcttccagcctctaccatgcaggagagaacacagaaggactgatgtatgttggtggatccatgtatgtgtccagcacagcggcctgctggactctgagaactgggaaagatcagagcaagccttgcctcttatcttcgggaaaccagaatatgtttggggtggtaggagccacacagactcttctgagccccctcactcacttccttccccctgtgcctttcctttgagagtgaaggtgggtggagttgaccagagaaaggggagagaattcgggaaagacccaaagtgtttgtaattcttctttgtccttttacctacagaaa

SEQ ID NO: 6250 - DNA, 259 bp, Homo sapiens
ccaaacccagcccttacgcccctgctgacaagggagacaagctgccccgctgaactccaacaacctctgggtgggctcagcagcccctaggaagttaagcgagagctacagggcaggggggctccctgagggagtttgcacagaccaggaggggccaaggggtagccccaagggagcagaggaaggagaagggcaggaaaaggtccagggcacagggcaagcaacagtgccagagggtgcctggtcacaggaagcccag

SEQ ID NO: 6251 - DNA, 375 bp, Homo sapiens
cctgaaggccctgggcttttacgtagtaaaatcattcttaacagactattccagtgctttggttttgaataggatgtagcagaagactcagggctagagatcttcatacatatcaaactgtatgattgccagaagcgtaaagtcacagacgaaatacacacccacgttgggattagcagtgacctgtggggaagctggaggccaggagaggacctcccctcatcactcagccagacagaaaaggatgcagctctttcccagccgctctgttcctctctgtccacaatgctggagcatgggcagatcaaacaaaactcctccctgtgcctaagcatcgaggcgtacgtggaagacgggagtgagtgggtgtgtgcc

SEQ ID NO: 6252 - DNA, 275 bp, Homo sapiens
  unsure (1): n=A,T,C or G
ncgaggtaaacattgacccaacatattaccaaactaattcctgtgaaatacaaaaagaataatatatcatgataaaggtaagtttgtttaacccatggttaatttaacatatgaaaatcaatcatctatcatcttaatagatacaaaaaagaatttgataaaagtcaacacttatgataaaaagcaaaacccttaacaaattaggtatagactgggctttccttgatctgataaatagcatctacaaaactgaacatcaaatattatatttcata

SEQ ID NO: 6253 - DNA, 364 bp, Homo sapiens
gcgaggtctgagttcccttcccgaaggtcagctcggggctcccgacgatcatgcagaagtagatgccactgtcttccggcttcacgcttgtgagattgagaatgaaccggcttgcatcccgaaacacagctatcttctcctgttccacctcttcaccgtggatagtcccttttgcggaatcccagagggccaggaactcgtggtgactgtcactgctcggtgcctggcgctgtctcagccagtagatgcgcatgttactgagggagattttagcctcgcaggacagcatcaccatcttgttggtttgcacctttatgtatgcaggggtctgctggaggactgagttgccatggagaactgtcag

SEQ ID NO: 6254 - DNA, 345 bp, Homo sapiens
gcgaggtctgcttcacaacaggatcacagtctttctgtccacatggaacaaactgaggagatcgcttgagacgaacggtgagatcaacctacccaaagactactgcagcactgacttggatctggacactgagtttgagatcctcttgccacgccgacggggcctgggcctctgtgctaccgctctcgtcagctacttgattcgcctacacaatgaaattgtctacgccgtggaaaaactctccaaggaaaacaacagctattccgtggatgccgccgaggtcactgaactgcatgtcatcagttatgaagtggagcgggacctgactccactgattctctccaa

SEQ ID NO: 6255 - DNA, 345 bp, Homo sapiens
aaaaaagaaagacatattttacatgtatgtgtagaaaataatcaggaagaatgtacaccatattaacaggagattattcctaaggtgaagaattatgagtggttcttatttccttatctacttaagttttttctctccaatgggcaggcattgcttgtaccataccttaagcaaggaagtgcatgtttgggacagcagtttgggctctcagcctccttaagagagtcaggtctgcctcatccctgtatctgctagttgagcagaggccagggctgtgtgaggggctctccaacaattgtctttacaaagtataaaaagtcatcagtgatcccaggaacatgtttg

SEQ ID NO: 6256 - DNA, 252 bp, Homo sapiens
  unsure (110): n=A,T,C or G
  unsure (155): n=A,T,C or G
  unsure (183): n=A,T,C or G
  unsure (218): n=A,T,C or G
  unsure (231): n=A,T,C or G
ctgttaaacaggttcgttcttggcgccacataaaaacaagccaatcacatcgaataaatcatggctttttttttctttatcacaattcactaagtgatgttaattatggnccttgtcaaacacgtttggtaaaggctatttacagtgtacatggntgagcatgcactatttatagttacaaanatacctgccagtttattacaatagaattacacagngcctgaaaatggngaaacatctcacacatcattt

SEQ ID NO: 6257 - DNA, 356 bp, Homo sapiens
gcgaggtctggtatatttttatgcgactgcaccagattctctgcctgaggctgctacggatttgttcccaagccgaacggcaaattgaagaagaaaaccgagagagagaatgggaacgggaagtgctgggcataaagcgagacaagagtgacagccctgccattcagctacgtctcaaagaacctatggatgttgatgtagaagattattacccagctttcctggacatggtgcggagcctgctggatggcaacatagactcatcacagtatgaagattcactgagagagatgttcaccattcatgcctacattgcctttaccatggacaaactgatccagagcattgtcagacag

SEQ ID NO: 6258 - DNA, 197 bp, Homo sapiens
gcgaggtctgagagccagcgaagaactgaattccgccaacaacctgaatgaacttagaagcagattcttccccagagcctccatgaaggaatgttgtcctgccaacccttatttcagcctttaagaccctgagcagagaatccagccacactgtgccagactcatgagctacagaactgctatgggtattgtttttt

SEQ ID NO: 6259 - DNA, 164 bp, Homo sapiens
aaagaattttaatacaaacttaatataaactatttcagtccctcttaacatgtaagacactgactcaaaatacttttataccgtttttttcaagtattgcacaatataggtacaaaattaatatttacgattacatttttcttccataatatatagcaaaaatc

SEQ ID NO: 6260 - DNA, 364 bp, Homo sapiens
aaaaggagtttttagaagaaaatagaaacaatgggggaagatggttaaaaattaataataactttccagacttgaagaaaaaaaactgaatcttcacattacagaagcacactatgtctagggcaggataaataacaaatctacactaggacacatcctgatctgcaacacactgaagataaagagagaacagtaaaaatatagattactacctgtaagattactacctacaaactaagagggctcagactaacagcagattttttcattagttaacactgaggcaaggagacaatagaacagtatcttcaaggcacagcagacagtactaaacaactcaactcggtcaaacctaactttctgg

SEQ ID NO: 6261 - DNA, 334 bp, Homo sapiens
cgaggtccttggcatagccaggctgctccagcactgtgagctgggagtctcctcttgcagaagatgggtgtgaacctgacacgcagcaacaaggagacggtgaagcacagcgacgtcctgtttctggctgtgaagccacatatcatccccttcatcctggatgagattggggccgacgtgcaagccagacacatcgtggtctcctgtgcggctggtatcaccatcagctctgtggagaaggtgcccatctcagccctgatgccccttgtgtgaggggagggttgacccacgaatggcagctaatgggtgggtgctggtgggagccgtgccctgg

SEQ ID NO: 6262 - DNA, 297 bp, Homo sapiens
  unsure (173): n=A,T,C or G
  unsure (220): n=A,T,C or G
  unsure (262): n=A,T,C or G
cctgcaggggatggaaccttccagaagtgggcggctgtggtggtgccttctggacaggagcagagatacacctgccatgtgcagcatgagggtttgcccaagcccctcaccctgagatgggagccgtcttcccagcccaccatccccatcgtgggcatcattgctggcctggntctctttggagctgtgatcactggagctgtggtcgctgctgtgatgnggaggaggaagagctcagatagaaaaggagggagctactctnaggctgcaaagcaggtgacagtgcccacggctctg

SEQ ID NO: 6263 - DNA, 206 bp, Homo sapiens
  unsure (1): n=A,T,C or G
ncgaggtaaataattaggccacttaatttttattacaccaagagtcagaaaatgattgcagactacatccttttacacaaaacacatttgtagggtttctaaaaagctacatacataaaggaaaaattttagaataatatcctactttcagtgtgtcagggaaatttgctaatatgttttaaggttatgttagtttttattttttt

SEQ ID NO: 6264 - DNA, 177 bp, Homo sapiens
gctgacagttctccatggcaactcagtcctccagcagacccctgcatacataaaggtgcaaaccaacaagatggtgatgctgtcctgcgaggctaaaatctccctcagtaacatgcgcatctactggctgagacagcgccaggcaccgagcagtgacagtcaccacgagttcctggc

SEQ ID NO: 6265 - DNA, 442 bp, Homo sapiens
gggtaaactgtttactggagaaaatcctcgctcatgtccatttattgttttttctgtactgtgatttgtttcaagcttaggaaaactagtatattagagtatgttctaggaaattaaaggatctggttagagtaaaaagttctttttaaggttcttaactaattttttcacaactaagaaaataaatgaagtattcttaggctgaaattcatcttattttatcataaattagattgtaggggcagcctacatttttgtgtatgtgtttttatttcttaaatgattgtgtgagcctggtgacattttatggttcttgtgatctaaactgtttttccaattcacatcttttgtcgtgaagtgatattatactagagtactgtttgcattgtaaaaatgctttgctggtgctctggcattttgtctttatctcatcacctaattt

SEQ ID NO: 6266 - DNA, 306 bp, Homo sapiens
  unsure (83): n=A,T,C or G
  unsure (254): n=A,T,C or G
gccactggaccgtcttcccagtcccatcaagagaaaaccacagactctgggctcactgaagtcttcccaagggattgttgaanaaacttctgaagagggaaactctgtacctgcttcacaaagtgttgctgctttgacagtaagagaagcttagtccttatgccagagaagttctgcagaagaaatcactgtttgtcctgagacccagctaagttcctctgaaacttttgaccttgaaagagaagtctctccangtagcaggagatatcttggatggggtcagaataataatggcagataaggagg

SEQ ID NO: 6267 - DNA, 229 bp, Homo sapiens
ccaatgcccttctagtatgtttggtgaaggtcttgaaggcaccatttcccccatccaccctggggagaaattgagtccctaaagtcaacgacaaggcttattgaggctgagtttgcaacagatccgatctgggaggtagaaacaaaaatgactgaacatctttttatcccccaatcgttacaaagcctaaataactctaaacgggatgggagggcaaattttaggtcag

SEQ ID NO: 6268 - DNA, 292 bp, Homo sapiens
  unsure (1): n=A,T,C or G
nggtaaatcaacttgtctgatgccagggttcagagagacacctacagtcagttgaaaggcaagaagagacaaggtacaggaaagttgctctttagataacatggtagactaggaggaacattaatatggtttgcttatataatctgactgtgtaaatctgaatctatgtaacattaaggttgcaaatttgagcgtttatattaggaagttaaaattttaagtgtctccaaaataatttttactcattgcacgtgttctgttttagaaaagcctaatgattgtgttttgattt

SEQ ID NO: 6269 - DNA, 418 bp, Homo sapiens
  unsure (1): n=A,T,C or G
  unsure (399): n=A,T,C or G
nctgttgaattgacagaaaaaattgctcagcttttcagcatttccccttgccagatcagccagatttacaagcaggggccaacaggaattcatgtgctcatcagtgatgagatgatacagaactttcaggaagaagcatgttttattctggacacaatgaaagcagaaaccaatgatagctatcatatcatactgaagtaggagtgcggcgtttcgtgcccagtggctgctccttccttcacctctgaaaacggccctcttgaagggggatatgaatggagatttgaaggtctgcaagaacctgactcgtctgactgtgtgtggaggagtccaggccatggaggcagaatcctggccctctgtgttggcccaactcttgtggtacacacagattactgnccaatatgcagttctgcag

SEQ ID NO: 6270 - DNA, 320 bp, Homo sapiens
  unsure (1): n=A,T,C or G
  unsure (43): n=A,T,C or G
nctgctccctgagaaagggctgggccttgattccctggcactntgaccttttgagcacagcagagtggggacagtttcgagcagagctgcaggtgggagctgggccagtaggcaccagtcaaggagtgggcagggtaccagcagcccccgcattagcttcctagggctactgtaacatgtgaccacagactgaatggcttaaaccacagaaacctactgtcttacagtgctgcaggccagaggccctcaaccaaggggtcggcaggcttggctccttctggaggctctcaggggacccctgtcttctccctttcccccag

SEQ ID NO: 6271 - DNA, 282 bp, Homo sapiens
ctgggctattggattaagtgtggctgatcttattgaatccatgttgaaaaatctatccaggattcatcccgtgtcaacaatggtaaaggggatgtatggcattgagaatgaagtcttcctgagccttccatgtatcctcaatgcccggggattaaccagcgttatcaaccaaagctaaaggatgatgaggttgctcagctcaagaaaagtgcagataccctgtgggacatccagaaggacctaaaagacctgtgactagtgagctctaggctgtagaaattt

SEQ ID NO: 6272 - DNA, 297 bp, Homo sapiens
ctgcagataccttagtgacaaagtttaatcagcttcctgttgagctaaaaaaggaagtagagatgaaaggtgtgtggagcatgccatcaaaatactctgaagaaggagtttataacgttcagtacagtttcattaaagaagctgaacatcactgcttgttacatagcccaattcctgtgaactgccccataagattgctccatggcatgaagggcgaattccagcacactggcggcccgttactagtggatccgagctcggtaccaagcttggcgtaatcatggtcatagctgtttt

SEQ ID NO: 6273 - DNA, 178 bp, Homo sapiens
  unsure (1): n=A,T,C or G
nctgaaggccatagagccccagaaggaggaagctgatgagaactataactccgtcaacacaagaatgagaaaaacccagcatggggtcctgtcccagcaattcgtggagctcatcaacaagtgcaattcaatgcagtccgaataccgggagaagaacgtggagcggattcggaggcag

SEQ ID NO: 6274 - DNA, 418 bp, Homo sapiens
ccattgcccacccaggtaccagcagcagaagactatctgacttggaaagaatgggggtttacaggagtccaggaggtcctttccgctctcctaagagccagtatgttcgcatctttccttttcccttcatttccacatccccccgaagctctagctggaagcatcctagctcatctagggcatccttggtggtagaggagacatggatcttcagcgcttgaccattagactccattcgagaagcagtgttcactgtgtctccaaaaagacaataacggggcatcttcaggccaacaaccccagcacagactggcctttgagaagaaacaggttgggagagtctgggaaaggtggagactagggctggagtgagagtcagccttaccagtatggaccctatgcgtagcctcagacctcg

SEQ ID NO: 6275 - DNA, 216 bp, Homo sapiens
  unsure (4): n=A,T,C or G
gggnccacagatttgggaatcaggattcttcagcctaaagaggttgacagctttcacactttttctgtttgctggaatgacttgtataagacaagaagtaactgtttctttttttctttttgagacagggtctcactctgacacccaggctgaagtgcaagtggtgcagtcacagctcactgtagtctcaatttctcaggcttaggccatcctccc

SEQ ID NO: 6276 - DNA, 155 bp, Homo sapiens
  unsure (88): n=A,T,C or G
aaccataccataccaggcttccggcaggcttcataatcctcggttccccagactcaccggacaccatctcctatgccttggagacctnctgtcacttggctcccttcttaccaccaccaaaactgtcccactgggcctgacccacctatgaggga

SEQ ID NO: 6277 - DNA, 451 bp, Homo sapiens
  unsure (1): n=A,T,C or G
ngtggtgtcgggcactgtcatagtccacgagtttccgaccccgcttggcaattctctccttaatttcactgaactgggcaacatagatttccatggtccttacagcctggtcagccagtttctcctcgtagtcttcccaaaggagatcattattctgtaggatagagtcagaggctggtgaaggctccacttcccaacaacaactgcctaccagggaaatacccaaattctccctgcaaaaaccttttttgtagcaccgtatttagaataccatgttggattctggggactagtcagaggaagaaaagagacagcccctaccccaaggaactgctctatgggagtctgaacatacattcagagattaagaacagggcacaaggtcaaagccttggattccagagcttagatgggaaagtttaagagtgtataactgcatgaagtttgtttt

SEQ ID NO: 6278 - DNA, 257 bp, Homo sapiens
aaattaatttttagttgttcaaagttgaaaactttaactgaaaatacttctgatcatagtgtgacatgaagttaatatttttacctatgaaagtggttacgtatatatatatacacatatatgtatagactgttacagataattgtataaatttgctcgtggagctagtctatatttgaagttatttgtctctgatttctgattttcaaagcttaatgagagttcttctagaaataacccagcccccattttttttt

SEQ ID NO: 6279 - DNA, 377 bp, Homo sapiens
  unsure (1): n=A,T,C or G
  unsure (200): n=A,T,C or G
  unsure (238): n=A,T,C or G
  unsure (373): n=A,T,C or G
nggtctgtacatggtgcaccatctttggggtatctgtttttcccttttcgagttactgggatttaagagttcattactaagttgtactgggaagtagagcacatcttgagtcagtaaccttaaccactacagcaaatccgacgtcacagagggacagtctgtacggggctgtctggactagcgaggtcaacagtgaaagnccatagattgatggcattagtgagctgaaagtgagtanggatgatggggaaaggaataagggggtaaagcaagcagccatggaagaaggaggccagggaagtcaagagtgccttccacagaagtgggtcccagcctttctttgtagactgactgcttactttcctcgacagangcag

SEQ ID NO: 6280 - DNA, 159 bp, Homo sapiens
  unsure (1): n=A,T,C or G
nccttctagcatggcatcaattccgatataggttcctgtgcgcccaacaccagcactgcagtgcaccacaatgggaccactgaagaaattgctgaaggcattcactctccttctcagtttgaggagcaagtgaggatcctcaggcaccccgtggtctgg

SEQ ID NO: 6281 - DNA, 139 bp, Homo sapiens
  unsure (42): n=A,T,C or G
  unsure (103): n=A,T,C or G
  unsure (119): n=A,T,C or G
  unsure (126): n=A,T,C or G
  unsure (134): n=A,T,C or G
agggttctgtggaacaccatttctcaaaggggcatcctgcanacgttccagccccaggggaggccccgagatgctggctggcctgcctggagggtgcttccanaaacaacggagatggnggtgaanaaggctcngggct

SEQ ID NO: 6282 - DNA, 152 bp, Homo sapiens
  unsure (77): n=A,T,C or G
  unsure (145): n=A,T,C or G
caattaagaagagtttttaagaaaaaagaggaaggttctggcatggggagctctgcaacccactgctgggtgccacnaagcgagctgtggagcggaagatgaagatggcaccatgtgtctctaaaccacaaatggaaccactgantcctatg

SEQ ID NO: 6283 - DNA, 269 bp, Homo sapiens
gcctagagaacgagctgctcatcatgtttctaatataatttctggggtgaaatgaatgatttccttactggcttagagaaaaccaaggtcaataaaatgcagattgacttaactattagaaaagatgggatgacttctgggaaccacttaactcttcaaatgactgttgaaagagaaaaagcaaaactgaaatcccaccagaccattttgtgtgcctgtttctaatcgatacaaagttaagcatgagctaaaatcagacaaagcacttt

SEQ ID NO: 6284 - DNA, 317 bp, Homo sapiens
  unsure (1): n=A,T,C or G
  unsure (2): n=A,T,C or G
  unsure (289): n=A,T,C or G
  unsure (315): n=A,T,C or G
nnggtctgagccgacttaggaatctcccatccccgccccaggaaaaagaaccaagagaaaagaaccgtttgtgctaacagtcatcgccaactgccgtgagtacaaactccggttaagtactgctgctgcgccagcgccctggcaggcatgatcacctcccattggtagggccacagctccattctgggaatggaaggggactagacccactgggcctccactcatcccactcctggacctcggcgcaccacctaaggggaattcacacactgcggcgtctatgatcgantcggaccaacttgcgatatggcatantg

SEQ ID NO: 6285 - DNA, 307 bp, Homo sapiens
  unsure (1): n=A,T,C or G
nggtcctgggtgagggcgtccatggtgccagccgtgccattcgtcaagcctgtggcgccaagtcctccattcagagccgccatacctgagagcatttgagcaactgctagtgcattaatattattcagtccaacagtggctccagccagtccttgcagagtcccaagagaggtcaaggagttcatggctgcaccagcagtggagttgggggttgaagcagccacgggactcgtgagggctcccagggcgctgctcgtggtagagagagggtttgcattggtgctggtggctgaggtctgggccgcag

SEQ ID NO: 6286 - DNA, 297 bp, Homo sapiens
  unsure (1): n=A,T,C or G
nggtctggctcgcaggcgtcgggggtaacctggtactgactctacccgcaggccctggggtgggtcagggcgcactaagggcatcaagacacaaagtcagggtaggctatgggtctccatcacttccccaccacttcccaaagtgtgtgtttaaaggagccttagccagacactcctgagaggggaggggaaatcttaaacttgatcatccattagactcagaccggtcatctgtattatgaaatgggctgaggccgcgtgtggtggctcatgcctgtaatctcagcactctggaag

SEQ ID NO: 6287 - DNA, 399 bp, Homo sapiens
gccaggatggtctcggctgcctgacctcgcgatccatccgcctcagcctcccaaagtgctgggattacaggcgtgagccaccatgcccggcctgtgtatcttctttatgtttaccctaccaagagcagacctgagcattttgctggccgtagaggtatataaaagaactctaagcttaggcatgcagaataggcactggatgaatgtagtgaggctattaggagtcttgttggctccctgatgtccttatcatgtcttcttcgcagactgtggatgcacacaagacagctaaaaccttgggcatcatttgaaaatgtttggctgcctgctacaatctcaggagagagaatccttcatacttatattggactggatatattgtcaatcaaattctttttt

SEQ ID NO: 6288 - DNA, 287 bp, Homo sapiens
gaaatgactaggacattaaagggattgtttcagaagaactatcagcaccttttttatgtgtcatgttcatccagactatccatccagataattgctttatttctgatatgtcttccaaggttgttaccccgtgtgggataggcaatgaatttaactgtcttttgtccctaaaagttttataagtttttatctaacatattcatgtagtggaaaaaaactcacaaaagtgctttcaagcattcacagtggtgtctaagccactattaattgaaaaagctgctgtattt

SEQ ID NO: 6289 - DNA, 212 bp, Homo sapiens
  unsure (4): n=A,T,C or G
gggnaaagcgaattctctactgaaaggtctgctctgcttaaggagctacaaactgctctcaaaagaatgaaatactgagttccaattcagtgaggcacagtgttggactatggcacatttagttggagtcggggggaggtcaggaatatgatcagataatggattttataccttagagcaaaatctattagtctctctcagtttatcaattt

SEQ ID NO: 6290 - DNA, 519 bp, Homo sapiens
  unsure (1): n=A,T,C or G
  unsure (505): n=A,T,C or G
naaaaaattagtcatgagacttattcatctttccagggaacatactgattggtcttaaaagactagacagttaagtaaaaggtggctggaacatctatttttctacaaaactggaaaaatgaacctggttctagaagaatgtacaccaaaataaaacatgtgaagcagtattgattctttattgggagtacatttttttaggtctcttaaactttaatttcacacagtaaattttgaatctcataaggaagcatatttgaacctagtcaatttaatcttagtgttcccttgaaaacttttttccctacaaaattttaaggtgaaaaatacaatagtaaattaagattacactggggaaaaaaatgcaggtatcactttactccattggtatctgacctagagcttaattaaggttttagaaatatgtaataccttccatcattccatcatccttaaattctggtaccaaataatggctaatggtacaaaaaggtatcctccaganacccaagcttgaca

SEQ ID NO: 6291 - DNA, 429 bp, Homo sapiens
gactttgtaagtttcttgatctctttagtatgatgttaaaaacagaagggactgaagatttctggcattgaagaaagctattttatgaacattctgcactgagcaggtaaaaacccaataatgcacaccaaaagtaccccagaaaatggggtagtcccatgtagtggagccccaaaggtaggtgctttctgcctaagtggagctcaaggtagcaaaaaataatggggatgagccatggcaccttgtcaggctgtgctataaagccatatgtactgttatttacaccccatagacttaatagtctgtccaagatcgctgaacactagaacatagcatggctctgtgggtttgtctcttgctacattgtaccgtgctcctggggttaagtggaagcaagcattggggagaaatgtgtgagatttagcccca

SEQ ID NO: 6292 - DNA, 457 bp, Homo sapiens
  unsure (1): n=A,T,C or G
  unsure (380): n=A,T,C or G
nggtctgtatggactagaaaagttttgggcttatttgaaatattctcaatctaagacacagtctattgacccaaaacttcaggaatacctctgtagttttaagaggttagaagacttccgtgttgatccccctattagtgatgaatttggaagaaaaagacattcctctacttctggtgaggagagtaatcgtcatagacttccacctaattcctctacaaagccaccaaatgctgctaaacctacatctaccagtgagcttcaggtaccaataaactctcccagaaggaatatttcaccggagtccagtgacaattcacattaaacagtgctgcctgtgtcctgtggtctcaagaaatggtgaaatgcctgagaaatanactcttatgaaagttctttgtccttgaagtcacatttacatcagtatttatttggggaaaatcttctggggttaatt

SEQ ID NO: 6293 - DNA, 302 bp, Homo sapiens
gcctatttatttgttttggccctggatcttttctaatcacaattatatttctttatttttgcctttgagcagtttcatttatctttgtgggcagggaagattaaatatgaaattcagtccagtcattttgctactggttagctttagtttgaggcaagtaaaaatttttgattaaaattagtttcttaaaattatgcccttgctttaccaaataatcaaattgactaaaaaataagggtatgtaactttgcattttgaagaacaaaccaataatttttcatgagccctactcgatcttcttt

SEQ ID NO: 6294 - DNA, 336 bp, Homo sapiens
gggtctgcaggcattcgccctttgtgtgttaacactgtagctctaatcgtgcctggtgttctgaagcaggctcctcttccctgctgctgtgctgccatcccctgctcactccgcactcgcatgcattgcggattcagcacttaagccctagtgtgtaaatgacttggatctccctcctggcaggctgtgaccctcagcacaggggctctgtcttagtcagctctgtggcctggtacacaattggtgctcattaaacacgtgttggattactggctgaggtggtgcagtggctgcctaccagcaagtctttgtttcccattctgtcaggagcagagg

SEQ ID NO: 6295 - DNA, 278 bp, Homo sapiens
  unsure (1): n=A,T,C or G
naggtccttccaattcaggccacatgtacctccagatactatgtggctggctgcctctgcctttttgggcaatctcagttccaaatattctatcatgttgtcatgccagcttttggcttgggaaatatggtcagtatgtctgtggggaaactgattctgtgtgccggccgcagaggaaggactctgggctggaggaaaggggtagggctcagcgccagtgctaggactggttgaactgtagggtgcagccctggctagtgaccacaccccatgtccag

SEQ ID NO: 6296 - DNA, 378 bp, Homo sapiens
  unsure (1): n=A,T,C or G
  unsure (184): n=A,T,C or G
  unsure (316): n=A,T,C or G
  unsure (365): n=A,T,C or G
  unsure (377): n=A,T,C or G
  unsure (378): n=A,T,C or G
nctgctctttcagctttgaacgtcctttcccattctccatcatccacattcacctatcctgcctgccccagttaaaatcctgtttcttctaggaagtccctcatcccacccgcttaccccagggagactgagcttgttccttctcctagtaagaccctcagcccatggagtcctgtgtgatgtngtgaagcgtgggaggacagactgaactgctcggaccgtggagtcctgtgtgatgttgcgagcggggaggacagactgaactgcgtggtgcttcgcacatagacctcaacagggattgggattttgaagctgntggcgggggctgaggactgcttttcttcctttctagctcaaccggcagntaaagccactgnn

SEQ ID NO: 6297 - DNA, 413 bp, Homo sapiens
  unsure (189): n=A,T,C or G
  unsure (249): n=A,T,C or G
  unsure (286): n=A,T,C or G
  unsure (336): n=A,T,C or G
  unsure (338): n=A,T,C or G
  unsure (383): n=A,T,C or G
  unsure (387): n=A,T,C or G
gaggtccaatgatttaatgaattatgcctacataatgaagcctccggaaatctacaaaagaactgggttcaaagagcttctggatagctgaacacatgggggctcctagaaagtggcatgcccacagagagcagggaagctccatgccccttcccatgtaccttgccctctgcacctcttccatctggntcgcatctgtcccctttgtaatatcctttataataaactggtaaaagtattttcctgggntctgtgagctgctctagcaaattaatcaaaccccaantgagggggtcatgggaacacttatttataactggttggcgagaagcacangnaaaacatctgggacttgtgattgtcactggaagttggggagaggnttangactcaactctcaaccttgtggaatc

SEQ ID NO: 6298 - DNA, 245 bp, Homo sapiens
aaactgctggagggtacttgctataatggaaagctcatttggaaggtgacagattacaagatgaagaagagagaggcggtggatgggcacacagtgtccatcttcagccagtccttctacaccagccgctgtggctaccggctctgtgctagagcatacctgaatggggatgggtcagggagggggtcacacctgtccctatactttgtggcatgcgaggagagtttgactcactgttgcagtgg

SEQ ID NO: 6299 - DNA, 247 bp, Homo sapiens
  unsure (138): n=A,T,C or G
  unsure (220): n=A,T,C or G
cctggaaggtgtgcaggagtttggtagaggagtgatctaggtgaggggaatggaaggtgcagagaccagagctgagagggcctgaggcactttccagagcgtggggaggggcctccaccaaggcgagaagggctgcangtccagatcaccagcgtttgtagacagtagtgtggcgcttggagtttacctgagggccagtggagctccagggacctatcangacggggacctgtggggactgggaagg

SEQ ID NO: 6300 - DNA, 341 bp, Homo sapiens
attttttctttatttttctttataaagtgaagagtaggtagcatgaattcctcttgccctttgctatttcagtctggcatcagtagcaattgttgctatgtccagttttcattcatggatttttctgggattgaagatgagttcaatgttgattatttaattgggcagtataagtaaattcattggctctccttccagtttagtgaatactaaatatcatccatgatattttatacttcttacacttctggaatctaacctgaaaatagaagttgtaagtcagggacggtggtatgtgcctctagtctcagctagttgggaggctgaggcttgagcccagg

SEQ ID NO: 6301 - DNA, 438 bp, Homo sapiens
  unsure (438): n=A,T,C or G
gcgaggtgagaggaccagcggccagagcctcagtgactgccaccctggaggacagggcacaacaaccgtttctggagagaatgggaggattccagaggggcaaatatggaactatggctgaaggtagatcagaagataacttgtctgcaacaccaccggcattgaggattatcctagtgggcaaaacaggctgcgggaaaagtgccacagggaacagcatccttggccagcccgtgtttgagtccaagctgagggcccagtcagtgaccaggacgtgccaggtgaaaacaggaacatggaacgggaggaaagtcctggtggttgacacgccctccatctttgagtcacaggctgatacccaagagcttgtacaagaacatcggggactgctacctgctctctgccccggggccccacgtcctgcttctggtgatccan

SEQ ID NO: 6302 - DNA, 248 bp, Homo sapiens
  unsure (2): n=A,T,C or G
gngaggtcctcatttagaaagaaaatcccctcagaaggctgtctggcacccagtgtcctagccaggccaagtatatgagaaaggtaagtccattttccccttcaggtcctcagtggattacttaaccactgctgtccctcggtccctttttcctaaacgggtttagttctgtcttttttctccttttttctaaatgctggtaaatatttacattcagccagggaagaggaggccagaggtcgggccag

SEQ ID NO: 6303 - DNA, 345 bp, Homo sapiens
  unsure (300): n=A,T,C or G
gaggtccaagccgtagtggggtctgatatcaccagcataaccgagcggtataggatatattctgttaaagatggaaaaaatggaaaatctctgccatttatgttgtgtgacactatggggctagatggggcagaaggagcaggactgtgcatggatgacattccccacatcttaaaaggttgtatgccagacagatatcagtttaattcccgtaaaccaattacacctgagcattctacttttatcacctctccatctctgaaggacaggattcctgtggtggcttatgtcttaaacatnaactctattgacaatctctactctaaaatgttggcaaaaagtgaa

SEQ ID NO: 6304 - DNA, 205 bp, Homo sapiens
aaatggtagagggttagtggaagtgcacacgttgtttttagcccaggggtagtaacaaactcttactagccaactagaaaattattttgttgacgagatgtcccttttaggagggcttgtttcctgaaagaatgccaactttttttgttgttctttcagtattggcttgagtgacctgttctcctgagtgctctagtgtctccag

SEQ ID NO: 6305 - DNA, 347 bp, Homo sapiens
  unsure (338): n=A,T,C or G
gcgaggtctgtgttggcatgcacctgcagtctcagctacttgggaggctgagacaggaggatcactcaagctcagaaggtcgaggttacagtgagctatgatcatgacactgcactccaacctgggcagcagagcaagaccccgactcaaaaaaaacatatgaaaagaaaaaagtatggagcatagttggggaaaagcaaatagccctatctgagcacagtcgactcatgatgctctcttctactataactgcctttacttttctcataaaagttgaaaaataccattctgccatttgtgcattaatttgctagagttgtagcaataaagtagcaganactggaagg

SEQ ID NO: 6306 - DNA, 348 bp, Homo sapiens
aggtaatttatgtacagactgtgacagattccttcaccttcatcgaagaaccaaaactcatcaaagacaggtcttcaaagaagaagaagaagctataaaggttgaccttcatgaaggttgtggtagaaccaaattgttctggttgatggcactggcagattctaaaacaatgaaggcaatggtggaattccgagaacacacaggcaaacccaccacgagtagctcagaagcatgtcgcttctgtggttccaggagtggaacagagttatctgctgttggcagtgtttgttctgatgcagattgccaggaatacgctaagatagcctgtagtaagacgcaaccttgtgg

SEQ ID NO: 6307 - DNA, 177 bp, Homo sapiens
catggtccttgcggagaaccgaccggctgtgaaggccgcgcagaacgagatctggcagactttcttcaggggccgctacctgctcctgcttatgggcctgttctccatctacaccggcttcatctacaacgagtgcttcagtcgcgccaccagcatcttcccctcgggctggagtgt

SEQ ID NO: 6308 - DNA, 201 bp, Homo sapiens
cctacggccagaagccctacaagaagatgaaagggccggaggtcatggccttcatcgagcagggcaagcggatggagtgcccaccagagtgtccacccgaactgtacgcactcatgagtgactgctggatctacaagtgggaggatcgccccgacttcctgaccgtggagcagcgcatgcgagcctgttactacagcctgg

SEQ ID NO: 6309 - DNA, 340 bp, Homo sapiens
  unsure (89): n=A,T,C or G
  unsure (98): n=A,T,C or G
  unsure (103): n=A,T,C or G
  unsure (117): n=A,T,C or G
  unsure (126): n=A,T,C or G
  unsure (196): n=A,T,C or G
  unsure (206): n=A,T,C or G
  unsure (269): n=A,T,C or G
  unsure (281): n=A,T,C or G
  unsure (290): n=A,T,C or G
cataggaacgcactcaggcaggtggtttgttctggatgcagaaaccagagatctagtttctatccacacagacgggaatgaacagcttntctgtgatncgctnctcaatagatgganccttcctgnctgtaggatctcatgacacctttatttacctctatgtagcctctgaaaagggaagaaaatatagcagatntggaaggtgnactggacattccagcttacatcacacaccttgactgggcccccagacaacaagtatataatgnctacctcggganactatgaanattgacctgggacattccaaatggctgcaaactaatcaggaatcgatccg

SEQ ID NO: 6310 - DNA, 195 bp, Homo sapiens
  unsure (1): n=A,T,C or G
natcatttaatggaaatctgcacttcaaaacagcacttgaaggaccagccattggccctccaatgtaaatacttctcatttcacattatcagagaacagtgcagtttactaaccactccttccttataagaaattcagtactgtaaaattttttttcagtttcaaaacatttcaatcttattaattccaaagatc

SEQ ID NO: 6311 - DNA, 309 bp, Homo sapiens
  unsure (302): n=A,T,C or G
aggtccagggtgcttttggaaacatgtgtcgtggaggccgaatgtttgcaccaaccaaaacctggcgccgttggcatcgtagagtgaacacaacccaaaaacgatacgccatctgttctgccctggctgcctcagccctaccagcactggcatgtctaaaggcatcgtattgaggaagttcctgaacttcctttggtagtttgaagataaagttgaaggctacaagaagaccaaggaagctgttttgctccttaagaaacttaaagcctgggaatgatatcaaaaaggtctatgcctctcancgaaatg

SEQ ID NO: 6312 - DNA, 186 bp, Homo sapiens
aggtctggagatgttgggctgggaggccctgtggtcactcatactgcaggagagagaagaagggtacaggtgccagcttctccctgcccttaagcgaggtcagctccaccaggctcacgcactccaggacctcagcctgcaggcggcccagcagctcacaggcagcgttcatggttccaccagtgg

SEQ ID NO: 6313 - DNA, 172 bp, Homo sapiens
gaggtaaaaaacaaattgttgctatttcctagaagtttctggtttttaagatgaacataaaagtgtcagtatgcttcttttatgaggtgtactttatactttgatgaaggctaaggtgtacctaacagctttttatagtatattcatttatggagttagctgtatttttttt

SEQ ID NO: 6314 - DNA, 194 bp, Homo sapiens
  unsure (69): n=A,T,C or G
  unsure (92): n=A,T,C or G
  unsure (113): n=A,T,C or G
  unsure (175): n=A,T,C or G
  unsure (176): n=A,T,C or G
  unsure (185): n=A,T,C or G
aaaagctatttacacgctacattctatgaaaaatatgcttcaggaaatacatctaaaattaaaatacangattgcctgagaaacaaatccancccctccgtgtcgatggtggncacaccatccaggtacgacccatgcaggcgacaccacacgctgacacgggagaacagagaanngccgaccgnaagtcctcg

SEQ ID NO: 6315 - DNA, 289 bp, Homo sapiens
  unsure (22): n=A,T,C or G
  unsure (31): n=A,T,C or G
  unsure (35): n=A,T,C or G
  unsure (48): n=A,T,C or G
  unsure (69): n=A,T,C or G
  unsure (73): n=A,T,C or G
  unsure (97): n=A,T,C or G
  unsure (201): n=A,T,C or G
atggtacctatggaattgcttntattttagngaanatggaataaattncacccatccccattgtcaagnaatnaaaatatgcctctttttctactgntgaatgattcaaaatcaggtatttctggaaatactcagaaagggtaggaagggaaggagaaggtcaataggtgcatcagaaaaaggtataaaaatcatctaccnttaatcataagggtggatggattgcacttttccacttatttcaacacataatttttctaactagtatgaatgattgcaaccattttgg

SEQ ID NO: 6316 - DNA, 297 bp, Homo sapiens
  unsure (133): n=A,T,C or G
  unsure (140): n=A,T,C or G
  unsure (168): n=A,T,C or G
  unsure (181): n=A,T,C or G
  unsure (197): n=A,T,C or G
ctgacatggcgggagtttcagataccatacaagtcactggtctctctggaacaacttcatgttcttctgctactactgcagactctacaggtgttaacgtaattgaagattctggctcttgggggggggtctngaacagncacagcagcctctgatactaaaactganggatctgatgctnacactgaataatcagnaggcactgctgaaggctccgaaatctcactttgactcacaggaggctcaggctgcgatacagactcttcagatggtaatgatggcacctctgtaggccaa

SEQ ID NO: 6317 - DNA, 129 bp, Homo sapiens
  unsure (25): n=A,T,C or G
  unsure (88): n=A,T,C or G
  unsure (121): n=A,T,C or G
  unsure (125): n=A,T,C or G
ctgaaggaccaacaagggaaacggngatgagagagactgcccattataactttcaaaaccccgtctttggggaagaatcatctagggngacattcctttgaagtaaaatccccaggagaancttnggcc

SEQ ID NO: 6318 - DNA, 370 bp, Homo sapiens
  unsure (260): n=A,T,C or G
  unsure (320): n=A,T,C or G
  unsure (337): n=A,T,C or G
  unsure (355): n=A,T,C or G
ctggaggagtggcaggccaagtggagcgtggagaagcaccaaaagtggtctgaagtcagagaagttggtggaacagctcactgaatacagcacagacaaggacgagcctccaaaggacgtcttttgatgaattatttaagctggctccggagaaagtgaacgcagtgaaagaggccatcgtgaactttgtcaaccagaagctggaccgcctgggcctgtctgtgcagaatctggacacccagtttgcagatggggtcatnttactcttgctgattggacaacttgaaggcttcttcctgcacttaaaggaattttacctnactccgaactctcctgnagaaattgctgcacaacntcaccctggcgcttg

SEQ ID NO: 6319 - DNA, 120 bp, Homo sapiens
  unsure (101): n=A,T,C or G
  unsure (118): n=A,T,C or G
ccaaaggtgtgggtacttgtattcatcaatgaatccagaggaaaatgggctgctctgaaataaaggatctggaaatgaaggaaaatgtgcatgagtatgcnagtgtgtgtgtgtgtgngt

SEQ ID NO: 6320 - DNA, 113 bp, Homo sapiens
aaatgttctcacaacaacaaaaaatgataagtatgtaagattcttaaccacagttgatgtacctcacaggaagagcttctctttcaagatgtgtagctgcccgatgggttctt

SEQ ID NO: 6321 - DNA, 280 bp, Homo sapiens
ctgttctgtcctaggggagggggacatagccctagcaggagctcccagcccctcttggcactctgacacacaagtacacccatctggggcccgctttgccacgaagagctgggcaggcctgcagggtgtggggaaggaggacacaacctcaagaaaggaagcgtgaaccccagggaacagcgggtcccttccctcctcagacacaagccacctcagcttgtggctcttggcccccagccccaccaacccacctgttcatttattcaacagacaatgacag

SEQ ID NO: 6322 - DNA, 277 bp, Homo sapiens
  unsure (164): n=A,T,C or G
  unsure (203): n=A,T,C or G
  unsure (277): n=A,T,C or G
ccagagggaaggcccaagagacgtctctgaagccaccgttcctgattattcagaggcagggtccacagtgagtgactcggtggggctggaggaacccagggtgacccagagggggctccggagccgggtccctaacatctgaaaaagtcctcccagggaactcngagcttggaacttccaggcagcttcgggggtgacatttntatccggccagccgagcggggaaaggagaccttgtgttctggcaacagggagagccgggactgggatggacctn

SEQ ID NO: 6323 - DNA, 120 bp, Homo sapiens
ttgcgcatgacaggcaaatgcagccaagttaccgtccttgccgaaaggttacaggtttggatgcaagatgctctgggaagtgcacgcagatatggggggagaaaagctgctcagaccttt

SEQ ID NO: 6324 - DNA, 101 bp, Homo sapiens
  unsure (4): n=A,T,C or G
acantattctgtggtcctgtgaactcagacttaaagcctgggggaggaggtcctgctgagttggtgaatctctggtaacggtgggaaaatggaggatactc

SEQ ID NO: 6325 - DNA, 227 bp, Homo sapiens
  unsure (116): n=A,T,C or G
  unsure (137): n=A,T,C or G
  unsure (150): n=A,T,C or G
  unsure (162): n=A,T,C or G
  unsure (198): n=A,T,C or G
  unsure (205): n=A,T,C or G
aaaaagacaacaaaaacagaaacagacttgcattagaagacacacactcacctgcctgggtggtcagacacttgcccatagttcagcccctacacatgcagtgtgggcaagagccnggggaaatgataaagcctggncagttttttaccnggaggcacaacnatggggaatgatgggagatgaactcaaaccatgctntgaagtnagtgccagggacaaattttagg

SEQ ID NO: 6326 - DNA, 115 bp, Homo sapiens
  unsure (1): n=A,T,C or G
  unsure (11): n=A,T,C or G
  unsure (101): n=A,T,C or G
ngtttcagaanactcttggtggcaagcagcctgtgtatgataccacaattagaactggcagagcactgaaagaaaagactttgcttcccgaagatagtcanaaacttgacaattt

SEQ ID NO: 6327 - DNA, 183 bp, Homo sapiens
aaatgtaggacctatttcatgggtacctactacagacaaagaagaacaagacttttttgtgtgtattctaaggcacaacaagtgcaggaaggaaatgacctctttcccgtaaaagtccctggcagtagttggttgctgcataagagtgtcatgggcccggagggagctgggcccagatgcagg

SEQ ID NO: 6328 - DNA, 118 bp, Homo sapiens
  unsure (16): n=A,T,C or G
  unsure (74): n=A,T,C or G
ctgctttccggcaaanatcaacctctgctggtcaggaggaatgccttccttgtcttggatctttgctttgacgntctcgatagtgacactgggctcgacctcaagggtgatggtcttg

SEQ ID NO: 6329 - DNA, 213 bp, Homo sapiens
aaatgtgtctttgatgcatactttagaagcacactggctcgcggtttccatccctcttgccttgggacactcctgaggctggcagccctcctgcaatgagttgctctcagttccttctgtttggatcttgctcaacatctccagtttctctgctctgaaaaatgggaaaaactgctaaacatcccagagatttgcaatcttctagctctccag

SEQ ID NO: 6330 - DNA, 224 bp, Homo sapiens
aaaaatgtattatgctatgtttatttcctataggaattaaggataacctagacgacataaagaggataattaaagccagagagcacagaaataggcttctagcagacatcagagactataggccctatgcagacttggtttccagaaattcgtattcttttggtgggtccagttgggtctggaaagtccagttttttcaattcagtcaagtctatttttcatgg

SEQ ID NO: 6331 - DNA, 353 bp, Homo sapiens
  unsure (1): n=A,T,C or G
  unsure (113): n=A,T,C or G
  unsure (114): n=A,T,C or G
  unsure (138): n=A,T,C or G
  unsure (323): n=A,T,C or G
  unsure (345): n=A,T,C or G
ntgcagccactgtgctaaagcgggcagtagaactagattcggagtcgcggtatccgcaggctctggtgtgttaccaagaggggattgatctgctcctgcaggttctgaaaggnnccaaagataatacctaagagatgnaatctcagagaaaaaatttccaaatacatggacagagcggaaaacataaagaagtacttggaccaagaaaaagaagaagctaaagaaactcctgggatttctctcagattttgttgggaatcaaaacacctcaggagttaagcattcctaatgattagagggcagatggaaaatatcacacgccnattaaaatagaaagagaatgcnacccgggt

SEQ ID NO: 6332 - DNA, 250 bp, Homo sapiens
ctgctgctccaggcggagggagggagagagaaatggagagtgtgcgctgctgatcagcgcgaggcccaggggggtgaggtccgctccagggctctgctctgctctgatcagggagctcactttccagaaacgaagtcccagagcaccagaaaaggaaccaaacccagaacctcactttctaagtagtgctggtgagagaataaaactgtccatcagtcaacgatgaattcacatagagcaaggctgacaa

SEQ ID NO: 6333 - DNA, 171 bp, Homo sapiens
  unsure (100): n=A,T,C or G
ctggtgcttgtctggctgggtgaagtgctaggtgtcattggggactgtccagagctagttcagcgctccttcctggtggctagtgttctgcctggccccnatggcaacattaactcacctacaagaaatgctgacatgcaggaggagctaattgcctccctagaggagcaa

SEQ ID NO: 6334 - DNA, 341 bp, Homo sapiens
  unsure (1): n=A,T,C or G
  unsure (6): n=A,T,C or G
  unsure (8): n=A,T,C or G
  unsure (174): n=A,T,C or G
  unsure (209): n=A,T,C or G
  unsure (255): n=A,T,C or G
  unsure (329): n=A,T,C or G
nggccnangtctgttacagccctcaacagtgaaagtaactttgcccgagcatatgcacagggtatcagccgaaccaagtactgggagttgatttatgaagactctatggatctaatcgcaaagctaccttgtgttgcagcaaagatctacccgaaatctctacagagaaggcancggtattggggccattgactctaacctggactggnctcacaatttcaccaacatgttagggctatactcgatcatcagttnactgagctcacgcgcctgtacctcaccatccacagtgaccatgagggtggcaatgtaagtgcccataccagccntttggtgggcag

SEQ ID NO: 6335 - DNA, 129 bp, Homo sapiens
  unsure (20): n=A,T,C or G
  unsure (58): n=A,T,C or G
  unsure (78): n=A,T,C or G
  unsure (80): n=A,T,C or G
  unsure (103): n=A,T,C or G
  unsure (116): n=A,T,C or G
  unsure (127): n=A,T,C or G
ctgagagactctaaatccantgacaagtctgtctgcctattcaccgattttgattctnaaacaaatgtgtcacaaagnanggattctgatgtgtatatcacanacaaaactgtgcnatacatgaagnct

SEQ ID NO: 6336 - DNA, 187 bp, Homo sapiens
  unsure (8): n=A,T,C or G
  unsure (65): n=A,T,C or G
  unsure (104): n=A,T,C or G
  unsure (141): n=A,T,C or G
  unsure (145): n=A,T,C or G
  unsure (166): n=A,T,C or G
  unsure (176): n=A,T,C or G
ccaccggncagcagccctctgtgatgtgtgtgcagagtgaacagaggactcaggtttcatagcanctagtgcggggcatcctcatcctgtacctatagagttcntgcactcccccatccatgctacctacctccccgtttnctgnttcagttttaaacaatgaaancagcatttcnctgctttcatt

SEQ ID NO: 6337 - DNA, 154 bp, Homo sapiens
  unsure (16): n=A,T,C or G
  unsure (49): n=A,T,C or G
  unsure (83): n=A,T,C or G
  unsure (96): n=A,T,C or G
  unsure (134): n=A,T,C or G
  unsure (147): n=A,T,C or G
  unsure (153): n=A,T,C or G
ctgagctctgaatcanagagcagtgagacctaagggtccctgatctcanagggtccctcctgtctcagggtgaggacctgaanggtgtgggtcccngggagggtgaggaggccattgttggaaatttactgagntgggatcgggatnccccana

SEQ ID NO: 6338 - DNA, 314 bp, Homo sapiens
  unsure (121): n=A,T,C or G
  unsure (135): n=A,T,C or G
  unsure (200): n=A,T,C or G
  unsure (220): n=A,T,C or G
  unsure (258): n=A,T,C or G
  unsure (259): n=A,T,C or G
  unsure (306): n=A,T,C or G
  unsure (313): n=A,T,C or G
  unsure (314): n=A,T,C or G
ccttttgccatacagtcctgggtttgaatgcagccccctcctcacaaactggctatgtgatcatgaacaaattaaccggccagctccaatttgcttcttaatgttgtgaagtgtaaatgangccatgactggcangcggtacctggaaaaaggggctttgtttttactaaaaagctgtctgaactttcaaattaaggcanagttcaaaataagtgatagntacttagttggaaaatgaaacctatccaacatacaggnngaggggtccttctagagatgtggcattgagacaatgttggaacattntatacann

SEQ ID NO: 6339 - DNA, 294 bp, Homo sapiens
cctgacaggatgatgattttagaaactagaaagagttcaacgggtctggcacaaaagtggcatctgtgggtgtgctggagaatttcgctggagagatgacagggtccaagtcagaaaggaccttgactatctcaaccaagaatctggcatttttctgcaggcaatgaaaacaacattgagagattattagcagtggaagagaaagttcttaatgtgatttagaaagatggcaccaagagccgcgtgaagaatgagaagcagtggctgagagagaaagcagagactggttagagg

SEQ ID NO: 6340 - DNA, 337 bp, Homo sapiens
  unsure (194): n=A,T,C or G
  unsure (270): n=A,T,C or G
  unsure (276): n=A,T,C or G
  unsure (294): n=A,T,C or G
  unsure (335): n=A,T,C or G
ctgtcaccaccaagcatgaactttcactgattacccataacctactggaaatcttcagccttgctgtcagcatagaccactgtgagaaacagtacattccattccagtttgccctgctttttgaagatctaaatgccattccatgttttctgttacatattgaagtttcttggctgccaaagaaaaacggactntgctgaacttgtggacagaacaaccccaaggttggaagaacaatgaaaaataatctatacttgaacatttcaaaanttaaanattttcaacagtagtttnaacacactggaagcttaaaatacatcgacactgaaatggtnaa

SEQ ID NO: 6341 - DNA, 100 bp, Homo sapiens
  unsure (10): n=A,T,C or G
  unsure (23): n=A,T,C or G
  unsure (93): n=A,T,C or G
gggggccgangtaaacatgactnggtgctgaaagacacactgctgggacccaagttccctcccacatggacgggatggatgctggaacccaangtttcaa

SEQ ID NO: 6342 - DNA, 113 bp, Homo sapiens
  unsure (58): n=A,T,C or G
  unsure (66): n=A,T,C or G
  unsure (86): n=A,T,C or G
  unsure (90): n=A,T,C or G
ctggcctgtgggtgatcccagctcttactaggagagggagctgaggtcctggcgccangggcccangcccttcaaccataaacagntcangatggaaccttggttcacccttt

SEQ ID NO: 6343 - DNA, 201 bp, Homo sapiens
  unsure (151): n=A,T,C or G
  unsure (167): n=A,T,C or G
  unsure (180): n=A,T,C or G
  unsure (197): n=A,T,C or G
ctgaatcagcctgggtgccctagacccagtcatgtttgttggaccaaattagctgtcttttcatttcatgctatatagaactggcagtttacacttctgattaatacattgtctccgatcaggaggtttattttttttttcctaataaaanctgaaaggagattggnaagaaccaattantaattttacattacacnttgt

SEQ ID NO: 6344 - DNA, 145 bp, Homo sapiens
  unsure (93): n=A,T,C or G
  unsure (115): n=A,T,C or G
  unsure (139): n=A,T,C or G
  unsure (144): n=A,T,C or G
ctgaatcaccagctccttttatgatatttgtgtttgtttcacaatttctcaaggactaaagcagctcagtttgcattgctttctgctggtaanggcgggaaaagtggtggtggtnacccccacaggagtgatggtaganaaggna

SEQ ID NO: 6345 - DNA, 267 bp, Homo sapiens
  unsure (55): n=A,T,C or G
  unsure (126): n=A,T,C or G
  unsure (139): n=A,T,C or G
  unsure (155): n=A,T,C or G
  unsure (167): n=A,T,C or G
  unsure (222): n=A,T,C or G
ttggctgacttccacacctagcatctcatgagtgccaagcaaaaggagagaaganagaaatagcctgcgctgttttttagtttgggggttttgctgtttccttttatgagacccattcctattttnttatagtcaatgnttcttttatcaccatnttattaagtaanaaaacatcactgaaatgctagctgcaagtgacatctctttgatgtcatatggaanagttaaaacaggtggagaaattccttgattcacaatgaaatgctc

SEQ ID NO: 6346 - DNA, 222 bp, Homo sapiens
  unsure (222): n=A,T,C or G
cctcatcagcagggatgagatcacagcctacttcatgagagccagctcaatctattccaagctgggcctgggctttcctcacaacttccaagagaccacctacctgaagcccactttttgtgacaactgtgcttggatttctctggggagtgatcaaacaaggatatcgatgtaaagactgcgggatgaacttgtcacaaaacaatgcaaaagatctggtgn

SEQ ID NO: 6347 - DNA, 175 bp, Homo sapiens
ccttagcagtagcctgagctgcccccagggctgtgagctgctgaatcttctgactcatcatttccatgacggcctgttttcatggcgtgcttctcctgaagagctggttggattttctccatctgcttggttagaaaatctatcttcctcttgaagaagtccttggcatcctcag

SEQ ID NO: 6348 - DNA, 252 bp, Homo sapiens
  unsure (119): n=A,T,C or G
ccaccagcatcaaaagaagaaatccttgagggtactgggtgagttggtgggcaagcgctgccaccttcagtgccagcacaatctggggtcagcaaagaggggtagcaagtgtgccttanagatgaagaaatggctaaggaggaaagcactgtaaaggtgacttggggaatcctcctgagacctaagatttgaaactaattgtccaagtcccagcctctgctctgggaggctccaggggccaaggtaagcagg

SEQ ID NO: 6349 - DNA, 196 bp, Homo sapiens
  unsure (162): n=A,T,C or G
ccttagccctgctcctctctattccatcctgtagaggtcgggagtcaggagtcgctggcaggagacagcatgtcacccaggactctgccggtgcagaatatgaacaatgccatgttcttgcagaaaacgcttggcctgagtttcataggaggtaatcaccanacaactgcagaatgtggaacactgagcaggacag

SEQ ID NO: 6350 - DNA, 301 bp, Homo sapiens
  unsure (183): n=A,T,C or G
  unsure (193): n=A,T,C or G
  unsure (286): n=A,T,C or G
  unsure (290): n=A,T,C or G
  unsure (300): n=A,T,C or G
ctgaaagggacgttgttggaagcgttctcggaaaggttcatgtggttctgcaccacgatgtaggccatctcacctttatgtctttcattattcatcacaagaggaatgttcagaagcatcgtgtcactgaaaataaacatccaaagatctcttgcccagggcggagtatctggcctggtcagnaactctaggntgccgtctctgtcgatgaatgatatcatgctcgccagcagaggggtgacagcaccttggacccgctttcagagggtgtgcctgaatgtgcccncctnctggagagcnt

SEQ ID NO: 6351 - DNA, 350 bp, Homo sapiens
  unsure (151): n=A,T,C or G
cctacaagtagggagggagggtaataaaaaaacgaatcccaggaagagcaccacgaaagcgggaagcctgaagtcacccacaaagggcactgcagacaccgcaccaggaatgtttcttaagagctggcagtcctctccagggagagagcanaggaggggaacagccgcagggactatagagtttctaggactccacgatgtgccggcacagcatgctgccatcacacacgctgacctccttgtcctgtgcaattacatgactaggacctgccttcgacaagcgtctgatggtctatgagcacattccgcttaccttcccaataaaataacaaagaaatacaaaacaaaac

SEQ ID NO: 6352 - DNA, 238 bp, Homo sapiens
  unsure (2): n=A,T,C or G
  unsure (5): n=A,T,C or G
gncgngcaggtctgatttctgaggagctggattcaatgtgggaggtgcagcagagctggaagcaccctgcactctgatctctagctgggggctctgtttccaaacttggttgtcctcagtggctgcctcacaccagtatgacccggagtgatcttctgaagctgtggggatctggaattctgaggagagccccctgctttgcactatccttccatccttgtagaaggagaagaggagg

SEQ ID NO: 6353 - DNA, 101 bp, Homo sapiens
  unsure (78): n=A,T,C or G
tgggggaggggacctaaaataaatagactttaacatttcccttgggtgctaatcatagttggaagttgaatttaaggngattatttgggtgacaattaaaa

SEQ ID NO: 6354 - DNA, 123 bp, Homo sapiens
  unsure (57): n=A,T,C or G
  unsure (105): n=A,T,C or G
  unsure (116): n=A,T,C or G
ctggagagagatcaatatgctgaacaaataaaaggagagagggcccagtggcagcanaggatgaggaaaatgtcgcaggaggtttgcacattgaaggaggagaanaaacatgatcncatcggg

SEQ ID NO: 6355 - DNA, 423 bp, Homo sapiens
aaaagtttagagaaggaaagtatagtgttaaaggggttcggggagatttcatcaatggaacggcacagggaaacggctttcaaggagaagaaatatttcacaaaatgaagagacaaaaagggccaacaaattcagcataagacaatatattaatggaggaaaagtcaccatgtttgggaaatgtggagttcaggttagtgaagggctggatctttgtaggcagagataaaatgggcaaggaacatttgcatgaagtaattttatttaattaggagcattatgaggaatcacagcaattttttgaaagagtaatgatatgatcaaagttaattaaagttatgatcttcagaaaaattaatctggccactgtgtacaagaatagattggaatcaaaaggaacctggaggtgggaacaccactttg

SEQ ID NO: 6356 - DNA, 129 bp, Homo sapiens
  unsure (9): n=A,T,C or G
  unsure (73): n=A,T,C or G
  unsure (129): n=A,T,C or G
gtgacccangtagaggaagatatggtgatggtgttgatggatggctctgtgaagctggtgaccccggaggggnccccagtccggggacttctcacacctgaaatccccatgaccgaaacggtggagccn

SEQ ID NO: 6357 - DNA, 248 bp, Homo sapiens
  unsure (103): n=A,T,C or G
ctgatcagactcctggtgccactcccaaaaaactatcaagttgggatcaggcagagacccctgggcatactccttccttaagatgggatgagacaccacgtcntgcaaagggaagcgagactcctggagcaaccccaggctcaaaaatatgggatcctacacctagccacacaccagctggagcttgcttactcctggacgaggtgatacaccaggccatgcgacaccaggccatggaggtgcaactt

SEQ ID NO: 6358 - DNA, 351 bp, Homo sapiens
  unsure (197): n=A,T,C or G
aaattctgcacagaaaaaggagaaagggtattaagatggcaccagagagacacaccatcaaatgttcagttcaggagtaggtctatagagttttctgacagggaatgtcacagaattgccagcatgttcctcaatggactctttgcttcttggagcttctgagacacttcaagacttgaagtgaccactggctgtgncctccagccccagggagcccagaagttctgagatgtgtatcttatttcagttccctactgcagctagggtcttaggagggaccctagttacaggatgaatcaaataccaaaaggtgaggttcaactgttccttgtcctggaatatcattcttgg

SEQ ID NO: 6359 - DNA, 122 bp, Homo sapiens
  unsure (69): n=A,T,C or G
  unsure (96): n=A,T,C or G
cacacgcctgttcccagcaagtgctgaaactcactagacccgctgcctgtttcgaaatggggaaagccntgcgtgcgcgttatttatttaaatgcncctgtgtgcgcgggtgtgggaacaca

SEQ ID NO: 6360 - DNA, 131 bp, Homo sapiens
ctgtgagaggcagtgcgcccgcctcccagggagaacgaggaaccgccaggagacaggtctacctgcaccaccggcaaaccagagggcccaaggccagggccgtaagccctgggagtacactcccttaaaga

SEQ ID NO: 6361 - DNA, 401 bp, Homo sapiens
  unsure (370): n=A,T,C or G
cctaagcatagggccattttgaaacacatgtggctcatcacaaaccacacaatattcatttaatacagggatccgctgttcagcaaactcaattgtctgcaccaggaagccacggtctcgtactggaatgcattttgcaccatttggagcaagctgagaagatgaagatgaagatggtgttaggataccaataagccctgaggtaagagagagcctcctgccctctgcgttaggttccttgaaaagctcagttttggatgacttgggggcactggagtaggacttgctgagcaatttgtgatttttcagtccatataattcttccattctgagattactagagtaagacctgcttaacagtttatggggnttcaagtttgtgttgtgctcacatcgtggat

SEQ ID NO: 6362 - DNA, 107 bp, Homo sapiens
  unsure (4): n=A,T,C or G
  unsure (14): n=A,T,C or G
  unsure (24): n=A,T,C or G
  unsure (56): n=A,T,C or G
  unsure (67): n=A,T,C or G
  unsure (78): n=A,T,C or G
  unsure (86): n=A,T,C or G
  unsure (88): n=A,T,C or G
  unsure (94): n=A,T,C or G
aaanctggctcaanactggcccangcataatactgtcaatctaaaggtaaccggcnacatcaaaaantacatctcaanagaatcangnttaaanatcaacaggagaa

SEQ ID NO: 6363 - DNA, 322 bp, Homo sapiens
aaatcaatagtgattattgcgagcggcagccccagctacacacgtcgctgggagctgattactgctacatctcaccgcagcgtagagtttagtcacagcttctccccacaatattgcaagtttaagtggtggagagtcgcaaagaaaaaacacaagaaaccccaaataataataacaacaaaaacaacaataacaactgtaataataataataataataataaaaaccctaagggatgtatgaactggttttaactaagtaggccaagggatcattggttctgatttgcattcatctctacagtaaataaaacctcgttttt

SEQ ID NO: 6364 - DNA, 254 bp, Homo sapiens
cctgccagatatttgtgagaaatctgccattcgatttcacatggaagatgctaaaggacaaattcaacgagtgcggccacgtgctgtacgccgacatcaagatggagaatgggaagtccaaggggtgtggtgtggttaagttcgagtcgccagaggtggccgagagagcctgccggatgatgaatggcatgaagctgagtggccgagagattgacgttcgaattgatagaaacgcttaagcagttgcctttttt

SEQ ID NO: 6365 - DNA, 388 bp, Homo sapiens
  unsure (121): n=A,T,C or G
  unsure (353): n=A,T,C or G
aaagttgctttgaagctcgtctataaatggcttcaagcaacatgactggttggttgtgagaattaaagggtcattaactgaataactccaaagtcattaacatgaccaaggtaaggatacnagaaataggaaaaggaaaatcctattccaagttggagggccatgccatcaaccacagtggtctgtgccagagcaacactattcgctagtggttctatactgacttctttactggctttccatctttgtatttattccctctgcaatccgtttcattttcagtagaagccagtgtcgaataggaataaagaatctgtgtattgcggtcagacagatttgggctagaataccanctctagactttctagtttccatcactttggggcag

SEQ ID NO: 6366 - DNA, 217 bp, Homo sapiens
aaatcaaggttcataggaaaagacataaatgaggaaactccaaacctcctgttagctgttatttctatttttgtagaagtaggaagtgaaaataggtatacagtggattaattaaatgcagcgaaccaatatttgtagaagggttatattttactactgtggaaaaatatttaagatagttttgccagaacagtttgtacagacgtatgcttgtttt

SEQ ID NO: 6367 - DNA, 343 bp, Homo sapiens
ccacctgcttgagccagggtggcctcctggaagacctggacaacctcatcctggaggacctgaaggaggaggaggaggaagaggaggaggtggaggacgaggagggcgggcccagggagtgacccctgccaggtgcagatacaaaccagacacggtctgtggctactttgtgttattataagatatgagctcaaaccgagatatgaatgaccttggggagccatctgaggccaagatattgacgggggggattcctgggtcccattttcagcgcccagggtcacagatccacagtgggaagttctgtgggacacattggcactgagccacaaagaaggtgtgg

SEQ ID NO: 6368 - DNA, 100 bp, Homo sapiens
  unsure (58): n=A,T,C or G
  unsure (74): n=A,T,C or G
  unsure (96): n=A,T,C or G
  unsure (100): n=A,T,C or G
ccttggtgctcagtggggagactcaggaacgggagcgaatcctctaccagttctccanacgcttccaccattgnaatccggggatcttcccctcantacn

SEQ ID NO: 6369 - DNA, 362 bp, Homo sapiens
ccagcagggattcagccggatcagcatctaccacaacactgccagcaacaccttcagagtcgttggagtcaagttgcaggatcagcaggttgtgatcaattattcaatcgtgaaagggctgaagtacaatcaggccacgccaaccttccaccagtggcgagatgcccgccaggtctacggcttaaactttgcaagtaaagaagaggcaaccacgttctccaatgcaatgctgtttgccctgaacatcatgaattcccaagaaggaggtgcgtgcatcctctaatgacaaagcaaccttgtatttccttccacaaatgaatggaggcagcctaacgtcatgtggcccctccagccagcgtcag

SEQ ID NO: 6370 - DNA, 324 bp, Homo sapiens
aaaaaagggaggaagaatctctgttttaatgtagtttgcttctacaccatctgtcccacaacactgttttaccaccttcagcacaatttttttcatttcctcatcaggagactggaattctcgaataagggattaacatcacttctctagtatagtagttggcatattctgcatccataagaggaataagatacccaatagccttcaagaaagcagccaaaccctttcctctgtgttggcggatacccttccataaaggctttaacacagaatcaaaagattcgataccataaggagttgctgcttcagccaaggcagcaatgg

SEQ ID NO: 6371 - DNA, 121 bp, Homo sapiens
  unsure (1): n=A,T,C or G
  unsure (7): n=A,T,C or G
  unsure (41): n=A,T,C or G
  unsure (62): n=A,T,C or G
  unsure (64): n=A,T,C or G
  unsure (100): n=A,T,C or G
  unsure (115): n=A,T,C or G
  unsure (117): n=A,T,C or G
nctgcancttctgatgatgccccctaccctgtctgtaccgngcggtacttccctagcacagncnatcacaccctgcagtgggcccggcatgagtttgaanaactctaccgactgncngcag

SEQ ID NO: 6372 - DNA, 338 bp, Homo sapiens
aaaattacactttttcttaacctgtctagctgtcggaaaaggtaacagaagatggaactcgaaatcccaatgaaaaacctacccagcaaagaagcatagcttttagctctaataattctgtagcaaaaccaatacaaaaatcagctaaagctgccacagaagaggcatcttcaagatcaccaaaaatagatcagaaaaaaagtccatatggactgtggatacctatctaaaagaagaaaactgatggctaagtttgcatgaaaactgcactttattgcaagttagtgtttctagcattatcccatccctttgagccattcaggggtacttgtgcattt

SEQ ID NO: 6373 - DNA, 348 bp, Homo sapiens; identical to SEQ ID NO: 415
  unsure (121): n=A,T,C or G
  unsure (124): n=A,T,C or G
  unsure (145): n=A,T,C or G
  unsure (273): n=A,T,C or G
  unsure (343): n=A,T,C or G

SEQ ID NO: 6374 - DNA, 274 bp, Homo sapiens
ccttccaattcaggccacatgtacctccagatactatgtggctggctgcctctgcctttttgggcaatctcagttccaaatattctatcatgttgtcatgccagcttttggcttgggaaatatgggtcagtatgtctgtggggaaactgattctgtgtgccggccgcagaggaaggactctgggctggaggaaaggggtagggctcagcgccagtgctaggactggttgaactgtagggtgcagccctggctagtgaccacaccccatgtccag

SEQ ID NO: 6375 - DNA, 299 bp, Homo sapiens
ctgctgcggctgcacaaagagccatttggggaaatcagttcaaggtacaaagcggatctgagcccggaaaatgctaagctcctcagcacattcctaaatcagactggcctagacgccttcctgctagagctgcacgaaatgataatcttgaaactaaagaacccccaaacccaaaccgaggagcgcttccgccctcagtggagcctgagagacactctcgtaagttacatgcaaactaaagaaagtgaaattcttcctgaaatggcatctcagttcccagaagagatactgctcgccag

SEQ ID NO: 6376 - DNA, 395 bp, Homo sapiens
  unsure (385): n=A,T,C or G
ctgagagactctaaatccagtgacaagtctgtctgcctattcaccgattttgattttcaaacaaatgtgtcacaaagtaaggattctgatgtgtatatcacagacaaaactgtgctagacatgaggtctatggacttcaagagcaacagtgctgtggcctggagcaacaaatctgactttgcatgtgcaaacgccttcaacaacagcattattccagaagacaccttcttccccagcccagaaagttcctgtgatgtcaagctggtcgagaaaagctttgaaacagatacgaacctaaactttcaaaacctgtcagagattgggttccgaatcctcctcctgaaagtggccgggtttaatctgctcatgacgctgcggctgtggnccagacctct

SEQ ID NO: 6377 - DNA, 204 bp, Homo sapiens
  unsure (73): n=A,T,C or G
aaaaatgttagcagttttcaaaatcacctgaacatccaagtaggatccacccaggagagatctttaatggagngaccctcacactctataaaactgacaggggcaacgaattgaaccttgacttaacaaaaacacatcctggtattcataagtctctgttaggaagtccgtggaggtaggtgggagccggaagttagggctcag

SEQ ID NO: 6378 - DNA, 289 bp, Homo sapiens
ctgatcgaaatggcattgctgtctctaggttattcacatagctctgctgcccaggccaaagggctagtccaggttggaaagtggaatccagttccactgtcttacgtgacagatgcccctgatgctacagtagcagatatgcttcaagatgtgtatcatgtggtcacattgaaaattcagttacacagttgccccaaactagaagacttgcctcccgaacaatggtcgcacaccacagtgaggaatgctctgaaggacttactgaaagatatgaatcagagttcattgg

SEQ ID NO: 6379 - DNA, 223 bp, Homo sapiens
  unsure (69): n=A,T,C or G
  unsure (125): n=A,T,C or G
  unsure (144): n=A,T,C or G
  unsure (161): n=A,T,C or G
  unsure (171): n=A,T,C or G
  unsure (182): n=A,T,C or G
  unsure (198): n=A,T,C or G
cctggaaggtgtgcaggagtttggtagaggagtgatctaggtgaggggaatggaaggtgcagagaccanagctgagagggcctgaggcactttccagagcgtggggaggggcctccaccaaggcnagaagggctgcaggtccanatcaccagcgtttgtanacagtagtgnggctcttggantttacctgagggccantggagctccagggacctattacgac

SEQ ID NO: 6380 - DNA, 306 bp, Homo sapiens
  unsure (153): n=A,T,C or G
  unsure (163): n=A,T,C or G
  unsure (171): n=A,T,C or G
  unsure (208): n=A,T,C or G
  unsure (225): n=A,T,C or G
  unsure (238): n=A,T,C or G
  unsure (288): n=A,T,C or G
  unsure (302): n=A,T,C or G
  unsure (306): n=A,T,C or G
ctgttcagaaagctcattggacctggttttgaaaataaaacaaagttaaaaccctgggaggagttattgtgcagtgtggagtactcaggctttcttataaagaaaaaaaaaagttatctggtaccaaagtgtgcaacctacagaccctcaggnactgccctgngacttctntgtatgacatcacaaggctgccaagtgcctgtttttntaaaactaggagttggngaggtttggctantgctgaaaccatgcataggattggtttactaaattaaaaccttattacgnacgtcctccaaaanacan

SEQ ID NO: 6381 - DNA, 191 bp, Homo sapiens
  unsure (1): n=A,T,C or G
  unsure (17): n=A,T,C or G
  unsure (83): n=A,T,C or G
  unsure (99): n=A,T,C or G
  unsure (138): n=A,T,C or G
  unsure (146): n=A,T,C or G
  unsure (155): n=A,T,C or G
  unsure (179): n=A,T,C or G
  unsure (183): n=A,T,C or G
nccatttaactggtcangcaattaagtcaagggaaaatccatttgggatttctgagaaagctttgctttccctcataaaaggngatatatatagctggnacaggcccatttccatttttttctttcctggccttcacnatggaccncggcccgcngaccaccctaagggggaatttcancacnctggcggg

SEQ ID NO: 6382 - DNA, 116 bp, Homo sapiens
  unsure (110): n=A,T,C or G
aggtcgatgggcctatttgtttggtgctggcaccaactcgggaactggcccaacaggtgcagcaagtagctgctgaatattgtagaacatgtcgcttgaaatctactttnattcta

SEQ ID NO: 6383 - DNA, 249 bp, Homo sapiens
  unsure (35): n=A,T,C or G
  unsure (57): n=A,T,C or G
  unsure (87): n=A,T,C or G
  unsure (120): n=A,T,C or G
  unsure (127): n=A,T,C or G
  unsure (180): n=A,T,C or G
  unsure (214): n=A,T,C or G
  unsure (239): n=A,T,C or G
ggaggaggctgattgcactccacaaacaggactgnctggaccaacggaaactggcangagggaggtgggaaaggaaaaaggcaaacntttggcttttataaagcaaaggacgtttatttnctgaggncatgacacacgaagtggaatcctagccacggctgcggagctctcgtgatgaangccggagtgctgactgacatgccgggtggaccangagctggagtctgttatcttacacnaatgctcatg

SEQ ID NO: 6384 - DNA, 112 bp, Homo sapiens
  unsure (24): n=A,T,C or G
  unsure (31): n=A,T,C or G
  unsure (34): n=A,T,C or G
  unsure (53): n=A,T,C or G
  unsure (59): n=A,T,C or G
  unsure (71): n=A,T,C or G
  unsure (84): n=A,T,C or G
  unsure (109): n=A,T,C or G
  unsure (111): n=A,T,C or G
ccatcccagtcccggctctccctnttgccanganacaagggctcctttccccnctcggntggccggatacnaatgtcacccccnaagctgcctggaagttccacctccnant

SEQ ID NO: 6385 - DNA, 204 bp, Homo sapiens
ccaaaagatttccccagacacggttctgcacttgatccttcctgagagccctggcagccacgaggagtcacgagagtactctttagaggaggtgaaggagcttttgaacaagttgatgctgatgtctggcaagaaaggatcgtaacaacacggaagtggagaggttttcagaggtcttctgcagtgtgcagaggctcagccagg

SEQ ID NO: 6386 - DNA, 230 bp, Homo sapiens
  unsure (1): n=A,T,C or G
  unsure (163): n=A,T,C or G
ncctgcgtgtgtctgtgttgagcgtgcgtctgtgtgtgcctgtgtgcgagtctgagtcagagatttggagatgtctctgtgtgtttgtgtgtatctgtgggtctccatcctccatgggggctcaaccaggtgctgtgacaccccccttctgaatgaagccttntgacctgggctggcactgctgggggtgaggacacattgccccatgagacagtcccagaacacggcag

SEQ ID NO: 6387 - DNA, 242 bp, Homo sapiens
  unsure (1): n=A,T,C or G
  unsure (3): n=A,T,C or G
  unsure (105): n=A,T,C or G
  unsure (134): n=A,T,C or G
ngnctgcagccccttgaacaggtgaaagctggaatagaagctcattcggaagccaaaaccagtggactcctgtgggctggattggcactgctgtccattcagggnggggcactggcctggctcacgtggggggngtactcctgggatatcatggagccaggttacattcttcatcacatttgcaaattctatggtcttttttgcatactttatagtcactcgacaggattatacttactcag

SEQ ID NO: 6388 - DNA, 156 bp, Homo sapiens
  unsure (11): n=A,T,C or G
  unsure (48): n=A,T,C or G
  unsure (111): n=A,T,C or G
  unsure (119): n=A,T,C or G
  unsure (136): n=A,T,C or G
  unsure (141): n=A,T,C or G
atttcatttcngtttcttttctcgccatgtttttctgtcggaattacngttcgttttggttctatgtactctctaaaatgttatcgtttttcatttgtctactaattttcntgcatttngttactacctgagtatnttaanatctgactggctcca

SEQ ID NO: 6389 - DNA, 261 bp, Homo sapiens
  unsure (133): n=A,T,C or G
ctgcgtcaccacctcctgggtggcagggagacgatacatatttcctaatgaccgggatggttttattaggattggcaagcgggacttcttagcctctctgttggtaataccagggagggaaaggaagggcagnctgccacccaggcaccccgtgcaggttctctggccgatgctctgcgctgagtgcagtgttgatcggtttctcttcccaagcctctcttgttgcttcatgcttgaatctcagcaggtcgccctccgtgg

SEQ ID NO: 6390 - DNA, 153 bp, Homo sapiens
cctcaggtttttgtgttctctgaagctcaggggacaggaactaagtccccattctcgctttggcttcctgctctgggactcagtttcccccgtgcagcagggggcttgggcaagtccaaggagaggtgggggtacccacctgtgacatgaagg

SEQ ID NO: 6391 - DNA, 284 bp, Homo sapiens; identical to SEQ ID NO: 416
  unsure (164): n=A,T,C or G
  unsure (178): n=A,T,C or G
  unsure (275): n=A,T,C or G

SEQ ID NO: 6392 - DNA, 248 bp, Homo sapiens
ctggcgttggcagggaggaatggagagcttgtggaaggtgcgggaagggagggctgtgcttggcctgagagcaggaggacaccgggaacagcacgatgggctatgcccgctctcaaagagcttgatcaggccggagggacctggatggggccagttatacataagacaggccaaaacacacgccctgagagagatggaaaatgaccacaccagagaaaggacagcaccacgtgcctcgaggggcttgg

SEQ ID NO: 6393 - DNA, 175 bp, Homo sapiens
  unsure (150): n=A,T,C or G
gatagcggcagcgaggggctcggagaggtgctcggattctcgtagctgtgccgggacttaaccaccaccatgtcgagcaaaagaacaaagaccaagaccaagaagcgccctcagcgtgcaacatccaatgtgtttgctatgtttgaccanccacagattcaggagttcaaagagg

SEQ ID NO: 6394 - DNA, 252 bp, Homo sapiens
  unsure (118): n=A,T,C or G
  unsure (121): n=A,T,C or G
  unsure (145): n=A,T,C or G
  unsure (148): n=A,T,C or G
  unsure (201): n=A,T,C or G
  unsure (218): n=A,T,C or G
  unsure (224): n=A,T,C or G
  unsure (248): n=A,T,C or G
aaacatgacttggtgctgaaagacacactgctgggacccaagttccctcccacatggacgggatggaggctggagcccaaggtttcagggaaacgtatgtggcctgtgccccctgggngtnatcatggggcacacacattttatntgncagggccagccttggctgttgaggggtcatgggcacacaggaggaccatctgntgacactgaagaccagntgttgnccacagccatggacaataaggaanaata

SEQ ID NO: 6395 - DNA, 338 bp, Homo sapiens
  unsure (131): n=A,T,C or G
aaacttactagctgccaagtagcacacttatgctgctgtgtcccaatccattctgtggtgagtataagtcacaagagtctgcataaaacactatcagcaatcaggatggctatggggcaaggaccgtttanaatgttaccaagtcacaggaccagcaggaaaatggaataatggaagaatgtgaaataaatctgatttgtttgagtagaaggcagctttgattcaggcataaatgcatctcccagattatcatgtaaataaagacctcagaagttgacacttccctcccagtccaccacttaaaacaggacacatgctcagttttcccaatctgtttt

SEQ ID NO: 6396 - DNA, 273 bp, Homo sapiens
caccacacatgatcataactaagccttgacggcatcactgtcccacctactggaacttgtccgtgaaaatccacacagatgctgcacatccccttatcccctacaaggaggctggagatcttccacaatgcaggctgcagcctgcttcttcatttgttaggagcagggaaggaaatgcagaagctgagaaatgagggccaagaaagccaggcagtaggatggagacccaagggacatcagggcagaaacaaaatagtacaaaggagaagagtg

SEQ ID NO: 6397 - DNA, 119 bp, Homo sapiens
  unsure (77): n=A,T,C or G
  unsure (94): n=A,T,C or G
  unsure (108): n=A,T,C or G
  unsure (116): n=A,T,C or G
aaaatcagtggcaccgaggcgcctgcagccgcactcgccagcgactcatctctccagcgggttttttttttgtttgncgtgtgcaatcctcacnctcatgaacatacncaggtttnccc

SEQ ID NO: 6398 - DNA, 262 bp, Homo sapiens
  unsure (188): n=A,T,C or G
  unsure (255): n=A,T,C or G
  unsure (258): n=A,T,C or G
cagaccccaaaattccgggtcctgaagacaggacagagcatgacactgctgtgtgcccaggatatgaaccatgaatacatgtactggtatcgacaagacccaggcatggggctgaggctgattcattactcagttggtgagggtacaactgccaaaggagaggtccctgatggctacaatgtctccanattaaaaaaacagaatttcctgctggggttggagtcggctgctccctcccaaacatctgtgtacttntgngcca

SEQ ID NO: 6399 - DNA, 312 bp, Homo sapiens
  unsure (152): n=A,T,C or G
  unsure (221): n=A,T,C or G
  unsure (234): n=A,T,C or G
  unsure (270): n=A,T,C or G
  unsure (285): n=A,T,C or G
  unsure (288): n=A,T,C or G
  unsure (301): n=A,T,C or G
aaatagagccaaccagtcattttctgagactaaactctggcaaactgcttcttcatgtagggaattgataatttagaaactagtttgcattttcaggtatgtctccaaaggattttttttttttaagtaaactatccgcctaaattgttaancccttttggggcagcaaaaacagcccttattacccatcaacaaccagtttgaacgggaattcagtgttntttgggaaaatgngtttttacaaaggagcagtaattaggcccccactgnttaacagatgacccnaancaaaaaaggaacnaaaatgtaacc

SEQ ID NO: 6400 - DNA, 287 bp, Homo sapiens
  unsure (247): n=A,T,C or G
ccaagggtcgctcactgggcaggaacattgtcaaggccattcatgcttggaatagggtctctcttcagctctgaggcaaatctgttctctaatttacagatgacttcaaggggaacgtgtacccgcacccctctggtgcgtcacattgcttaggaagcctgctgtgtttatcactgggtggctgtcagggctgagatggagagggccagggcctggcgaggtggagcagtcggcccaggtgtcccancaattgttgctggaacagggtctggaacccacaggagagg

SEQ ID NO: 6401 - DNA, 315 bp, Homo sapiens
  unsure (122): n=A,T,C or G
  unsure (134): n=A,T,C or G
  unsure (150): n=A,T,C or G
  unsure (167): n=A,T,C or G
cccgtctgcgtcctgcatccatctccctgttacagtggcccgcatcatgattaaagaatgtggatccctctgtctggggtgggatgccttactttgcacttaatttaataagggcattctcngaggagtagacntttaatacgaagtggnggcatagccctgccganatgtcggtgatggcctggatgctgtaaccacaacctgtggctaaaaattttattttctatcctttacccgtcattatcattagttgctatgattctttctgcattttcggttaactatcatttccaaagacttgtcattcactaatat

SEQ ID NO: 6402 - DNA, 152 bp, Homo sapiens
  unsure (132): n=A,T,C or G
  unsure (148): n=A,T,C or G
aaactgcataatttagtaaaattggtacaatttcttttcacatattaatcaacattagaggactgtaaatgcctccctagtaatacagaaatatccattggaaataaaaatagcaccagtggggaaagtatnaaaaaaataagacaantcag

SEQ ID NO: 6403 - DNA, 177 bp, Homo sapiens
aaataaaggtcactattgctgtgaaatgggatgtcagttttgcaattcttctgcactttcccaccaagctgggatctgggtgagtctagagatatttgtgaaataagctaatttgaaaggacaccacaatccgtcaaaagcgactttcttcctcttccacagcacgatgaaggccag

SEQ ID NO: 6404 - DNA, 213 bp, Homo sapiens
  unsure (197): n=A,T,C or G
aaacattgacccaacatattaccaaactaattcctgtgaaatacaaaaagaataatatatcatgataaaggtaagtttgtttaacccatggttaatttaacatatgaaaatcaatcatctatcatcttaatagatacaaaaaagaatttgataaaagtcaacacttatgataaaaagcaaaacccttaacaaattangtttagactgggcttt

SEQ ID NO: 6405 - DNA, 204 bp, Homo sapiens
ctggaagaagaaaagaaagcaaacaatgagaaacagaaagctgaaagggagctagagggtcaaatccagagattgaacacagagaaaaagaaactaaatacggacctgtatcacatgaaacattctctcagatactttgaagaagagtccaaggatctggccggccgcctgcaacgttcatcgcagccgtataggagaattaga

SEQ ID NO: 6406 - DNA, 206 bp, Homo sapiens
ccagagggaaggcccaagagacgtctctgaagccaccgttcctgattattcagaggcagggtccacagtgagtgactcggtggggctggaggaacccagggtgacccagagggggctctggagcgggtccctaacatctgaaaaagtcctcccagggaactcggagctggaacttccaggcagcttcgggggtgacatttgtattc

SEQ ID NO: 6407 - DNA, 221 bp, Homo sapiens
  unsure (199): n=A,T,C or G
cctgtgtccaggtctccctggcggccctgcagagatcttcctagcccgagagcttctctgcttgggtcctacggttccaagcctggttccattttcttctcatttggtgagagtccacctcaacattcggggctggagtggctcactggcctcccagtgtcgcatggtccgtgcagaggggagcatctctgcctgtctncttctggaccctttgcctttgg

SEQ ID NO: 6408 - DNA, 172 bp, Homo sapiens
ccaaggtgcatgcctacatcatcagctacctgaagaaggagatgccaagtgtatttggaaaggaaaacaagaagagagagcttatcagcaggctaccggaaatctacattcagctacagcgagaataccagatttctgcaggggacttccctgaggtcaaggctatgcatga

SEQ ID NO: 6409 - DNA, 172 bp, Homo sapiens
ctgccctgtcagccctgaagatatcgtgaacaaggatgccaagagcacactgcgggtgctctatggtctgttctgcaagcacacgcagaaggcacacagggacaggacgccccatggagccccgaattgaccctcactgcctccaaagcccagagcctgcctgtcagcccag

SEQ ID NO: 6410 - DNA, 217 bp, Homo sapiens
  unsure (213): n=A,T,C or G
ccatggtaaggaggagggtgggatagggcagatgatgggggcaggggatggaacatcacacatgggcataaaggaatctcagagccagagcacagcctaatatatcctatcacctcaatgaaaccataatgaagccagactggggagaaaatgcagggaatatcacagaatgcatcatgggaggatggagacaaccagcgagccctcttaaantaga

SEQ ID NO: 6411 - DNA, 148 bp, Homo sapiens
ctggttcacgtgtggagctagttaatacgtcctgccaagatgggtaccagttgactggacatgcttatcagatgtgtcaagatgctgaaaatggaatttggttcaaaaagattccactttgtaaagttatccactgcaccctccacca

SEQ ID NO: 6412 - DNA, 197 bp, Homo sapiens
  unsure (195): n=A,T,C or G
ctgacagttctccatggcaactcagtcctccagcagacccctgcatacataaaggtgcaaaccaacaagatggtgatgctgtcctgcgaggctaaaatctccctcagtaacatgcgcatctactggctgagacagcgccaggcaccgacagtgacagtcaccacgagttcctggccctctgggattccgcaaaangg

SEQ ID NO: 6413 - DNA, 187 bp, Homo sapiens
ctgcacagcttctaaaccataatttttaattttgtagctaatttgttagtcctgcaaaggcagtgtagtcccagtcaggaagagggtttttgttacagtctttctttcaaagtgaaactatcaactaagttcctcccaaagttagtttggtatccacccaggaatgaacaaggacagcttggaggtt

SEQ ID NO: 6414 - DNA, 205 bp, Homo sapiens
cctcctgcactccgcccggacccccggccccgccgtggctatccagtcagttcgctgctattcccatgggtcacaggagacagatgaggagtttgatgctcgctgggtaacatacttcaacaagccagatatagatgcctgggaattgcgtaaagggataaacacacttgttacctatgatatggttccagagcccaaaatcatt

SEQ ID NO: 6415 - DNA, 189 bp, Homo sapiens
  unsure (6): n=A,T,C or G
  unsure (153): n=A,T,C or G
  unsure (189): n=A,T,C or G
ccaggncactgccacaatcctcggggtgtggtcaaggggcactcagagacacctgcactagaaattgcattgacattgtgagctggctcagaagacaaaccaattaagatgtagatagaaattaatttaaggtcttttcttaaaaaaaaaagnccacctcattttcagttaacatgtgccattaaatan

SEQ ID NO: 6416 - DNA, 191 bp, Homo sapiens
aaaagggaaaatctcacacataattaagcagtggaaaatgtgctcaatgctatggtgcgtcaggccctctgtctaccaggtttctcccctttctgcagagctgtggaccctgtacgtaccaaacaggtgaacttggtccatctttccttcttcctttttttgcacatttgcatttatatcttcccgtacta

SEQ ID NO: 6417 - DNA, 180 bp, Homo sapiens
  unsure (6): n=A,T,C or G
  unsure (116): n=A,T,C or G
  unsure (170): n=A,T,C or G
cctgcnagaccccccaaagccagcagtcagcctacttcctgttaacactgtttagagaggtggctattttgtacagatcccacaatgcaagcctccaccccacgccagagcaatgngaagcttgtgagcaaattcattggcgaatgcaagatctttcacctctgatatcngccgttttgg

SEQ ID NO: 6418 - DNA, 210 bp, Homo sapiens
ctgggtcattataaaacctcacaccaggagttgtgatggcttcactcttatgcagaccttcatattccaatctcattaaggcttttcttctgacatcctcatagagttcttttattggatcaagcaggtcttttagtactatgtgattaattttgttcttgcaaatgggacaagatataaatccaaatgttatccttgggccaagccatc

SEQ ID NO: 6419 - DNA, 217 bp, Homo sapiens
aaaaacagatccttcaagctaagttaacacttctaatataaaatgtattttttcttcataaaaacaaaggaaaagcaaaagcttttagattcacttgaaagaattctctctctttctctgtctctcacacaaacacacacccatacacacatacatatacacacataacgattacaaagaagttgttttttactgaataagagataaaattttacct

SEQ ID NO: 6420 - DNA, 111 bp, Homo sapiens
  unsure (70): n=A,T,C or G
  unsure (72): n=A,T,C or G
  unsure (73): n=A,T,C or G
  unsure (79): n=A,T,C or G
  unsure (85): n=A,T,C or G
tgtgttggcatgcacctgcagtctcagctacttgggaggctgagacaggaggatcactcatgctcagaangnngaggtnacaganagctatgatcatgacactgcactcca

SEQ ID NO: 6421 - DNA, 181 bp, Homo sapiens
  unsure (173): n=A,T,C or G
cctctttgtctgtgagaggaaatggttccctcactttaagttctgtaggctaatcagaaagggatctctctatagtttcaaaaagtgaaattttacttgcactacagaaataagaaacttacagatttgtccttgaagacctactaacctgcaactttagggtcctgaaagangattaagt

SEQ ID NO: 6422 - DNA, 155 bp, Homo sapiens
ccacaccctcacccctgagcagcccggggggccacagcaagaggtacacatgctgtggacaccagcacccccagacctgacccttggggaaggtgaggaggctaggacgtgggacttcctgacagcggtgggcggcagccaggctgaggctcagg

SEQ ID NO: 6423 - DNA, 184 bp, Homo sapiens
  unsure (173): n=A,T,C or G
  unsure (178): n=A,T,C or G
ctggaaggccggccatccattttagaaatggatgagacttcagcactcaagtttgaaataagagcaacaggttttccagagccaaatccaagagtaattgaactaaacaaggatgagaatgttgcgcatgttctactggaaggactacatcatcaaagacccaaacgttattncaccntagtga

SEQ ID NO: 6424 - DNA, 129 bp, Homo sapiens
ctggctgaggaccagcccgtgcacggggaccttgacctcgtcatgaacctcatggatgcacacaaggttttccagaaggaactgggaaagcgaacaggaaccgttcaggtcctgaagcggtcaggccga

SEQ ID NO: 6425 - DNA, 211 bp, Homo sapiens; identical to SEQ ID NO: 515
  unsure (204): n=A,T,C or G
  unsure (211): n=A,T,C or G

SEQ ID NO: 6426 - DNA, 197 bp, Homo sapiens
ctggctgatgtctgcttggacactccactctgtaatgggcacaccacagggatggatgtcctctgggcagggacccccatggtgactatgccaggagagactcttgcttctcgagttgcagcatcccagctcacttgcttaggttgtcttgagcttattgctaaaaacagacaagaatatgaagacatagctgtgaa

SEQ ID NO: 6427 - DNA, 208 bp, Homo sapiens
ccaggtggccctccgtgtgaggtcatggtcacagcatagtttggagctagggagggactgtcagcctggaggtttggagactcattctggaatctagtgtgggtctagccaacttcagggagaggctgagccagggtaggagtcacaggagcagacgaggatgtggggtgccgtgcacagagctccatgaccagcttgggaagttaaa

SEQ ID NO: 6428 - DNA, 193 bp, Homo sapiens
  unsure (171): n=A,T,C or G
ccttgctcatagtatacacaagccaggttgccgtgcaccactgcgtgatttggactcaaacttagggcacgaagataagctgccacagctctgtcaaaaatgcgtgcctctttcaagacatttcctaaattgatataagcatccagaaagtttgggtcaagggtgacaagncttttcaaagtgatgaattgca

SEQ ID NO: 6429 - DNA, 198 bp, Homo sapiens
  unsure (179): n=A,T,C or G
  unsure (194): n=A,T,C or G
aaaagtttacaggagagccgaccattttcagttgactttttcaggaaaatgattcagtttgaaaaggagcaagaatcctgcaatatggcgaacataagagaatattatgagagagctttgagagagtttggatccgcagattctgatctttggatggattatatgaaagaagaattganccacccccttggtanacct

SEQ ID NO: 6430 - DNA, 198 bp, Homo sapiens
cagacatttattgaactcctgatgtgtgccaggccaggcaccaaggaggagcacacagaggtattagataaagtcctggcccttgaggaacttctggatgatctgaggaaagaaaagtaggtgggcagaagcttctgtcaatcccaggcttctcccctctctctgtggtctcaggaaatgggagagccagaaaggggt

SEQ ID NO: 6431 - DNA, 204 bp, Homo sapiens
ccatctttaagtctggaggcattcctgccctggtgaaaatgcttggttcaccagtggattctgtgttgttttatgccattacaactctccacaaccttttattacatcaagaaggagctaaaatggcagtgcgtttagctggtgggctgcagaaaatggttgccttgctcaacaaaacaaatgttaaattcttggctattacga

SEQ ID NO: 6432 - DNA, 199 bp, Homo sapiens
aaaaatgtttttcagtgagtgcttttaacaaacttaagcttctgccctgccaagggaattaatgttatcttgtgaaaggtgttgctgtttgaattgatgagaaatggaagatgagaactccctaagagttctcataataaatcatctcatcacaaatcaatacggtatacagagttaaagtggaatgaggtaagaagat

SEQ ID NO: 6433 - DNA, 109 bp, Homo sapiens
ccacattttaagtgctcagtagtcacgtatggctaagggctactatactggacagtacagattcatagagtataaaatatgactttaactttggagatggtgaggtagg

SEQ ID NO: 6434 - DNA, 196 bp, Homo sapiens
aaaacctattaagtgtataatcttacaaatagtcatctacaaaatttatggagaaagtgcccagcccattcacatcacatggaccaggaattcttttgtaaatgacttaaggtaacatcatgcagttcagtgcctaataaatgctttttaatgatgaacatttctataatgactcgtaagataccatagtctgatt

SEQ ID NO: 6435 - DNA, 195 bp, Homo sapiens
cctacagacctggctcatgcccttggatgtggctgactctacttctagactgtcctgaagagattatctgaatcttggacagagattatgatgtcatttataacagtgaaaaaacggaaaacctcaatagccactagaagaaatgactgatgagtaaattatattaaaataacacaatttattttttcgtggaat

SEQ ID NO: 6436 - DNA, 198 bp, Homo sapiens
aaatccattgtttctttgttgatttttggttttgatgacctgtctagtgttgtcagtggagtattgaagtcccccactattattttgttgctgtctatctcatttcttaggtctattagtaattgttttataaatttgggagctccaatattaggtggatgtatgtttagaattgtgatattttcctgttagacaagg

SEQ ID NO: 6437 - DNA, 212 bp, Homo sapiens
ccagcagcatgggcaaggaggagctgaggcaccggcgggcgcagatgcccactcccaaggccattgactgccgaaaatgttttggagcacctccagaatgctagagaccttaagcttccctctccagcctagggtggggaagtgaggaagaagggattctagagttaaactgcttccctgttgccttcatggagttgggaacaggcttggaa

SEQ ID NO: 6438 - DNA, 211 bp, Homo sapiens
  unsure (197): n=A,T,C or G
ctgagttcccttcccgaaggtcagctcggggctcccgacgatcatgcagaagtagatgccactgtcttccggcttcacgcttgtgagattgagaatgaaccggcttgcatcccgaaacacagctatcttctcctgttccacctcttcaccgtggatagtcccttttgcggaatcccagagggccaggaactcgtggngactgtcactgctc

SEQ ID NO: 6439 - DNA, 216 bp, Homo sapiens
aaaatgcatgtattataatcatataatcataactgttgttaattcttgattatatacctagggacaatgtgtaatgtaagattactaattggttcttcccaatctcctttcagattttattaggaaaaaaaataaacctcctgatcggagacaatgtattaatcagaagtgtaaactgccagttctatatagcatgaaatgaaaagacagctaatt

SEQ ID NO: 6440 - DNA, 212 bp, Homo sapiens; identical to SEQ ID NO: 417

SEQ ID NO: 6441 - DNA, 189 bp, Homo sapiens
  unsure (1): n=A,T,C or G
nctgaaagccaaggaagagacttataatcaactacttgacaagggcagactcatgcttctaagccgtgacgactctgggtctggctccaagacagaacagagtgtagcacttttggagcagaagtggcatgtggtcagcagtaagatggaagaaagaaagtcaaagctggaagaggccctcaactttgg

SEQ ID NO: 6442 - DNA, 206 bp, Homo sapiens
  unsure (193): n=A,T,C or G
ttgcgctaatcacatttcaagtgctcagcagccacccgtgtctactactacacagtgcagacacagaacatatcatcactgcagatagttctactggacaatgttacgctagaataaacaccaaggcagtcagttaaggcagctatggtttggaaaggcatacggacagagtctgcttagaagagatacaagntgttaataaaaat

SEQ ID NO: 6443 - DNA, 212 bp, Homo sapiens
  unsure (209): n=A,T,C or G
  unsure (211): n=A,T,C or G
ctggtgtatctcatcctcaggttgctttacaacgtcatctcctccagaggaaacgcagcctcgtcatatccctgagaaacaggtctgctgtgtcctccctccgcacgtatagactgtccctccaggaggttagacacctcccctgaaactgcggcttctgtgtccaccttcaccacacttccgtcctcctcatcttggagcacaacctngnc

SEQ ID NO: 6444 - DNA, 212 bp, Homo sapiens
  unsure (191): n=A,T,C or G
ttgaggacaccgaggttcacggtctgagtaacacctcattacaccgaagcctgggcctgtattcccagagctttgggaggctgaggcgagaggatcacttgagcacaggagttcgagaccagcctggacaacatagtgagacccccatctctaaataaaaatagaccaacgctaaagcctgtgctccaganccttcaggcaattggataaga

SEQ ID NO: 6445 - DNA, 217 bp, Homo sapiens
  unsure (172): n=A,T,C or G
  unsure (191): n=A,T,C or G
  unsure (205): n=A,T,C or G
ctgagcaaatggatatgtatctagttgtaagaaatcaagaagaggatataaaatataatcaggatgtggactctgaaacggaataacctctttgtcctgtaacttttttcacttgtaataatacagcattctcaccctattaaatggaaatttagagcacccttaaattccngaataattaaaattgctanttggattgaaaaancccctaagggat

SEQ ID NO: 6446 - DNA, 203 bp, Homo sapiens
  unsure (189): n=A,T,C or G
ccaagcacagctcgatttttgatcagttggatgttgtttcctacgaggaagtcgttcggctccctgcattcaagaggaagaccctggtgctgatcggagccagtggggtgggtcgcagccacattaagaatgccctgctcagccagaatccggagaagtttgtgtaccctgtcccatatacaacacggnccgccaaggaagaa

SEQ ID NO: 6447 - DNA, 207 bp, Homo sapiens
  unsure (205): n=A,T,C or G
ccttgggaaattacctggaaatgcgactgaaatcttccttcctgaggggtctgggctcttggaaatcaaaccctctcaggttgggtggctggacgattctcctcacacttacaatgggacaaggggaaccaggaggcccccaaggggatccctgggttccacacgaactcctcctaccctcattgtgtgacagcagccatgcctnct

SEQ ID NO: 6448 - DNA, 208 bp, Homo sapiens
ccactacatcgcccacgtgaaagatccacagtctggtgaatggtataagtttaatgatgaagacatagaaaagatggaggggaagaaattacaactagggattgaggaagatctagcagaaccttctaagtctcagacacgtaaacccaagtgtggcaaaggaactcattgctctcgaaatgcatatatgttggtttatagactgcca

SEQ ID NO: 6449 - DNA, 193 bp, Homo sapiens
  unsure (164): n=A,T,C or G
aaagcttatttttcaattcataaaaaagacatttattttcagtcaaatggatgatgtctccctcttttcccctattctcaatgtttgcttgaatcttttattattttttttaattctcccccatacccacttcctgatactttggttctctttcctgctcaggncccttcatttgtactttggagtttttctc

SEQ ID NO: 6450 - DNA, 222 bp, Homo sapiens
ctgtactatcttcagttttcaaagagggatgctaagaagggattacatgctactctggggttaggactatgtctcttggattgccctatcttacttggcaccctatgtgaggactaaaactagaatacatttgttactataaataaatgtggcatggtatacctagggaaaaaaataaggaaacagttgcaattacatgggttatcttaaaaaccaaaaacc

SEQ ID NO: 6451 - DNA, 212 bp, Homo sapiens
ctgctctgcgtccacctcctccccaacattgtctcgcacgttcagtgctgccttctggaagaacttcatgtacttgttgaagacagtctggatctcctcgttgatgctgggctgcaggacagctcggaggagatccatggagatggcaggatctgtgaaacttgttgtcatctgtgagcggcggcccctccgctgcacctgccggggcttta

SEQ ID NO: 6452 - DNA, 180 bp, Homo sapiens
  unsure (179): n=A,T,C or G
aaattgcagttattctcccaggggttgaagatacacatggaagttcatttgccagtgcactggctgatgttcaatatttggaaataccccagaacagtactattcagcagttaagagtgagagagtgctttttacataagaacagtgagtggcaggttacagaaactgacaggtgaatna

SEQ ID NO: 6453 - DNA, 189 bp, Homo sapiens
  unsure (140): n=A,T,C or G
aaattagccctataaataaaccaggcattctcttttcttcttgttttgttgttaccttacaggaaaaaaagtttcatatcataattaaggcttagggacacagacttcagagccaataaaattttggttcaaattccagngctacctcctactagctgtgagatattgggctagtttcttaaccattgc

SEQ ID NO: 6454 - DNA, 183 bp, Homo sapiens
  unsure (90): n=A,T,C or G
  unsure (137): n=A,T,C or G
  unsure (161): n=A,T,C or G
aaaaaaagacaatttgagcaggacgaccctctccaatctgggtagcatggttagcctgtgcagtaacaacgtaggcttggaggatgggtncaatgaaaatgattctgattcggaaacgttttgactttggactgtanaagcttttctttgatcacctgtgntggaggaaaggaaagaagcctt

SEQ ID NO: 6455 - DNA, 191 bp, Homo sapiens
  unsure (176): n=A,T,C or G
aaaaatatgtgaactcaaatattgcacttctttcaagatgttatcaattggttattgtactgtatagttttaataattttgattgaaaccctttaacaactctttgtaaattttaactcattttagttgattttcagtactatttacataggaattgatttttatggatatagtanaagaaatgggctgga

SEQ ID NO: 6456 - DNA, 193 bp, Homo sapiens
  unsure (174): n=A,T,C or G
tgcagtctacctgcagcacagcacactccctttgggcaaggacctgagacccttgtgctaagtcaagaggctcaatgggctgcagaagaactagagaaggaccaagcaaagccatgatatttccatggaaatgtcagagcacccagagggacttatggaacatcttcaagttgngggggtggaccatgctttt

SEQ ID NO: 6457 - DNA, 195 bp, Homo sapiens
ctgtgccaagtgcaagaagaagattacaggcgagatcatgcacgccctgaagatgacctggcacgtgcactgctttacctgtgctgcctgcaagacgcccatccggaacagggccttctacatggaggagggcgtgccctattgcgagcgagactatgagaagatgtttggcacgaaatgccatggctgtgactt

SEQ ID NO: 6458 - DNA, 210 bp, Homo sapiens
  unsure (196): n=A,T,C or G
  unsure (202): n=A,T,C or G
ctgctgagctattggtattgctgtgccagaggggaggggatgaggggctctgcgaggaaggagaggagggtcccatcctcagatacagcagtgtgcagtgagaagaccccagtaccgcgtattgtagagattgaggtggggagagaggaagtcagggagaggcgcctgtggccccaggggcaactgaccacgaatncccttnccacccca

SEQ ID NO: 6459 - DNA, 186 bp, Homo sapiens
ccagcaccccaacatcatcactctgaaagatgtgtatgatgatggcaaacacgtgtacctggtgacagagctgatgcggggtggggagctgctggacaagatcctgcggcagaagttcttctcagagcgggaggccagctttgtcctgcacaccattggcaaaactgtggagtatctgcactcaca

SEQ ID NO: 6460 - DNA, 201 bp, Homo sapiens
  unsure (197): n=A,T,C or G
ctgtaattagagaaatgatgacttcctaagagttcagccacgcataattctagatttcaagagcatctaagacttgtggattagcctcatggcatgagagtttcagactcagccttctgagccagtcagggaaagtggagttctgcagcgcaaatgagagcctgggcttggtgtcgagggagctggcttctaattgngcca

SEQ ID NO: 6461 - DNA, 187 bp, Homo sapiens
ccaccactaaaggtcccagttcagggaaagcacaggagccggaagcggtggcatgggcagcatttcttactcagtcctccagcacactctgtgaagtgccctgggggcaatgaaaccttctccctagtattcccgatgacccacgaacaagttgctcccatgcacatcacacacagaaaggacctcg

SEQ ID NO: 6462 - DNA, 174 bp, Homo sapiens
  unsure (174): n=A,T,C or G
ctgcaacgcatcattcggacaggccgtacaggtcactggttgaaccatgggaaggaacactgcttggtgagcagcagtggggcccaatccaataggtggagcacaaagaagaatcatttgatttcttactgagaaaaagttcaaaggtgtggtttcataaggtaatctgctatn

SEQ ID NO: 6463 - DNA, 201 bp, Homo sapiens
ctggcgctgtcctggacttgatgggggatgaagcccagaacctgacgaggggccggcagcagctcaagtgggaccgtaagaagaagcggtttgtgggacagtcaggacaggaagacaagaagaagattaagacagagagcggccgctacatcagcagctcctacaagcgagacctctatcagaagtggaaaccagaaacca

SEQ ID NO: 6464 - DNA, 202 bp, Homo sapiens
ccaaagggaacataaggtaggcagaaaacttaaaagagtttgttaaagtgaagactggagaaattcctcccttcctctgagctgtgaatctctcttcatgaaagccaaaggtagagacagggaggacagggccaggttagggccttccacacacaaacacttctagagttgcccattcctgttatgttcttggaccctaaaa

SEQ ID NO: 6465 - DNA, 204 bp, Homo sapiens
  unsure (182): n=A,T,C or G
  unsure (185): n=A,T,C or G
ctggagaggaggttccccgtaccattattgtaaccacccgttctcagtacgggttaccagaagatgccatcgtatactgtaactttaatcagttgtataaaattgacccttctactttgcagatgtgggcaaacattctgaagcgtgttcccaatagtgtactctggctgttgcgttttcancantaggagaacctaatattta

SEQ ID NO: 6466 - DNA, 206 bp, Homo sapiens
  unsure (202): n=A,T,C or G
  unsure (204): n=A,T,C or G
ctggatatgttttataggaattgggcacttaaggaaagcttcataaaagccattggtgttggactaggatttgaattgcagcggcttgaatttgatctatctccattaaacttggatataggccaagtttataaagaaacacgtttattcctggatggagaggaagaaaaagaatgggcatttgaggaaagcaaaatagatnancc

SEQ ID NO: 6467 - DNA, 143 bp, Homo sapiens
ctagaacctgggtcctagtttgtacctagaatatgaggcaagtggcgagagtgatcgtgttcctgaccctgagtactttgagccttgctaagaccacccagcccatctccatggactcatatgaaggacaagaagtgaacata

SEQ ID NO: 6468 - DNA, 136 bp, Homo sapiens
  unsure (129): n=A,T,C or G
  unsure (132): n=A,T,C or G
tgaattcagtgagagattcacatcattgcaagagccacgcatgtgttggatctgtgtcagtactgccctcacccacttcggtcccatcactgacttggcattaggtctactctctcttcctgggactgncanaagc

SEQ ID NO: 6469 - DNA, 154 bp, Homo sapiens
  unsure (133): n=A,T,C or G
  unsure (136): n=A,T,C or G
aagctgctccacatctaccaacaatcccggaaggacaactccaattccctgcaggtgaaaacgtgccacctggtcaggtactggatctccgccttcccagcggagtttgacttgaacccggagttggcttgancanatcaaggatctgaaggct

SEQ ID NO: 6470 - DNA, 202 bp, Homo sapiens
ctgacattgataccagatctgaattctacaaacacattgtgctttctggagggtctactatgtatcctggcctgccatcacggttggaacgagaacttaaacagctttacttagaacgagttttgaagggtgatgtggaaaaactttctaaatttaagatccgcattgaagacccaccccgcagaaagcacatgggattcct

SEQ ID NO: 6471 - DNA, 198 bp, Homo sapiens
ctggtggctggtgacatcgtcctggacaagctaggggaaaggctagccatcctcctcaaggtgcgagacatggtcagcagccatgtggagcgagtgtttcagatctatgagcaacacgcagacacagttggcattgatgctgtcctgcagccttcagcagtgagcccctctgtggctgacatgttggaatggttgcaa

SEQ ID NO: 6472 - DNA, 192 bp, Homo sapiens
  unsure (12): n=A,T,C or G
  unsure (128): n=A,T,C or G
  unsure (185): n=A,T,C or G
ccaagacagagnccctacccccaaggcaggattcagtctcattttattgtctttcccatccccagcactgtctggtcctgtgtgtcactgaaggaataaagggatgggccctggaaagggtgggtcanagctgaccttggtgaagcctgagtcaggccacagagctgggagtcaggcatgtaganggataca

SEQ ID NO: 6473 - DNA, 204 bp, Homo sapiens
  unsure (200): n=A,T,C or G
ctgtgactgagggcctggtcaccacaattagagcttgatgcctcccggctttgcagggagaccaggcttcccaaaccaagtgccttgagctgcctgctctgcagcccacagaggacagtgctgaccccaggaagtgggagaagtggcccctcgtgacctacagggaactgggaagatgctggccccaaaagccttacggncatt

SEQ ID NO: 6474 - DNA, 210 bp, Homo sapiens
  unsure (193): n=A,T,C or G
  unsure (210): n=A,T,C or G
cctgggacagttgatcttgaaagaagagatggagaaagagagccgggaaaggtcatctctgttagccagtcgctacgattctcccatcaactcagcttcacatattccatcatctaaaactgcatctctccctggctatggaagaaatgggcttcaccggcctgtttctaccgacttcgctcagtataacagntattggggatgtcaacn

SEQ ID NO: 6475 - DNA, 345 bp, Homo sapiens
aaaaagaccacatgaaatgctgattctaattgtgtgtaggtcttgaggattaagcacacaaatttcacaaacttctgtttgagtaaacaaactcagccttctgtaaatatacatgcaagtttggaaacagtaatactgtacctataaatatatgctgtctgttttgtgtacagtatgtaaaaactccttttctgccacactaaaaatgcaagccatttatgggaatcctaaaactagtattgaactaaaactttgctaatgatctttattagaggatcgtccaacttttcacttaccttgggttttcttttcaattcactcttacactagtctgcttatttccag

SEQ ID NO: 6476 - DNA, 264 bp, Homo sapiens
cctgcaagaccccccaaagccagcagtcagcctacttcctgttaacactgtttagagaggtggctattttgtacagatcccacaatgcaagcctccaccccacgccagagcaatgtgaagctgtgagcaaattcattggcgaatgcaagatcctttcacctcctgatatcagccgttttgcaacatcgctcgtggacaattctgtgccattgttgagggcggggcctagtgacagcaaccttgatggaacggtgacagaaatgg

SEQ ID NO: 6477 - DNA, 286 bp, Homo sapiens
  unsure (267): n=A,T,C or G
ctggtgctctgggtctaccctacctgacatccttccagtcttatcctttgtttcctatccaggcccaggcttgtggctgagaacatccactttcagtcccatatacctgcctccaagtgtggtacagagaacttgggcctgctgggggcgcttagccttactctctccaccacctctcccaccaacccccagatgaactgcaggtagacgtttcttccttgcttggagccccagtttttgcatttcattttcattaaaatgaaaggnggtttggttttggttctaa

SEQ ID NO: 6478 - DNA, 382 bp, Homo sapiens
ctgcttatgctgctcgttgggtggcaaaatcccttgttaaaggaggtctgtgccggagggttcttgttcaggtctcttatgctattggagtttctcatccattatctatctccattttccattatggtacctctcagaagagtgagagagagctattagagattgtgaagaagaatttcgatctccgccctggggtcattgtcaggtaaagatggtaaagcctgttgctagtcaagtattgagggtgttgggtgtgtgtgtatatacttaaggctgaggaggtgaaggtgtgaaggaagactcctcaaatgggaatatattttaattcctggaacagttttgaactgctgccttagtgaagacttagttatttgagaaattt

SEQ ID NO: 6479 - DNA, 386 bp, Homo sapiens
aaatttatttgtaaaaagttaaaagagagtgggtctctgtggctctcactgatgttcactctggcatccttcagcatttttcttttttcatttcataattgtaggtcattagcatgcatatcgagtttgcccttacgtggtgggagttcaaacacacaaagacccactctttgcacaaaactgttctcgctggtttggaataggctcccgtgcttttctaatgttattgcagcatggatgtccattacagaattcagataaaatttgctaatgttctgctatgatgtttgatctcatcttaatcacagtgagctcttctatagctcaatatgcggtttgccctcaagtgtgcactgtttattactttgtaatatgccactgtgagt

SEQ ID NO: 6480 - DNA, 329 bp, Homo sapiens
ccaaagctgcctcttgatcaaccacgcaaacaaaaaccatttacctcaggtaccaaccaaccaagcgcagagcccccaccagccccgcctcgggttccaggctcagcagtggcaggcatgagcgactgctgtttccatctttgcaagttagggttctgaaagcatccccaagggtggaatccaaacaataccacactagaaatttggggcttcttcccccttttggtgctacagaagaactgcactgaggtgagatggtacctagaaccacatgactctggaagcacatttatgtctgccaagtggcagcagtgacacagaatcagagg

SEQ ID NO: 6481 - DNA, 376 bp, Homo sapiens; identical to SEQ ID NO: 6158

SEQ ID NO: 6482 - DNA, 428 bp, Homo sapiens
ggagaggagtcgaagtatagataaagataggaaaaagaaagacaaagaaagggaacgtgaacaggataaaagaaaagagaaacaaaaaagggaagaaaaagattttaagttcagtagtcaggatgatagattaaaaaggaaacgagaaagtgaaagaacattttctaggagtggttctatatctgttaaaatcataagacatgattctagacaggatagtaagaaaagtactaccaaagatagtaaaaaacattcaggctctgattctagtggaaggagcagttctgagtctccaggaagtagcaaagaaaagaaggctaagaagcctaaacatagtcgatcgcgatccgtggagaaatctcaaaggtctggtaagaaggcaagccgcaaacacaagtctaagtcccgatcaaggtagtatacttttt

SEQ ID NO: 6483 - DNA, 362 bp, Homo sapiens
ccaacatggtgaaaccccacctctactaaacacacatacacacccacaaattagccaggtgcagtggtacattcgtgtaatcccagctacttgggaggctgaggtgcacaagtgagaatcgcttgagcctgggaggcagatgttgcagtgagccaagatggtgccactatactccagcctgggcaacagagtgaaactctgtcaaaaaaagaaaaagaaaaagaaaaagaaaaagaaaagaaaagaaagaaagaaaacattctagaattccagaagccattctcattccctatttaagtcactaacccaagagtaattaatatcctgagttccaacaccttggatttgtatgggttattttt

SEQ ID NO: 6484 - DNA, 247 bp, Homo sapiens; identical to SEQ ID NO: 2583

SEQ ID NO: 6485 - DNA, 309 bp, Homo sapiens
cctggagatttatgaagtcatgaggaagagccttccaggctctgatccgaatgaaattcaattacaaatggatttgagatgaatcttaatacaaaaaaacagtgtgacagtgtcctgaggaatgggtctacagagcctttggatagctgaattgtagagaacctgggaggctcaatagtatcttcagagtgctccttcatgagaatcacaaacttacacaaaagaagagctatatgtttgctaaactatcattaaataattgagaaaatcaaactcagcatgaacatacctgatagcctgaatgttgaa

SEQ ID NO: 6486 - DNA, 435 bp, Homo sapiens
ccaagccgtagtggggtctgatatcaccagcataaccgagcggtataggatatattctgttaaagatggaaaaaatggaaaatctctgccatttatgttgtgtgacactatggggctagatggggcagaaggagcaggactgtgcatggatgacattccccacatcttaaaaggttgtatgccagacagatatcagtttaattcccgtaaaccaattacacctgagcattctacttttatcacctctccatctctgaaggacaggattcactgtgtggcttatgtcttagacatcaactctattgacaatctctactctaaaatgttggcaaaagtgaagcaagttcacaaagaagtattaaactgtggtatagcctatgtggccttgcttactaaagtggatgattgcagtgaggttcttcaagacaacttttg

SEQ ID NO: 6487 - DNA, 280 bp, Homo sapiens
aaaggcacttttactctttggttttatcattccattttgctaatatttactagctttataaattacagtaaggtacaaaaactcatcttgtaatattttcatttttgaagtgaaaaagtacatatattttgcacaaggttttatactgctaagtgcttggttggggtggtgagatgatgattagatcaggggtgaggctgagagactctgggtttagggctagccctgcctccatctcccttgggtaaaatgaagggtgtggggtaaaagatgcataagg

SEQ ID NO: 6488 - DNA, 333 bp, Homo sapiens
  unsure (331): n=A,T,C or G
cctaggatggttcttgtcctatatccacctagtcttcacctggggctataattctgtcctggaaaaagaactctgaaaacctgggtcaggggaatgattcctaaggaaaacggtctgcatttgagctctggtttgaaagtagccaaggagactgatggtggacactccagatgtggttggaagcatatgtggggaggctggctggttgagttttgttattttctgtatagaaaggttgagatatatcaacacttggaattgttacccatctgcagaattgacttctcaaataaagatgctaaaaatctaaaaaaaaaaaaaaaaaaaaacntg

SEQ ID NO: 6489 - DNA, 324 bp, Homo sapiens
tttcatttcaagtttacaagaggcatggatggagttgtgacgttcttgacaagctgggctaacctttcccgaacttgtttcccggaggcaaggtgctcggtgacccagcgcatcttaaccttgggtctcctaggctcgaggctagggcattacgtttcgtggaaccaaagcagccaattgcatagcaagtattttcctgcattccaattaaatgcttaagaaaaagcagcatcctataaaattgtgatcataaacatccatttccctcagcttttgtgagtgccttgacttacagccaacatcactgtttaactcagtctgttt

SEQ ID NO: 6490 - DNA, 237 bp, Homo sapiens
aaacagagcacagaattaaaccattagtatgtgaatctgcaaaaagagaacttgttttagactcttctacagtttagacttcaatgtgcatactaaatgcataacattcgtatcaaataattaacatttatatacaattaacaaataaggacaaattttatacaaaacttctactactgctataatttttgaaaacatttaacccactagcaagaggtaagacagcactgccttttt

SEQ ID NO: 6491 - DNA, 187 bp, Homo sapiens
tgaatgcaggggctgccgcaataaaacccagatttctttggtgcgaatgccttacgcatgcaaactattgtttcaggaacttatgtctatgagtattgcaccgcgaatgatgagtgtttagctattttacaggagtcaacaagataattaaatatcttggtgtcttgtttctattgtgtggcttttt

SEQ ID NO: 6492 - DNA, 343 bp, Homo sapiens
ctggagaggatgcctgatgacttcctgccaggagaagccaaagccaggacatagtcaaccaaaataactccaggttggtgagggaagggacaaggaaaagaaacactgggaaattcaaagaaaggcaatctcagacactaaaagagcagagagagaaagcgacatgggggacttaaagaggctccttccagggcgctgggcttctcttccagcacagaaggctgcaaaagtggaactggcccccagttcccagaggatcacaaggccaaggatccaatgggcacaccatgaggacccaaggaaaggacagagaaaggaacggctctgggaaagccaaacctgg

SEQ ID NO: 6493 - DNA, 392 bp, Homo sapiens
ccttaacccttgccctgggagcccccaaggataataacatccctttctggggcaacaaaactgggaccgagtgggtaactgatatttgacaggggaacctaaacagtctacggaagtgtcctgagatgggcgtaaagtcaaacagaccaagcacacaggtaacactgaaataggaaagagtaagagcttctgttcaggctggaggtgctcgtatggtgggacaggaaaggggaaaagagaaaggggcaacatggcagacataccacggttcctacagagattaggggcagccctggcccgggaagtacacagggcagagagctgactctcaggccaggaaggagtttagctctgacccatcctcagggaccacggctctcccccagcctcag

SEQ ID NO: 6494 - DNA, 220 bp, Homo sapiens
ccaagtcacccaccctgtatgggcctcagtttccccatgtttacaatgagatactgagctgaatggtaaccaaaagaatcagagtttgcatgtattgagagcattctatgttccacgtacattctgtaatatcaccaatccttacagtcatctgacaggataagtttccatttgacagagaaactaaaacgtggcctataccccacagactgggatttga

SEQ ID NO: 6495 - DNA, 178 bp, Homo sapiens
  unsure (33): n=A,T,C or G
ctggggatgagaactgtcaggagggaaggtcanaagtcccaggatgcacttgaaaagcctctagctccaccagtgaccagctcctggctggactcctggtctggactcagcatcagggaggctctggcctctcgccctcagggctgggggcttcttcacatggtcatcaaagacttgg

SEQ ID NO: 6496 - DNA, 531 bp, Homo sapiens
  unsure (321): n=A,T,C or G
aaataatgtctatccatgtatcatgaaggacagtatgcttcaaattgtcttttgaggcagacatgttctcagtactaaaagacatttttagatggattttattctcaacagatgcaaaatgcaaaataaaatattgacaaacaatacagcaacaaataatttactatcactcaggattataaggctggtgttaagcagaacagccattaaatcagcatcaaaagaacaaatagtaaagtccaaagtattaattacagataacttttcaaaaattcatcattcacccttgatttaattatttctctggcaattatttaatanacttctcggagtctgttaagtacttaaaccaagaactaccattattcctactgggaaaacataaacatttctcaagtggaaagtaaacagtggtggcactatttttatatatggttaaagagacctgtcattgcaataaaagccagcattcacaaaatgaggaagataaggaaagtagcataaatattttctattaacatggctttacaa

SEQ ID NO: 6497 - DNA, 265 bp, Homo sapiens
  unsure (187): n=A,T,C or G
  unsure (235): n=A,T,C or G
  unsure (250): n=A,T,C or G
cctgggaacgtttggggcaattttatataagcagtacaaccataattcctttactcatcactgactttcatgaaatggaatgttaaactacctgttcattcttatttgttttcataccagaaaaaggaatgatgtcctaaagggcagggtggggagagcaggtcgagtgatgataaacaaaacaacnaaacgttaagtttcattgagccattcctctgaattactgacaaagtgncctactcactggtgnaaggggaaactttgg

SEQ ID NO: 6498 - DNA, 342 bp, Homo sapiens
  unsure (330): n=A,T,C or G
ccacttgtgtgggtcctcacaagcaaagagagcactaaacttgacattgggggtccaccactccaactttgctttctgaaggttttggtgtacattgagccccagaaggaaaggagagtatctgtgagtgggggcctcccttgaccccagtacgaagtctatgccctgaatccccagagtagcccttcctggtgcccaactggcctggggacaaacagcgtccactacatctaggactgccggctaagtggacacacttcttgacctcctaccaggaactttggtaaaagctagctttggggaaggggttgggtgtaaatatgagagggnggagggagacca

SEQ ID NO: 6499 - DNA, 345 bp, Homo sapiens
cctagacgaacacaatcacatgttttctttgctgttcctcccgggatgggcctgttttggggtttgggactctgaacccgagcggggttccttcgcttgactttgatcctggtccttaaatgcctttccccactcccctcccgtgggttcaggggccaagcggcccctcctcagagcacgggcagcaccgtctcctggacccctgtgtgccagcctctgcagacgcagaaatagagagtaaaatggaatggctgaatagccctcaaaaccaacgtatgtctagggatcatctacctaaggtagattctacagttttgtacaagcttttttttttttttttttttt

SEQ ID NO: 6500 - DNA, 310 bp, Homo sapiens
  unsure (276): n=A,T,C or G
cctcacaagcatgagtcctcagccccaggacaagtcatctaacacctctgagccccaggatcctcccctctaagaagctgccacctactttgcagagtcttttgagggtgcgttgtcaacagtgcttgatgactaaaggccactgtcagctctgggggtaaggtgacatctaggaggggcaggtcagctctgggagggggtcatctctcgggattcaagccctggctccagcacgtcctccctctgagacccaggagggacgtactgcacctcagnttcctcccgcgccacacgtcaccccttcccgagg

SEQ ID NO: 6501 - DNA, 285 bp, Homo sapiens
ccaaggaccgctgcaggatcgagatgtctatggctgacttgttcacaaaacttgctatcttcttaatgaacgccaccgaaaatgtatcccaggacactatgccatggtccatcagctcaacgaaggccgtcagggtgaaggacagcatgtctccaaagcaaggcttcatgatcttctgcaatttctggtatcgctcagtgccgctctccaccatctgcgtgaggagagagataccgtccaggtttataaactcctgggcaaacgtgacaccccgggagaggctgg

SEQ ID NO: 6502 - DNA, 491 bp, Homo sapiens
ctgtgagagttaagcagatttttttttaaccctccgcttaccttgctgatagtgaagtatgtgaaggagatctagagctctgacgactgccttttgtgctagctgtaggtagttctaacccactctggaggaatattcaatagcaatcattagtactacctactgttttttagaagataaatatttttaattagctttcacttcatgatgaatgtcatgaaagtttttattttcatgaagtttttaagaaatatttaatagaaggtgctgtattacctgttgaaagtatgtttgaaggataatacggatctcagtattttcttctatgatatcaactaacatttcatcaataactttgtgaagctgtttcatttcacgaagtttgatgtcttgttcttccattgtttcatcttttgtgtctttcaaaagacggatttcctttgtgagttctgcacactgttggtaaataatagtcaattattctataaacc

SEQ ID NO: 6503 - DNA, 365 bp, Homo sapiens
ctgacatgctctcaggggtgaagaagtttagcttaaaatacctgatggcgctgcataaactggggatttgggaactgagtttttagctctgtgacacacaacataaaaaacaaaaatccagtctcattagctaaattcggattaaaatctgaaatgtttttatggagttgccaacaggctggaatgtacctgatacagtttaatctgcttttatttctttggctgtcttccaaaccactttcttcctgtaattcttaagttggctagttctccttcctcagaaaaattacccctaagaatcttcctaatagtgagggtgtacttccgaatagaagagtccttcggctgaaatggcatctccaagg

SEQ ID NO: 6504 - DNA, 247 bp, Homo sapiens
cctcgctggaggccccggggctccaggctccctgtcatgtgctcagcccagtgttcctcggtgattcgtaaggactgggtgagtgaatgatgaagtaaggaaaggtaaaaccagagacgtgagggccacgggtcacctgtgactcggccaagctgctggctccagtgccagcccctggttgtggattccagaactttctaggcaacaaagtaacctcccagcagaggttatcaccaacaagacgcag

SEQ ID NO: 6505 - DNA, 224 bp, Homo sapiens
aaaatgtctttataaaatcagttttggaatggaatgtgtgtgttctggaagggtggggaagggaggttaaaaatcaaagctgagctccagtgagtagggatggggttcgccttgctgcccaagaaggggagggagaagagattcgattctgagtctcctactcccgggttctgcgtagagaagccgactgctgctggaggtcggcaacgcggccacaaccgctc

SEQ ID NO: 6506 - DNA, 170 bp, Homo sapiens
ctgccagtgctgcacggatgtccttcttgccctcaatatccttctggctgcggttcaccacgccaatgtagcctcttctcaacgggagcaacttgttctccaagacgtccctggcgtcggtgccctcgtccatcaggtcaagcttggtgatgacaccgatggtccgtagg

SEQ ID NO: 6507 - DNA, 251 bp, Homo sapiens
  unsure (238): n=A,T,C or G
cctaagtgaggtaatcgatgagatttaaggatgtaggatcacgttaatagtagggaaaaaagtcactttagctatgatgaaaggaagggaactgaattctacaaaggcagaatgagagcttttgatgagtaaccatgatacaaatacacaaacagaaaacatcttacaacatgaagaaacagtgatttctctgtgagtaaaattcaacaatcccattcttaatattgaatggaatctntgagttcaccagg

SEQ ID NO: 6508 - DNA, 126 bp, Homo sapiens
  unsure (65): n=A,T,C or G
  unsure (120): n=A,T,C or G
ctggttttgtttttgtttttataaacagagcttctccatttccttagaagagctgtcatcttganctttgtgcttgtgaccatgctcacatgttgtttgacaaaccagctcattcttggnccatga

SEQ ID NO: 6509 - DNA, 284 bp, Homo sapiens
  unsure (226): n=A,T,C or G
tggccctgtcctgcagaatgaggtgtccggcccggtacagtgggtgttcatgcagatctgtctgggcgggaaacaccagcagctccggcatcaaggagtccaggagaaaatgcttccccttgagggcttgtaagtcatcaaggctgccagggaagaaccattcattcatttcctgaatttctccctgccaggccctatttcaacggtccattcatgcaacaaatgntaccacagctatggagaaatcaacagggtgataagggaatccgggatccgcagttgag

SEQ ID NO: 6510 - DNA, 247 bp, Homo sapiens
  unsure (240): n=A,T,C or G
ctggacatggggtgtggtcactagccagggctgcaccctacagttcaaccagtcctagcactggcgctgagccctacccctttcctccagcccagagtccttcctctgcggccggcacacagaatcagtttccccacagacatactgaccatatttcccaagccaaaagctggcatgacaacatgatagaatatttggaactgagattgcccaaaaaggcagaggcagccagccacatantatctgg

SEQ ID NO: 6511 - DNA, 263 bp, Homo sapiens
ccaagagcccacgccacacagtcttgccagttctgtggacgcactctcaggaccccaagcactggcttcagtaaggtgagtgtcttgtggctcatccatgtctgccagggaagtgtgtgcctgttggtggtggttgatggtctctgcagacagtcggaagagttcttcaaactcatgccgggcccactgcagggtgtgctcggctgtgctagggaagtaccgcacggtacagacagggtagggggcatcctcagaagctgcag

SEQ ID NO: 6512 - DNA, 357 bp, Homo sapiens
ctgacagttctccatggcaactcagtcctccagcagacccctgcatacataaaggtgtaaaccaacaagatggtgatgctgtcctgcgaggctaaaatctccctcagtaacatgcgcatctactggctgagacagcgccaggcaccgagcagtgacagtcaccacgagttcctggccctctgggattccgcaaaagggactatccacggtgaagaggtggaacaggagaagatagctgtgtttcgggatgcaagccggttcattctcaatctcacaagcgtgaagccggaagacagtggcatctacttctgcatgatcgtcgggagccccgagctgaccttcgggaagggaactcag

SEQ ID NO: 6513 - DNA, 287 bp, Homo sapiens
ccaagggtcactcactgggcaggaacattgtcaaggccattcatgcttggaacagggtctctcttcagctctgaggcaaatctgttctctaattttcagatgacttcaaggggaacgtgtaccaccacccctctggtgcgtcacattgcttaggaagcctgctgtgtttatcactgggtggctgtcagggctgagatggagagggccagggcctggcgaggtggagcagtcggcccaggtgtcccagcaattgttgctggaacagggtctggaacccacaggagagg

SEQ ID NO: 6514 - DNA, 267 bp, Homo sapiens
  unsure (13): n=A,T,C or G
  unsure (29): n=A,T,C or G
  unsure (45): n=A,T,C or G
  unsure (121): n=A,T,C or G
  unsure (130): n=A,T,C or G
  unsure (136): n=A,T,C or G
  unsure (154): n=A,T,C or G
  unsure (170): n=A,T,C or G
ccaggaaatgatnaaagggtagcatttangaaatcagcaaactanagcctcaaatcgaaggtggacaaatgcattctcaactcaaacaggttgggtaatgctttcataagatacattatgnttttgtgtncacagnacacaaattttattatgnctacaaacagattcangaaagacctccaggctatttccccaaatgattgacaaagtgcaaaacaaaacaaaaaagaggagagcacaaatgaatagcccacttagaagctgaat

SEQ ID NO: 6515 - DNA, 369 bp, Homo sapiens
  unsure (34): n=A,T,C or G
cctaagaactgagacttgtgacacaaggccaacnacctaagattagcccagggttgtagctggaagacctacaacccaaggatggaaggcccctgtcacaaagcctacctagatggatagaggacccaagcgaaaaaggtatctcaagactaacggccggaatctggaggcccatgacccagaacccaggaaggatagaagcttgaagacctggggaaatcccaagatgagaaccctaaaccctacctcttttctattgtttacacttcttactcttagatatttccagttctcctgtttatctttaagcctgattcttttgagatgtactttttgatgttgccggttacctttagattgacagtatta

SEQ ID NO: 6516 - DNA, 190 bp, Homo sapiens
ctgctgctgacttgagtgagaacaagagagaggacggcagcgccaagcaggagctgaaggacttcaggaacttcctgtagaaaagcccccaaaacaaaacaaaccttaattgactaaaaagtattgcatgctcaacttaggataagcactacggcaaaggatacgaaatctaccaagcttgcaagaccag

SEQ ID NO: 6517 - DNA, 272 bp, Homo sapiens; identical to SEQ ID NO: 261

SEQ ID NO: 6518 - DNA, 308 bp, Homo sapiens
  unsure (227): n=A,T,C or G
  unsure (253): n=A,T,C or G
aaagtcaactctagagagacattttgtgtgactggtccaaataaaacagcacatttaatgaggtcatattcttcttaaactttttaagagaagcaaaaacaatggaaaagccattaaaatttacacaaagaccactaaaactctactagtgtcaattaaaacaaagccaataaaacatgaacaacttcaaagttaccatcactttccacactgttctacagttatangaatatattcaagcaccatattgatnataggtaggtaaacgatgaagtcctactttggcggtctgacccacgctcacacaa

SEQ ID NO: 6519 - DNA, 306 bp, Homo sapiens
  unsure (84): n=A,T,C or G
  unsure (227): n=A,T,C or G
  unsure (266): n=A,T,C or G
  unsure (269): n=A,T,C or G
ctggaaggtagtattccgccctcacccagccacccgagtaaatgagaatgatgactgactgagaccctgatggtggtggcttangcaagatgaacgtctgaaatggaggcccagggctgccacgatggctctgtagtcatcagggagggagctccttttatcttgttacctactcccctcttgtgcccctttcttcccttgatctaagaaggttgctccggatctcnccatctggcctgcgttcaatcaacataagcttcctggangancaggaggaggcactgtgctcgcatcacataccagtgg

SEQ ID NO: 6520 - DNA, 284 bp, Homo sapiens
aaaaagtctgaagcaagtttatccagtagatggctgggggtgttactcgcgctgtctctgaggccctcctttgcagacatcatgaccgtaaggcttttggggccagcatcttcccagttccctgtaggtcacgaggggccacttctcccacttcctggggtcagcactgtcctctgtgggctgcagagcaggcagctcaaggcacttggtttgggaagcctggtctccctgcaaagccgggaggcatcaagctctaattgtggtgaccaggccctcagtcacag

SEQ ID NO: 6521 - DNA, 480 bp, Homo sapiens
  unsure (1): n=A,T,C or G
nctgtaagagctggctgagctccatgacgatggacagtgaagatggctaccagacgtgtgtgtctgaggactccagcaggggtgccttcagtcggcagacgagtacagatgatgagtgctttatccccaaggagggggatgattttctgaggaggtcatcttcaaggaggaaccggagcatcagtaacaccagcagcggatccatgtctcccttgtgggagggcaacttatcaagcatgtttgggaccctgccccggaagagcagaaagggaagtgtccgaaagcaactcttgaaatttatccctggccttcatcgtgctgtggaagaggaagaaagtcgcttttgacggattgtggtgtcctttcaaattagcttatttcacaaatatctctagactcacccagatcccagcttggtgggaaagtgcagaagaattgcaaaactgacatcccatttcacagcaatagtgacctttattt

SEQ ID NO: 6522 - DNA, 230 bp, Homo sapiens
  unsure (1): n=A,T,C or G
nctgctccctgagaaagggctgggccttgattccctggcactctgaccttttgagcacagcagagtggggacagtttcgagcagagctgcaggtgggagctgggccagtaggcaccagtcaaggagtgggcagggtaccggcagcccccgcattagcttcctagggctactgtaacatgtgaccacagactgaatggcttaaaccacagaaacctactgtcttacagtgc

SEQ ID NO: 6523 - DNA, 195 bp, Homo sapiens
aaagcttcttgttttaattaaaaacaagcacatattaacagccacatgtgaatgccaaatgattaaaacaaaaaaacaaaaacaagagccatctacactgcagctagggaaagcaaacttcttggcttaagagaagtgagggatgtgtgtacgtgtgtgtgtgtgtgtgtgtgtgtgtgtgtgtgtgtgtgtgtt

SEQ ID NO: 6524 - DNA, 332 bp, Homo sapiens
tgaagaacatctcgaatacaattttggtgggaaaggagccaattgatttcaacagaatcagatctgagcttcataaagtctttgaagtgacttcacagagacgcagacatgtgcacttgaagatgctgccccttccctggtacctagcaaagctcctgcctctttgtgtgcgtcactgtgaaacccccacccttctgcctcgtgctaaacgcacacagtatctagtcaggggaaaagactgcatttaggagatagaaaatagtttggattacttaaaggaataaggtgttgcctggaatttctggtttgtaaggtggtcactgttctttttt

SEQ ID NO: 6525 - DNA, 283 bp, Homo sapiens
aaaaatctactttttccaaaaacagtaacactgacattcctcccctttttcaagggagacagagtagggtccttcaaatcttatttaccaacagatttgacaactgttttaacatcaaatctaaggttttacttcaaatcaacttcagcaggaaggaaagaaggtccagttggacaagctgatgaattttaagtaaccaggggaaggcagacagtggaacaaataggtgggagaccactgtcaaagcatatttttgcccaaaaggtctgcttacttcagtcag

SEQ ID NO: 6526 - DNA, 500 bp, Homo sapiens; identical to SEQ ID NO: 262
  unsure (485): n=A,T,C or G

SEQ ID NO: 6527 - DNA, 249 bp, Homo sapiens
  unsure (1): n=A,T,C or G
ncggccatcggccagaagattttcctgtggagcctgcgggccagcgagctgacgggcatggccttcatcgacacgcagctctacatacaccagatgatcagcgtcaagaacttcatcctggcagccgacgtcatgaagagcatttcgctgctgcgctaccaggaggaaagcaagacgctgagcctggtgtcgcgggatgccaagcccctggaggtgtacagcgtggacttcatggtggacaatgcccag

SEQ ID NO: 6528 - DNA, 334 bp, Homo sapiens
  unsure (31): n=A,T,C or G
  unsure (123): n=A,T,C or G
  unsure (126): n=A,T,C or G
  unsure (128): n=A,T,C or G
  unsure (221): n=A,T,C or G
  unsure (226): n=A,T,C or G
  unsure (267): n=A,T,C or G
  unsure (272): n=A,T,C or G
  unsure (288): n=A,T,C or G
  unsure (308): n=A,T,C or G
aaaaacatgggcttcatgaaaacaccattgntactaacttgggcttagatgggaatctaatgtgaatagttcaagttatgggacttgtctaaatatgtctatactctaaacctgggggaaggnggngnggaacattgacttgactacagccgaatacatgttgggaatcattcccaatcataagacatcgtcgtttctgtaggatgactgcatatgttcanagtanctttttgaatttggttcccttacctttagggatgcgatgtnatagnccaaaatgattacacnaaaacctaagtcttcaaaanccaacttttgttgcttatgactttgc

SEQ ID NO: 6529 - DNA, 441 bp, Homo sapiens
ctgaacacacaactcttaaaccagttacaccaagtgtattactccctcctcccaccctaaaggtaatgatagtagtccataaagctaacctttagtttttctttctttggcttcttgctcttggagtgagtttctctgttgcagacaagtcctgcatttgcttaaaagctcttgcagagttggaattagagctgggtttaactgtttgggagtgtgtactgacaggagcaaagcgagtgccctcaggtcctacaaaaacccagataggaacatttcaaattctaaagccaacactttgatgcagttgtttacagttaattgcagatgtttattttcccaggaatccattctttcctaagaataccctggtttctctgggattcttagaatgataaaaccagaaagccagtgttaagatactacagcatttcattagttgct

SEQ ID NO: 6530 - DNA, 520 bp, Homo sapiens
aaataattattctttttataactaagccatatactggacaagatttataatttagagataatatccccattagtaaagtttatgacccaataaacagctcccactagttaataaatgccaaagccataaaaacaaagactattaatgtaatagaatttctgtacctccctcttttgctggtggtctcaagacactgaagggaaatgctatcttaggaaaaacatttattctcgttatgtaaatatcagtgaattgtcttacaatccatctggaagtctcccagccccccttggtcccaggtggtcctgaaatgctgatgcattctgcttaggtttcaagcagtagataactctggctttcagcacaaataaatcccgaaactaaaattttggggggaggaggactggaatttctgcctcttctcttccctctgcaaaagagaaatcccaactattgtcattgttccagggtaataatttgaaagaagtttcacaacctttccatatacttatattttcag

SEQ ID NO: 6531 - DNA, 292 bp, Homo sapiens
tgctgtccctcctcctgcctcggtccccgccgcaccagtgctgctctgtggctccaccttcacagtgcctgttctgaggctaagggcatggggtgaacaaggtaatgggcatctctggagtttggggtccagcagggataagaatgataaggggatattagagcaggggctctgccatgggtgcaggaccctaggacacacctccctgccaggaaacttgccccaccccctagcagccaccagttctcttcccatttccctgaaggagtgtttggctgccccacaactgtgg

SEQ ID NO: 6532 - DNA, 400 bp, Homo sapiens
  unsure (1): n=A,T,C or G
naaagttgctttgaagctcgtctataaatggcttcaagcaacatgactggttggttgtgagaattaaagggtcattaactgaataactccaaagtcattaacatgaccaaggtaaggatacagaataggaaaaggaaaatcctattccaagttggagggccatgccatcaaccacagtggtctgtgccagagcaacactattcgctagtggttctatactgacttctttactggctttccatctttgtatttattccctctgcaatccgtttcattttcagtagaagccagtgtcgaataggaataaagaatctgtgtattgcggtcagacagatttgggctagaataccagctctagactttctagttccatcactttgggcagatgtcttggcttttt

SEQ ID NO: 6533 - DNA, 250 bp, Homo sapiens
  unsure (1): n=A,T,C or G
  unsure (3): n=A,T,C or G
ngnaggaagacaaagagtattaactgttaaacactgaaatttgacaagttatgactcaaaatgattaagtataacagttttattttctattagtgatatttgtaatctttactttgcctttatgactttgcactcagttcttggtttacaacagtactatgtagaaacacaaaggttgccatcactagttatttttacctgctacagatattttttacctgccatatttacaatgttgagattcaagttt

SEQ ID NO: 6534 - DNA, 312 bp, Homo sapiens
cctttctcccagggtcttattgaagtttgggttttggcataagagatctaagggttgccctaggaggcagaggatggttccctgatcttaaaggctctcaacctctcctctctcctcccttcccccacagtgtgccagagctgtgtggagctggatccagccaccgtggctggcatcattgtcactgatgtcattgccactctgctccttgctttgggagtcttctgctttgctggacatgagactggaaggctgtctgggggttagtggaagagcagagcatgagagtgtgtttgtgtgtgtgtgtgtgtg

SEQ ID NO: 6535 - DNA, 318 bp, Homo sapiens
  unsure (1): n=A,T,C or G
naaaactaagtcagatttttatttttttttccatagaccacatcatttaataataaaaaaaataaaaataaaaattgaacaaaaggaaaaggtggatataaagtggaacctgtgggaaagaggcaagggctgcaggacagaagagactgggaactgcaggggccctgggactcaggaggagatgctgattcagctcataggtgacccagtcctggccccggctgttcccaagagaaggctgtaagtacccagggaggtggtaagcaggatggaggaaaaatcagaggactggggcacctggctgttccccatctctgg

SEQ ID NO: 6536 - DNA, 395 bp, Homo sapiens
ctgtgcaacttggagcattttagcttggtaacactgatcccctttcaggtgagtattgggcttgtaatttgaatttgaatgagaaaccgtaatgtggctactggtaaggtaaaacggataaatgccccagaccaaaacagctcgcaacgaagtatgtttgccgtaaagtcacacagtccaggcttgataatcttctgagaaattgataaaagatgtgtgatgtagacatgagtagcaaggactaaagagataaattcattctgaaactgctttgaatattgtatgttgttgatgggttggaaatatgtcaccttaggaatgagtttgtttttttttaattggagttttaggagttggtaatatcgtggtcagtatatataggcttcacaagttat

SEQ ID NO: 6537 - DNA, 301 bp, Homo sapiens
ccaagcaaagaaaggaaaaggagcagaatgaggctgaagaaagaagctctaggtgattgggggaaaggaaagaattcactagaaatttgtttagggtccagttgatttgtgtatttttgttatcatttaatttgtaattttcgtttcagaagcaaatattcgtgttgtacaaatttctgattgccctaaatgtagagagactgatggggaaagtatgatgggtttgatttttatatcaaatcatcaggcatggagaaatatcttttagaagtgttaaaataaatgttcctactgtatattt

SEQ ID NO: 6538 - DNA, 327 bp, Homo sapiens
aaatagttttatatgctcattggtctcattttctctataattaaaatactagaccagtcttaaaatggggatgattgaagtattgatatttctttttacagttactattttataatttatgcactttgattctgtgattcagatttctaatcagaaaatgtatttttttgtttttggctgttactatgttaaaattgaattatgggcatgtcattttgccatctttgtagtttcacaaattttgtgtaatctacctcaaatgaataatccaagtattggttaactatgatgttggcatctcttattcggcaagcttaaaggctcttt

SEQ ID NO: 6539 - DNA, 302 bp, Homo sapiens
  unsure (252): n=A,T,C or G
  unsure (297): n=A,T,C or G
aaagtgaaataattttttgcaaaggggtttcctcgatttggagctttttttttcttccaccgtcatttctaactcttaaaaccaactcagttccatcatggtgatgttcaagaagatcaagtcttttgaggtggtctttaacgaccctgaaaaggtgtacggcagtggcgagaaggtggctggccgggtgatagtggaggtgtgtgaagttactcgtgtcaaagccgttaggatcctggcttgcggagtggntaaagtgctttggatgcagggatcccagcagtgcaaacagacttnggagt

SEQ ID NO: 6540 - DNA, 342 bp, Homo sapiens
ccttggtgctcagtggggagactcaggaacgggagcgaatcctctaccagttctccagacgcttccaccattgcaatccggggatcttcccctcagtagattctgtacacaccttgacatgtgcaatcatgctgcttaacacggacctgcatggacagaacattgggaagagcatgagctgccaggaattcataaccaacctgaatgggctgagggatggcgggaacttccccaaggagctgctgaaggccctctactggtctatccgcagcgagaagctcgagtgggccgtggatgaagaagacacagccagacctgagaaggcccagccgtccctgccag

SEQ ID NO: 6541 - DNA, 393 bp, Homo sapiens
cctctagcatgggtgacccagccgacctcaggccggtttccgcactgccacaactttgttcaaagttgcccccaattggaacctgccacttggcattagagggtctttcatggggagagaaggagactgaattactctaagcaaaatgtgaaaagtaaggaaatcagcctttcatcccggtcctaagtaaccgtcagccgaaggtctcgtggaacacaggcaaacccgtgattttggtgctccttgtaactcagccctgcaaagcaaagtcccattgatttaagttgtttgcatttgtactggcaaggcaaaatatttttattaccttttctattacttattgtatgagcttttgttgtttacttggaggttttgtcttttactacaagtttg

SEQ ID NO: 6542 - DNA, 347 bp, Homo sapiens; identical to SEQ ID NO: 5482

SEQ ID NO: 6543 - DNA, 266 bp, Homo sapiens
aaaaattccatgtgattcaattatgtatgattacatttcagttttgctatactttatatttggcttgtatgattaaagtaaacaaagtaaattccattgttataattggttttgagtgttataggtttattcaaatccaagatttgattacagttttgataagagtcacagcttaacaggtatctggagttcacatgtgcatagctatttcactgtataaaaatagattaagatattttgagattttggtgatatttcctgttttt

SEQ ID NO: 6544 - DNA, 282 bp, Homo sapiens
  unsure (1): n=A,T,C or G
  unsure (2): n=A,T,C or G
  unsure (10): n=A,T,C or G
  unsure (55): n=A,T,C or G
  unsure (99): n=A,T,C or G
  unsure (105): n=A,T,C or G
  unsure (134): n=A,T,C or G
  unsure (186): n=A,T,C or G
  unsure (196): n=A,T,C or G
  unsure (207): n=A,T,C or G
  unsure (231): n=A,T,C or G
  unsure (235): n=A,T,C or G
  unsure (245): n=A,T,C or G
  unsure (258): n=A,T,C or G
  unsure (268): n=A,T,C or G
  unsure (278): n=A,T,C or G
nncatcccantcccggctctccctgttgccaggacacaaggtctcctttccccgntcggctggccggatacaaatgtcacccccgaagctgcctggaanttccanctccgagttccctgggaggactttttcanatgttagggacccgctccacagccccctctgggtcaccctgggttcctccanccccaccgantcactcactgnggaccctgcctctgaataatcagnaacngtggcttcanagacgtctcttgngccttccctntggacctcgnccgc

SEQ ID NO: 6545 - DNA, 507 bp, Homo sapiens
gaagatcctggaatagcgtcttccatgtgggacatcttaaaagatagtattttggcttcagtgagttacacaaatgaatcaccagtccttattaattcaatgggtctgtttacagagtgtggtaatttcgttctttagatttgcagaatttataaagaaagaaaattacagcctgcacacccaagaccaggacaattcctccaatgaaactggctgcatcaaaggtagactttcgcacaggttgtgaggttggagtcacagtgttatttgttgtacctgatgtagtaactgtcttggaagttgtagaaggggagggctgaactgtgggtttagctgtagaattggctgttggcactggagtggccgtggaaacggaacagaagtctgtcgtgttccccacttgacaatcactaactgttgagttatgtgaacaatagctctcatctttacattctatccaaaagcaggtaagtattaacaacgctaacattaaaacaggaaacgcag

SEQ ID NO: 6546 - DNA, 103 bp, Homo sapiens
  unsure (33): n=A,T,C or G
  unsure (58): n=A,T,C or G
  unsure (82): n=A,T,C or G
  unsure (86): n=A,T,C or G
ggcttgctctattactgtgaagcactaacaaanacaaacctccaactccataaagcancttgcctggctctgaaaatccttnaggntactgaaagcattaaaa

SEQ ID NO: 6547 - DNA, 234 bp, Homo sapiens
gccgccaccaaaatgcagattttcgtgaaaacccttacggggaagaccatcaccctcgaggtacgggccgggtggtcatgaggaagccaaggtccgaataaggtcctgaggtggattttaggaccggcgctgctttccatgtcttagaccatgattccgaatttgggttctaaaacttaagctttgaaatgagtaccttttgctgagcaacgacctagaggtgattttcggtgg

SEQ ID NO: 6548 - DNA, 619 bp, Homo sapiens
  unsure (1): n=A,T,C or G
  unsure (8): n=A,T,C or G
  unsure (470): n=A,T,C or G
ngcatctnacactatgccatgatgaagaagatgcagttgccagaactgcccaaggacatcagctacaagcgatatattccagaaacattgaataagtccatcagacagaggaaccttctcaccaggatgcggataaataatgttttcaaggatttcctaaaggaatttaacaacaagaccatttgtgacagcagcgtgtccacgcatgacctgaaggtgaaatacttggctaccttggaaactttgacaaaacattacggtgctgaaatatttgagacttccatgttactgatttcatcagaaaatgagatgaattggtttcattcgaatgacggtggaaacgttctctactacgaagtgatggtgactgggaatcttggaatccagtggaggcataaaccaaatgttgtttctgttgaaaaggaaaaaaataaactgaagcggaaaaaactggaaaataaacacaaganggatgaggagaaaaacaagatccgggaagagtggaacaatttttcttacttccctgaaatcactcacattgtaataaaggagtctgtggtcagcattaacaagcaggacaacaagaaaatggaactgaagctctcttcccacgaggagg

SEQ ID NO: 6549 - DNA, 255 bp, Homo sapiens
gcgacgggtttgtcagagcaccataacatggtgtgggaagtgaagacaaatcagatgcctaatgcagtacagaaactcctgttggtgatggacaagagagcctcaggaatgaatgactcattggagttgctgcagtgtaatgagaatttgccatcttcacctggatataactcctgtgatgaacacatggagcttgatgaccttcctgaacttcaggcagttcaaagtgatcctacccaatctggcatgtaccag

SEQ ID NO: 6550 - DNA, 149 bp, Homo sapiens
ctgaagttttaggagacagcttagggtttggtgcgggccacggggaggggaccgggaagcgctggggcttgtttctgtttgttacttacaggactgagacatcttctgtaaactgctacccctggggccttctgcaccccggggtgagg

SEQ ID NO: 6551 - DNA, 603 bp, Homo sapiens
  unsure (16): n=A,T,C or G
  unsure (35): n=A,T,C or G
  unsure (39): n=A,T,C or G
  unsure (526): n=A,T,C or G
tgtggggagatttcantgcattgcctcccctgggngttnttcatcttggattattccttgggcctgaatgacttgaatgtttccccgcctgagctaacagtccatgtgggtgattcagctctgatgggatgtgttttccagagcacagaagacaaatgtatattcaagatagactggactctgtcaccaggagagcacgccaaggacgaatatgtgctatactattactccaatctcagtgtgcctattgggcgcttccagaaccgcgtacacttgatgggggacatcttatgcaatgatggctctctcctgctccaagatgtgcaagaggctgaccagggaacctatatctgtgaaatccgcctcaaaggggagagccaggtgttcaagaaggcggtggtactgcatgtgcttccagaggagcccaaagagctcatggtccatgtgggtggattgattcagatgggatgtgttttccagagcacagaagtgaaacacgtgaccaaggtagaatggatattttcangacggcgcccaaaggaggagattgtatttcgttactaccacaaactcaggatgtctgcggagtactcccagagctgg

SEQ ID NO: 6552 - DNA, 258 bp, Homo sapiens
ccatctcagaggcacatttagtgtttgttctacttatgaaatcaaggacaaccaattgtacttatcttacaactgatgttctgggatgggactggaaaacattgattccagaaccactctttttcttaaaatcactggcttttatgacaatgtcttccaagagctcattagaatctataagatcgcaggaatttcgccaagaagggctgcatagaaaccacagagacaactcggccagggctgctcccattgtggtgg

SEQ ID NO: 6553 - DNA, 562 bp, Homo sapiens
  unsure (1): n=A,T,C or G
  unsure (499): n=A,T,C or G
  unsure (556): n=A,T,C or G
nctgtagcagcttctccgccacgtggacaaagtgtgtgatgaccagggcccgctgcggggctgtgggtttgctgaggatcatgagctgcacccactgtgagacgctgttgaagagggagatgaaccgctccaggacggggttgtccacagtgcagccatgagtcacgaaactgtgatagtcctgaaacaggatcttgcagaaggagcgatactccaagtaggtgagatgctccgccagctccatgggctccaggtggtcaaacaacggggacatcttgcgctttttctgtcccacagggttccgctgagtcacctgccgcttccacttgtaggtagggacgctgtctatgtcgatttggctgctgtgccgtcggttcccttcttggtctagcagagccttcagctccttgatctgctcagccaactccgggttcaagtcaaactccgctgggaaggcggagatccagtacctgaccaggtggcacgttttcacctgcanggaattggagttgtccttccgggactgttggtagatgtggaacaacttggccgccanacctgc

SEQ ID NO: 6554 - DNA, 181 bp, Homo sapiens
  unsure (20): n=A,T,C or G
  unsure (69): n=A,T,C or G
  unsure (170): n=A,T,C or G
agttcagtgacctcggcggnatccacggaatagctgttgttttccttggagagtttttccacggcgtanacaatttcattgtgtaggcgaatcaagtagctgacgagagcggtagcacagaggcccaggccccgtcggcgtggcaagaggatctcaaactcagtgtccanatccaagtcag

SEQ ID NO: 6555 - DNA, 232 bp, Homo sapiens
aaagaacagtcccaacaataaccacagagctgacaaaaatgccacctaatctgcatcatttccaggagctctgccacatattcttcctggcccgtaccaagtctcttagcccctctagaagagctaagaaaatgcaggtgtgcacctctgaacagcccatacttggcttttctgaggcaaattcccatggaaaccacattgaaggaagaggcaaaggctggtaggaaatcag

SEQ ID NO: 6556 - DNA, 285 bp, Homo sapiens; identical to SEQ ID NO: 418

SEQ ID NO: 6557 - DNA, 312 bp, Homo sapiens
ggcagtagctcaacaaggaatagagggaggagtgtaattttggtagctggtgttgaatagggcctttgagaatcagactgaacacagtgaaatatgtgcccaaagttcagaaagatgaagtttccagaaactaagaaggtagcacaatatgtggcatcatactcagaaaggaagaccatgccatggggccagaaattcagaaacgtaattcttacattgtgattgcaatggatactcatggaagaaagtgggtagtggccgatttgacttcagagtgacaggtagagaagggaagagcgtgtagaactgtgg

SEQ ID NO: 6558 - DNA, 727 bp, Homo sapiens
  unsure (638): n=A,T,C or G
  unsure (720): n=A,T,C or G
aaatgtttgaagaacagcaaacatcaaataatataataccaaatagaatattatagtctctatgagataataactcatcagctacaaccacctaaaactgaaattttctgtacttagtttctattagtacaacaccttcattcttaatgcttcttagggcatcacaggttttagaaattaatgtatttttagcattccacagtaatgatcactttcaaaaactgcaatatacatctgcatgttacactgacatacaacacataagtattttgtcacacatcaacttttagcctcaaataatagaatacaaaaagctacactggacataacgccacagaacttttgaatatccccttttcccaattgttaacaggtagtacttttttctaaagagaaagtgatgaaaaatccaaaatttctgcatccagtgtttgactccaactttctactttatcgtctcctggtaccaccatatcctgatgcagttctggttttcgtgtctgagtttgaacataccgaatagctgcccgagcctccatgaaggggtgagtaagccctattccacgtgccagggtaggagggaggataggacgggtagtaccacgagtctgagaagggtgttgccgctctattgctgncaaacaaatatcctagtattccaccagttcccaagcctgtccagaaccctgggcctggaatttcatatccttggtggcctgnaaaagca

SEQ ID NO: 6559 - DNA, 320 bp, Homo sapiens
ctgaaggagagccgccaggaagagatgaattctcagcaggaggaagaggaaatggaaacagatgctcgctcgtccctgggccagtcagcgtcagagactgaggaggacacagtgtccgtatctaaaaaggaggtagggattggagctgagtgtggaaggaaagccaggagatgggacttgggtacggaaataacacaatttgtaagtgttcagtaagtaatagcttctattttgtgccaatttccgccctcagcatcttatagatatttttcatttaattgctttgagttccaagtactatacgtgcctacattttacag

SEQ ID NO: 6560 - DNA, 410 bp, Homo sapiens; identical to SEQ ID NO: 4733

SEQ ID NO: 6561 - DNA, 372 bp, Homo sapiens
aaagccattatttctcaaaaagaacggtttatgttttagctgccattttaattaagcttgttaaaaatgaaatggcctaaggatgaactctgtaaactccacatgggcagggccactgttgtatcatggctttgccagtgtggtgatgagatcaggacctggcagatgtgcttggtgaacctaatgaacaaccacctgaggaatgacgtgaagggggaggagattaccaccactaccattggctactaattcaaaactactgtgatggcgtagagcttattttagatatatctgtgattcattattcttttgtcacacttcagcttgccaattctgtaactccttgggatatcttgctgagcttaattgcag

SEQ ID NO: 6562 - DNA, 239 bp, Homo sapiens
gttgtgaggtgagctttttcagaagcgcgatcccaggacacgtcgggaagcaagcatccccagagctgcttggaaagaggaccaaagacgtctaaaaagtcatttggaaatatctctaaatatttgttaccatgtataagctgctaaagagaaattgggcccaacaaaactaattgaataattgaggcagatttgtgtgtatcatcaaattctatccagaagttgaagaatctgaattt

SEQ ID NO: 6563 - DNA, 287 bp, Homo sapiens; identical to SEQ ID NO: 263

SEQ ID NO: 6564 - DNA, 400 bp, Homo sapiens
  unsure (18): n=A,T,C or G
  unsure (22): n=A,T,C or G
  unsure (31): n=A,T,C or G
  unsure (67): n=A,T,C or G
  unsure (183): n=A,T,C or G
  unsure (194): n=A,T,C or G
  unsure (245): n=A,T,C or G
  unsure (313): n=A,T,C or G
cgtccttgtctcacccanaatnacgacgctntcagttcaccaacaaacacgattcagtgctgctagngctgggtcctgttctgggggctggtgatgaggccaagagggaaagagggagctctgtgttccatcgagggggcgacaagcctggaccagatgaaagtgactcatgttgttaattancggcttagggncaaaggtggcccctggaccagtggcctcagcatcacctgggaaaaggttanaaatgaacattcccaggccccacctcagcctcctgaatcagagcatccctttggcaaaccatactganaaacaaccacgtgcatcaccaagcgctgtgaagaaggcaaagctttgagaccttgaaggaatcatcaaactctgggcctcggtgtgc

SEQ ID NO: 6565 - DNA, 316 bp, Homo sapiens
aaaatgccaagataagaaacgatttattatagagagaagaaaaatttctcatccaaaatatagaaatctgtacaactttgccacaatcaatatacatgaactgtacaaatttacaccagttcataatttaccaaataaaagatgactaacaaagttcacaaaatagatggtggtttgtggaaaagacttttacccaattaagtacaaggaaagttacaaaccagacctccactttctaaaaataagaagtttactcagtcttagaaaactacaagctagcaaatgtacagagagctggctggtgctaacaccacag

SEQ ID NO: 6566 - DNA, 271 bp, Homo sapiens; identical to SEQ ID NO: 419

SEQ ID NO: 6567 - DNA, 157 bp, Homo sapiens
cctatcaacctaagcaacagaaataatctgacactaccttatcaggcagattggggaggggagggtgtatctagctctagttcaaattatttggaagtgttcccttgagaaaacccaccagcctaagaagctctggccccaagcttgtcactagcag

SEQ ID NO: 6568 - DNA, 522 bp, Homo sapiens
  unsure (1): n=A,T,C or G
  unsure (6): n=A,T,C or G
  unsure (48): n=A,T,C or G
  unsure (50): n=A,T,C or G
  unsure (80): n=A,T,C or G
  unsure (181): n=A,T,C or G
  unsure (182): n=A,T,C or G
  unsure (252): n=A,T,C or G
  unsure (490): n=A,T,C or G
  unsure (511): n=A,T,C or G
ngcatntaataactacaagttccttgcaactagattactgatattggncngaacaaccatccaagcccttaagagggctntttttcaaaggacacccaatatcatcagcaggttcttggctctagcacttctacttttgtggaactccaaatctcagtaacaccgtcattctttagtttannctgaaatgctgaacatgtgaatggtgaaaaagccgttattcggaatgaagatattctgtctctcctagtncctaaacgttagttgagtattacaatccctgcattcacagaaattattactgaggaagataagactaaaaattaaattattgacgttatgaataaagagaaaatggttttctaataaggaatgaatagtggaatacaacttcagatagaatgttgattccaagaaagccccttggaggaacttctactggatacttaaagactgagaacccagccagatacagggaaaaaaactgggntgaggactatttcaggcaaanggataaaaaaa

SEQ ID NO: 6569 - DNA, 237 bp, Homo sapiens
ctgaaggacatcattgagtacgcagagctcaaaacagacgtgttccagagcctgagggaagtgggcaatgccatcctcttctgcctcctcatagagcaagctctgtctcaggaggaggtctgcgatttgctccatgccgcacccttccaaaacatcttgcctagagtctacatcaaagagggggagcgcctggaggtccggatgaaacgtctggaagccaagtatgccccgctccac

SEQ ID NO: 6570 - DNA, 381 bp, Homo sapiens
  unsure (313): n=A,T,C or G
  unsure (323): n=A,T,C or G
  unsure (369): n=A,T,C or G
  unsure (370): n=A,T,C or G
  unsure (377): n=A,T,C or G
cctggaaagaaatatcgtgtttggaatcaatccaggagtagccccaccggctggggcctacaatcttctgctctgtttggcttctagggcaaaaagacatctgtatattctgaaggcttctgtgtgacaggaaacccaagcctaagaaacaattaagtggttctcatctctaattaactgtgaaaccatttaatccaaacatgtaagcacacactcacttattaagtcacatacttttctaggtgctggggattgagaacgaatcgatgtaagattcctcctttagggcagagacagaccactgacaaatacncagatagacnaggaatttcccatggtaaaaagggatattagtaattaagaagaccnngagactnaaaa

SEQ ID NO: 6571 - DNA, 262 bp, Homo sapiens
aaaatgcatgtattataatcatataatcataactgttgttaattcttgattatatacctagggacaatgtgtaatgtaagattactaattggttcttcccaatctcctttcagattttattaggaaaaaaaataaacctcctgatcggagacaatgtattaatcagaagtgtaaactgccagttctatatagcatgaaatgaaaagacagctaatttggtccaacaaacatgactgggtctagggcacccaggctgattcag

SEQ ID NO: 6572 - DNA, 379 bp, Homo sapiens
aaaatacaatagaattaaaatgtaaacctcaaaaaaggggtgaggaatggagggaagatatgtgagtaggccaggacagaatgagagcgtcgttgtgggttcctgagacaacagttatccaatgtcattgttatttttaatgaaattcaaggaatttgcatttattccaaattggaaaagatgtgaaccaggaacaacctgcctgacagtttatgtatctttggtgattttcctttgaaccatgggaaaaatcatgtttatcttgtagtttacattgtaattctcatccactcctctgtgaagacgtggaactgtgccacccagaacctcctgcaagagaagacttgcttgcccaactgagggggaatgaagtaagcag

SEQ ID NO: 6573 - DNA, 101 bp, Homo sapiens
  unsure (101): n=A,T,C or G
ccacgctaagggcgaattccagcacactggcggccgttactagtggatccgagctcggtaccaagcttggcgtaatcatggtcatagctgtttcctgtgan

SEQ ID NO: 6574 - DNA, 393 bp, Homo sapiens
  unsure (1): n=A,T,C or G
  unsure (341): n=A,T,C or G
  unsure (362): n=A,T,C or G
  unsure (383): n=A,T,C or G
nctggagagagatcaatatgctgaacaaataaaaggagggagggcccagtggcagcagaggatgaggaaaatgtcgcaggaggtttgcacattgaaggaggagaagaagcatgatacgcatcgggtagaggagctggagaggagcttgtccagactcaaaaaccagatggctgagccactgcccccggatgccccagcagtgtcctcagaggtggagctgcaagacctgaggaaggagctggagagagtggcaggagagctccaggctcaggtggaaaacaatcagtgcatcagtctcctgaaccgtgggcaaaaggagagcttcgcgagcaggaggagangcttcaggagcagcaggagangcttcgggaacaggagaagangcttcagcag

SEQ ID NO: 6575 - DNA, 249 bp, Homo sapiens
  unsure (86): n=A,T,C or G
  unsure (87): n=A,T,C or G
  unsure (246): n=A,T,C or G
ggtcttttgcaaaatgaaaagaagcctgttcccaagatgaaaactttattctcaaacatgacagagcgttccttttatcaatggcnnatcgagggaaacataccaatggttcccagtttttcataaagagtgttacaccgtgcgctccaaagagttgccgtgtcagagcttcaccttgggtgaaggaagatgggcaggaattctggaaacagaactcctgagacctacctctgcctgcctaaaaanggg

SEQ ID NO: 6576 - DNA, 335 bp, Homo sapiens
ccaagaaaagattagcagaaactcaagaagagattagtgctgaagtagcagcaaaggcagaacgtgttcatgagttaaatgaagaaattggtaaattgtcagccaaggtggaacaactaggagctgaagggaatgtggaggaatcccagaaagtaatggatgaagtagagaaagcacgggcaaagaaaagagaagcagaggaagtttatcggaattctatgccagcttccagttttcagcagcagaaacttcgagtctgtgaagtctgctctgcctatttaggacttcataataatgacagacgactggctgatcattttgggggtaaactgcac

SEQ ID NO: 6577 - DNA, 274 bp, Homo sapiens
ccaggcatggaaccagcaaggatttaatcagacacagtcttctgcaccatggatgggaccaaattatggagtgcaaccgcctcaagggcaaaatggcagcatgttgcccaatcagccttctgggtatcgagtggcagggtatgaaacccagtgaataaggactccagaatctaaagccagtggcttgaggctacagggagtgtagtaaagccgttgtttacttaaagatttatcaaatcagtcagtgcaaatgtcagatacaatgtatttattt

SEQ ID NO: 6578 - DNA, 687 bp, Homo sapiens
  unsure (535): n=A,T,C or G
  unsure (628): n=A,T,C or G
gctgtgcttttcacatcaagttggcttagttcttggaggaaagtcttagtgactaaaattgtacacagatcacaggacaagagaactagtctaacaaattcaataagaaatcaggacaactgtagactatataaaaactgtcttagaaaattatttacaactttatcatagtgtaaatactctaaatgtaaaataaatctatggattttatataaaaatactccaaagtacaaatgtaagttaaatgctgaataaaacattttcaccttttccagtggatgctattactaagactataatctaggtgtcaaaacttaaagtgataaccacaaagcaatgttttcttaatcactcataattttacatttgttagtagtcatcacgaggtttagagttccactgaaaaagtctcatttttacaaatgcaactcatacactttccttcatggaccctttctctgtttaacacatgttaaaaaagtaaaacaaaattcttagtcaaaagttgacatgctatgtgaagcatataaattgnaaaattatcagtcttaaatacctagttgattctctttacaaaagaaacagtcatgtaatacatcagaaaatgcaaagcacactgctacaaggnacctactcaatctaaaaataatggtccccacttgggaaaatggtaagcactaaatcttt

SEQ ID NO: 6579 - DNA, 313 bp, Homo sapiens
ctgaagaaaaaagcagtcatcgattttaagtccaatgggcacatttatgacaatcggatagttctgaatggcatcgacctcaaagcatttcttgatagtctaccagatgtgaaaattgtcaagatgaagtgtcctgatggaggagacaatgcagatagcagtaacacagctcttaatatgcctgttattcctatgaatactattgcagaagcagttattgaaatgattaaccgaggacagattcaaataacaattaatggattcagtattagcaatggactggcaactactcagatcaacaataaggctgcaa

SEQ ID NO: 6580 - DNA, 285 bp, Homo sapiens
ctgtttccaggagatcagaaaagggtaaatgaatactcaagatttacagcgtcaaaaggctatgttgaggataattcttatgactatgtaaaagacaaggtagtgaaattgtgagggccctgggcccggccactcacagaatgactgaagcatgctgcagtggagaactggaaatgtatctcttgttgccctccatctccacccaccctcaagactgggacttagaattcccacgtccagcactgttgtagatgggaggtacgttgtgctgaactgctgcgctgg

SEQ ID NO: 6581 - DNA, 385 bp, Homo sapiens
aaaagttaacttgaaaatcctcgttgataattcagcagcatgcttctggtcagcctatacagtctctgtcctggtgaggagcatgatcaccaacaggcaagatcttctggccttgaagtttcgcttgagttaaaagagctcatctcaggtaagtaacaggccaagaatggtgggcaccgtgaccactagccaacttgcaatccattctactccaaaggaccgggccagggtacagggtggactgaggcagaccgtgccattcttgctgctcacagaattgctgacttggcaagtataacacctggagtaattatgtggcataagggtggtttcaagcacactgttctggagctcctttgggaagggccttttgtccccataccag

SEQ ID NO: 6582 - DNA, 332 bp, Homo sapiens
  unsure (274): n=A,T,C or G
  unsure (280): n=A,T,C or G
  unsure (295): n=A,T,C or G
  unsure (330): n=A,T,C or G
aaaagaggtatgagggctgggcgtggtggcttatgtttgtaatcccagctacttgggaggctgaggttgcagccaagattgcgccactgcactacagcctgggcgacagagcaagactctcaaaaggaggcatgaaatgcacctcaatcttttgctccaagtctgccaaagattgtcaaaccctccctgttaaaaaaaaaaatcagtttacctactctcccttctatataaaggaccctaaaattaaatgtcaatgccaaaatgcgaagtgcanatcgtnttctctccaaataanagttacttggaatccttaacaaatccaaggagaanaa

SEQ ID NO: 6583 - DNA, 390 bp, Homo sapiens
  unsure (1): n=A,T,C or G
nctgagagactctaaatccagtgacaagtctgtctgcctattcaccgattttgattctcaaacaaatgtgtcacaaagtaaggattctgatgtgtatatcacagacaaaactgtgctagacatgaggtctatggacttcaagagcaacagtgctgtggcctggagcaacaaatctgactttgcatgtgcaaacgccttcaacaacagcattattccagaagacaccttcttccccagcccagaaagttcctgtgatgtcaagctggtcgagaaaagctttgaaacagatacgaacctaaactttcaaaacctgtcagtgattgggttccgaatcctcctcctgaaagtggccgggtttaatctgctcatgacgctgcggctgtggtccag

SEQ ID NO: 6584 - DNA, 358 bp, Homo sapiens
ctggacgtgcagggaggtgaagggctccacgcggatgaggtagtgcatcacgcctgctgcattggagtagtgggtgccatagtggaacttgtcaatggtccctgctgggtcctcaaagctttcatacttctccctcacgagctgggcatgcttggggttcaccacaccgatgggcttagacaggtcccggaagacggctgggttgctgaggtccagggttggggacacgtagtcctgcaggacccaggggaacacagggtactgagacaggtcattgtaggtccgccccgcaatggtgttgagttgcatcaagtactcgaagttggatatctcacgctgtacccatttctgggtaagg

SEQ ID NO: 6585 - DNA, 449 bp, Homo sapiens
  unsure (1): n=A,T,C or G
nctggcagggcagggtcagcctccttggggggaaggtgctgacacaatgaggtcaatgacagactggcgccccacccacgcggggcactcatggctatgttcccaaccaaggccaattaggtatcaattaacaaggacactcgcccaaccacacacccctgtgtagcacagaagcttgagagccaccattcatggggcccatcatggcagcagactaagcagcctcctgcctccccttccttctaacttcccaagctggtcatggagctctgtgcacggcaccccacatcctcgtctgctcctgtgactcctaccctggctcagcctctccctgaagttggcttgacccacactagattccagaatgagtctccaaacctccaggctgacagtccctccctagctccaaactatgctgtgaccatgacctcacacggagggccacctgg

SEQ ID NO: 6586 - DNA, 317 bp, Homo sapiens
ccagtatggaatccagaaggaccgagtggataagagcgctgtcggcttcaatgaaatggaggccccgaccacagcttataagaagacgacgcccatagaagccgcttctagtggtgcccgtgggctgaaggcgaaatttgagtccatggctgaggagaagaggaagcgagaggaagaggagaaggcacagcaggtggccaggaggcaacaggagcgaaaggctgtgacaaagaggagccctgaggctccacagccagtgatagctatggaagagccagcagtaccggccccactgcccaagaaaatctcctcagagg

SEQ ID NO: 6587 - DNA, 263 bp, Homo sapiens
aaaatctagatctctctcattcatttcaatgtatttttactttaagatgaaccaaaattattagacttatttaagatgtacaggcatcagaaaaaagaagcacataatgcttttggtgcgatggcactcactgtgaacatgtgtaaccacatattaatatgcaatattgtttccaatactttctaatacagttttttataatgttgtgtgtggtgattgttcaggtcgaatctgttgtatccagtacagctttaggtcttcag

SEQ ID NO: 6588 - DNA, 514 bp, Homo sapiens
  unsure (1): n=A,T,C or G
naaacttaattaaagagcttgacaagctctgcatattcatgtgtcataagcagtatgtgacaaaaaaaactgtgcagtatataccccctcacgaaatttagtttggcagggaaaacaagatgcacatgttattataaattagaaaatggaagagaagtagaaataaatccatgagtattatatataagtaacagaacaaaaacaacaggataatgtatcccccccaaaggcccagtagagaccatcaaagctcattctgggggtagtcaaggagggagtggagggagaaaaagaacgcagaccttcaaccactaatgaaagaactgaaacatctgtatgtagaaaaaaggtaaaatcaactcactatcatcttcagccttttggttatctcatttaatggtcacagttaagtccgtgagtagggtttttgtacttgaagttcaaatagaagattaagataagcaacttcctcaaggtaagcaaactaattaatagatcaaggttttgaactttt

SEQ ID NO: 6589 - DNA, 331 bp, Homo sapiens
  unsure (9): n=A,T,C or G
  unsure (10): n=A,T,C or G
  unsure (13): n=A,T,C or G
ggcatgcannggncaggtccttatgacagacctggggctggtagagggtataacagcattggcagaggagctggctttgagaggatcaggcgtggtgcttatggtggaggctatggaggctatgatgattacaatggctataatgatggctatggatttgggtcagatagatttggaagagacctcaattactgtttttcaggaatgtctgatcacagatacggggatggtggctctactttccagagcacaacaggacactgtgtacacatgcggggattaccttacagagctactgagaatgacatttataattttttttcccgctcaa

SEQ ID NO: 6590 - DNA, 236 bp, Homo sapiens
cacagccccagaagcgagaggagcaaaccaagaaggagaatgaagaagacaaactcactgactggaataaactggcttgtctgctttgcagaaggcagtttcccaataaagaagttctgatcaaacaccagcaactgtcagacctgcacaagcaaaacctggaaatccaccggaagataaaacagtctgagcaggagctagcctatctggaaaggagagaacgagagggaaagttt

SEQ ID NO: 6591 - DNA, 343 bp, Homo sapiens
caggagtctgcctacctgtcgccctgaccgcttgtggatggagaaggggagagcatctaggcaggcaaacagaagggaagtggagttaaacctctggcatgaagtctgggagtagggtaggctagggggtttcttctatgacacttgacccttccatgctggttcccaagcctattggaggaatgtgggtgtggccgaggtgatggcaagaaaggtgcaagaaagtgagcagtctgcctgtgagtgagcacagatgccggggtgtgtgtgtgtgtgtgtgattttcactgtggggtgtgtctgtgagagctagctgccttacccctccttggcacatagtagg

SEQ ID NO: 6592 - DNA, 297 bp, Homo sapiens
  unsure (1): n=A,T,C or G
nccatcaggaaggtgaaagaggtctttgggacaggggccatgagacacgtggtcatccccttcacccacaaagaggacttagggggccaggccctggatgactatgtagcaaacacggacaactgcagcctgaaagacctggtgcgggagtgtgagagaaggtactgtgccttcaacaactggggctctgtggaggagcagaggcagcagcaggcagagctcctggctgtgattgagaggctggggagggagcgagagggctccttccacagcaatgacctcttcttggatgcccag

SEQ ID NO: 6593 - DNA, 284 bp, Homo sapiens
ctgtactgggcatctcagaatcaccgggaaggctgaaggggtagaattggaagacgggcagaaataacggtcgctaggtggttgcaccagaaccaaaatcatgctagagaatgaccctaggaaaaccactgttgctgctgacggggctgagcacgacaccactgatggcattggggcaggttgcgttccctggaccaggatgtttctgtctgcagcagaatttctctgctgagtcaccaccacatgaccgtaaatccaaggtgacatatctatctccagcctgg

SEQ ID NO: 6594 - DNA, 236 bp, Homo sapiens; identical to SEQ ID NO: 6590

SEQ ID NO: 6595 - DNA, 293 bp, Homo sapiens
  unsure (219): n=A,T,C or G
  unsure (224): n=A,T,C or G
ctggtacacggcagggtcagggttctggatatcaggtaaaacagtcaattgtgtcccagatccaaaggtcagttgccttgcagaaccagaagactccatgtcacccacgaggcagtagtacacagcagtgtcgctcagggaaacccggggcaggctcagagtgctggactttctgtcggcagggataaacagggaggccacttcgtttgtaacttttgncttgnatccttgaataataaatcgtggtccttggctgggaaactgttggtaccacgtgatataatcatttgtag

SEQ ID NO: 6596 - DNA, 286 bp, Homo sapiens
ccttgctgaccctgtggcctttagcctcagagacgaatcgacaccctcaactcagatggatacacccctgagccagcacgcataacgtccccagacaaaccgcggccgatgcccatggacacgagcgtgtatgagagcccctacagcgacccagaggagctcaaggacaagaagctcttcctgaagcgcgataacctcctcatagccgacattgaacttggctgcggcaactttggctcagtgcgccagggcgtgtaccgcatgcgcaagaagcagatcgacgtgg

SEQ ID NO: 6597 - DNA, 371 bp, Homo sapiens
aaaaaatgtgagaagagaaaaaccaggcaggaagcccattttgcgggatagggcaccaggaggtgaagaatgtacacatgtacagttgaggattagatgaatctgagcttgaaaaaggtaataccatgcacaggggaattttctaaaccaaaccacagagatcagtcaattccaatgttttctttctagactgaatgttccagaaatcatctctaattaaggatcccaaaagataatgtacaaaattctaaaaagtaaacagagataattttggataagctgagtaaaatcatcttctgaatgacagagttttatcttgaggctctccacttcacaataattataattaaaaattatgcatctgaatctca

SEQ ID NO: 6598 - DNA, 425 bp, Homo sapiens
aaaagagcctagaacctgggtcctagtttgcacctagaatatgaggcaagtggcgagagtgatcgtgttcctgaccctgagtactttgagccttgctaagaccacccagcccatctccatggactcatatgaaggacaagaagtgaacataacctgtagccacaacaacattgctacaaatgattatatcacgtggtaccaacagtttcccagccaaggaccacgatttattattcaaggatacaagacaaaagttacaaacgaagtggcctccctgtttatccctgccgacagaaagtccagcactctgagcctgccccgggtttccctgagcgacactgctgtgtactactgcctcgtgggtgacatggagtcttctggttctgcaaggcaactgacctttggatctgggacacaatttgact

SEQ ID NO: 6599 - DNA, 369 bp, Homo sapiens
ctggtcttgaattcagcacgagagaagagggacatggagcagagacacgtgctgctgaaacagaaggagctgggtggggaggagccagaaccaagcttaagagaggggcctggtggcctggtgatggaaggacatctcttcaaacgggccagcaacgcatttaagacctggagcagacgctggttcaccattcagagcaaccaactggtttaccagaagaagtacaaggaccctgtgactgtggtggtggatgaccttcgtctctgcacagtgaaactctgccctgactcagaaaggcggttctgctttgaggtggtgtccaccagcaagtcctgcctcctccaggctgactcagagcgcctcctgcag

SEQ ID NO: 6600 - DNA, 374 bp, Homo sapiens
  unsure (266): n=A,T,C or G
ctgagagactctaaatccagtgacaagtctgtctgcctattcaccgattttgattctcaaacaaatgtgtcacaaagtaaggattctgatgtgtatatcacagacaaaactgtgctagacatgaggtctatggacttcaagagcaacagtgctgtggcctggagcaacaaatctgactttgcatgtgcaaacgccttcaacaacagcattattccagaagacaccttcttccccagcccagaaagttcctgtgatgtcaagctggncgagaaaagctttgaaacagatacgaacctaaactttcaaaacctgtcagtgattgggttccgaatcctcctcctgaaagtggccgggtttaatctgctcatgacgct

SEQ ID NO: 6601 - DNA, 324 bp, Homo sapiens
aaaactcagtgaggacttagatgggaaagaatgaggtaaatacaaaggattacaggacaacaactacagcgttgtgtactgtgggaaggggagttgggcactcttggaggactcctgctgaaggtggtcagcctgcctgacaatggaagacatacttgaatggggagcagggtatgtgctttcatatgaaaaaagagctgatgttaaaactcatttggtgaggtcaacgttgtcacataccttcacataagggatagtatattttgggttgcagtcaaacttgtgctcagactggtgaaactgagagtcaggcttttacatttt

SEQ ID NO: 6602 - DNA, 336 bp, Homo sapiens
ccaggaactgaagcgcaggagcccctcccggccattggtggcctcttcctcagggaatggcagcagaggagtggggggaagcctcgtggaagcacagaatctcttgagtgactccaccaactccccccgcccattcatctccatgaagccccgagaccagcacacaaagctggggggactattgagtagaggctgggaaccaggagaagagaaagcaagaagaaaaatattgaggaaaatgaaaaaaaaactgacatgttgggtagaggatcggggttaggggtaaggctcagtatcctccatggggaacgcgagtggggacaggggggccttcag

SEQ ID NO: 6603 - DNA, 190 bp, Homo sapiens
  unsure (29): n=A,T,C or G
  unsure (44): n=A,T,C or G
  unsure (189): n=A,T,C or G
gagcagagagactgttcccttgggtgganaggtgtgggcatganagccacccattgccaagcagcaagaatgttcgtgcttttttccagagaggggaaccccactggtttttgtggaaacaatggaaacttacagatgcctgcctgggatgatgaggcacattcagaacaaatgctttttttttttttna

SEQ ID NO: 6604 - DNA, 232 bp, Homo sapiens
ctgaggtttctcctgctccagggccctcagttcctgcctcatctcatcactcagagttgtctggtccagccccaggcgtatgagtttgcaggcaggatgcctgagcccctcacagagcagtcgcacgccaacgtcatccaggttgttctgctgcaggtctagctccttcaggctggggctggcactaagcacagaggccaggtcctggcagcagtcagacgtgaggccacag

SEQ ID NO: 6605 - DNA, 230 bp, Homo sapiens
ctgccatgtgtgctaaggctggtgtccctttaccaccaaacctaaagcctgcacctccacctactatagaagagaaagttgctaaaaagtcaggaggagctactatagaagaactaactgagaaatgtaaacagatcgcacagagtaaagaagatgatgatgtaatagtgaataaacctcatgtttcggatgaagaggaagaagaacctcctttttatcatcatcccttt

SEQ ID NO: 6606 - DNA, 338 bp, Homo sapiens
ccattcctaaatgaggtgctgactctagatcatcacccttccttcatgcatggcagaacaatcaggaggctcaattagtgtgctatttgtcacactacttagtatcttctgtttaagtagcattttgtgcaattatttaagtcacatgagtcaccagaggaaaactgtaaataatggttagataaaatcacaagcagcctcttaattacccatagtgatcctgccacgaaacctaggaccctttagagggttcagtagagatttttttccagttctgccttgtaaaacttgattttttaagagatgaagtcaattatagggaaggagcccattcattt

SEQ ID NO: 6607 - DNA, 442 bp, Homo sapiens
  unsure (27): n=A,T,C or G
  unsure (421): n=A,T,C or G
ccaccacccccccccgccacgccttanagcagagcagcccctcctctcatttggtgcagaaacagtcaagaggaaccattggcctagagctcctgtgaccgagagcgccacggaagcctggggatgatgtcgggcagcttattctttgcttggctttggtaactaggtggtcccctcaagcatcctcagttcctcttgctgtttatgaatctaagacaaggaagtcctatagaagccaaagggacagggacggaaaggacaggtcccaagggatggggctgtctttacttgtggaaaccaggaaattgctcctctcagccaaccaaggttgaccacacaccacccttccggagcagctcagtcagccctcggggacgagaaaccacaagccgcagagacgctgaggcccaggcaggtgaanaagaagtggctttgggttttt

SEQ ID NO: 6608 - DNA, 546 bp, Homo sapiens
ccagtcacttacttaattcctgtccttcagtgttccatctagagaattaagagatatgatgtataaaatagacatcgagggccattaagagagtaaatacttaaaaatacatgttatgaaagcaaagccaataatcactgtaggagtatgagttgcctaagggccaaaactaatgtaaataagagaaagtgtggatataaatgaccattgtttataaacagttatgaaaaatgctgtgacttgaaatctttcccacatctcccaagaaagtaggtaggagtttatcctttccgtaatctctttttaaccctgctgactattacagggcttgtttaatcacagtggcaagaattacatgtatcttacagtaaagaaacagaatactggaatcgttagagaaccctgatgtgttgacctggataaagtacaaaggtggaagagggaatgagttatgctgttaaaatctcaggctattctgttaatgttcctgctactatgaacccaacttttttttcccccttttgactccttgggcttcctctcctg

SEQ ID NO: 6609 - DNA, 468 bp, Homo sapiens
  unsure (465): n=A,T,C or G
ctggtctgatgtctccctgaaaagttctcgcttgtcacaagaacacttagacttgccttgtgccttagagtcagagctcacacaagaaaatgtggatactatcctagttgagtagcagcttctctttcagaatttttataccaattctgaaaaagaaaatttgcgtggcatttttaattcataaattattttcctcctcaagtttcattgactttttttcttcacagcttatccatggttttaaggttgtatatattagatcttctcataagacatattaatatgtggctattaaaatgtaacattcaattactactgtgaacttttcacaaacgaaataacaatttagaaatcagaaatcaatgtagaaatatggaaaccttaaatagttatttatagaattctaagtttttccagttatagaatcagtaaaatcaaattgaatataaagtaaatgaaatctgnttt

SEQ ID NO: 6610 - DNA, 506 bp, Homo sapiens
  unsure (468): n=A,T,C or G
  unsure (488): n=A,T,C or G
ccaattatttccaatttttattttattcttaaaacttaagcatggtaaaatgttaagctgttttcatccactgatattattctactataaaaagcccttcttgagcagatttgatgataaaaaggagaacatttctaaggtataattagagaagctgttgcatgagaaatcatgtctccatctccattttgctatgcgttatctgaggattgtttctgaaagagatctatttaggcagtgtatgtatgtgtcagcatgtaaaaagtaaagaactgaaaatagacaaaccttgtaaatgcacttcaaaaccaattgtggctcaagtgtaggtggttccccaaggctggtaccaatgagactggggtttgggaattagttggtcatcatccctcctgctgcccagcagtggtcagtcatttttcatgagggatggactaggaaaatgaagtgtctattataaggagagtnctgtacttaaggagcaagtnactacaaacccagttcct

SEQ ID NO: 6611 - DNA, 240 bp, Homo sapiens; identical to SEQ ID NO: 326

SEQ ID NO: 6612 - DNA, 461 bp, Homo sapiens
  unsure (448): n=A,T,C or G
ctgtgcaacttggagcattttagcttggtaacactgatcccctttcaggtgagtattgggcttgtaatttgaatttgaatgagaaaccgtaatgtggctactggtaaggtaaaacggataaatgccccagaccaaaacagctcgcaacgaagtatgtttgccgtaaagtcacacagtccaggcttgataatcttctgagaaattgataaaagatgtgtgatgtagacatgagtagcaaggactaaagagataaattcattctgaaactgctttgaatattgtatgttgttgatgggttggaaatatgtcaccttaggaatgagtttgtttttttttaattggagttttaggagttggtaatatcgtggtcagtatatataggcttcacaagttatgtaatttgtagtggggacatggaatagacatttcatctgtgtcaccccgaggnggttttagggttt

SEQ ID NO: 6613 - DNA, 313 bp, Homo sapiens
ctgaaagagacagactccctggggaaaactaaatataaagacccaggatcaaacagggacacaaaagcaagtatcatgggaggaacttgaaatctctgtggacagcagaagctgacttcaactctgataattgtggcatccataaattgcaaatatagccctgaatagatacacacaaatgtctataatgaaggcccagcagaatggaatgtgtgaccatcttcaggaagaaaataatgaatacatgagtacaagaaaataaattacaaataaaagtcaaacttgaattctatatgtattaaaaatttcattt

SEQ ID NO: 6614 - DNA, 212 bp, Homo sapiens; identical to SEQ ID NO: 6127

SEQ ID NO: 6615 - DNA, 286 bp, Homo sapiens; identical to SEQ ID NO: 421

SEQ ID NO: 6616 - DNA, 274 bp, Homo sapiens
ctgacaagacacctacaccttcccactaccccttgtcctgcccctcagggattagcacccagaattccctgagctgctctccaccccaccagtccccagccctagaggacattggctgcagttcttgtgcggaaaaatccaagaaaaccccttgtgggactgccaatgggccagtgaacacagaggtgaaagctaatggcccacacctctacagcagccctactgattccacggacccccggcgacttccaggcgctaacaccccactaccagg

SEQ ID NO: 6617 - DNA, 314 bp, Homo sapiens
ttgttgcactgcaactctgcctcgaattgggctatgcccgagtatcctcagagtttagatgggcagtgtatttttgcttaagtagaagaatgtagttgtgccactgagaaggataaccagaaaaggttagatatatttgtcagttcacttttactcaaatttccattgagttacttaagaaatcagttcttcaaagtggatatgtacattacaggctctgtcacctacacatacacaggaatcttttgaagaataagatctgggtaatactggagtaggatgtaggaaggttaatgttgtatagatgatgtttt

SEQ ID NO: 6618 - DNA, 304 bp, Homo sapiens
aaatctgggaagctggggggacgagctgtgtatgacatagttcattttcagccatattcctggattgatgggtggagaagttttaacccaggacatgagcatccagatcagaactcatttacttttgcccccaatggacaagtatttgtttctgatgctctctatggacccaagttgagccaccttaacaatgtattggtgtttgctccatcaccctcaagccagtgtaataagccctgggaaggtcaactgggagaatgtgcgcagtggcttaagtggactggcgaggaggttggtgatgcag

SEQ ID NO: 6619 - DNA, 292 bp, Homo sapiens
aaaagacatcggtcagtaacgagcacgatgtggaaaaatgagagaagggacacattcaaccctggagagttcaatggctgctgaagctgcctgcttttcactgctgcaaggcctttctgtgtgtgatgtgcatgggagcaacttgttcgtgggtcatcgggaatactagggagaaggtttcattgcccccagggcacttcacagagtgtgctggaggactgagtaagaaatgctgcccatgccaccgcttccggctcctgtgctttccctgaactgggacctttagtggtgg

SEQ ID NO: 6620 - DNA, 175 bp, Homo sapiens
aaaattagggttcacaagttctttacgattagaacactgaagtgcatttccataaactaagtccaaagcacacagcagcaggtgataagaattgaccaaatcatcactaatcatggggaaattaccgctgtttccttcctcgctgctgacgaggttgctcctcttgagggtattt

SEQ ID NO: 6621 - DNA, 214 bp, Homo sapiens
  unsure (51): n=A,T,C or G
  unsure (70): n=A,T,C or G
aaaattttatctcttattcagtaaaaaacaacttctttgtaatcgttatgngtgtatatgtatgtgtggnatgggtgtggtgtttgtgtgagagacagagaaagagagagaattctttcaagtgaatctaaaagctttgcttttccttggtttttatgaagaaaaaatacattttatattagaagtgttaacttagcttgaaggatctgttttt

SEQ ID NO: 6622 - DNA, 349 bp, Homo sapiens
  unsure (103): n=A,T,C or G
  unsure (183): n=A,T,C or G
  unsure (222): n=A,T,C or G
  unsure (298): n=A,T,C or G
cctcgagggagattgccagcaccctgatggagagtgagatgatggagatcttgtcagtgctagctaagggtgaccacagccctgtcacaagggctgctgcggnctgcctggacaaagcagtggaatatgggcttatccaacccaaccaagatggagagtgagggggttgtccctgggcccaangctcatgcacacgctacctattgtggcacggagagtaangacggaagcagctttggctggtggtggctggcatgcccaatactcttgcccatcctcgcttgctgccctaggatgncctctgttccgagtcaagcggccacgttcagtcacacaggcccttgcttgg

SEQ ID NO: 6623 - DNA, 174 bp, Homo sapiens
ctgagcaggacctctgaaaccctggaccagtggtctcacatggtgctacgcctgcatgtaaacacgcctgcaaacgctgcctgccggtaaacacgcctgcaaacgctgcctgcccgtaaacacgcctgcaaacgctgcctgcccacacaggttcacgtgcagctcaaggaaagg

SEQ ID NO: 6624 - DNA, 298 bp, Homo sapiens
ccacaggaggacagaaagtgaaatgtcagccaggatcgctaaaatgtccttgagtcccagcagccccaggcacgaggatcagctcgaggtcaccagggaaccggccaggcggctcttcctttttggagaggagccatcaaaactcgatcaggatgttttggccgctcttgaatgtgcagacgtcgacccccatcagttcccggccgtgcacagatggaagagtgctgtcctgtgctactcaccctcggacagacagagttggcccagtcccgcggtgaaaggaaggttcaagtctcag

SEQ ID NO: 6625 - DNA, 481 bp, Homo sapiens
  unsure (417): n=A,T,C or G
ccactgcaatgactgtaattaggcccatgataacagcaattaaagtgaaaataaatctcttagatctttttagaattcactgtaacacttcattaattaaatgtattgaaggggaggattcccaaggtctgggcaaagttaccggaatccagattccttcttgagctcgaaccaacattacacttttcctggaatcaaaatgggagttaatacaagtgtataaatgacaattaatgcattggacagtttgattgttcatccaaattttgatatatctcactaacagcatgcaaggaggcttaacagaactctgtatggaaacaggttggaggtaggtaaagcagaatgtctggatctacgttgatactgagagagggagatggtagtggggacaacagacagaatagtttctgcttnccatacttgcagtccagacatggcaatagccaatttccaaagttctgggtggtctgggtcagaa

SEQ ID NO: 6626 - DNA, 360 bp, Homo sapiens
  unsure (304): n=A,T,C or G
cctcttaatggatttcaggcacaagataatttgtggtttcttctactttatccctactgcaattaattccacttttcaaatcccaaactaggaaggtgctgatattcccttttcaattgatatgctttgctacaaagcattagaaaataatcaacattttgcccactcccccaaataagaatctttttagaaggcatgacttcccaatggagatttacacaggccttgtaaatagaacatcacccaaatgcacagaggcactaagaaaaagccggagggtactgcttaccattttaggtgcggncacccagacttattcaaaactagatttcaaaagaaaaaaaaaaattttcactttgg

SEQ ID NO: 6627 - DNA, 372 bp, Homo sapiens
  unsure (34): n=A,T,C or G
  unsure (204): n=A,T,C or G
  unsure (230): n=A,T,C or G
  unsure (315): n=A,T,C or G
  unsure (321): n=A,T,C or G
  unsure (360): n=A,T,C or G
tcttggcacctctaattgctctcgtgtattcggngccgcgactttcacgatggctcgcccaaccttactaccttctgtcggccctgctctctgctgccttcctactcgtgaggaaactgccgccgctctgccacggtctgcccacccaacgcgaagacggtaacccgtgtgactttgactggagagaagtggagatcctgatgnttctcagtgccattgtgatgatgaanaaccgcagatccatgccccatgaagagggacaaagaatgggatataggagtgcacagcccagcctgacctgtgacatctctgtgnttcagncactgtggagcaacatataggcaacattttcatgtttantaaagtggacct

SEQ ID NO: 6628 - DNA, 155 bp, Homo sapiens
cctatcaacctaagcaacagaaataatctgacactaccttatcaggcaaattggggaggggagggtgtatctagctctagttcaaattatttggaagtgttccctgagaaacccaccagcctaagaagctctggccccaagcttgtcactagcag

SEQ ID NO: 6629 - DNA, 334 bp, Homo sapiens
aaaatgaattccggctcaaggagaatttgtaactttagtaggtacgtcatgacaactaccatttttttaagatgttgagaatgggaacagtttttttagggtttattcttgaccacagatcttaagaaaatggacaaaacccctcttcaatctgaagattagtatggtttggtgttctaacagtatcccctagaagttggatgtctaaaactcaagtaaatggaagtgggaggcaatttagataagtgtaaagccttgtaactgaagatgattttttttagaaagtgtatagaaactattttaatgccaagatagttacagtgctgtggggttt

SEQ ID NO: 6630 - DNA, 420 bp, Homo sapiens
ctgcttgggattagaagtttttactgactgaaaaaacagtgggtcccatcctctctgaattttccctgaggagagtcagttcaaccttattacagcagcttttacaaatctatctctaaagtctccctgccgactcaagtttccactgacttgtccccctgcatgcgatgccatgaccttcacaccaacatccaaccacatgtctctcctttggaatctgtgtgccccaccaccaggaacctgttaggcaaaggtggcaccatctccctctgtaaggctgcagcgggtgtctgtcagcatctgacaggggccctttgcgtgctgtgtgttgaatgttgcacttgctgaatgcatgcagttcccgtgagcctgtggctgagctgaaactgacagcgctctgcagcccgatccatcttccag

SEQ ID NO: 6631 - DNA, 309 bp, Homo sapiens
aaaacaacttttaacagatataagatcagtatcattcacattcacacaaacatacacacactttagaaagactgtgtgcttggcttcggcatatttaatatcattaaagaatatatagaatcatccttttatcataaggaatttacatcattgttttctcaaaagctgctattttagattgaaacagcattcagaaaaaaagtacatttcagatggtcagcatcaggatttactacagactttgtaaacagatatctataaataaataaactagggtggagaaaagaatatcctgaggtggctctgtgg

SEQ ID NO: 6632 - DNA, 315 bp, Homo sapiens
ccttcctccgcttccgctgcacctcttccttgtctgggggcagaggaaaatgagattgagcccagttattgtgtcatgcctcaggggcccttcccagaagagccctcagggccggctcctaggaagcacctcctgggaccctcgcacttctgacttggctcatgcatccccacatctagctcttgggaccttcttctagcccagcctggccccccgccagcaccctgaggtcctcagcccagctccaccttccaccagagggtaataggtgaactgtttggaatcagacacgtcccctcctcgcttgcgtttcag

SEQ ID NO: 6633 - DNA, 306 bp, Homo sapiens; identical to SEQ ID NO: 264

SEQ ID NO: 6634 - DNA, 129 bp, Homo sapiens
  unsure (121): n=A,T,C or G
  unsure (125): n=A,T,C or G
  unsure (129): n=A,T,C or G
gtaggaagtgaagagaaccagggcatctggtcaggaggatattgtaatgattcagataagagatggtggcagtggaggtggtaaaaagtgggtagatactagatgtctttttttttttttnaaanaaan

SEQ ID NO: 6635 - DNA, 341 bp, Homo sapiens
atctcaaacaaacaaacaaacaaagaaaaaaaactcttgtctccttaggatatgttacctgctccactgcagactagagaaataaatgtgtattgaaccttttactgcaaacttgaaaatgctagaaaaccaagcatgaagaataaatacatggtgggaaacacacaggcatgtgcatatgcatatacattgtaagttagtaagttagaaagctagctttgttgtatctgaacacatgaatcttttttggtcagtgtaggaagcacagccagatcctataggaatgaatacctcaaatctgttgtctgagattctagagattaaaccactgtgccattttt

SEQ ID NO: 6636 - DNA, 367 bp, Homo sapiens
  unsure (345): n=A,T,C or G
  unsure (361): n=A,T,C or G
aaaaaacttttccaatagaaaatgaaatattattgaaaataatatctattttttagctttcagcaattgatggtgctttgttgtggtgtctgctggaagtctactgccattatagggaaccttgcttgttagcttctctagatctctattctaaacaatctgttagtgatgataaattctgtaggagggtctattctgagccgttaacttcctgtaaggggaaaatgggtgggttaccagaaataccattgaagcagggtgggctgtggggtggaaggttggggtatttgtcttgagaattaaaaactacgaaacacttttgtacacaactgattttttacctgnccgggcggccgctaangcgaat

SEQ ID NO: 6637 - DNA, 262 bp, Homo sapiens; identical to SEQ ID NO: 6571

SEQ ID NO: 6638 - DNA, 155 bp, Homo sapiens
ccatggagacagtggcccagcagaaaagagactactaccagcccctcgccgccaaacggactgagattgagaagtggcggaaggagttcaaggagcagtggatgaaggagcagaagcggatgaatgaggcggtgcaggcactgcggcgcgcccag

SEQ ID NO: 6639 - DNA, 171 bp, Homo sapiens
ctggtgcttgtctggctgggtgaagtgctaggtgtcattggggactgtccagagctagttcagcgctccttcctggtggctagtgttctgcctggccccgatggcaacattaactcacctacaagaaatgctgacatgcaggaggagctaattgcctccctagaggagcaa

SEQ ID NO: 6640 - DNA, 274 bp, Homo sapiens
ccaggcatggaaccagcaaggatttaatcagacacagtcttctgcaccatggatgggaccaaattatggagtgcaaccgcctcaagggcaaaatggcagcatgttgcccaatcagccttctgggtatcgagtggcagggtatgaaacccagtgaataaggactccagaatctaaagccagtggcttgaggctacagggagtgtagtaaagccgttgtttacctaaagatttatcaaatcagtcagtgcaaatgtcagatacaatgtatttattt

SEQ ID NO: 6641 - DNA, 397 bp, Homo sapiens
  unsure (382): n=A,T,C or G
ctgcatagtgcaaaggggtcctcccacacttgtcctttttatggaaatctgctccgctgctctgcaagagttttatacattccacattacctcctgcagcagcagcatgaaggcacgttcttccaaatttatctggggtgtctatttcaaagcccgatgataacaactttctgcagcagtcagagtgagcatttagggcagctaaatgtaaagggaacatgctatggattccacacttggctgtgtcagctccgctggttattaaggtgttaatcaaaagctcatgaccgtatcttgcagccacatggagaggagtgttgccgtccttatccacacagtcaatttcacctccattctgaatgagggtctgtgaccgtgtggnaccttccatggacag

SEQ ID NO: 6642 - DNA, 270 bp, Homo sapiens; identical to SEQ ID NO: 2914

SEQ ID NO: 6643 - DNA, 195 bp, Homo sapiens
cctgctctctttttctccagggtcagaaacaggaccgggtggaagggatggggtgccagtttgaatgcagtctgtccaggctcgtcattggaggtgaacaagcaaacccagagggctccactaggacttcaaattgggggttggatttgaagacttttaagtttccttccagcccagaaagtctctcattctagg

SEQ ID NO: 6644 - DNA, 244 bp, Homo sapiens
  unsure (1): n=A,T,C or G
  unsure (8): n=A,T,C or G
  unsure (15): n=A,T,C or G
ngtctggncctgcanacaggtgctcttgtcctgagtgacaacggcatctgctgtatcgatgagttcgacaagatgaatgaaagtacaagatcggtattgcatgaagtcatggaacagcagactctgtccattgcaaaggctggggtcatctgtcagctcaatgcgcgcacctctgtcctggcagcagcaaatcccattgagtctcagtggaatcctaaaaaaaacaaccattgaaaacatccag

SEQ ID NO: 6645 - DNA, 343 bp, Homo sapiens
cctgaaggacccagggccctctggctggatgcgtttgcctatcaggacccagaattacttacagacctgtttagggctaggcttggcctctttcttgagctcatctggaggggtgtgacaacactcattcttcatccttattctccctggctgtgggcaacacttgtcctcagtgtcaccagatggtcctcctctgtgcccatgacccctcagcagccaaggctggccctgccagataaatgtgtgtgcccatgatcacacccaggggcacaggccacatacgtttccctgaaaccttgggctccagccttcatcccgtccatgtgggaaggaacttgggtcc

SEQ ID NO: 6646 - DNA, 306 bp, Homo sapiens
  unsure (197): n=A,T,C or G
  unsure (243): n=A,T,C or G
  unsure (263): n=A,T,C or G
  unsure (291): n=A,T,C or G
ctggtgtgggtgagtgtcctcggggctggtgaggggacagcagcttcagtggaaacccttccctatgtgtggccgagggcctagaacacgtctgagcgggtcaggtgggttcttcccactggagggcgtggcctcaggctgagagtgaagacggggaaggggaggaagagaacagctcgggctcctgagaccagganccagacctggtaagtacatgaccttaggggctgggcctttgcctgnaatcccaacgctttggaggnccatgcaggaggatcggatcacttgaanccatgagttaaaacc

SEQ ID NO: 6647 - DNA, 471 bp, Homo sapiens
  unsure (404): n=A,T,C or G
aaatgttttacttctttgataaagcagagtacaatagaaaaaaaacaattagtttccagtaatatctatatctctaatcagaattaagtcttccaagacatattacctggaaataaaagcctgttacaataagcaaagcttcaaccagagcggctacttttcgtgccaggaaaaagttcatccctataggaggaatgatgtgctatgtaaaatggctgtaaggtcacagccttgagggcattggaagtatattatcctattccacattaagtatttcagcgaatttcaaacatcagtttatctgcaaccatgctggcaacctttaactgatatttcaatcaaccggtaaaaaataaattaagaaatcccttcacggatattcccgggatttacactgttaaaangtacactgttcattaacatgtaattctggttcagaattacctttgagactccttgctcaaaaattgg

SEQ ID NO: 6648 - DNA, 467 bp, Homo sapiens
aggtccttatgacagacctggggctggtagagggtataacagcattggcagaggagctggctttgagaggatgaggcgtggtgcttatggtggaggctatggaggctatgatgattacaatggctataatgatggctatggatttgggtcagatagatttggaagagacctcaattactgtttttcaggaatgtctgatcacagatacggggatggtggctctactttccagagcacaacaggacactgtgtacacatgcggggattaccttacagagctactgagaatgacatttataattttttttcaccgctcaaccctgtgagagtacacattgaaattggtcctgatggcagagtaactggtgaagcagatgtcgagttcgcaactcatgaagatgctgtggcagctatgtcaaaagacaaagcaaatatgcaacacagatatgtagaactcttcttgaatt

SEQ ID NO: 6649 - DNA, 338 bp, Homo sapiens
  unsure (196): n=A,T,C or G
  unsure (291): n=A,T,C or G
  unsure (312): n=A,T,C or G
aaaaagcatatgccaccttttttattaattattatataaaatgaagcatttaattatagtaataatttgaagtagtttgaagtaccacactgaggtgaggacttaaaaatgataagacgagttccctattttataagaaaaataagccaaaattaaatattcttttggatataaatttcaacagtgagatagctgnctagtggaaatgaataatatcccagccactagtgtacagggtgttttgtggcacaggattatgtaatatggaactgctcaagcaaataactagtnatgacaacagcagttctttgnaataactgaaaaagaatattgtttct

SEQ ID NO: 6650 - DNA, 366 bp, Homo sapiens
ctggaagaagaaaagaaagcaaacaatgagaaacagaaagctgaaagggagctagagggtcaaatccagagattgaacacagagaaaaagaaactaaatacggacctgtatcacatgaaacattctctcagatactttgaagaagagtccaaggatctggccggccgcctgcaacgttcatcgcagcgtataggagagttagagtggtctctctgtgctgtcgccgccacacagaagaagaagccggatgggttctcgagccgcagtaaagcacttctcaagcggcagttagagcagtccatacgggagcagatactgctgaaaggacacgtgacacagttgaaggagtcgcttaaagaagtccag

SEQ ID NO: 6651 - DNA, 287 bp, Homo sapiens
ccaagggtcgctcactgggcaggaacattgtcaaggccattcatgcttggaatagggtctctcttcagctctgaggcaaatctgttctctaattttcagatgacttcaaggggaacgtgtaccaccacccctctggtgcgtcacattgcttaggaagcctgctgtgtttatcactgggtggctgtcagggctgagatggagagggccagggcctggcgaggtggagcagtcggcccaggtgtcccagcaattgttgctggaacagggtctggaacccacaggagagg

SEQ ID NO: 6652 - DNA, 138 bp, Homo sapiens
ccatgttgaaggcaaggaagaaaaaatggaaatggcctgtgccagctatatatatcgccttttatgagggaaagcaaagctttctcagaaatcccaaatggattttcccttgacttaattgcctgaccagttaaatgg

SEQ ID NO: 6653 - DNA, 248 bp, Homo sapiens
  unsure (122): n=A,T,C or G
  unsure (137): n=A,T,C or G
  unsure (147): n=A,T,C or G
  unsure (201): n=A,T,C or G
  unsure (214): n=A,T,C or G
  unsure (245): n=A,T,C or G
ctgctttgaaggctgcacagaaaaccttacttgtttccacctctgcagttgataataatgaagcacagaaaaaaaaacaggaggcattgaaacttcagcaggatgtaaggaaaaggaaacangaaattttataaaancacattgaancacagaagatgttaatttcaaaactggagaaaaacaaaacaatgaagtctgaanataaagcagaaanaatgaaaactttagaggttttgacaaaaaanatt

SEQ ID NO: 6654 - DNA, 305 bp, Homo sapiens
ctgagttcccttcccgaaggtcagctcggggctcccgacgatcatgcagaagtagatgccactgtcttccggcttcacgcttgtgagattgagaatgaaccggcttgcatcccgaaacacagctatcttctcctgttccacctcttcaccgtggatagtcccttttgcggaatcccagagggccaggaactcgtggtgactgtcactgctcggtgcctggcgctgtctcagccagtagatgcgcatgttactgagggagattttagcctcgcaggacagcatcaccatcttgttggtttgccctt

SEQ ID NO: 6655 - DNA, 236 bp, Homo sapiens
  unsure (231): n=A,T,C or G
  unsure (232): n=A,T,C or G
aaaaaagactatgtagaaaagaggtctataaaattgtgcaaaatacccagcattaataaacccgtttcaagtattgccagcatgagcataacccacccatgccgggacctggcttgggagagaagtggaggggcaggctgggatcccttaaagagctctccatgggcaggggaaggaccaggctcccacttccactgtgctgcccaggaactgcacaggagctgaggctgnngggt

SEQ ID NO: 6656 - DNA, 357 bp, Homo sapiens
aaaacaggtacaaaatattgaaatgaccaacgttacatgatttcaagggttgtcctttctgtgcttttatctgtcacgacaggaaggtgtggaaagtttatatccttaatttgactactcttggatattaaaatctttctattaattaaaaagacttttagacaacctcttaaatggaattacactatggaaaacagggctcccccaaaaacacctaggcagaactgagagttctttgaaaaccattcccaataaaaactaaatgaaaaataaatataaaacaaagcttaaaaaaatatgcattacctgacaccaaccttttctggctgacaatatttattcatgaaaacatatcag

SEQ ID NO: 6657 - DNA, 343 bp, Homo sapiens; identical to SEQ ID NO: 6492

SEQ ID NO: 6658 - DNA, 298 bp, Homo sapiens
ctggtggctggtgacatcgtcctggacaagctaggggaaaggctagccatcctcctcaaggtgcgagacatggtcagcagccatgtggagcgagtgtttcagatctatgagcaacacgcagacacagttggcattgatgctgtcctgcagccttcagcagtgagcccctctgtggctgacatgttggaatggttgcaggatattgagagacattatcgaaagtcgtacctgaagagaaagtatcttctttcgtctatccagtggggagactaggcaaacatacaagctttgcccaagg

SEQ ID NO: 6659 - DNA, 453 bp, Homo sapiens
ctggtcaggtactggatctccgccttcccagcggagtttgacttgaacccggagttggctgagcagatcaaggagctgaaggctctgctagaccaagaagggaaccgacggcacagcagcctaatcgacatagacagcgtccctacctacaagtggaagcggcaggtgactcagcggaaccctgtgggacagaaaaagcgcaagatgtccctgttgtttgaccacctggagcccatggagctggcggagcatctcacctacttggagtatcgctccttctgcaagatcctgtttcaggactatcacagtttcgtgactcatggctgcactgtggacaaccccgtcctggagcggttcatctccctcttcaacagcgtctcacagtgggtgcagctcatgatcctcagcaaacccacagccccgcagcgggccctggtcatcacacactttgtc

SEQ ID NO: 6660 - DNA, 359 bp, Homo sapiens
  unsure (142): n=A,T,C or G
  unsure (270): n=A,T,C or G
  unsure (273): n=A,T,C or G
gtctacctgcagcacagcacactccctttgggcaaggacctgagacccttgtgctaagtcaagaggctcaatgggctgcagaagaactagagaaggaccaagcaaagccatgatatttccatggaaatgtcagagcacccanagggacttatggaacatcttcaagttgtgggggtggacaatgctctgttgtgatttcctggcacatcatggaaccgactgctggacttaccattattctgaaaaacccatgaactggcaaagggctanaanattctgccgagacaattacacagatttagttgccatacaaaacaaggcggaaattgagtatctgcagaaaactctgcctttcagcc

SEQ ID NO: 6661 - DNA, 368 bp, Homo sapiens
  unsure (135): n=A,T,C or G
  unsure (186): n=A,T,C or G
  unsure (255): n=A,T,C or G
  unsure (273): n=A,T,C or G
  unsure (274): n=A,T,C or G
  unsure (303): n=A,T,C or G
  unsure (305): n=A,T,C or G
  unsure (353): n=A,T,C or G
  unsure (356): n=A,T,C or G
cctcgggtgatctgcccacctcagcctcccaaagtgctgggactacaggcataagccactgcgcccggcctggtccaggttttctaagatgcaggctgcagattctgtgttctccagtggacacttgcagagganccaggaaggaccacaggtcccttttggaaggaacgttgggcctgtccccangaatgcacactagtatcctttctagtggagtgtctgaggctcacagcctcttgcttaccccaggctcanatcactgagccttagcannggtctctatcctgtttcaaggatgccaananccacaagacaaatggacgtttcagaaggaactctgacggccgagtgancancctgtcctgagg

SEQ ID NO: 6662 - DNA, 147 bp, Homo sapiens
  unsure (140): n=A,T,C or G
cctccaaaagcgagcctctaggtgcacatgtaactatgtgtcttctctgtgcatgcacatgttcaggtctgggcccacccatgagaaacaggagcacccgcagcagaccattttaggaatgtgagctctggggcccatcntgtgttc

SEQ ID NO: 6663 - DNA, 347 bp, Homo sapiens
  unsure (342): n=A,T,C or G
ccaagaacaaggcgtgtgccacagtcacgtagtgacacaggtcacatttgctttctgccagcagaagagactggactccagtgcaggggagtgtgcaaggacaggttctggggggtggaggcatctgtggacatcccagggcaggggtgagggccagaacatccctaggtcctgagactacagtttctccacatttagatcagacattctcttccaaggaaggaaaccaagagaggctggtgaaccgtctggtaatgacaagccctcacttttgcagccctcttggctggtccctcagcaggtcttccctatgaacctgcaaaggagacaggcaggaatganttcca

SEQ ID NO: 6664 - DNA, 168 bp, Homo sapiens
  unsure (132): n=A,T,C or G
  unsure (152): n=A,T,C or G
cctatggaagaagaacacaaaggaactatatctgtagtagaagcccatcctaactactaagaaagccacacgataccctttagatttcacattagaattcctaaactgttagcctaacacctggccctcatnctgaccaacaggaagagganttctgaaccacccatc

SEQ ID NO: 6665 - DNA, 368 bp, Homo sapiens
  unsure (81): n=A,T,C or G
  unsure (88): n=A,T,C or G
  unsure (94): n=A,T,C or G
  unsure (109): n=A,T,C or G
  unsure (122): n=A,T,C or G
  unsure (136): n=A,T,C or G
  unsure (142): n=A,T,C or G
  unsure (145): n=A,T,C or G
  unsure (167): n=A,T,C or G
  unsure (186): n=A,T,C or G
  unsure (225): n=A,T,C or G
  unsure (226): n=A,T,C or G
  unsure (279): n=A,T,C or G
  unsure (304): n=A,T,C or G
  unsure (328): n=A,T,C or G
  unsure (332): n=A,T,C or G
  unsure (337): n=A,T,C or G
agggcgaattgggccctctagatgcatgctcgagcggccgccagtgtgatggatatctgcagaattcgcccttagagcggncgcccgngcaggnccatactaaccctgntaaaatgcccatnttacctggatggcnacccancantgctcctgcccacctgcccctnaatcctcctagaattcagnccccaattgcccagttaccaataaaaacttgtacaccanncccagggacagtctcaaatgcaaatccacagagtggaccaccacctcgggtanaatttgatgacaacaatccctttantgaaagttttcaagaacgggaacntaangaacntttacgagaacagcaagagagacaacggatc

SEQ ID NO: 6666 - DNA, 396 bp, Homo sapiens
ccacataccaagatgtgaacatattcttgtcttatataagaaaaggctcaggttgtatgccacaaactttgaattaaattccagggaaatattgctttggtaacatgaacaatttgtaccacattccattaaaaaaagatttaataaaatccctcaaacagcacttttctacttgtttcggagtacacaattcccaaattagcacaaacaaaacaaagcaaaaaaagaaaaacagacagaatgtaaaatgaaggttgctacttttatgatatcacttccctttcccttccttagctagtgttcttttcctttcccttaatagtaaaggatggtgaatagaaaatgacctattcttatccccatccatttgcttctaggattcctgcttaaaccaaa

SEQ ID NO: 6667 - DNA, 234 bp, Homo sapiens
aaaaagtcttcaggcagagtaatcatgttagaggtggtattcgatggaagaaagtttagagagttaggagtgggggtagaattctagaatttataagagtccaggaagcatagcagtcaggggcaaaaattagcgtaatatggagtaggcaatagaggagctactggagtcagaagtcactgcagagtgcaacataggaagatggactcctagcttacatgagattccctgcag

(The sequence listing continues in the following parts.)
